United States Patent Application Publication US 2026/0226133 A1 - sequence listing, part 7

SEQ ID NO: 10418 - protein, 473 aa, synthetic construct
MALPVTALLLPLALLLHAARPDIQMTQSPSSLSASVGDRVTITCSATSSISYMHWYQQKPGKAPKGWIYDTSKLAHGVPSRFSGSGSGTDFTLTISSLQPEDFATYYCHQRRSYPFTFGQGTKVEIKGGGGSGGGGSGGGGSEVQLVQSGAEVKKPGASVKVSCKASGYTFTNFWIHWVRQAPGQGLEWIGEIDPSDSYTNYNQKFKGRVTITRDTSTSTAYLELSSLRSEDTAVYYCAREITTVDYWGQGTLVTVSSTRGMRTEDLPKAVVFLEPQWYRVLEKDSVTLKCQGAYSPEDNSTQWFHNESLISSQASSYFIDAATVDDSGEYRCQTNLSTLSDPVQLEVHIGWLLLQAPRWVFKEEDPIHLRCHSWKNTALHKVTYLQNGKGRKYFHHNSDFYIPKATLKDSGSYFCRGLVGSKNVSSETVNITITQGLAVPTISSFFPPGYQVSFCLVMVLLFAVDTGLYFYV

SEQ ID NO: 10419 - protein, 480 aa, synthetic construct
MALPVTALLLPLALLLHAARPDIQMTQSPSSLSASVGDRVTITCKASQGFNKYVAWYQQKPGKAPKLLIYYTSTLQPGVPSRFSGSGSGRDYTLTISSLQPEDFATYYCLQYGNLLYAFGQGTKVEIKRGGGGSGGGGSGGGGSEVQLVQSGAEVKKPGASVKVSCKASGYTFTSYWIGWVRQAPGQGLEWIGDIYPGGGYTNYNEKFKGRVTITRDTSTSTAYLELSSLRSEDTAVYYCARLDGSSYRGAMDSWGQGTLVTVSSTRGMRTEDLPKAVVFLEPQWYRVLEKDSVTLKCQGAYSPEDNSTQWFHNESLISSQASSYFIDAATVDDSGEYRCQTNLSTLSDPVQLEVHIGWLLLQAPRWVFKEEDPIHLRCHSWKNTALHKVTYLQNGKGRKYFHHNSDFYIPKATLKDSGSYFCRGLVGSKNVSSETVNITITQGLAVPTISSFFPPGYQVSFCLVMVLLFAVDTGLYFYV

SEQ ID NO: 10420 - protein, 476 aa, synthetic construct
MALPVTALLLPLALLLHAARPDIQMTQSPSSLSASVGDRVTITCRASQDIRYYLNWYQQKPGKAPKLLIYVASSLQSGVPSRFSGSGSGTEFTLTVSSLQPEDFATYYCLQVYSTPRTFGQGTKVEIKGGGGSGGGGSGGGGSEVQLVESGGGLAKPGGSLRLSCAASGFRFTFNNYYMDWVRQAPGQGLEWVSRISSSGDPTWYADSVKGRFTISRENAKNTLFLQMNSLRAEDTAVYYCASLTTGSDSWGQGVLVTVSSTRGMRTEDLPKAVVFLEPQWYRVLEKDSVTLKCQGAYSPEDNSTQWFHNESLISSQASSYFIDAATVDDSGEYRCQTNLSTLSDPVQLEVHIGWLLLQAPRWVFKEEDPIHLRCHSWKNTALHKVTYLQNGKGRKYFHHNSDFYIPKATLKDSGSYFCRGLVGSKNVSSETVNITITQGLAVPTISSFFPPGYQVSFCLVMVLLFAVDTGLYFYV

SEQ ID NO: 10421 - protein, 477 aa, synthetic construct
MALPVTALLLPLALLLHAARPEIVMTQSPATLSVSPGERATLSCRASQSVSRNLAWYQQKPGQAPRLLIYGASTRATGIPARFSGSGSGTEFTLTIGSLQSEDFAVYYCQQYKTWPRTFGQGTNVEIKGGGGSGGGGSGGGGSQVQLQQWGAGLLKPSETLSLTCAVFGGSFSGYYWSWIRQPPGKGLEWIGEINHRGNTNDNPSLKSRVTISVDTSKNQFALKLSSVTAADTAVYYCARERGYTYGNFDHWGQGTLVTVSSTRGMRTEDLPKAVVFLEPQWYRVLEKDSVTLKCQGAYSPEDNSTQWFHNESLISSQASSYFIDAATVDDSGEYRCQTNLSTLSDPVQLEVHIGWLLLQAPRWVFKEEDPIHLRCHSWKNTALHKVTYLQNGKGRKYFHHNSDFYIPKATLKDSGSYFCRGLVGSKNVSSETVNITITQGLAVPTISSFFPPGYQVSFCLVMVLLFAVDTGLYFYV

SEQ ID NO: 10422 - protein, 483 aa, synthetic construct
MALPVTALLLPLALLLHAARPDIQMTQSPSSLSASVGDRVTITCKASKNIRSYLAWYQQKPGKAPKLLIYSGSTLHSGVPSRFSGSGSGTDFTLTISSLQPEDFATYYCQQHHEYPLTFGQGTKVEIKRGGGGSGGGGSGGGGSQVQLQESGPGLVKPSETLSLTCTVSGYTITSGYDWSWIRQPPGKGLEWIGYINYGGSTNYKPSLGSRVTISVDTSKNQFSLKLSSVTAADTAVYYCARYNEYKSYIYDWYFDFWGQGTLVTVSSTRGMRTEDLPKAVVFLEPQWYRVLEKDSVTLKCQGAYSPEDNSTQWFHNESLISSQASSYFIDAATVDDSGEYRCQTNLSTLSDPVQLEVHIGWLLLQAPRWVFKEEDPIHLRCHSWKNTALHKVTYLQNGKGRKYFHHNSDFYIPKATLKDSGSYFCRGLVGSKNVSSETVNITITQGLAVPTISSFFPPGYQVSFCLVMVLLFAVDTGLYFYV

SEQ ID NO: 10423 - protein, 485 aa, synthetic construct
MALPVTALLLPLALLLHAARPQSVVTQPPSVSAAPGQKVTISCSGSSSNIGNNYVSWYQQLPGTAPKLLIYDNNKRPSGIPDRFSGSKSGTSATLGITGLQTGDEADYYCGTWDGSLYTMLFGGGTKLTVLGGGGSGGGGSGGGGSEVQLVESGGGLVKPGGSLRLSCAASGFTFSNAWMSWVRQAPGKGLEWVGFIRSKAYGGTTEYAASVKGRFTISRDDSKSIAYLQMNNLKTEDTAVYYCARDGLYSSSWYDSDYWGQGTLVTVSSTRGMRTEDLPKAVVFLEPQWYRVLEKDSVTLKCQGAYSPEDNSTQWFHNESLISSQASSYFIDAATVDDSGEYRCQTNLSTLSDPVQLEVHIGWLLLQAPRWVFKEEDPIHLRCHSWKNTALHKVTYLQNGKGRKYFHHNSDFYIPKATLKDSGSYFCRGLVGSKNVSSETVNITITQGLAVPTISSFFPPGYQVSFCLVMVLLFAVDTGLYFYV

SEQ ID NO: 10424 - protein, 490 aa, synthetic construct
MALPVTALLLPLALLLHAARPQSVLTQPPSVSGAPGQRVTISCTGSSSNIGAGYDVHWYQQLPGTAPKLLIFGNSNRPSGVPDRFSGFKSGTSASLAITGLQAEDEADYFCQSYDSSLSGSGVFGTGTKVTVLGGGGGSGGGGSGGGGSQMQLVQSGGGLVQPGRSLRLSCAASGFTFDDYAMHWVRQAPGKGLEWVSGISWNSGSIGYADSVKGRFTISRDNAKNSLYLQMNSLRAEDTALYYCAKDIHSGSYYGLLYYAMDVWGQGTTVTVSSTRGMRTEDLPKAVVFLEPQWYRVLEKDSVTLKCQGAYSPEDNSTQWFHNESLISSQASSYFIDAATVDDSGEYRCQTNLSTLSDPVQLEVHIGWLLLQAPRWVFKEEDPIHLRCHSWKNTALHKVTYLQNGKGRKYFHHNSDFYIPKATLKDSGSYFCRGLVGSKNVSSETVNITITQGLAVPTISSFFPPGYQVSFCLVMVLLFAVDTGLYFYV

SEQ ID NO: 10425 - protein, 490 aa, synthetic construct
MALPVTALLLPLALLLHAARPLPVLTQPPSASGTPGQRVTISCSGRSSNIGSNSVNWYRQLPGAAPKLLIYSNNQRPPGVPVRFSGSKSGTSASLAISGLQSEDEATYYCATWDDNLNVHYVFGTGTKVTVLGSRGGGGSGGGGSGGGGSLEMAQVQLVQSGAEVKKPGSSVKVSCKASGGTFSSYAISWVRQAPGQGLEWMGRIIPILGIANYAQKFQGRVTITADKSTSTAYMELSSLRSEDTAVYYCARGGYYSHDMWSEDWGQGTLVTVSSTRGMRTEDLPKAVVFLEPQWYRVLEKDSVTLKCQGAYSPEDNSTQWFHNESLISSQASSYFIDAATVDDSGEYRCQTNLSTLSDPVQLEVHIGWLLLQAPRWVFKEEDPIHLRCHSWKNTALHKVTYLQNGKGRKYFHHNSDFYIPKATLKDSGSYFCRGLVGSKNVSSETVNITITQGLAVPTISSFFPPGYQVSFCLVMVLLFAVDTGLYFYV

SEQ ID NO: 10426 - protein, 479 aa, synthetic construct
MALPVTALLLPLALLLHAARPDIVLTQSPASLAVSLGERATINCRASESVSVIGAHLIHWYQQKPGQPPKLLIYLASNLETGVPARFSGSGSGTDFTLTISSLQAEDAAIYYCLQSRIFPRTFGQGTKLEIKGGGGSGGGGSGGGGSQVQLVQSGSELKKPGESVKISCKASGYTFTDYSINWVKQAPGQGLKWMGWINTETREPAYAYDFRGRFVFSLDTSASTAYLQISSLKAEDTAVYFCALDYSYAMDYWGQGTLVTVSSTRGMRTEDLPKAVVFLEPQWYRVLEKDSVTLKCQGAYSPEDNSTQWFHNESLISSQASSYFIDAATVDDSGEYRCQTNLSTLSDPVQLEVHIGWLLLQAPRWVFKEEDPIHLRCHSWKNTALHKVTYLQNGKGRKYFHHNSDFYIPKATLKDSGSYFCRGLVGSKNVSSETVNITITQGLAVPTISSFFPPGYQVSFCLVMVLLFAVDTGLYFYV

SEQ ID NO: 10427 - protein, 480 aa, synthetic construct
MALPVTALLLPLALLLHAARPDIVLTQSPATLSLSPGDRATLSCRASESVTILGSHLIYWYQQKPGQAPRLLIQLASNVQTGIPARFSGSGSRTDFTLTISSLEPEDFAVYYCLQSRTIPRTFGQGTKLEIKRGGGGSGGGGSGGGGSQVQLVQSGSELKKPGESVKISCKASGYTFTHYSMNWVRQAPGQGLEWMGRINTETGEPLYADDFKGRFVFSLDTSASTAYLQISSLKAEDTAVYYCSNDYLYSLDYWGQGTLVTVSSTRGMRTEDLPKAVVFLEPQWYRVLEKDSVTLKCQGAYSPEDNSTQWFHNESLISSQASSYFIDAATVDDSGEYRCQTNLSTLSDPVQLEVHIGWLLLQAPRWVFKEEDPIHLRCHSWKNTALHKVTYLQNGKGRKYFHHNSDFYIPKATLKDSGSYFCRGLVGSKNVSSETVNITITQGLAVPTISSFFPPGYQVSFCLVMVLLFAVDTGLYFYV

SEQ ID NO: 10428 - protein, 484 aa, synthetic construct
MALPVTALLLPLALLLHAARPDFVMTQSPDSLAVSLGERVTMSCKSSQSLLNSGNQKNYLTWYQQKPGQPPKLLIYWASTRESGVPDRFSGSGSGTDFTLTISSLQAEDVAVYYCQNDYSYPYTFGQGTKLEIKGGGGSGGGGSGGGGSEVQLVQSGAELKKPGASVKVSCKASGYTFTDYYMKWVRQAPGQGLEWIGDIIPSNGATFYNQKFKGRVTITVDKSTSTAYMELSSLRSEDTAVYYCARSHLLRASWFAYWGQGTLVTVSSTRGMRTEDLPKAVVFLEPQWYRVLEKDSVTLKCQGAYSPEDNSTQWFHNESLISSQASSYFIDAATVDDSGEYRCQTNLSTLSDPVQLEVHIGWLLLQAPRWVFKEEDPIHLRCHSWKNTALHKVTYLQNGKGRKYFHHNSDFYIPKATLKDSGSYFCRGLVGSKNVSSETVNITITQGLAVPTISSFFPPGYQVSFCLVMVLLFAVDTGLYFYV

SEQ ID NO: 10429 - protein, 484 aa, synthetic construct
MALPVTALLLPLALLLHAARPDFVMTQSPDSLAVSLGERVTMSCKSSQSLLNSGNQKNYLTWYQQKPGQPPKLLIYWASTRESGVPDRFSGSGSGTDFTLTISSLQAEDVAVYYCQNDYSYPYTFGQGTKLEIKGGGGSGGGGSGGGGSQVQLVQSGAELKKPGASVKVSCKASGYTFTDYYMKWVRQAPGQGLEWIGDIIPSNGATFYNQKFKGRVTITVDKSTSTAYMELSSLRSEDTAVYYCARSHLLRASWFAYWGQGTLVTVSSTRGMRTEDLPKAVVFLEPQWYRVLEKDSVTLKCQGAYSPEDNSTQWFHNESLISSQASSYFIDAATVDDSGEYRCQTNLSTLSDPVQLEVHIGWLLLQAPRWVFKEEDPIHLRCHSWKNTALHKVTYLQNGKGRKYFHHNSDFYIPKATLKDSGSYFCRGLVGSKNVSSETVNITITQGLAVPTISSFFPPGYQVSFCLVMVLLFAVDTGLYFYV

SEQ ID NO: 10430 - protein, 474 aa, synthetic construct
MALPVTALLLPLALLLHAARPDVQITQSPSYLAASPGETITINCRASKSISKDLAWYQEKPGKTNKLLIYSGSTLQSGIPSRFSGSGSGTDFTLTISSLEPEDFAMYYCQQHNKYPYTFGGGTKLEIKRGGGGSGGGGSGGGGSQVQLQQPGAELVRPGASVKLSCKASGYTFTSYWMNWVKQRPDQGLEWIGRIDPYDSETHYNQKFKDKAILTVDKSSSTAYMQLSSLTSEDSAVYYCARGNWDDYWGQGTTLTVSSTRGMRTEDLPKAVVFLEPQWYRVLEKDSVTLKCQGAYSPEDNSTQWFHNESLISSQASSYFIDAATVDDSGEYRCQTNLSTLSDPVQLEVHIGWLLLQAPRWVFKEEDPIHLRCHSWKNTALHKVTYLQNGKGRKYFHHNSDFYIPKATLKDSGSYFCRGLVGSKNVSSETVNITITQGLAVPTISSFFPPGYQVSFCLVMVLLFAVDTGLYFYV

SEQ ID NO: 10431 - protein, 476 aa, synthetic construct
MALPVTALLLPLALLLHAARPEIVLTQSPTSMTASPGEQVTITCRASSSINYMHWYQQKPGASPRPWIYETSKLASGVPDRFSGSASGTSYSLTINNMEAEDAATYYCQQWNYPSWTFGGGTKLELKGGGGSGGGGSGGGGSEVQLVESGGGLVQPGRSLKLSCAASGFTFSDYNMAWVRQAPKKGLEWVATILYDGGRTYYRGSVKGRFTISRDNAKSTLYLRMDSLRSEDTATYYCATHSRGTDYFDYWGQGVMVTVSSTRGMRTEDLPKAVVFLEPQWYRVLEKDSVTLKCQGAYSPEDNSTQWFHNESLISSQASSYFIDAATVDDSGEYRCQTNLSTLSDPVQLEVHIGWLLLQAPRWVFKEEDPIHLRCHSWKNTALHKVTYLQNGKGRKYFHHNSDFYIPKATLKDSGSYFCRGLVGSKNVSSETVNITITQGLAVPTISSFFPPGYQVSFCLVMVLLFAVDTGLYFYV

SEQ ID NO: 10432 - protein, 485 aa, synthetic construct
MALPVTALLLPLALLLHAARPDIVMTQSPSSLAVSEGETVTINCKSSQSFLSSGDGKNYVAWYQYKPGQSPKLLIYWASTRQSGVPDRFIGSGSGTDFTLTISTVQAEDLAIYYCQQYYDTPLTFGSGTKLEIKGGGGSGGGGSGGGGSEVKLQESGPSLVQSSQTLSLTCTVSGFSLTSYHIHWVRQTPGKGLEWMGVMWSDGDTSYNSALKSRLSISRDTSQSQVFLKMNSLQTEDTATYYCARGYYSSYLYLWFAYWGQGTLVTVSSTRGMRTEDLPKAVVFLEPQWYRVLEKDSVTLKCQGAYSPEDNSTQWFHNESLISSQASSYFIDAATVDDSGEYRCQTNLSTLSDPVQLEVHIGWLLLQAPRWVFKEEDPIHLRCHSWKNTALHKVTYLQNGKGRKYFHHNSDFYIPKATLKDSGSYFCRGLVGSKNVSSETVNITITQGLAVPTISSFFPPGYQVSFCLVMVLLFAVDTGLYFYV

SEQ ID NO: 10433 - protein, 489 aa, synthetic construct
MALPVTALLLPLALLLHAARPDVLMTQTPVSLPVSLGGQVSISCRSSQSLVHSDGDTYLHWYLQKPGQSPQLLIYRVSNRFSGVPDRFSGSGSGTDFTLKISRVEPEDLGLYYCLQTTHFPPWTFGGGTKLEMKGGGGSGGGGSGGGGSQVQLQQSGPELRRPGSSVRLSCKASGYRIKDFLIHWIKNRPEHGLEWIGWIDPEDGETKYAQKFQTKATLTADTSSNTAYMQLSSLTSEDTATYFCARWGDVYYGLMRGHVMDAWGQGTSVTVSSTRGMRTEDLPKAVVFLEPQWYRVLEKDSVTLKCQGAYSPEDNSTQWFHNESLISSQASSYFIDAATVDDSGEYRCQTNLSTLSDPVQLEVHIGWLLLQAPRWVFKEEDPIHLRCHSWKNTALHKVTYLQNGKGRKYFHHNSDFYIPKATLKDSGSYFCRGLVGSKNVSSETVNITITQGLAVPTISSFFPPGYQVSFCLVMVLLFAVDTGLYFYV

SEQ ID NO: 10434 - protein, 485 aa, synthetic construct
MALPVTALLLPLALLLHAARPDIVMTQAAPSIPVTPGESVSISCRSSKSLLNSNGNTYLYWFLQRPGQSPQLLIYRMSNLASGVPDRFSGSGSGTAFTLRISRVEAEDVGVYYCMQHLEYPFTFGAGTKLELKRGGGGSGGGGSGGGGSEVQLQQSGPELIKPGASVKMSCKASGYTFTSYVMHWVKQKPGQGLEWIGYINPYNDGTKYNEKFKGKATLTSDKSSSTAYMELSSLTSEDSAVYYCARGTYYYGSRVFDYWGQGTTLTVSSTRGMRTEDLPKAVVFLEPQWYRVLEKDSVTLKCQGAYSPEDNSTQWFHNESLISSQASSYFIDAATVDDSGEYRCQTNLSTLSDPVQLEVHIGWLLLQAPRWVFKEEDPIHLRCHSWKNTALHKVTYLQNGKGRKYFHHNSDFYIPKATLKDSGSYFCRGLVGSKNVSSETVNITITQGLAVPTISSFFPPGYQVSFCLVMVLLFAVDTGLYFYV

SEQ ID NO: 10435 - protein, 485 aa, synthetic construct; identical to SEQ ID NO: 10434

SEQ ID NO: 10436 - protein, 503 aa, synthetic construct
MALPVTALLLPLALLLHAARPINIYNAEPANPSEKNSPEFDIVMTQSPATLSLSPGERATLSCRSSKSLQNVNGNTYLYWFQQKPGQSPQLLIYRMSNLNSGVPDRFSGSGSGTEFTLTISSLEPEDFAVYYCMQHLEYPITFGAGTKLEIKGGGGSGGGGSGGGGSEVQLVESGGGLVKPGGSLKLSCAASGYTFTSYVMHWVRQAPGKGLEWIGYINPYNDGTKYNEKFQGRVTISSDKSISTAYMELSSLRSEDTAMYYCARGTYYYGTRVFDYWGQGTLVTVSSTRGMRTEDLPKAVVFLEPQWYRVLEKDSVTLKCQGAYSPEDNSTQWFHNESLISSQASSYFIDAATVDDSGEYRCQTNLSTLSDPVQLEVHIGWLLLQAPRWVFKEEDPIHLRCHSWKNTALHKVTYLQNGKGRKYFHHNSDFYIPKATLKDSGSYFCRGLVGSKNVSSETVNITITQGLAVPTISSFFPPGYQVSFCLVMVLLFAVDTGLYFYV

SEQ ID NO: 10437 - protein, 480 aa, synthetic construct
MALPVTALLLPLALLLHAARPDIQMTQSPSSLSASVGDRVTITCKASDHINNWLAWYQQKPGQAPKLLIYGATTLETGVPSRFSGSGSGTDYTLTISSLQPEDFATYYCQQSWNTPWTFGQGTKLEIKRGGGGSGGGGSGGGGSQVQLQQPGAELVKPGASVKMSCKASGYAFSSYWINWMKQKPGQGLEWIGQIYPGDGDTNYNGKFKGRATLTADTSSSTAYMQLSSLTSEDSAVYFCARSITTVVGCAMDYWGQGTSVTVSSTRGMRTEDLPKAVVFLEPQWYRVLEKDSVTLKCQGAYSPEDNSTQWFHNESLISSQASSYFIDAATVDDSGEYRCQTNLSTLSDPVQLEVHIGWLLLQAPRWVFKEEDPIHLRCHSWKNTALHKVTYLQNGKGRKYFHHNSDFYIPKATLKDSGSYFCRGLVGSKNVSSETVNITITQGLAVPTISSFFPPGYQVSFCLVMVLLFAVDTGLYFYV

SEQ ID NO: 10438 - protein, 482 aa, synthetic construct
MALPVTALLLPLALLLHAARPQIVLSQSPAILSASPGEKVTMTCRASSSVSYMHWYQQKPGSSPKPWIYATSNLASGVPARFSGSGSGTSYSFTISRVEAEDAATYYCQQWTFNPPTFGGGTRLEIKRTVAAGGGGSGGGGSGGGGSQAYLQQSGAELVRPGASVKMSCKASGYTFTSYNMHWVKQTPRQGLEWIGGIYPGNGDTSYNQKFKGKATLTVGKSSSTAYMQLSSLTSEDSAVYFCARYDYNYAMDYWGQGTSVTVSSASTRGMRTEDLPKAVVFLEPQWYRVLEKDSVTLKCQGAYSPEDNSTQWFHNESLISSQASSYFIDAATVDDSGEYRCQTNLSTLSDPVQLEVHIGWLLLQAPRWVFKEEDPIHLRCHSWKNTALHKVTYLQNGKGRKYFHHNSDFYIPKATLKDSGSYFCRGLVGSKNVSSETVNITITQGLAVPTISSFFPPGYQVSFCLVMVLLFAVDTGLYFYV

SEQ ID NO: 10439 - protein, 481 aa, synthetic construct
MALPVTALLLPLALLLHAARPDEIVLTQSPATLSLSPGERATLSCRASQSVSSYLAWYQQKPGQAPRLLIYDASNRATGIPARFSGSGSGTDFTLTISSLEPEDFAVYYCQQRSNWPITFGQGTRLEIKGGGGSGGGGSGGGGSEVQLVESGGGLVQPDRSLRLSCAASGFTFHDYAMHWVRQAPGKGLEWVSTISWNSGTIGYADSVKGRFTISRDNAKNSLYLQMNSLRAEDTALYYCAKDIQYGNYYYGMDVWGQGTTVTVSSTRGMRTEDLPKAVVFLEPQWYRVLEKDSVTLKCQGAYSPEDNSTQWFHNESLISSQASSYFIDAATVDDSGEYRCQTNLSTLSDPVQLEVHIGWLLLQAPRWVFKEEDPIHLRCHSWKNTALHKVTYLQNGKGRKYFHHNSDFYIPKATLKDSGSYFCRGLVGSKNVSSETVNITITQGLAVPTISSFFPPGYQVSFCLVMVLLFAVDTGLYFYV

SEQ ID NO: 10440 - protein, 475 aa, synthetic construct
MALPVTALLLPLALLLHAARPDIQMTQSPSSLSASVGDRVTINCKASQDINSYLSWFQQKPGKAPKTLIYRANRLVDGVPSRFSGSGSGQDYTLTISSLQPEDFATYYCLQYDEFPLTFGGGTKVEIKGGGGSGGGGSGGGGSQVQLVQSGAEVKKPGASVKVSCKASGYTFTNYDINWVRQAPGQGLEWIGWIYPGDGSTKYNEKFKAKATLTADTSTSTAYMELRSLRSDDTAVYYCASGYEDAMDYWGQGTTVTVSSTRGMRTEDLPKAVVFLEPQWYRVLEKDSVTLKCQGAYSPEDNSTQWFHNESLISSQASSYFIDAATVDDSGEYRCQTNLSTLSDPVQLEVHIGWLLLQAPRWVFKEEDPIHLRCHSWKNTALHKVTYLQNGKGRKYFHHNSDFYIPKATLKDSGSYFCRGLVGSKNVSSETVNITITQGLAVPTISSFFPPGYQVSFCLVMVLLFAVDTGLYFYV

SEQ ID NO: 10441 - protein, 477 aa, synthetic construct
MALPVTALLLPLALLLHAARPDIVMTQTPLSLSVTPGQPASISCKSSQSLLDGDGKTYLNWLLQKPGQSPQRLIYLVSKLDSGVPDRFSGSGSGTDFTLKISRVEAEDVGVYYCWQGTHFPRTFGQGTKLEIKGGGGSGGGGSGGGGSQVQLVQSGAEVKKPGASVKVSCKASGYTFKDTYIHWVRQAPGQGLEWMGRIDPANGNTKYDPKFQGRVTMTRDTSISTAYMELSRLRSDDTAVYYCARRGGVDWGQGTLVTVSSTRGMRTEDLPKAVVFLEPQWYRVLEKDSVTLKCQGAYSPEDNSTQWFHNESLISSQASSYFIDAATVDDSGEYRCQTNLSTLSDPVQLEVHIGWLLLQAPRWVFKEEDPIHLRCHSWKNTALHKVTYLQNGKGRKYFHHNSDFYIPKATLKDSGSYFCRGLVGSKNVSSETVNITITQGLAVPTISSFFPPGYQVSFCLVMVLLFAVDTGLYFYV

SEQ ID NO: 10442 - protein, 478 aa, synthetic construct
MALPVTALLLPLALLLHAARPDIQMTQSPSSLSASVGDRVTITCKASQDVSTAVAWFQQKPGKAPKLLIYSPSYRYTGVPSRFSGSGSGTDFTLTISSLQPEDFTYYCQQLYSTPYTFGQGTKVEIKGGGGSGGGGSGGGGSEVQLVQSGAEVKKPGASVKVSCKASGYTFTDYYLDVVVRQAPGQGLEWIGRVNPYNGGTIYNQKFKGRVTLTRDTSTSTAYLELSSLRSEDTAVYYCARDHYRYDPLLDYWGQGTLVTVSSTRGMRTEDLPKAVVFLEPQWYRVLEKDSVTLKCQGAYSPEDNSTQWFHNESLISSQASSYFIDAATVDDSGEYRCQTNLSTLSDPVQLEVHIGWLLLQAPRWVFKEEDPIHLRCHSWKNTALHKVTYLQNGKGRKYFHHNSDFYIPKATLKDSGSYFCRGLVGSKNVSSETVNITITQGLAVPTISSFFPPGYQVSFCLVMVLLFAVDTGLYFYV

SEQ ID NO: 10443 - protein, 484 aa, synthetic construct
MALPVTALLLPLALLLHAARPDIQMTQSPSSLSASVGDRVTITCRASQSVSTSSYNYMHWYQQKPGKPPKLLIKYASNLESGVPSRFSGSGSGTDFTLTISSLQPEDFATYYCQHSWEIPLTFGQGTKVEIKGGGGSGGGGSGGGGSEVQLVQSGAEVKKPGASVKVSCKASGYSFTDYYMHWVRQAPGQGLEWIGRINPYNGAAFYSQNFKDRVTLTVDTSTSTAYLELSSLRSEDTAVYYCAIERGADLEGYAMDYWGQGTLVTVSSTRGMRTEDLPKAVVFLEPQWYRVLEKDSVTLKCQGAYSPEDNSTQWFHNESLISSQASSYFIDAATVDDSGEYRCQTNLSTLSDPVQLEVHIGWLLLQAPRWVFKEEDPIHLRCHSWKNTALHKVTYLQNGKGRKYFHHNSDFYIPKATLKDSGSYFCRGLVGSKNVSSETVNITITQGLAVPTISSFFPPGYQVSFCLVMVLLFAVDTGLYFYV

SEQ ID NO: 10444 - protein, 482 aa, synthetic construct
MALPVTALLLPLALLLHAARPEIVLTQSPATLSASPGERVTLTCRASSNVISSYVHWYQQKPGSSPRLFLYSTSNLASGVPSRFSGSGSGTDFTFTISSLEAEDAATYYCQQYSGYPLTFGQGTRLEIKGGGGSGGGGSGGGGSQVQLQESGPGLVKPSETLSLTCAVSGYSITSAYYWNWIRQPPGKGLEWIGYISYDGRNNYNPSLKNRITINPDTSKNQFSLQLNSVTPEDTAVYYCAREGDYDVGNYYAMDYWGQGTLVTVSSTRGMRTEDLPKAVVFLEPQWYRVLEKDSVTLKCQGAYSPEDNSTQWFHNESLISSQASSYFIDAATVDDSGEYRCQTNLSTLSDPVQLEVHIGWLLLQAPRWVFKEEDPIHLRCHSWKNTALHKVTYLQNGKGRKYFHHNSDFYIPKATLKDSGSYFCRGLVGSKNVSSETVNITITQGLAVPTISSFFPPGYQVSFCLVMVLLFAVDTGLYFYV

SEQ ID NO: 10445 - protein, 482 aa, synthetic construct
MALPVTALLLPLALLLHAARPEIVLTQSPATLSLSPGERATLSCRASSNVISSYVHWYQQKPGQAPRLLIYSTSNLASGIPARFSGSGSGTDFTLTISSLEPEDFAVYYCQQYSGYPLTFGQGTRLEIKGGGGSGGGGSGGGGSEVQLVESGGGLVQPGRSLRLSCAASGYSITSAYYWNWVRQAPGKGLEWVSYISYDGRNNYNPSLKNRFTISRDNAKKSLYLQMNSLRAEDTALYYCAKEGDYDVGNYYAMDYWGQGTTVTVSSTRGMRTEDLPKAVVFLEPQWYRVLEKDSVTLKCQGAYSPEDNSTQWFHNESLISSQASSYFIDAATVDDSGEYRCQTNLSTLSDPVQLEVHIGWLLLQAPRWVFKEEDPIHLRCHSWKNTALHKVTYLQNGKGRKYFHHNSDFYIPKATLKDSGSYFCRGLVGSKNVSSETVNITITQGLAVPTISSFFPPGYQVSFCLVMVLLFAVDTGLYFYV

SEQ ID NO: 10446 - protein, 491 aa, synthetic construct
MALPVTALLLPLALLLHAARPDVVMTQTPLSLPVSLGDQASISCRSSQSLVHSNGNTYLRWYLQKPGQSPKVLIYKVSNRVSGVPDRFSGSGSGTDFTLKINRVEAEDLGVYFCSQSTHVPWTFGGGTKLEIKSSADDAKKDAAKKDDAKKDDAKKDGGVKLDETGGGLVQPGGAMKLSCVTSGFTFGHYWMNWVRQSPEKGLEWVAQFRNKPYNYETYYSDSVKGRFTISRDDSKSSVYLQMNNLRVEDTGIYYCTGASYGMEYLGQGTSVTVSTTRGMRTEDLPKAVVFLEPQWYRVLEKDSVTLKCQGAYSPEDNSTQWFHNESLISSQASSYFIDAATVDDSGEYRCQTNLSTLSDPVQLEVHIGWLLLQAPRWVFKEEDPIHLRCHSWKNTALHKVTYLQNGKGRKYFHHNSDFYIPKATLKDSGSYFCRGLVGSKNVSSETVNITITQGLAVPTISSFFPPGYQVSFCLVMVLLFAVDTGLYFYV

SEQ ID NO: 10447 - protein, 487 aa, synthetic construct
MALPVTALLLPLALLLHAARPQVQLVESGGNLVQPGGSLRLSCAASGFTFGSFSMSWVRQAPGGGLEWVAGLSARSSLTHYADSVKGRFTISRDNAKNSVYLQMNSLRVEDTAVYYCARRSYDSSGYWGHFYSYMDVWGQGTLVTVSGGGGSGGGGSGGGGSSVLTQPSSVSAAPGQKVTISCSGSTSNIGNNYVSWYQQHPGKAPKLMIYDVSKRPSGVPDRFSGSKSGNSASLDISGLQSEDEADYYCAAWDDSLSEFLFGTGTKLTVLGTRGMRTEDLPKAVVFLEPQWYRVLEKDSVTLKCQGAYSPEDNSTQWFHNESLISSQASSYFIDAATVDDSGEYRCQTNLSTLSDPVQLEVHIGWLLLQAPRWVFKEEDPIHLRCHSWKNTALHKVTYLQNGKGRKYFHHNSDFYIPKATLKDSGSYFCRGLVGSKNVSSETVNITITQGLAVPTISSFFPPGYQVSFCLVMVLLFAVDTGLYFYV

SEQ ID NO: 10448 - protein, 478 aa, synthetic construct
MALPVTALLLPLALLLHAARPQSVVTQPPSVSGAPGQRVTISCTGSSSNIGAGYDVHWYQQLPGTAPKLLIYGNSNRPSGVPDRFSGSKSGTSASLAITGLQAEDEADYYCQSYDSSLSGSYVFGTGTKLTVLGGGGGSGGGGSGGGGSEVQLVETGGNLVQPGASLRLSCAASGFSFSGTAMHWVRQAPGKGLEWVSTISSTGRSTYYRDSVKGRFTISRDNSKNTLYLQMNSLRGEDTAVYYCARVSFDYWGQGTLVTVSSTRGMRTEDLPKAVVFLEPQWYRVLEKDSVTLKCQGAYSPEDNSTQWFHNESLISSQASSYFIDAATVDDSGEYRCQTNLSTLSDPVQLEVHIGWLLLQAPRWVFKEEDPIHLRCHSWKNTALHKVTYLQNGKGRKYFHHNSDFYIPKATLKDSGSYFCRGLVGSKNVSSETVNITITQGLAVPTISSFFPPGYQVSFCLVMVLLFAVDTGLYFYV

SEQ ID NO: 10449 - protein, 480 aa, synthetic construct
MALPVTALLLPLALLLHAARPQSVVTQPASVSGSPGQSITISCTGTSSDVGGYNYVSWYQQHPGKAPKLMIYDVSKRPSGVSNRFSGSKSGNTASLTISGLQAEDEADYYCSSYTSSSTLVFGGGTKLTVLGGGGGSGGGGSGGGGSEVQLVESGGAFVQPGGSLRLSCAASGFTFSSYAMTWVRQAPGKGLEWVSTISGRGRSTFYADSVKGRFTISRDNSKNTLYLQMNSLRAEDTAVYYCARYYHAGAFDLWGQGTLVTVSSTRGMRTEDLPKAVVFLEPQWYRVLEKDSVTLKCQGAYSPEDNSTQWFHNESLISSQASSYFIDAATVDDSGEYRCQTNLSTLSDPVQLEVHIGWLLLQAPRWVFKEEDPIHLRCHSWKNTALHKVTYLQNGKGRKYFHHNSDFYIPKATLKDSGSYFCRGLVGSKNVSSETVNITITQGLAVPTISSFFPPGYQVSFCLVMVLLFAVDTGLYFYV

SEQ ID NO: 10450 - protein, 482 aa, synthetic construct
MALPVTALLLPLALLLHAARPDVVMTQSPSSLSASVGDRVTITCQSSLDISHYLNWYQQKPGKAPKLLIYDASNLETGVPSRFSGSGSGTHFTFTISSLQPEDFATYYCQQYDNLPLTFGGGTKLEIKRGGGGSGGGGSGGGGSQVQLVQSGGGVVQPGGSLRVSCAASGVTLSDYGMHWVRQAPGKGLEWVAFIRNDGSDKYYADSVKGRFTISRDNSEKTVSLQMSSLRAEDTAVYYCAKNGESGPLDYWYLDLWGRGTLVTVSSTRGMRTEDLPKAVVFLEPQWYRVLEKDSVTLKCQGAYSPEDNSTQWFHNESLISSQASSYFIDAATVDDSGEYRCQTNLSTLSDPVQLEVHIGWLLLQAPRWVFKEEDPIHLRCHSWKNTALHKVTYLQNGKGRKYFHHNSDFYIPKATLKDSGSYFCRGLVGSKNVSSETVNITITQGLAVPTISSFFPPGYQVSFCLVMVLLFAVDTGLYFYV

SEQ ID NO: 10451 - protein, 489 aa, synthetic construct
MALPVTALLLPLALLLHAARPDVMLTQTPLSLPVSLGDQASISCRSSQSILHSTGDTYLEWYLQKPGQSPKLLINKVSNRLSGVPDRFSGSGSGTDFTLKISRVEAEDLGVYYCFQGSHVPWTFGGGTKLEIKRADAAPTVSIFPGGGGSGGGGSGGGGSQVKLQQSGPSLVKPGASVKMSCKASGYTFTDFYMKWVKQSHGKSLEWIGDINPNIGDTFYNQKFKGKATLTVDKSSSTAYMQLNSLTSEDSAVYFCSVGYFDVWGAGTTVTVSSTRGMRTEDLPKAVVFLEPQWYRVLEKDSVTLKCQGAYSPEDNSTQWFHNESLISSQASSYFIDAATVDDSGEYRCQTNLSTLSDPVQLEVHIGWLLLQAPRWVFKEEDPIHLRCHSWKNTALHKVTYLQNGKGRKYFHHNSDFYIPKATLKDSGSYFCRGLVGSKNVSSETVNITITQGLAVPTISSFFPPGYQVSFCLVMVLLFAVDTGLYFYV

SEQ ID NO: 10452 - protein, 489 aa, synthetic construct
MALPVTALLLPLALLLHAARPLPVLTQPPSVSVAPGKTARITCGGNNIGSKSVHWYQQKPGQAPVLVVYDDSDRPSGIPERFSGSNSGNTATLTISRVEAGDEADYYCQVWDSSSDYVVFGGGTKLTVLGGGGSGGGGSGGGGSEVQLVQSGAEVKKPGESLKISCKGSGYSFTSYWIGWVRQMPGKGLEWMGIIYPGDSDTRYSPSFQGQVTISADKSISTAYLQWSSLKASDTAMYYCARQVWGWQGGMYPRSNWWYNLDSWGQGTLVTVSSTRGMRTEDLPKAVVFLEPQWYRVLEKDSVTLKCQGAYSPEDNSTQWFHNESLISSQASSYFIDAATVDDSGEYRCQTNLSTLSDPVQLEVHIGWLLLQAPRWVFKEEDPIHLRCHSWKNTALHKVTYLQNGKGRKYFHHNSDFYIPKATLKDSGSYFCRGLVGSKNVSSETVNITITQGLAVPTISSFFPPGYQVSFCLVMVLLFAVDTGLYFYV

SEQ ID NO: 10453 - protein, 482 aa, synthetic construct
MALPVTALLLPLALLLHAARPELVMTQSPASLAVSLGQRATISCRASESVDSYGKSFMHWYQLKPGQPPKLLIYRASNLESGVPARFSGSGSRTDFTLTIDPVEADDAATYYCQQNNEDPWTFGGGTKLEIKGGGGSGGGGSGGGGSEVQLEQSGPELVKPGASVKMSCKASGYTFTNYYMKWVKQSHGKSLEWIGDLNPNNGDTFYNQKFKGKATLTVDKSSNTAYMQLNSLTSEDSAVYYCARTGRYEENAMDYWGQGTSVTVSSTRGMRTEDLPKAVVFLEPQWYRVLEKDSVTLKCQGAYSPEDNSTQWFHNESLISSQASSYFIDAATVDDSGEYRCQTNLSTLSDPVQLEVHIGWLLLQAPRWVFKEEDPIHLRCHSWKNTALHKVTYLQNGKGRKYFHHNSDFYIPKATLKDSGSYFCRGLVGSKNVSSETVNITITQGLAVPTISSFFPPGYQVSFCLVMVLLFAVDTGLYFYV

SEQ ID NO: 10454 - protein, 480 aa, synthetic construct; identical to SEQ ID NO: 10427

SEQ ID NO: 10455 - protein, 480 aa, synthetic construct; identical to SEQ ID NO: 10336

SEQ ID NO: 10456 - protein, 476 aa, synthetic construct
MALPVTALLLPLALLLHAARPDVVMTQSPSSLSASVGDRVTITCMASEDIYIRLAWYQQKPGNAPKLLIYAATSLETGVPSRFSGSGSGTDFTLTISSLQPEDFATYYCQQYWSSPWTFGGGTKVEIKGGGGSGGGGSGGGGSQVQLQESGPGLVKPSQTLSLTCTVSGYSITSDYTWNWIRQPPGNGLEWIGYITYSGSTSYNPSLKSRVLISVDTSKNQVSLKLSSVTAADTAVYYCARLGRRYTMDYWGQGTTVTVSSTRGMRTEDLPKAVVFLEPQWYRVLEKDSVTLKCQGAYSPEDNSTQWFHNESLISSQASSYFIDAATVDDSGEYRCQTNLSTLSDPVQLEVHIGWLLLQAPRWVFKEEDPIHLRCHSWKNTALHKVTYLQNGKGRKYFHHNSDFYIPKATLKDSGSYFCRGLVGSKNVSSETVNITITQGLAVPTISSFFPPGYQVSFCLVMVLLFAVDTGLYFYV

SEQ ID NO: 10457 - protein, 481 aa, synthetic construct
MALPVTALLLPLALLLHAARPEVQLVESGGGLVQPGRSLRLSCAASGFTFDDYAMHWVRQAPGKGLEWVSGISWNSGSIGYADSVKGRFTISRDNAKNSLYLQMNSLRAEDTALYYCAKDKGGGYYDFWSGSDYWGQGTLVTVSSGGGGSGGGGSGGGGSSSELTQDPAVSVALGQTVRITCQGDSLRSYYASWYQQKPGQAPVLVIYGKNNRPSGIPDRFSGSSSGNTASLTITGAQAEDEADYYCNSRDSSGWVFGGGTKLTVLTRGMRTEDLPKAVVFLEPQWYRVLEKDSVTLKCQGAYSPEDNSTQWFHNESLISSQASSYFIDAATVDDSGEYRCQTNLSTLSDPVQLEVHIGWLLLQAPRWVFKEEDPIHLRCHSWKNTALHKVTYLQNGKGRKYFHHNSDFYIPKATLKDSGSYFCRGLVGSKNVSSETVNITITQGLAVPTISSFFPPGYQVSFCLVMVLLFAVDTGLYFYV

SEQ ID NO: 10458 - protein, 490 aa, synthetic construct
MALPVTALLLPLALLLHAARPEVQLQQSGPGLVKPSQTLSLTCAISGDSVLSNSDTWNWIRQSPSRGLEWLGRTYHRSTWYDDYASSVRGRVSINVDTSKNQYSLQLNAVTPEDTGVYYCARDRLQDGNSWSDAFDVWGQGTMVTVSSGGGGSGGGGSGGGGSQSALTQPASVSGSPGQSITISCTGTSSDVGGYNYVSWYQQHPGKAPKLMIYDVSNRPSGVSNRFSGSKSGNTASLTISGLQAEDEADYYCSSYTSSSTLVYVFGTGTKVTVLTRGMRTEDLPKAVVFLEPQWYRVLEKDSVTLKCQGAYSPEDNSTQWFHNESLISSQASSYFIDAATVDDSGEYRCQTNLSTLSDPVQLEVHIGWLLLQAPRWVFKEEDPIHLRCHSWKNTALHKVTYLQNGKGRKYFHHNSDFYIPKATLKDSGSYFCRGLVGSKNVSSETVNITITQGLAVPTISSFFPPGYQVSFCLVMVLLFAVDTGLYFYV

SEQ ID NO: 10459 - protein, 488 aa, synthetic construct
MALPVTALLLPLALLLHAARPQVQLVQSGAEVKKPGASVKVSCKASGYTFTSYDINWVRQATGQGLEWMGWMNPNSGNTGYAQKFQGRVTMTRNTSISTAYMELSSLRSEDTAVYYCARGDSNYWSYYGMDVWGQGTLVTVSSGGGGSGGGGSGGGGSGGGGSQSVLTQPRSVSGSPGQSVTISCTGTSSDVGGYNYVSWYQQHPGEAPKLIIYDADKRPSGISNRFSSGKSGNTASLTISGLQVEDEADYYCCSYAGGSTWVFGGGTKVTVLTRGMRTEDLPKAVVFLEPQWYRVLEKDSVTLKCQGAYSPEDNSTQWFHNESLISSQASSYFIDAATVDDSGEYRCQTNLSTLSDPVQLEVHIGWLLLQAPRWVFKEEDPIHLRCHSWKNTALHKVTYLQNGKGRKYFHHNSDFYIPKATLKDSGSYFCRGLVGSKNVSSETVNITITQGLAVPTISSFFPPGYQVSFCLVMVLLFAVDTGLYFYV

SEQ ID NO: 10460 - protein, 490 aa, synthetic construct
MALPVTALLLPLALLLHAARPEVQLQQSGPGLVKPSQTLSLTCAISGDSVSSNSAAWNWIRQSPSRGLEWLGRTYYRSKWYSDYAVSVKSRITINPDTSKNQFSLQLNSVTPEDTAVYYCARDPYDFWSGYPDAFDIWGQGTMVTVSSGGGGSGGGGSGGGGSQSALTQPASVSGSPGQSITISCTGTSSDVGGYNYVSWYQQHPGKAPKVIISEVNNRPSGVSHRFSGSKSGNTASLTISGLQAEDEADYFCSSYTSGRTLYVFGTGSKVTVLGTRGMRTEDLPKAVVFLEPQWYRVLEKDSVTLKCQGAYSPEDNSTQWFHNESLISSQASSYFIDAATVDDSGEYRCQTNLSTLSDPVQLEVHIGWLLLQAPRWVFKEEDPIHLRCHSWKNTALHKVTYLQNGKGRKYFHHNSDFYIPKATLKDSGSYFCRGLVGSKNVSSETVNITITQGLAVPTISSFFPPGYQVSFCLVMVLLFAVDTGLYFYV

SEQ ID NO: 10461 - protein, 489 aa, synthetic construct
MALPVTALLLPLALLLHAARPEVQLQQSGPGLVKPSQTLSLTCAISGDSMLSNSDTWNWIRQSPSRGLEWLGRTYHRSTWYDDYASSVRGRVSINVDTSKNQYSLQLNAVTPEDTGVYYCARVRLQDGNSWSDAFDVWGQGTMVTVSSGGGGSGGGGSGGGGSQSALTQPASASGSPGQSVTISCTGTSSDVGGYNYVSWYQQHPGKAPKLMIYDVSNRPSGVSNRFSGSKSGNTASLTISGLQAEDEADYYCSSYTSSSTLYVFGTGTQLTVLTRGMRTEDLPKAVVFLEPQWYRVLEKDSVTLKCQGAYSPEDNSTQWFHNESLISSQASSYFIDAATVDDSGEYRCQTNLSTLSDPVQLEVHIGWLLLQAPRWVFKEEDPIHLRCHSWKNTALHKVTYLQNGKGRKYFHHNSDFYIPKATLKDSGSYFCRGLVGSKNVSSETVNITITQGLAVPTISSFFPPGYQVSFCLVMVLLFAVDTGLYFYV

SEQ ID NO: 10462 - protein, 480 aa, synthetic construct
MALPVTALLLPLALLLHAARPEIVLTQSPATLSLSPGERATLSCSASSSVSYMYWYQQKPGQAPRLLIYRTSNLASGIPARFSGSGSGTDFTLTISSLEPEDFAVYYCQQYHSYPTTFGQGTKVEIKRTVGGGGSGGGGSGGGGSEVQLVESGGGLVQPGGSLRLSCAASGFSFNTYAMNWVRQAPGKGLEWVSHIRSKSNNFATYYADSVKDRFTISRDNAKNSLYLQMNSLRAEDTAVYYCARQGGDFPMDYWGQGTLVTVSSTRGMRTEDLPKAVVFLEPQWYRVLEKDSVTLKCQGAYSPEDNSTQWFHNESLISSQASSYFIDAATVDDSGEYRCQTNLSTLSDPVQLEVHIGWLLLQAPRWVFKEEDPIHLRCHSWKNTALHKVTYLQNGKGRKYFHHNSDFYIPKATLKDSGSYFCRGLVGSKNVSSETVNITITQGLAVPTISSFFPPGYQVSFCLVMVLLFAVDTGLYFYV

SEQ ID NO: 10463 - protein, 476 aa, synthetic construct
MALPVTALLLPLALLLHAARPDVVMTQSPSSLSASVGDRVTITCKASEDIYIRLAWYQQKPGKAPKLLIYAATSLETGVPSRFSGSGSGTDFTLTISSLQPEDFATYYCQQYWTTPWTFGGGTKVEIKGGGGSGGGGSGGGGSQVQLQESGPGLVKPSQTLSLTCTVSGYSITIDYTWNWIRQPPGKGLEWIGYITYSGSTDYNPSLKSRVLISVDTSKNQVSLKLSSVTAADTAVYYCARLGRRYALDYWGQGTTVTVSSTRGMRTEDLPKAVVFLEPQWYRVLEKDSVTLKCQGAYSPEDNSTQWFHNESLISSQASSYFIDAATVDDSGEYRCQTNLSTLSDPVQLEVHIGWLLLQAPRWVFKEEDPIHLRCHSWKNTALHKVTYLQNGKGRKYFHHNSDFYIPKATLKDSGSYFCRGLVGSKNVSSETVNITITQGLAVPTISSFFPPGYQVSFCLVMVLLFAVDTGLYFYV

SEQ ID NO: 10464 - protein, 481 aa, synthetic construct
MALPVTALLLPLALLLHAARPDIQLTQSPSFLSASVGDRVTITCRASQGISTDLNWYQQKPGKAPKLLIYAASNLESGVPSRFSGSGSGTEFTLTISSLQPEDFATYYCQQSYNWPYTFGGGTKVEIKRGGGGSGGGGSGGGGSEVQLVESGGGLVKPGGSLRLSCAASGFTFSNFEMNWVRQAPGKGLEWVSGISSNGRYINYADSVKGRFTISRDNAKNSLYLQMNSLRAEDTAVYYCARVVDFDQDYNGFDYWGQGTLVTVSSTRGMRTEDLPKAVVFLEPQWYRVLEKDSVTLKCQGAYSPEDNSTQWFHNESLISSQASSYFIDAATVDDSGEYRCQTNLSTLSDPVQLEVHIGWLLLQAPRWVFKEEDPIHLRCHSWKNTALHKVTYLQNGKGRKYFHHNSDFYIPKATLKDSGSYFCRGLVGSKNVSSETVNITITQGLAVPTISSFFPPGYQVSFCLVMVLLFAVDTGLYFYV

SEQ ID NO: 10465 - protein, 479 aa, synthetic construct
MALPVTALLLPLALLLHAARPDIQLTQSPSFLSASVGDRVTITCSLSLGISTWRDWFPPRLGRGLEPLTYAASTLQSGVPSRFSGSGSGTEFTLTISSLQPEDFATYYCQQLNSYPLTFGGGTKVEIKRGGGGSGGGGSGGGGSEVQLVESGGGLVKPGGSLRLSCAASGFTFSTYGMSWVRQAPGKGLEWVAYINNGSGYIYYADSVKGRFTISRDNAKNSLYLQMNSLRAEDTAVYYCARGQWWSGGDFDYWGQGTLVTVSSTRGMRTEDLPKAVVFLEPQWYRVLEKDSVTLKCQGAYSPEDNSTQWFHNESLISSQASSYFIDAATVDDSGEYRCQTNLSTLSDPVQLEVHIGWLLLQAPRWVFKEEDPIHLRCHSWKNTALHKVTYLQNGKGRKYFHHNSDFYIPKATLKDSGSYFCRGLVGSKNVSSETVNITITQGLAVPTISSFFPPGYQVSFCLVMVLLFAVDTGLYFYV

SEQ ID NO: 10466 - protein, 481 aa, synthetic construct
MALPVTALLLPLALLLHAARPDIQMTQTTSSLSASLGDRVTISCRASQDISNYLNWYQQKPDGTVKLLIYYTSILHSGVPSRFSGSGSGTDYSLTISNLEQEDFATYFCQQGNTLPWTFGGGTKLEIKAGGGGSGGGGSGGGGSEVQLVESGGGLVKPGGSLKLSCAASGFAFSIYDMSWVRQTPEKRLEWVAYISSGGGTYYPDTVKGRFTISRDNAKNTLYLQMSSLKSEDTAMYYCARHSGYGTHWGVLFAYWGQGTLVTVSATRGMRTEDLPKAVVFLEPQWYRVLEKDSVTLKCQGAYSPEDNSTQWFHNESLISSQASSYFIDAATVDDSGEYRCQTNLSTLSDPVQLEVHIGWLLLQAPRWVFKEEDPIHLRCHSWKNTALHKVTYLQNGKGRKYFHHNSDFYIPKATLKDSGSYFCRGLVGSKNVSSETVNITITQGLAVPTISSFFPPGYQVSFCLVMVLLFAVDTGLYFYV

SEQ ID NO: 10467 - protein, 491 aa, synthetic construct
MALPVTALLLPLALLLHAARPDIVMTQSPDSLAVSLGERATINCKSSQSLLYRSNQKNYLAWYQQKPGQPPKLLIYWASTRESGVPDRFSGSGSGTDFTLTISSLQAEDVAVYYCQQYYNYPRTFGQGTKVEIKRTVGGGGSGGGGSGGGGSEVQLLESGGGLVQPGGSLRLSCAASGYSITSDYAWNWVRQAPGKGLEWVSYISNSGSTSYNPSLKSRFTISRDNSKNTLYLQMNSLRAEDTAVYYCAKERNYDYDDYYYAMDYWGQGTLVTVSSTRGMRTEDLPKAVVFLEPQWYRVLEKDSVTLKCQGAYSPEDNSTQWFHNESLISSQASSYFIDAATVDDSGEYRCQTNLSTLSDPVQLEVHIGWLLLQAPRWVFKEEDPIHLRCHSWKNTALHKVTYLQNGKGRKYFHHNSDFYIPKATLKDSGSYFCRGLVGSKNVSSETVNITITQGLAVPTISSFFPPGYQVSFCLVMVLLFAVDTGLYFYV

SEQ ID NO: 10468 - protein, 484 aa, synthetic construct
MALPVTALLLPLALLLHAARPDVVMTQSPLSLPVTLGQPASISCRSSQSLLHSSGNTYLEWYQQRPGQSPRPLIYKISTRFSGVPDRFSGSGSGTDFTLKISRVEAEDVGVYYCFQGSHVPYTFGGGTKVEIKRGGGGSGGGGSGGGGSQVQLVQSGAEVKKPGASVKVSCKASGLTIEDYYMHWVRQAPGQGLEWMGWIDPENGDTEYGPKFQGRVTMTRDTSINTAYMELSRLRSDDTAVYYCAVHNAHYGTWFAYWGQGTLVTVSSTRGMRTEDLPKAVVFLEPQWYRVLEKDSVTLKCQGAYSPEDNSTQWFHNESLISSQASSYFIDAATVDDSGEYRCQTNLSTLSDPVQLEVHIGWLLLQAPRWVFKEEDPIHLRCHSWKNTALHKVTYLQNGKGRKYFHHNSDFYIPKATLKDSGSYFCRGLVGSKNVSSETVNITITQGLAVPTISSFFPPGYQVSFCLVMVLLFAVDTGLYFYV

SEQ ID NO: 10469 - protein, 476 aa, synthetic construct
MALPVTALLLPLALLLHAARPDIQMTQSPSSLSASVGDRVTITCRASENIYSNLAWYQQKPGKAPKLLIYAATNLADGVPSRFSGSGSGTDFTLTISSLQPEDFATYYCQHFWGTPTFGQGTKVEIKRTVGGGGSGGGGSGGGGSEVQLVESGGGLVQPGGSLRLSCAASGFSLTNYGVHWVRQAPGKGLEWVSVIWSGGSTDYNAAFISRFTISADTSKNTAYLQMNSLRAEDTAVYYCARELIHAMDNWGQGTLVTVSSTRGMRTEDLPKAVVFLEPQWYRVLEKDSVTLKCQGAYSPEDNSTQWFHNESLISSQASSYFIDAATVDDSGEYRCQTNLSTLSDPVQLEVHIGWLLLQAPRWVFKEEDPIHLRCHSWKNTALHKVTYLQNGKGRKYFHHNSDFYIPKATLKDSGSYFCRGLVGSKNVSSETVNITITQGLAVPTISSFFPPGYQVSFCLVMVLLFAVDTGLYFYV

SEQ ID NO: 10470 - protein, 483 aa, synthetic construct
MALPVTALLLPLALLLHAARPDFVMTQSPLSLPVTPGEPASISCRSSQSIVHSNGNTYLEWYLQKPGQSPQLLIYKVSNRFSGVPDRFSGSGSGTDFTLKISRVEAEDVGVYYCFQGSHVPLTFGQGTKLEIKRGGGGSGGGGSGGGGSEVQLVESGAEVKKPGASVKVSCKASGYTFTSYWIHWVRQAPGQGLEWMGENDPSNGRTNYNEKFKNRVTLTVDTSISTAYMELSRLRSDDTAVYYCARGPNYFYSMDYWGQGTMVTVSSTRGMRTEDLPKAVVFLEPQWYRVLEKDSVTLKCQGAYSPEDNSTQWFHNESLISSQASSYFIDAATVDDSGEYRCQTNLSTLSDPVQLEVHIGWLLLQAPRWVFKEEDPIHLRCHSWKNTALHKVTYLQNGKGRKYFHHNSDFYIPKATLKDSGSYFCRGLVGSKNVSSETVNITITQGLAVPTISSFFPPGYQVSFCLVMVLLFAVDTGLYFYV

SEQ ID NO: 10471 - protein, 476 aa, synthetic construct
MALPVTALLLPLALLLHAARPDIQLTQSPSFLSASVGDRVTITCSARSSISFMYWYQQKPGKAPKLLIYDTSNLASGVPSRFSGSGSGTEFTLTISSLEAEDAATYYCQQWSSYPLTFGQGTKLEIKGGGGSGGGGSGGGGSQVQLVQSGAEVKKPGASVKVSCKASGYTFTGSWMNWVRQAPGQGLEWIGRIYPGDGETNYNGKFKDRVTITADKSTSTAYMELSSLRSEDTAVYYCARIYGNNVYFDVWGQGTTVTVSSTRGMRTEDLPKAVVFLEPQWYRVLEKDSVTLKCQGAYSPEDNSTQWFHNESLISSQASSYFIDAATVDDSGEYRCQTNLSTLSDPVQLEVHIGWLLLQAPRWVFKEEDPIHLRCHSWKNTALHKVTYLQNGKGRKYFHHNSDFYIPKATLKDSGSYFCRGLVGSKNVSSETVNITITQGLAVPTISSFFPPGYQVSFCLVMVLLFAVDTGLYFYV

SEQ ID NO: 10472 - protein, 484 aa, synthetic construct
MALPVTALLLPLALLLHAARPQLVLTQSPSASASLGSSVKLTCTLSSGHKTDTIDWYQQQPGKAPRYLMKLEGSGSYNKGSGVPDRFSGSSSGADWYLTISSLQSEDEADYYCGTDYPGNYLFGGGTQLTVLGGGGGSGGGGSGGGGSQEQLVESGGGLVQPGGSLRLSCAASGFTFSDYYMSWIRQAPGKGLEWVATIYPSSGKTYYADSAKGRLTISSDNAKDSLYLQMNSLRAEDTAVYYCTRDSYADDAALFDIWGQGTTVTVSSTRGMRTEDLPKAVVFLEPQWYRVLEKDSVTLKCQGAYSPEDNSTQWFHNESLISSQASSYFIDAATVDDSGEYRCQTNLSTLSDPVQLEVHIGWLLLQAPRWVFKEEDPIHLRCHSWKNTALHKVTYLQNGKGRKYFHHNSDFYIPKATLKDSGSYFCRGLVGSKNVSSETVNITITQGLAVPTISSFFPPGYQVSFCLVMVLLFAVDTGLYFYV

SEQ ID NO: 10473 - protein, 479 aa, synthetic construct
MALPVTALLLPLALLLHAARPDIVLTQSPPSLAMSLGKRATISCRASESVTILGSHLIHWYQQKPGQPPTLLIQLASNVQTGVPARFSGSGSRTDFTLTIDPVEEDDVAVYYCLQSRTIPRTFGGGTKLEIKGGGGSGGGGSGGGGSQIQLVQSGPELKKPGETVKISCKASGYTFTDYSINWVKRAPGKGLKWMGWINTETREPAYAYDFRGRFAFSLETSASTAYLQINNLKYEDTATYFCALDYSYAMDYWGQGTSVTVSSTRGMRTEDLPKAVVFLEPQWYRVLEKDSVTLKCQGAYSPEDNSTQWFHNESLISSQASSYFIDAATVDDSGEYRCQTNLSTLSDPVQLEVHIGWLLLQAPRWVFKEEDPIHLRCHSWKNTALHKVTYLQNGKGRKYFHHNSDFYIPKATLKDSGSYFCRGLVGSKNVSSETVNITITQGLAVPTISSFFPPGYQVSFCLVMVLLFAVDTGLYFYV

SEQ ID NO: 10474 - protein, 483 aa, synthetic construct
MALPVTALLLPLALLLHAARPQVQLQESGPGLVKPSQTLSLTCTVSGGSISSGGFYWSWIRQHPGKGLEWIGYIHHSGSTHYNPSLKSRVTISIDTSKNLFSLRLSSVTAADTAVYYCASLVYCGGDCYSGFDYWGQGTLVTVSSGGGGSGGGGSGGGGSDIQLTQSPSSLSASVGDRVSFTCQASQDINNFLNWYQQKPGKAPKLLIYDASNLETGVPSRFSGSGSGTDFTFTISSLQPEDIATYYCQQYGNLPFTFGGGTKVEIKRTRGMRTEDLPKAVVFLEPQWYRVLEKDSVTLKCQGAYSPEDNSTQWFHNESLISSQASSYFIDAATVDDSGEYRCQTNLSTLSDPVQLEVHIGWLLLQAPRWVFKEEDPIHLRCHSWKNTALHKVTYLQNGKGRKYFHHNSDFYIPKATLKDSGSYFCRGLVGSKNVSSETVNITITQGLAVPTISSFFPPGYQVSFCLVMVLLFAVDTGLYFYV

SEQ ID NO: 10475 - protein, 481 aa, synthetic construct
MALPVTALLLPLALLLHAARPQVQLQESGPGLVKPSETLSLTCTVSGGSISSYYWSWIRQPPGKGLEWIGYIYYSGSTNYNPSLKSRVTISVDTSKNQFSLKLSSVTAADTAVYYCVSLVYCGGDCYSGFDYWGQGTLVTVSSGGGGSGGGGSGGGGSDIQLTQSPSSLSASVGDRVSFTCQASQDINNFLNWYQQKPGKAPKLLIYDASNLETGVPSRFSGSGSGTDFTFTISSLQPEDIATYYCQQYGNLPFTFGGGTKVEIKRTRGMRTEDLPKAVVFLEPQWYRVLEKDSVTLKCQGAYSPEDNSTQWFHNESLISSQASSYFIDAATVDDSGEYRCQTNLSTLSDPVQLEVHIGWLLLQAPRWVFKEEDPIHLRCHSWKNTALHKVTYLQNGKGRKYFHHNSDFYIPKATLKDSGSYFCRGLVGSKNVSSETVNITITQGLAVPTISSFFPPGYQVSFCLVMVLLFAVDTGLYFYV

SEQ ID NO: 10476 - protein, 486 aa, synthetic construct
MALPVTALLLPLALLLHAARPQVTLKESGPVLVKPTETLTLTCTVSGFSLINARMGVSWIRQPPGKALEWLAHIFSNAEKSYRTSLKSRLTISKDTSKSQVVLTMTNMDPVDTATYYCARIPGYGGNGDYHYYGMDVWGQGTTVTVSSGGGGSGGGGSGGGGSDIQMTQSPSSLSASLGDRVTITCRASQGIRNDLGWYQQKPGKAPKRLIYASSTLQSGVPSRFSGSGSGTEFTLTISSLQPEDFATYYCLQHNNFPWTFGQGTKVEIKRTRGMRTEDLPKAVVFLEPQWYRVLEKDSVTLKCQGAYSPEDNSTQWFHNESLISSQASSYFIDAATVDDSGEYRCQTNLSTLSDPVQLEVHIGWLLLQAPRWVFKEEDPIHLRCHSWKNTALHKVTYLQNGKGRKYFHHNSDFYIPKATLKDSGSYFCRGLVGSKNVSSETVNITITQGLAVPTISSFFPPGYQVSFCLVMVLLFAVDTGLYFYV

SEQ ID NO: 10477 - protein, 480 aa, synthetic construct
MALPVTALLLPLALLLHAARPQIQLVESGGGVVQPGRSLRLSCVASGFTFKNYGMHWVRQAPGKGLEWVAVIWYDGSNEYYGDPVKGRFTISRDNSKNMLYLQMNSLRADDTAVYYCARSGIAVAGAFDYWGQGTLVTVSSGGGGSGGGGSGGGGSEIVLTQSPDTLSLSPGEKATLSCRASQSVSSSFLAWYQQKPGQAPSLLIYVASRRAAGIPDRFSGSGSGTDFTLTISRLEPEDFGMFYCQHYGRTPFTFGPGTKVDIKRTRGMRTEDLPKAVVFLEPQWYRVLEKDSVTLKCQGAYSPEDNSTQWFHNESLISSQASSYFIDAATVDDSGEYRCQTNLSTLSDPVQLEVHIGWLLLQAPRWVFKEEDPIHLRCHSWKNTALHKVTYLQNGKGRKYFHHNSDFYIPKATLKDSGSYFCRGLVGSKNVSSETVNITITQGLAVPTISSFFPPGYQVSFCLVMVLLFAVDTGLYFYV

SEQ ID NO: 10478 - protein, 481 aa, synthetic construct
MALPVTALLLPLALLLHAARPDIQLTQSPSFLSASVGDRVTITCRASQGISSYLAWYQQKPGKAPKLLIYAASTLQSGVPSRFSGSGSGTEFTLTISSLQPEDFATYYCQQVNSYPLTFGGGTKVEIKRGGGGSGGGGSGGGGSQLQLQESGPGLVKPSETLSLTCTVSGGSISSSTYYWGWIRQPPGKGLEWIGSIYFTGSTDYNPSLKSRVSISVDTSKNQFSLKLSSVTAADTAVYYCAKEDDSSGYYSFDYWGQGNLVTVSSTRGMRTEDLPKAVVFLEPQWYRVLEKDSVTLKCQGAYSPEDNSTQWFHNESLISSQASSYFIDAATVDDSGEYRCQTNLSTLSDPVQLEVHIGWLLLQAPRWVFKEEDPIHLRCHSWKNTALHKVTYLQNGKGRKYFHHNSDFYIPKATLKDSGSYFCRGLVGSKNVSSETVNITITQGLAVPTISSFFPPGYQVSFCLVMVLLFAVDTGLYFYV

SEQ ID NO: 10479 - protein, 484 aa, synthetic construct
MALPVTALLLPLALLLHAARPQSALTQPRSVSGSPGHSVTISCTGTSSDVGDYNYVSWYQQRPGKVPKLLIYDVSKRPSGVPDRFSGSKSGNTASLTISGLQAEDEAIYFCASYAGNYNVVFGGGTKLTVLGQGGGGSGGGGSGGGGSQVQLVQSGSELKKPGASVKVSCKASGYTFNTYAMNWVRQAPGQGLEWMGWINTNTGNPTYAQGFTGRFVFSLDTSVSTAYLQISSLKAEDTAVYYCARRYFDWLLGAFDIWGQGTMVTVSSTRGMRTEDLPKAVVFLEPQWYRVLEKDSVTLKCQGAYSPEDNSTQWFHNESLISSQASSYFIDAATVDDSGEYRCQTNLSTLSDPVQLEVHIGWLLLQAPRWVFKEEDPIHLRCHSWKNTALHKVTYLQNGKGRKYFHHNSDFYIPKATLKDSGSYFCRGLVGSKNVSSETVNITITQGLAVPTISSFFPPGYQVSFCLVMVLLFAVDTGLYFYV

SEQ ID NO: 10480 - protein, 476 aa, synthetic construct
MALPVTALLLPLALLLHAARPDIQMTQSPSSLSASVGDRVTITCSASQGINNYLNWYQQKPGKAPKLLIHYTSGLHAGVPSRFSGSGSGTDYTLTISSLQPEDVATYYCQQYSILPWTFGGGTKVEIKRGGGGSGGGGSGGGGSQVQLVQSGAEVKKPGSSVKVSCKASGYAFSSSWMNWVRQAPGQGLEWMGRIYPGDGNTHYAQKFQGRVTLTADKSTSTAYMELSSLRSEDTAVYYCGEGYLDPMDYWGQGTLVTVSSTRGMRTEDLPKAVVFLEPQWYRVLEKDSVTLKCQGAYSPEDNSTQWFHNESLISSQASSYFIDAATVDDSGEYRCQTNLSTLSDPVQLEVHIGWLLLQAPRWVFKEEDPIHLRCHSWKNTALHKVTYLQNGKGRKYFHHNSDFYIPKATLKDSGSYFCRGLVGSKNVSSETVNITITQGLAVPTISSFFPPGYQVSFCLVMVLLFAVDTGLYFYV

SEQ ID NO: 10481 - protein, 479 aa, synthetic construct
MALPVTALLLPLALLLHAARPEVQLVESGGGLVQPGGSLRLSCAASGYTFTTYWMHWVRQAPGKGLEWVGYIRPSTGYTEYNQKFKDRFTISADTSKNTAYLQMNSLRAEDTAVYYCARSRWLLDYWGQGTLVTVSGGGGSGGGGSGGGGSDIQMTQSPSSLSASVGDRVTITCKSSQSVLYSSNQKNYLAWFQQKPGKAPKLLIYWASTRESGVPSRFSGSGSGTDFTLTISSLQPEDFATYFCHQYLSSYTFGQGTKVEIKRTRGMRTEDLPKAVVFLEPQWYRVLEKDSVTLKCQGAYSPEDNSTQWFHNESLISSQASSYFIDAATVDDSGEYRCQTNLSTLSDPVQLEVHIGWLLLQAPRWVFKEEDPIHLRCHSWKNTALHKVTYLQNGKGRKYFHHNSDFYIPKATLKDSGSYFCRGLVGSKNVSSETVNITITQGLAVPTISSFFPPGYQVSFCLVMVLLFAVDTGLYFYV

SEQ ID NO: 10482 - protein, 476 aa, synthetic construct
MALPVTALLLPLALLLHAARPDIQMTQSPSSLSASVGDRVTITCRASQDISNYLNWYQQKPGKAPKLLIYYTSRLHSGVPSRFSGSGSGTDFTLTISSLQPEDFATYYCQQGNTLPYTFGQGTKVEIKRGGGGSGGGGSGGGGSEVQLVESGGGLVQPGGSLRLSCAASGFTFSDYFMSWVRQAPGKGLEWVATISNGGTYTYYPDSVKGRFTISRDNSKNTLYLQMNSLRAEDTAVYYCARFDGYIFDYWGQGTLVTVSSTRGMRTEDLPKAVVFLEPQWYRVLEKDSVTLKCQGAYSPEDNSTQWFHNESLISSQASSYFIDAATVDDSGEYRCQTNLSTLSDPVQLEVHIGWLLLQAPRWVFKEEDPIHLRCHSWKNTALHKVTYLQNGKGRKYFHHNSDFYIPKATLKDSGSYFCRGLVGSKNVSSETVNITITQGLAVPTISSFFPPGYQVSFCLVMVLLFAVDTGLYFYV

SEQ ID NO: 10483 - protein, 483 aa, synthetic construct
MALPVTALLLPLALLLHAARPDIQMTQSPSSLSASVGDRVTITCTASSRVSSSYLHWFQQKPGKAPKLLIYSTSNLASGVPSRFSGSGSGTDFTLTISSLQPEDFATYYCHQYHRSPYTFGQGTKVEIKRGGGGSGGGGSGGGGSEVQLVESGGGLVQPGGSLRLSCAASGYAFSNSWINWVRQAPGKGLEWVGQIYPGDYDTNYNGKFKGRFTISRDKSKNTAYLQMNSLRAEDTAVYYCARGGSIYYGNLGFFDVWGQGTLVTVSSTRGMRTEDLPKAVVFLEPQWYRVLEKDSVTLKCQGAYSPEDNSTQWFHNESLISSQASSYFIDAATVDDSGEYRCQTNLSTLSDPVQLEVHIGWLLLQAPRWVFKEEDPIHLRCHSWKNTALHKVTYLQNGKGRKYFHHNSDFYIPKATLKDSGSYFCRGLVGSKNVSSETVNITITQGLAVPTISSFFPPGYQVSFCLVMVLLFAVDTGLYFYV

SEQ ID NO: 10484 - protein, 473 aa, synthetic construct
MALPVTALLLPLALLLHAARPDIQMTQSPSSLSASVGDRVTITCSASSSVTYMYWYQQKPGKAPKLLIYDTSNLASGVPSRFSGSGSGTDYTLTISSLQPEDFATYYCQQWSNYPLTFGQGTKVEIKGGGGSGGGGSGGGGSQVQLVQSGAEVKKPGASVKVSCKASGYSFIEYTINWVRQAPGQGLEWIGNIDPYYGTTYYNQMFTGRATLTVDTSISTAYMELSRLRSDDTAVYYCARGSAWFPYWGQGTLVTVSSTRGMRTEDLPKAVVFLEPQWYRVLEKDSVTLKCQGAYSPEDNSTQWFHNESLISSQASSYFIDAATVDDSGEYRCQTNLSTLSDPVQLEVHIGWLLLQAPRWVFKEEDPIHLRCHSWKNTALHKVTYLQNGKGRKYFHHNSDFYIPKATLKDSGSYFCRGLVGSKNVSSETVNITITQGLAVPTISSFFPPGYQVSFCLVMVLLFAVDTGLYFYV

SEQ ID NO: 10485 - protein, 473 aa, synthetic construct
MALPVTALLLPLALLLHAARPEIVLTQSPSSLSASVGDRVTITCRASENIYSYLAWYQQKPGKAPKLLIYNTKTLGEGVPSRFSGSGSGTDFTLTISSLQPEDFATYYCQHHYGTPFTFGPGTKVDIKGGGGSGGGGSGGGGSQVQLVQSGAEVKKPGASVKVSCKASGYTFSDYWVHWVRQAPGQGLEWMGAIDGSDTFNDYSQKFKGRVTMTRDTSISTAYMELSRLRSDDTAVYYCARGGLLQYWGQGTLVTVSSTRGMRTEDLPKAVVFLEPQWYRVLEKDSVTLKCQGAYSPEDNSTQWFHNESLISSQASSYFIDAATVDDSGEYRCQTNLSTLSDPVQLEVHIGWLLLQAPRWVFKEEDPIHLRCHSWKNTALHKVTYLQNGKGRKYFHHNSDFYIPKATLKDSGSYFCRGLVGSKNVSSETVNITITQGLAVPTISSFFPPGYQVSFCLVMVLLFAVDTGLYFYV

SEQ ID NO: 10486 - protein, 477 aa, synthetic construct
MALPVTALLLPLALLLHAARPQVQLQQSGPELVKPGASVKISCKASGYAFSSSWMNWVKQRPGKGLEWIGRIYPGDEDTNYSGKFKDKATLTADKSSTTAYMQLSSLTSEDSAVYFCARSLLYGDYLDYWGQGTTLTVSSGGGGSGGGGSGGGGSQIVLTQSPAIMSASPGEKVTMTCSASSSVSYMHWYQQKSGTSPKRWIYDTSKLASGVPDRFSGSGSGTSYFLTINNMEAEDAATYYCQQWNINPLTFGAGTKLELKRTRGMRTEDLPKAVVFLEPQWYRVLEKDSVTLKCQGAYSPEDNSTQWFHNESLISSQASSYFIDAATVDDSGEYRCQTNLSTLSDPVQLEVHIGWLLLQAPRWVFKEEDPIHLRCHSWKNTALHKVTYLQNGKGRKYFHHNSDFYIPKATLKDSGSYFCRGLVGSKNVSSETVNITITQGLAVPTISSFFPPGYQVSFCLVMVLLFAVDTGLYFYV

SEQ ID NO: 10487 - protein, 480 aa, synthetic construct
MALPVTALLLPLALLLHAARPDIQMTQSSAYLSVSLGGRVTITCKASDHINNWLAWYQHKPGNAPRLLISGATTLETGVPSRFSGSGSGKDYTLSITSLQTEDVATYYCQQSWNTPWTFGGGTKLEIKRGGGGSGGGGSGGGGSQVQLQQSGAELVRPGSSVKISCKASGYAFSSYWVNWMKQRPGQGLEWIGQIYPGDGDTNYNGKFKGRATVTADKSSSTSYMQFSSLTSEDSAVYFCARSITTVVGCAMDYWGQGTSVTVSSTRGMRTEDLPKAVVFLEPQWYRVLEKDSVTLKCQGAYSPEDNSTQWFHNESLISSQASSYFIDAATVDDSGEYRCQTNLSTLSDPVQLEVHIGWLLLQAPRWVFKEEDPIHLRCHSWKNTALHKVTYLQNGKGRKYFHHNSDFYIPKATLKDSGSYFCRGLVGSKNVSSETVNITITQGLAVPTISSFFPPGYQVSFCLVMVLLFAVDTGLYFYV

SEQ ID NO: 10488 - protein, 479 aa, synthetic construct
MALPVTALLLPLALLLHAARPEVQLLESGGGLVQPGGSLRLSCAASGFTFSSYAMSWVRQAPGKGLEWVSVISGSGGRPNYADSVKGRFTISRDNSKNTLYLQMNSLRDEDTAVYYCAKVDYSNYLFFDYWGQGTLVTVSSGGGGSGGGGSGGGGSEIVLTQSPGTLSLSPGEGATLSCRAGQSVRSSYLGWYQQKPGQAPRLLIYGASSRATGIPDRFSGSGSGTDFTLTISRLEPEDFAVYYCQQYGYSPPTFGGGTKLEIKTRGMRTEDLPKAVVFLEPQWYRVLEKDSVTLKCQGAYSPEDNSTQWFHNESLISSQASSYFIDAATVDDSGEYRCQTNLSTLSDPVQLEVHIGWLLLQAPRWVFKEEDPIHLRCHSWKNTALHKVTYLQNGKGRKYFHHNSDFYIPKATLKDSGSYFCRGLVGSKNVSSETVNITITQGLAVPTISSFFPPGYQVSFCLVMVLLFAVDTGLYFYV

SEQ ID NO: 10489 - protein, 482 aa, synthetic construct
MALPVTALLLPLALLLHAARPDIVLTQSPPSLAMSLGKRATISCRASESVTILGSHLIHWYQQKPGQPPTLLIQLASNVQTGVPARFSGSGSRTDFTLTIDPVEEDDVAVYYCLQSRTIPRTFGGGTKLEIKGSTSGSGKPGSGEGSTKGQIQLVQSGPELKKPGETVKISCKASGYTFTDYSINWVKRAPGKGLKWMGWINTETREPAYAYDFRGRFAFSLETSASTAYLQINNLKYEDTATYFCALDYSYAMDYWGQGTSVTVSSTRGMRTEDLPKAVVFLEPQWYRVLEKDSVTLKCQGAYSPEDNSTQWFHNESLISSQASSYFIDAATVDDSGEYRCQTNLSTLSDPVQLEVHIGWLLLQAPRWVFKEEDPIHLRCHSWKNTALHKVTYLQNGKGRKYFHHNSDFYIPKATLKDSGSYFCRGLVGSKNVSSETVNITITQGLAVPTISSFFPPGYQVSFCLVMVLLFAVDTGLYFYV

SEQ ID NO: 10490 - protein, 482 aa, synthetic construct
MALPVTALLLPLALLLHAARPDIQMTQSPSSLSASVGDRVTITCRASSSVSYMHWYQQKPGKAPKLLIYATSNLASGVPSRFSGSGSGTDFTLTISSLQPEDFATYYCQQWTFNPPTFGQGTKLEIKRTVAAGGGGSGGGGSGGGGSQVQLVQSGAEVKKPGASVKVSCKASGYTFTSYNMHWVRQAPGQRLEWMGGIYPGNGDTSYNQKFKGRVTITRDTSASTAYMELSSLRSEDTAVYYCARYDYNYAMDYWGQGTLVTVSSASTRGMRTEDLPKAVVFLEPQWYRVLEKDSVTLKCQGAYSPEDNSTQWFHNESLISSQASSYFIDAATVDDSGEYRCQTNLSTLSDPVQLEVHIGWLLLQAPRWVFKEEDPIHLRCHSWKNTALHKVTYLQNGKGRKYFHHNSDFYIPKATLKDSGSYFCRGLVGSKNVSSETVNITITQGLAVPTISSFFPPGYQVSFCLVMVLLFAVDTGLYFYV

SEQ ID NO: 10491 - protein, 477 aa, synthetic construct
MALPVTALLLPLALLLHAARPEIVLTQSPGTLSLSPGERATLSCRASQSVSSSYLAWYQQKPGQAPRLLIYGASSRATGIPDRFSGSGSGTDFTLTISRLEPEDFAVYYCQQYHHSPLTFGGGTKVEIKRGGGGSGGGGSGGGGSEVQLVESGGGLVQPGGSLRLSCAASGFTFSGRSMNWVRQAPGKGLEWVSYISSDSRTIYYADSVKGRFTISRDNAKNSLYLQMNSLRAEDTAVYYCARGGHGYFDLWGRGTLVTVSSTRGMRTEDLPKAVVFLEPQWYRVLEKDSVTLKCQGAYSPEDNSTQWFHNESLISSQASSYFIDAATVDDSGEYRCQTNLSTLSDPVQLEVHIGWLLLQAPRWVFKEEDPIHLRCHSWKNTALHKVTYLQNGKGRKYFHHNSDFYIPKATLKDSGSYFCRGLVGSKNVSSETVNITITQGLAVPTISSFFPPGYQVSFCLVMVLLFAVDTGLYFYV

SEQ ID NO: 10492 - protein, 480 aa, synthetic construct
MALPVTALLLPLALLLHAARPEIVLTQSPGTLSLSPGERATLSCRASQSVSSDYLAWYQQKPGQAPRLLIYGASRRATGIPDRFSGSGSGTDFTLTISRLEPEDFAVYYCQQYVSYWTFGGGTKVEIKRGGGGSGGGGSGGGGSQVQLVESGGGVVQPGRSLRLSCAASGFTFSSYGMHWVRQAPGKGLEWVAGIWWDGSNEKYADSVKGRFTISRDNSKNTLYLQMNSLRAEDTAVYYCAKEAPYYAKDYMDVWGKGTTVTVSSTRGMRTEDLPKAVVFLEPQWYRVLEKDSVTLKCQGAYSPEDNSTQWFHNESLISSQASSYFIDAATVDDSGEYRCQTNLSTLSDPVQLEVHIGWLLLQAPRWVFKEEDPIHLRCHSWKNTALHKVTYLQNGKGRKYFHHNSDFYIPKATLKDSGSYFCRGLVGSKNVSSETVNITITQGLAVPTISSFFPPGYQVSFCLVMVLLFAVDTGLYFYV

SEQ ID NO: 10493 - protein, 480 aa, synthetic construct
MALPVTALLLPLALLLHAARPDIQMTQSPSSLSASVGDRVTITCRASQDVNTAVAWYQQKPGKAPKLLIYSASFLYSGVPSRFSGSRSGTDFTLTISSLQPEDFATYYCQQHYTTPPTFGQGTKVEIKRTGGGGSGGGGSGGGGSEVQLVESGGGLVQPGGSLRLSCAASGFNIKDTYIHWVRQAPGKGLEWVARIYPTNGYTRYADSVKGRFTISADTSKNTAYLQMNSLRAEDTAVYYCSRWGGWGFYAMDYWGQGTLVTVSSTRGMRTEDLPKAVVFLEPQWYRVLEKDSVTLKCQGAYSPEDNSTQWFHNESLISSQASSYFIDAATVDDSGEYRCQTNLSTLSDPVQLEVHIGWLLLQAPRWVFKEEDPIHLRCHSWKNTALHKVTYLQNGKGRKYFHHNSDFYIPKATLKDSGSYFCRGLVGSKNVSSETVNITITQGLAVPTISSFFPPGYQVSFCLVMVLLFAVDTGLYFYV

SEQ ID NO: 10494 - protein, 475 aa, synthetic construct
MALPVTALLLPLALLLHAARPQVQLVESGGGLVKPGGSLRLSCAASGFTFSDYYMTWIRQAPGKGLEWISYISSSGSTIYYADSVKGRFTISRDNAKNSLYLQMNSLRAEDTAVYYCARDRNSHFDYWGQGTLVTVSSGGGGSGGGGSGGGGSDIQMTQSPSSVSASVGDRVTITCRASQGITRWLAWYQQKPGKAPKLLIYAASVLQSGVPSRFSGSGSGTDFTLTISSLQPEDFATYYCQQSNSFPRTFGQGTKVEIKTRGMRTEDLPKAVVFLEPQWYRVLEKDSVTLKCQGAYSPEDNSTQWFHNESLISSQASSYFIDAATVDDSGEYRCQTNLSTLSDPVQLEVHIGWLLLQAPRWVFKEEDPIHLRCHSWKNTALHKVTYLQNGKGRKYFHHNSDFYIPKATLKDSGSYFCRGLVGSKNVSSETVNITITQGLAVPTISSFFPPGYQVSFCLVMVLLFAVDTGLYFYV

SEQ ID NO: 10495 - protein, 475 aa, synthetic construct
MALPVTALLLPLALLLHAARPQVQLVESGGGLVKPGGSLRLSCAASGFTFSDHYMSWIRQAPGKGLEWFSYISSSGGIIYYADSVKGRFTISRDNAKNSLYLQMNSLRAEDTAVYYCARDVGSHFDYWGQGTLVTVSSGGGGSGGGGSGGGGSDIQMTQSPSSVSASVGDRVTITCRASQDISRWLAWYQQKPGKAPKLLISAASRLQSGVPSRFSGSGSGTDFTLTISSLQPEDFAIYYCQQAKSFPRTFGQGTKVEIKTRGMRTEDLPKAVVFLEPQWYRVLEKDSVTLKCQGAYSPEDNSTQWFHNESLISSQASSYFIDAATVDDSGEYRCQTNLSTLSDPVQLEVHIGWLLLQAPRWVFKEEDPIHLRCHSWKNTALHKVTYLQNGKGRKYFHHNSDFYIPKATLKDSGSYFCRGLVGSKNVSSETVNITITQGLAVPTISSFFPPGYQVSFCLVMVLLFAVDTGLYFYV

SEQ ID NO: 10496 - protein, 487 aa, synthetic construct
MALPVTALLLPLALLLHAARPQVQLVESGGGVVQSGRSLRLSCAASGFTFRNYGMHWVRQAPGKGLEWVAVIWYDGSDKYYADSVRGRFTISRDNSKNTLYLQMNSLRAEDTAVYYCARDGYDILTGNPRDFDYWGQGTLVTVSSGGGGSGGGGSGGGGSDTVMTQTPLSSHVTLGQPASISCRSSQSLVHSDGNTYLSWLQQRPGQPPRLLIYRISRRFSGVPDRFSGSGAGTDFTLEISRVEAEDVGVYYCMQSTHVPRTFGQGTKVEIKTRGMRTEDLPKAVVFLEPQWYRVLEKDSVTLKCQGAYSPEDNSTQWFHNESLISSQASSYFIDAATVDDSGEYRCQTNLSTLSDPVQLEVHIGWLLLQAPRWVFKEEDPIHLRCHSWKNTALHKVTYLQNGKGRKYFHHNSDFYIPKATLKDSGSYFCRGLVGSKNVSSETVNITITQGLAVPTISSFFPPGYQVSFCLVMVLLFAVDTGLYFYV

SEQ ID NO: 10497 - protein, 480 aa, synthetic construct
MALPVTALLLPLALLLHAARPEVQLVESGGGLVQPGGSLRLSCAASGFPFSSYDMHWVRQATGKGLEWVSAIGTAGATYYPGSVKGRFTISRENAKNSLYLQMNSLRAGDTAVYYCARGDYVWGTYRPLFDYWGQGTLVTVSSGGGGSGGGGSGGGGSDIQLTQSPSFLSASVGDRVTITCWASQGINNYLAWYQQKPGKAPKLLIYAASTLQTGVPSRFSGSGSGTEFTLTISSLQPEDFATYYCQQLNSYPLTFGGGTKVEIKTRGMRTEDLPKAVVFLEPQWYRVLEKDSVTLKCQGAYSPEDNSTQWFHNESLISSQASSYFIDAATVDDSGEYRCQTNLSTLSDPVQLEVHIGWLLLQAPRWVFKEEDPIHLRCHSWKNTALHKVTYLQNGKGRKYFHHNSDFYIPKATLKDSGSYFCRGLVGSKNVSSETVNITITQGLAVPTISSFFPPGYQVSFCLVMVLLFAVDTGLYFYV

SEQ ID NO: 10498 - protein, 477 aa, synthetic construct
MALPVTALLLPLALLLHAARPQVQLQESGPGLVKPSETLSLTCTVSGASISSFYWSWIRQPPGKGLEWIGYIYYSGTTNYNPSLKSRVTISVDTSKNQFSLKLSSVTAADTAVYYCARIAVAGFFFDYWGQGTLVTVSSGGGGSGGGGSGGGGSEIVLTQSPGTLSLSPGERATLSCRASQSVNKNYLAWYQQKPGQAPRLLIYGASSRATGIPDRFSGSGSGTDFTLTISRLEPEDFAVYYCQQYDRSPLTFGGGTKVEIKTRGMRTEDLPKAVVFLEPQWYRVLEKDSVTLKCQGAYSPEDNSTQWFHNESLISSQASSYFIDAATVDDSGEYRCQTNLSTLSDPVQLEVHIGWLLLQAPRWVFKEEDPIHLRCHSWKNTALHKVTYLQNGKGRKYFHHNSDFYIPKATLKDSGSYFCRGLVGSKNVSSETVNITITQGLAVPTISSFFPPGYQVSFCLVMVLLFAVDTGLYFYV

SEQ ID NO: 10499 - protein, 486 aa, synthetic construct
MALPVTALLLPLALLLHAARPQVQLVQSGAEVKKPGASVKVSCKASGYTFTNYYMHWVRQAPGLGLEWMGIINPSDGSTSYAQKFQGRVTMTRDTSTNTVYMDLSSLRSEDTAVYYCARGGNSAFYSYYDMDVWGQGTTVTVSSGGGGSGGGGSGGGGSDVVMTQTPLSLPVTLGQPASISCRSSQSLVYRDGNTYLSWFQQRPGQSPRRLIYKVSNWQSGVPDRFSGGGSGTDFTLKISRVEAEDVGVYYCMQGTHWPPTFGQGTKVEIKTRGMRTEDLPKAVVFLEPQWYRVLEKDSVTLKCQGAYSPEDNSTQWFHNESLISSQASSYFIDAATVDDSGEYRCQTNLSTLSDPVQLEVHIGWLLLQAPRWVFKEEDPIHLRCHSWKNTALHKVTYLQNGKGRKYFHHNSDFYIPKATLKDSGSYFCRGLVGSKNVSSETVNITITQGLAVPTISSFFPPGYQVSFCLVMVLLFAVDTGLYFYV

SEQ ID NO: 10500 - protein, 473 aa, synthetic construct
MALPVTALLLPLALLLHAARPQVQLQQSGPELVKPGASVRISCKASGYTFTTYYIHWVKQRPGQGLEWIGWIYPGNVNTNYNEKFKGKATLTADKSSSTAYMQLTSLTSEDSAVYFCARGVYYFDYWGQGTILTVSSGGGGSGGGGSGGGGSIVMTQTPKFLLVSAGDRVTITCKASQSVNNDVSWFQQKPGQSPTLLIYYASNRYTGVPDRFTGSGYGTDFTFTISTVQAEDLAVYFCQQDYSSPYTFGGGTKLEIKTRGMRTEDLPKAVVFLEPQWYRVLEKDSVTLKCQGAYSPEDNSTQWFHNESLISSQASSYFIDAATVDDSGEYRCQTNLSTLSDPVQLEVHIGWLLLQAPRWVFKEEDPIHLRCHSWKNTALHKVTYLQNGKGRKYFHHNSDFYIPKATLKDSGSYFCRGLVGSKNVSSETVNITITQGLAVPTISSFFPPGYQVSFCLVMVLLFAVDTGLYFYV

SEQ ID NO: 10501 - protein, 476 aa, synthetic construct
MALPVTALLLPLALLLHAARPQVQLQESGPGLVKPSQTLSLTCTVSGGSINNNNYYWTWIRQHPGKGLEWIGYIYYSGSTFYNPSLKSRVTISVDTSKTQFSLKLSSVTAADTAVYYCAREDTMTGLDVWGQGTTVTVSSGGGGSGGGGSGGGGSDIQMTQSPSSLSASVGDRVTITCRASQSINNYLNWYQQKPGKAPTLLIYAASSLQSGVPSRFSGSRSGTDFTLTISSLQPEDFAAYFCQQTYSNPTFGQGTKVEVKTRGMRTEDLPKAVVFLEPQWYRVLEKDSVTLKCQGAYSPEDNSTQWFHNESLISSQASSYFIDAATVDDSGEYRCQTNLSTLSDPVQLEVHIGWLLLQAPRWVFKEEDPIHLRCHSWKNTALHKVTYLQNGKGRKYFHHNSDFYIPKATLKDSGSYFCRGLVGSKNVSSETVNITITQGLAVPTISSFFPPGYQVSFCLVMVLLFAVDTGLYFYV

SEQ ID NO: 10502 - protein, 481 aa, synthetic construct
MALPVTALLLPLALLLHAARPSYELTQPPSVSVSPGQTASITCSGDKLGDKYASWYQQKPGQSPVLVIYQDNRRPSGIPERFSGSNSGNTATLTISGTQAMDEADYYCQAWDSDTYVFGTGTKVTVLGQGGGGSGGGGSGGGGSEVQLVQSGAEVKKPGASVKVSCKASGDTFKRYYVHWVRQAPGQGLEWMGIINPSGVSTTYAQKFQGRVTMTRDTSTSTVYMELSSLRSEDTAVYYCAEVRGSGFNYFGMDVWGQGTLVTVSSTRGMRTEDLPKAVVFLEPQWYRVLEKDSVTLKCQGAYSPEDNSTQWFHNESLISSQASSYFIDAATVDDSGEYRCQTNLSTLSDPVQLEVHIGWLLLQAPRWVFKEEDPIHLRCHSWKNTALHKVTYLQNGKGRKYFHHNSDFYIPKATLKDSGSYFCRGLVGSKNVSSETVNITITQGLAVPTISSFFPPGYQVSFCLVMVLLFAVDTGLYFYV

SEQ ID NO: 10503 - protein, 480 aa, synthetic construct
MALPVTALLLPLALLLHAARPEVQLLESGGGLVQPGGSLRLSCAASGFTFSSYAMSWVRQAPGKGLEVVVSAISGGGGRTYYADSVKGRFTISRDNSKNTLYLQMNSLRAEDTAVYYCAREEMAFRAYRFDIWGQGTLVTVSSGGGGSGGGGSGGGGSDIQMTQSPSSLSASVGDRVTITCRASQSISSYLNWYQQKPGKAPKLLIYAASSLQSGVPSRFSGSGSGTDFTLTISSLQPEDFATYYCQQSYITPLTFGGGTKVEIKTRGMRTEDLPKAVVFLEPQWYRVLEKDSVTLKCQGAYSPEDNSTQWFHNESLISSQASSYFIDAATVDDSGEYRCQTNLSTLSDPVQLEVHIGWLLLQAPRWVFKEEDPIHLRCHSWKNTALHKVTYLQNGKGRKYFHHNSDFYIPKATLKDSGSYFCRGLVGSKNVSSETVNITITQGLAVPTISSFFPPGYQVSFCLVMVLLFAVDTGLYFYV

SEQ ID NO: 10504 - protein, 488 aa, synthetic construct
MALPVTALLLPLALLLHAARPDIVLTQSPASLAVSLGQGATISCRASKSVSTSGYTYMHWYQQKPGQPPKLLIYLASNLESGVPARFSGSGSGTDFTLNIHPVEEEDAATYYCQHSGELPPSFGGGTKLEIKRAGGGGSGGGGSGGGGSEVQLVESGGDLVKPGGSLKLSCAVSGFTFSSYGMSWVRQTPDKRLEWVATVSSGGTYTYYPDSVKGRFTISRDNAKNTLYLQMSSLKSEDSAMYYCARHRGNYYATYYYAMDYWGQGTSVTVSSTRGMRTEDLPKAVVFLEPQWYRVLEKDSVTLKCQGAYSPEDNSTQWFHNESLISSQASSYFIDAATVDDSGEYRCQTNLSTLSDPVQLEVHIGWLLLQAPRWVFKEEDPIHLRCHSWKNTALHKVTYLQNGKGRKYFHHNSDFYIPKATLKDSGSYFCRGLVGSKNVSSETVNITITQGLAVPTISSFFPPGYQVSFCLVMVLLFAVDTGLYFYV

SEQ ID NO: 10505 - protein, 482 aa, synthetic construct
MALPVTALLLPLALLLHAARPDIQMTQSPSSLSASVGDRVTITCSASQGIRNYLNWYQQKPGKVPKLLIYYTSRLHSGVPSRFSGSGSGTDFTLTISSLQPEDVATYYCQQYGKLPYTFGQGTKLEIKRTVAAGGGGSGGGGSGGGGSEVQLVESGGGLVQPGGSLRLSCAASGFTFSDAWMDWVRQAPGKGLEWVGEIRSKVNNHETYYAESVKGRFTISRDDSKNSLYLQMNSLKTEDTAVYYCARNDYFDYWGQGTTVTVSSASTRGMRTEDLPKAVVFLEPQWYRVLEKDSVTLKCQGAYSPEDNSTQWFHNESLISSQASSYFIDAATVDDSGEYRCQTNLSTLSDPVQLEVHIGWLLLQAPRWVFKEEDPIHLRCHSWKNTALHKVTYLQNGKGRKYFHHNSDFYIPKATLKDSGSYFCRGLVGSKNVSSETVNITITQGLAVPTISSFFPPGYQVSFCLVMVLLFAVDTGLYFYV

SEQ ID NO: 10506 - protein, 490 aa, synthetic construct
MALPVTALLLPLALLLHAARPEVQLQESGAEVKKPGSSVKVSCKASGFNIKDTYMHWVRQAPGQGLEWMGRIDPANGNSKYVPKFQGRVTITADESTSTAYMELSSLRSEDTAVYYCAPFGYYVSDYAMAYWGQGTTVTVSSASGGGGSGGGGSGGGGSDIVMTQSPDSLAVSLGERATINCRAGESVDIFGVGFLHWYQQKPGQPPKLLIYRASNLESGVPDRFSGSGSGTDFTLTIRPLQAEDVAVYYCQQTNEDPYTFGQGTKLEIKRTVAATRGMRTEDLPKAVVFLEPQWYRVLEKDSVTLKCQGAYSPEDNSTQWFHNESLISSQASSYFIDAATVDDSGEYRCQTNLSTLSDPVQLEVHIGWLLLQAPRWVFKEEDPIHLRCHSWKNTALHKVTYLQNGKGRKYFHHNSDFYIPKATLKDSGSYFCRGLVGSKNVSSETVNITITQGLAVPTISSFFPPGYQVSFCLVMVLLFAVDTGLYFYV

SEQ ID NO: 10507 - protein, 483 aa, synthetic construct
MALPVTALLLPLALLLHAARPQVQLVQSGAEVKKPGSSVKVSCKASGGTFSSYAISWVRQAPGQGLEWMGLIIPRYGKARYAQKFQGRVTITADESTSTAYMELSSLRSEDTAVYYCARNWPYYYMDFWGQGTLVTVSSASGGGGSGGGGSGGGGSDIVLTQSPATLSLSPGERATLSCRASQNIVFNLAWYQQKPGQAPRLLIYDASNRATGVPARFSGSGSGTDFTLTISSLEPEDFAVYYCQQKKSMPLTFGQGTKVEIKRTVAATRGMRTEDLPKAVVFLEPQWYRVLEKDSVTLKCQGAYSPEDNSTQWFHNESLISSQASSYFIDAATVDDSGEYRCQTNLSTLSDPVQLEVHIGWLLLQAPRWVFKEEDPIHLRCHSWKNTALHKVTYLQNGKGRKYFHHNSDFYIPKATLKDSGSYFCRGLVGSKNVSSETVNITITQGLAVPTISSFFPPGYQVSFCLVMVLLFAVDTGLYFYV

SEQ ID NO: 10508 - protein, 486 aa, synthetic construct
MALPVTALLLPLALLLHAARPEVQLVESGGGLVKPGGSLRLSCAASGFTFSNAWMSWVRQAPGKGLEWVGRIKSKTEGGTTDYAAPVKGRFTISRDDSKNTLYLQMNSLKTEDTAVYYCTTPYEWSWYDYWGQGTLVTVSSASGGGGSGGGGSGGGGSQTVVTQEPSLTVSPGGTVTLTCGSSTGAVTTSNYANWVQQKPGQAPRGLIGGTNKRAPGTPARFSGSLLGGKAALTLSGVQPEDEAEYYCALWYSNLWVFGGGTKLTVLTVAATRGMRTEDLPKAVVFLEPQWYRVLEKDSVTLKCQGAYSPEDNSTQWFHNESLISSQASSYFIDAATVDDSGEYRCQTNLSTLSDPVQLEVHIGWLLLQAPRWVFKEEDPIHLRCHSWKNTALHKVTYLQNGKGRKYFHHNSDFYIPKATLKDSGSYFCRGLVGSKNVSSETVNITITQGLAVPTISSFFPPGYQVSFCLVMVLLFAVDTGLYFYV

SEQ ID NO: 10509 - protein, 486 aa, synthetic construct
MALPVTALLLPLALLLHAARPQVQLVQSGAEVKKPGASVKVSCKASGYTFTSYYMHWVRQAPGQGLEWMGIINPSGGSTSYAQKFQGRVTMTHDTSTSTVYMELSSLRSEDTAVYYCARSFFTGFHLDYWGQGTLVTVSSASGGGGSGGGGSGGGGSEIVLTQSPGTLSLSPGERATLSCRASQSVSSSYLAWYQQKPGQAPRLLIYGASSRATGIPDRFSGSGSGTDFTLTISRLEPEDFAVYYCQQYTNEHYYTFGQGTKVEIKRTVAATRGMRTEDLPKAVVFLEPQWYRVLEKDSVTLKCQGAYSPEDNSTQWFHNESLISSQASSYFIDAATVDDSGEYRCQTNLSTLSDPVQLEVHIGWLLLQAPRWVFKEEDPIHLRCHSWKNTALHKVTYLQNGKGRKYFHHNSDFYIPKATLKDSGSYFCRGLVGSKNVSSETVNITITQGLAVPTISSFFPPGYQVSFCLVMVLLFAVDTGLYFYV

SEQ ID NO: 10510 - protein, 492 aa, synthetic construct
MALPVTALLLPLALLLHAARPEIVLTQSPATLSLSPGERATLSCSVSSSISSSNLHWYQQKPGQAPRLLIYGTSNLASGIPARFSGSGSGTDFTLTISSLEPEDFAVYYCQQWSSYPHTFGGGTKVEIKRTVAAGGGGSGGGGSGGGGSQVQLVQSGAEVKKPGASVKVSCKASGYTFTNYLIEWVRQAPGQGLEWMGLINPGSGGTNYNEKFKGRVTMTTDTSTSTAYMELRSLRSDDTAVYYCARRSPLGSWIYYAYDGVAYWGQGTLVTVSSASTRGMRTEDLPKAVVFLEPQWYRVLEKDSVTLKCQGAYSPEDNSTQWFHNESLISSQASSYFIDAATVDDSGEYRCQTNLSTLSDPVQLEVHIGWLLLQAPRWVFKEEDPIHLRCHSWKNTALHKVTYLQNGKGRKYFHHNSDFYIPKATLKDSGSYFCRGLVGSKNVSSETVNITITQGLAVPTISSFFPPGYQVSFCLVMVLLFAVDTGLYFYV

SEQ ID NO: 10511 - protein, 477 aa, synthetic construct
MALPVTALLLPLALLLHAARPDIQMTQSPSSLSASVGDRVTITCKAGQNVGTSVAWYQQKPGKAPKLLIYSASYRYSGVPSRFSGSGSGTDFTLTISSLQPEDFATYYCQQYITYPYTFGQGTKVEIKRTVAAGGGGSGGGGSGGGGSEVQLVESGGGLVQPGGSLRLSCAASGFTFSRYWMSWVRQAPGKGLEWVAEINPDSSTIQYTPSLKARFTLSVDRSKNTLYLQMNSLRAEDTAVYYCARPAYWGQGTLVTVSSASTRGMRTEDLPKAVVFLEPQWYRVLEKDSVTLKCQGAYSPEDNSTQWFHNESLISSQASSYFIDAATVDDSGEYRCQTNLSTLSDPVQLEVHIGWLLLQAPRWVFKEEDPIHLRCHSWKNTALHKVTYLQNGKGRKYFHHNSDFYIPKATLKDSGSYFCRGLVGSKNVSSETVNITITQGLAVPTISSFFPPGYQVSFCLVMVLLFAVDTGLYFYV

SEQ ID NO: 10512 - protein, 484 aa, synthetic construct
MALPVTALLLPLALLLHAARPDIQMTQSPSSLSASVGDRVTITCSASQDIGNFLNWYQQKPGKAPKLLIYYTSSLYSGVPSRFSGSGSGTDFTLTISSLQPEDFATYYCQQYSKLPLTFGQGTKLEIKRTVAAGGGGSGGGGSGGGGSQVQLVQSGAEVKKPGASVKVSCKASGYTFTGYNIHWVRQAPGQRLEWMGAIYPGNGDTSYKQKFRGRVTITRDTSASTAYMELSSLRSEDTAVYYCARGETARATFAYWGQGTLVTVSSASTRGMRTEDLPKAVVFLEPQWYRVLEKDSVTLKCQGAYSPEDNSTQWFHNESLISSQASSYFIDAATVDDSGEYRCQTNLSTLSDPVQLEVHIGWLLLQAPRWVFKEEDPIHLRCHSWKNTALHKVTYLQNGKGRKYFHHNSDFYIPKATLKDSGSYFCRGLVGSKNVSSETVNITITQGLAVPTISSFFPPGYQVSFCLVMVLLFAVDTGLYFYV

SEQ ID NO: 10513 - protein, 348 aa, synthetic construct
MALPVTALLLPLALLLHAARPDVQVTQSPSSLSASVGDRVTITCRSSQSLANSYGNTFLSWYLHKPGKAPQLLIYGISNRFSGVPDRFSGSGSGTDFTLTISSLQPEDFATYYCLQGTHQPYTFGQGTKVEIKTRGMRTEDLPKAVVFLEPQWYRVLEKDSVTLKCQGAYSPEDNSTQWFHNESLISSQASSYFIDAATVDDSGEYRCQTNLSTLSDPVQLEVHIGWLLLQAPRWVFKEEDPIHLRCHSWKNTALHKVTYLQNGKGRKYFHHNSDFYIPKATLKDSGSYFCRGLVGSKNVSSETVNITITQGLAVPTISSFFPPGYQVSFCLVMVLLFAVDTGLYFYV

SEQ ID NO: 10514 - protein, 343 aa, synthetic construct
MALPVTALLLPLALLLHAARPDIQMTQSPSSLSASVGDRVTITCRASQDISNYLNWYQQKPGKAVKLLIYYTSILHSGVPSRFSGSGSGTDYTLTISSLQPEDFATYFCQQGNTLPWTFGGGTKVEIKTRGMRTEDLPKAVVFLEPQWYRVLEKDSVTLKCQGAYSPEDNSTQWFHNESLISSQASSYFIDAATVDDSGEYRCQTNLSTLSDPVQLEVHIGWLLLQAPRWVFKEEDPIHLRCHSWKNTALHKVTYLQNGKGRKYFHHNSDFYIPKATLKDSGSYFCRGLVGSKNVSSETVNITITQGLAVPTISSFFPPGYQVSFCLVMVLLFAVDTGLYFYV

SEQ ID NO: 10515 - protein, 344 aa, synthetic construct
MALPVTALLLPLALLLHAARPDIVMTQSQRFMTTSVGDRVSVTCKASQSVDSNVAWYQQKPRQSPKALIFSASLRFSGVPARFTGSGSGTDFTLTISNLQSEDLAEYFCQQYNNYPLTFGAGTKLELKRTRGMRTEDLPKAVVFLEPQWYRVLEKDSVTLKCQGAYSPEDNSTQWFHNESLISSQASSYFIDAATVDDSGEYRCQTNLSTLSDPVQLEVHIGWLLLQAPRWVFKEEDPIHLRCHSWKNTALHKVTYLQNGKGRKYFHHNSDFYIPKATLKDSGSYFCRGLVGSKNVSSETVNITITQGLAVPTISSFFPPGYQVSFCLVMVLLFAVDTGLYFYV

SEQ ID NO: 10516 - protein, 344 aa, synthetic construct
MALPVTALLLPLALLLHAARPDIQMTQSPSSLSASVGDRVTITCRASQDISNYLNWYQQKPGKAPKLLIYYTSILHSGVPSRFSGSGSGTDFTLTISSLQPEDFATYYCQQGNTLPWTFGQGTKVEIKRTRGMRTEDLPKAVVFLEPQWYRVLEKDSVTLKCQGAYSPEDNSTQWFHNESLISSQASSYFIDAATVDDSGEYRCQTNLSTLSDPVQLEVHIGWLLLQAPRWVFKEEDPIHLRCHSWKNTALHKVTYLQNGKGRKYFHHNSDFYIPKATLKDSGSYFCRGLVGSKNVSSETVNITITQGLAVPTISSFFPPGYQVSFCLVMVLLFAVDTGLYFYV

SEQ ID NO: 10517 - protein, 344 aa, synthetic construct
MALPVTALLLPLALLLHAARPDIQMTQSPSSLSASVGDRVTITCKASDHINNWLAWYQQKPGKAPKLLIYGATTLETGVPSRFSGSGSGTDFTLTISSLQPEDFATYYCQQSWNTPWTFGQGTKVEIKRTRGMRTEDLPKAVVFLEPQWYRVLEKDSVTLKCQGAYSPEDNSTQWFHNESLISSQASSYFIDAATVDDSGEYRCQTNLSTLSDPVQLEVHIGWLLLQAPRWVFKEEDPIHLRCHSWKNTALHKVTYLQNGKGRKYFHHNSDFYIPKATLKDSGSYFCRGLVGSKNVSSETVNITITQGLAVPTISSFFPPGYQVSFCLVMVLLFAVDTGLYFYV

SEQ ID NO: 10518 - protein, 344 aa, synthetic construct
MALPVTALLLPLALLLHAARPSYVLTQPPSVSVAPGQTARITCGGNNIGSKSVHWYQQPPGQAPVVVVYDDSDRPSGIPERFSGSNSGNTATLTISRVEAGDEAVYYCQVWDSSSDHVVFGGGTKLTVLTRGMRTEDLPKAVVFLEPQWYRVLEKDSVTLKCQGAYSPEDNSTQWFHNESLISSQASSYFIDAATVDDSGEYRCQTNLSTLSDPVQLEVHIGWLLLQAPRWVFKEEDPIHLRCHSWKNTALHKVTYLQNGKGRKYFHHNSDFYIPKATLKDSGSYFCRGLVGSKNVSSETVNITITQGLAVPTISSFFPPGYQVSFCLVMVLLFAVDTGLYFYV

SEQ ID NO: 10519 - protein, 344 aa, synthetic construct
MALPVTALLLPLALLLHAARPDIQMTQSPSSLSASVGDRVTITCMASEDIYIRLAWYQQKPGKAPKLLIYAATSLETGVPSRFSGSGSGTDFTLTISSLQPEDFATYYCQQYWSSPWTFGQGTKVEIKRTRGMRTEDLPKAVVFLEPQWYRVLEKDSVTLKCQGAYSPEDNSTQWFHNESLISSQASSYFIDAATVDDSGEYRCQTNLSTLSDPVQLEVHIGWLLLQAPRWVFKEEDPIHLRCHSWKNTALHKVTYLQNGKGRKYFHHNSDFYIPKATLKDSGSYFCRGLVGSKNVSSETVNITITQGLAVPTISSFFPPGYQVSFCLVMVLLFAVDTGLYFYV

SEQ ID NO: 10520 - protein, 348 aa, synthetic construct
MALPVTALLLPLALLLHAARPDIQMTQSPSSVSASVGDRVTITCRASESVDNYGISFMNWYQQKPGKAPKLLISAASNRATGVPSRFSGSGSGTDFTLTISSLQPEDFAIYYCQQSKEVPWTFGQGTKVEIKRTRGMRTEDLPKAVVFLEPQWYRVLEKDSVTLKCQGAYSPEDNSTQWFHNESLISSQASSYFIDAATVDDSGEYRCQTNLSTLSDPVQLEVHIGWLLLQAPRWVFKEEDPIHLRCHSWKNTALHKVTYLQNGKGRKYFHHNSDFYIPKATLKDSGSYFCRGLVGSKNVSSETVNITITQGLAVPTISSFFPPGYQVSFCLVMVLLFAVDTGLYFYV

SEQ ID NO: 10521 - protein, 348 aa, synthetic construct
MALPVTALLLPLALLLHAARPDIQLTQSPSSLSASVGDRVTITCRASKSVSTSGYSYMHWYQQKPGKAPKLLIYLVSNLESGVPSRFSGSGSGTDFTLTISSLQPEDFATYYCQQFSELPWTFGQGTKVEIKRTRGMRTEDLPKAVVFLEPQWYRVLEKDSVTLKCQGAYSPEDNSTQWFHNESLISSQASSYFIDAATVDDSGEYRCQTNLSTLSDPVQLEVHIGWLLLQAPRWVFKEEDPIHLRCHSWKNTALHKVTYLQNGKGRKYFHHNSDFYIPKATLKDSGSYFCRGLVGSKNVSSETVNITITQGLAVPTISSFFPPGYQVSFCLVMVLLFAVDTGLYFYV

SEQ ID NO: 10522 - protein, 345 aa, synthetic construct
MALPVTALLLPLALLLHAARPDIQMTQSPSSVSASVGDRVTITCRASQFISSSYLSWYQQKPGKAPKLLISGSSSRATGVPSRFSGSGSGTDFTLTISSLQPEDFAIYYCQQLYSSPMTFGQGTKVEIKRTRGMRTEDLPKAVVFLEPQWYRVLEKDSVTLKCQGAYSPEDNSTQWFHNESLISSQASSYFIDAATVDDSGEYRCQTNLSTLSDPVQLEVHIGWLLLQAPRWVFKEEDPIHLRCHSWKNTALHKVTYLQNGKGRKYFHHNSDFYIPKATLKDSGSYFCRGLVGSKNVSSETVNITITQGLAVPTISSFFPPGYQVSFCLVMVLLFAVDTGLYFYV

SEQ ID NO: 10523 - protein, 359 aa, synthetic construct
MALPVTALLLPLALLLHAARPQVQLVESGGGLVQAGDSVTLSCTASGRTFSSYALAWFRQRPGKEREFVAGLRWGGPTNYADSVKDRFTISGDSAKHTMYLQMNSLKPEDTAVYYCGYNPGGWAVPSQYEYDSWGQGTQVTVSSTRGMRTEDLPKAVVFLEPQWYRVLEKDSVTLKCQGAYSPEDNSTQWFHNESLISSQASSYFIDAATVDDSGEYRCQTNLSTLSDPVQLEVHIGWLLLQAPRWVFKEEDPIHLRCHSWKNTALHKVTYLQNGKGRKYFHHNSDFYIPKATLKDSGSYFCRGLVGSKNVSSETVNITITQGLAVPTISSFFPPGYQVSFCLVMVLLFAVDTGLYFYV

SEQ ID NO: 10524 - protein, 354 aa, synthetic construct
MALPVTALLLPLALLLHAARPQVQLQESGGGLAQAGGSLRLSCAASGRTFSMGWFRQAPGKEREFVAAITYSGGSPYYASSVRGRFTISRDNAKNTVYLQMNSLKPEDTAVYYCAANPTYGSDWNAENWGQGTQVTVSSTRGMRTEDLPKAVVFLEPQWYRVLEKDSVTLKCQGAYSPEDNSTQWFHNESLISSQASSYFIDAATVDDSGEYRCQTNLSTLSDPVQLEVHIGWLLLQAPRWVFKEEDPIHLRCHSWKNTALHKVTYLQNGKGRKYFHHNSDFYIPKATLKDSGSYFCRGLVGSKNVSSETVNITITQGLAVPTISSFFPPGYQVSFCLVMVLLFAVDTGLYFYV

SEQ ID NO: 10525 - protein, 352 aa, synthetic construct
MALPVTALLLPLALLLHAARPEVQLVESGGGLVQPGGSLRLSCAASGFSFSDFWMSWVRQAPGKGLEWVATISQAGSEKDYVDSVKGRFTISRDNAKKSLYLQMNSLRAEDTAVYYCASGVYSFDYRGQGTLVTVSSTRGMRTEDLPKAVVFLEPQWYRVLEKDSVTLKCQGAYSPEDNSTQWFHNESLISSQASSYFIDAATVDDSGEYRCQTNLSTLSDPVQLEVHIGWLLLQAPRWVFKEEDPIHLRCHSWKNTALHKVTYLQNGKGRKYFHHNSDFYIPKATLKDSGSYFCRGLVGSKNVSSETVNITITQGLAVPTISSFFPPGYQVSFCLVMVLLFAVDTGLYFYV

SEQ ID NO: 10526 - protein, 352 aa, synthetic construct
MALPVTALLLPLALLLHAARPEVQLVESGGGLVQPGGSLRLSCAASGFTFSNYWMSWVRQAPGKGQEWVATINQDGSDKDYVDSVKGRFTISRDNAKKSLYLQMNSLRAEDTAVYYCASGVYSFDYRGQGTLVTVSSTRGMRTEDLPKAVVFLEPQWYRVLEKDSVTLKCQGAYSPEDNSTQWFHNESLISSQASSYFIDAATVDDSGEYRCQTNLSTLSDPVQLEVHIGWLLLQAPRWVFKEEDPIHLRCHSWKNTALHKVTYLQNGKGRKYFHHNSDFYIPKATLKDSGSYFCRGLVGSKNVSSETVNITITQGLAVPTISSFFPPGYQVSFCLVMVLLFAVDTGLYFYV

SEQ ID NO: 10527 - protein, 352 aa, synthetic construct
MALPVTALLLPLALLLHAARPEVQLVESGGGLVQPGGSLRLSCAASGIDFSRYWMSWVRQAPGKGLEWVATISQAGSEKDYVDSVKGRFTISRDNAKKSLYLQMNSLRAEDTAVYYCASGVYSFDYRGQGTLVTVSSTRGMRTEDLPKAVVFLEPQWYRVLEKDSVTLKCQGAYSPEDNSTQWFHNESLISSQASSYFIDAATVDDSGEYRCQTNLSTLSDPVQLEVHIGWLLLQAPRWVFKEEDPIHLRCHSWKNTALHKVTYLQNGKGRKYFHHNSDFYIPKATLKDSGSYFCRGLVGSKNVSSETVNITITQGLAVPTISSFFPPGYQVSFCLVMVLLFAVDTGLYFYV

SEQ ID NO: 10528 - protein, 352 aa, synthetic construct
MALPVTALLLPLALLLHAARPEVQLVESGGGLVQPGGSLRLSCAASGIDFSRYWMSWVRQAPGKGQEWVATINQDGSDKDYVDSVKGRFTISRDNAKKSLYLQMNSLRAEDTAVYYCASGVYSFDYRGQGTLVTVSSTRGMRTEDLPKAVVFLEPQWYRVLEKDSVTLKCQGAYSPEDNSTQWFHNESLISSQASSYFIDAATVDDSGEYRCQTNLSTLSDPVQLEVHIGWLLLQAPRWVFKEEDPIHLRCHSWKNTALHKVTYLQNGKGRKYFHHNSDFYIPKATLKDSGSYFCRGLVGSKNVSSETVNITITQGLAVPTISSFFPPGYQVSFCLVMVLLFAVDTGLYFYV

SEQ ID NO: 10529 - protein, 356 aa, synthetic construct
MALPVTALLLPLALLLHAARPEVQLVESGGGLVQPGGSLRLSCTFSGGTFSSYTMGWFRQAPGKEREFVAEVRWGGVTTYSNSLKDRFSISEDSVKNAVYLQMNSLKPEDTAVYYCAAVRQMYMTVVPDYWGQGTLVTVSSTRGMRTEDLPKAVVFLEPQWYRVLEKDSVTLKCQGAYSPEDNSTQWFHNESLISSQASSYFIDAATVDDSGEYRCQTNLSTLSDPVQLEVHIGWLLLQAPRWVFKEEDPIHLRCHSWKNTALHKVTYLQNGKGRKYFHHNSDFYIPKATLKDSGSYFCRGLVGSKNVSSETVNITITQGLAVPTISSFFPPGYQVSFCLVMVLLFAVDTGLYFYV

SEQ ID NO: 10530 - protein, 354 aa, synthetic construct
MALPVTALLLPLALLLHAARPEVQLVESGGGLVQAGGSLRLSCAASGRTFSMGWFRQAPGKEREFVAAITYSGGSPYYADSVKGRFTISRDNAKNTVYLQMNSLKPEDTAVYYCAANPTYGSDWNAENWGQGTQVTVSSTRGMRTEDLPKAVVFLEPQWYRVLEKDSVTLKCQGAYSPEDNSTQWFHNESLISSQASSYFIDAATVDDSGEYRCQTNLSTLSDPVQLEVHIGWLLLQAPRWVFKEEDPIHLRCHSWKNTALHKVTYLQNGKGRKYFHHNSDFYIPKATLKDSGSYFCRGLVGSKNVSSETVNITITQGLAVPTISSFFPPGYQVSFCLVMVLLFAVDTGLYFYV

SEQ ID NO: 10531 - protein, 354 aa, synthetic construct
MALPVTALLLPLALLLHAARPQLQLQESGPGLVKPSETLSLTCTVSGGSISSGDYYWGWIRQPPGKGLEWIGHIYYSGATYYNPSLKSRVTISVDTSRNQFSLKLSSVTAADTAVYYCTRDDSSNWRSRGQGTLVTVSSTRGMRTEDLPKAVVFLEPQWYRVLEKDSVTLKCQGAYSPEDNSTQWFHNESLISSQASSYFIDAATVDDSGEYRCQTNLSTLSDPVQLEVHIGWLLLQAPRWVFKEEDPIHLRCHSWKNTALHKVTYLQNGKGRKYFHHNSDFYIPKATLKDSGSYFCRGLVGSKNVSSETVNITITQGLAVPTISSFFPPGYQVSFCLVMVLLFAVDTGLYFYV

SEQ ID NO: 10532 - protein, 354 aa, synthetic construct
MALPVTALLLPLALLLHAARPQLQLQESGPGLVKPSETLSLTCTVSGDSISSGDYYWGWIRQPPGKGLEWIGHIYYSGVTYYNPSLKSRVTISVDTSRNQFSLKLSSVTAADTAVYYCTREDSSNWRSRGQGTLVTVSSTRGMRTEDLPKAVVFLEPQWYRVLEKDSVTLKCQGAYSPEDNSTQWFHNESLISSQASSYFIDAATVDDSGEYRCQTNLSTLSDPVQLEVHIGWLLLQAPRWVFKEEDPIHLRCHSWKNTALHKVTYLQNGKGRKYFHHNSDFYIPKATLKDSGSYFCRGLVGSKNVSSETVNITITQGLAVPTISSFFPPGYQVSFCLVMVLLFAVDTGLYFYV

SEQ ID NO: 10533 - protein, 354 aa, synthetic construct
MALPVTALLLPLALLLHAARPQLQLQESGPGLVKPSETLSLTCTVSGGSISSGDYYWGWIRQPPGKGLEWIGSISYSGSTYYNPSLKSRVTISVDTSRNQFSLKLSSVTAADTAVYYCTREDSSNWRSRGQGTLVTVSSTRGMRTEDLPKAVVFLEPQWYRVLEKDSVTLKCQGAYSPEDNSTQWFHNESLISSQASSYFIDAATVDDSGEYRCQTNLSTLSDPVQLEVHIGWLLLQAPRWVFKEEDPIHLRCHSWKNTALHKVTYLQNGKGRKYFHHNSDFYIPKATLKDSGSYFCRGLVGSKNVSSETVNITITQGLAVPTISSFFPPGYQVSFCLVMVLLFAVDTGLYFYV

SEQ ID NO: 10534 - protein, 360 aa, synthetic construct
MALPVTALLLPLALLLHAARPQLQLQESGPGLVKPSETLALTCNVSGGSISSSSYYWGWIRQPPGKRLEWIGSIYYSGSTYFNPSLKSRVTISVDTSKNQFSLKLSSVTAADTAVYYCAGGDYYGPVGQWPSDYRGQGTLVTVSSTRGMRTEDLPKAVVFLEPQWYRVLEKDSVTLKCQGAYSPEDNSTQWFHNESLISSQASSYFIDAATVDDSGEYRCQTNLSTLSDPVQLEVHIGWLLLQAPRWVFKEEDPIHLRCHSWKNTALHKVTYLQNGKGRKYFHHNSDFYIPKATLKDSGSYFCRGLVGSKNVSSETVNITITQGLAVPTISSFFPPGYQVSFCLVMVLLFAVDTGLYFYV

SEQ ID NO: 10535 - protein, 366 aa, synthetic construct
MALPVTALLLPLALLLHAARPEVQLLESGGGLVQPGGSLRLSCAASGFIFSSYAMSWVRQAPGKGQEWVSGVSGTGVNTYYADSVKGRFTISRDNSKNTLYLQMNSLRAEDTAVYYCASGKGWDSGSWYEDYRGQGTLVTVSSTRPRLCLLTRGMRTEDLPKAVVFLEPQWYRVLEKDSVTLKCQGAYSPEDNSTQWFHNESLISSQASSYFIDAATVDDSGEYRCQTNLSTLSDPVQLEVHIGWLLLQAPRWVFKEEDPIHLRCHSWKNTALHKVTYLQNGKGRKYFHHNSDFYIPKATLKDSGSYFCRGLVGSKNVSSETVNITITQGLAVPTISSFFPPGYQVSFCLVMVLLFAVDTGLYFYV

SEQ ID NO: 10536 - protein, 360 aa, synthetic construct
MALPVTALLLPLALLLHAARPQLQLQESGPGLVKPSETLSLTCTVSGGSVSSSSYYWGWIRQPPGKRLELIGSIYYGGSTYFNPSLKSRVTISVDTSKNQFSLKLSSVTAADTAVYYCAGGDTYGPVGQWPSDYRGQGTLVTVSSTRGMRTEDLPKAVVFLEPQWYRVLEKDSVTLKCQGAYSPEDNSTQWFHNESLISSQASSYFIDAATVDDSGEYRCQTNLSTLSDPVQLEVHIGWLLLQAPRWVFKEEDPIHLRCHSWKNTALHKVTYLQNGKGRKYFHHNSDFYIPKATLKDSGSYFCRGLVGSKNVSSETVNITITQGLAVPTISSFFPPGYQVSFCLVMVLLFAVDTGLYFYV

SEQ ID NO: 10537 - protein, 358 aa, synthetic construct
MALPVTALLLPLALLLHAARPEVQLLESGGGLVQPGGSLRLSCAASGFIFSIYAMSWVRQAPGKGLEWVSGISGSGVNTYYADSVKGRFIISRDNSRNTVYLQMNSLRADDTAVYHCANGKGWDGNTWYEDYRGQGTLVTVSSTRGMRTEDLPKAVVFLEPQWYRVLEKDSVTLKCQGAYSPEDNSTQWFHNESLISSQASSYFIDAATVDDSGEYRCQTNLSTLSDPVQLEVHIGWLLLQAPRWVFKEEDPIHLRCHSWKNTALHKVTYLQNGKGRKYFHHNSDFYIPKATLKDSGSYFCRGLVGSKNVSSETVNITITQGLAVPTISSFFPPGYQVSFCLVMVLLFAVDTGLYFYV

SEQ ID NO: 10538 - protein, 353 aa, synthetic construct
MALPVTALLLPLALLLHAARPEVQVLESGGGLVQPGGSLRLSCAASGFTFSNFAMSWVRQAPGKGLEWVSTISGSAGTTDYADSVKGRFTISRDNSKKTLYLQMNSLRVEDTAVYYCADGRGPFFDYRGQGTLVTVSSTRGMRTEDLPKAVVFLEPQWYRVLEKDSVTLKCQGAYSPEDNSTQWFHNESLISSQASSYFIDAATVDDSGEYRCQTNLSTLSDPVQLEVHIGWLLLQAPRWVFKEEDPIHLRCHSWKNTALHKVTYLQNGKGRKYFHHNSDFYIPKATLKDSGSYFCRGLVGSKNVSSETVNITITQGLAVPTISSFFPPGYQVSFCLVMVLLFAVDTGLYFYV

SEQ ID NO: 10539 - protein, 355 aa, synthetic construct
MALPVTALLLPLALLLHAARPEVQLVESGGGLVQPGGSLRLSCAASGFNIKDTCIGWVRRAPGKEEELVAKICKYSGHTRYADSVKGRFTISADTSKNTAYLQMNSLRAEDTAVYYCAAVSVRDGHYNYWGQGTTVTVSSTRGMRTEDLPKAVVFLEPQWYRVLEKDSVTLKCQGAYSPEDNSTQWFHNESLISSQASSYFIDAATVDDSGEYRCQTNLSTLSDPVQLEVHIGWLLLQAPRWVFKEEDPIHLRCHSWKNTALHKVTYLQNGKGRKYFHHNSDFYIPKATLKDSGSYFCRGLVGSKNVSSETVNITITQGLAVPTISSFFPPGYQVSFCLVMVLLFAVDTGLYFYV

SEQ ID NO: 10540 - protein, 355 aa, synthetic construct
MALPVTALLLPLALLLHAARPEVQLVESGGGLVQPGGSLRLSCAASGFNIKDTCIGWVRRAPGKEEELVADICPYKGSTRYADSVKGRFTISADTSKNTAYLQMNSLRAEDTAVYYCAIVSARDGYYNYWGQGTTVTVSSTRGMRTEDLPKAVVFLEPQWYRVLEKDSVTLKCQGAYSPEDNSTQWFHNESLISSQASSYFIDAATVDDSGEYRCQTNLSTLSDPVQLEVHIGWLLLQAPRWVFKEEDPIHLRCHSWKNTALHKVTYLQNGKGRKYFHHNSDFYIPKATLKDSGSYFCRGLVGSKNVSSETVNITITQGLAVPTISSFFPPGYQVSFCLVMVLLFAVDTGLYFYV

SEQ ID NO: 10541 - protein, 355 aa, synthetic construct
MALPVTALLLPLALLLHAARPEVQLLESGGGLVQPGGSLRLSCAASGFTFSSYAMSWVRQAPGKGLEWVSAITGSGGSTYYADSVKGRFTISRDNSKNTLYLQMNSLRAEDTAVYYCAKDEDGGSLLGHRGQGTLVTVSSTRGMRTEDLPKAVVFLEPQWYRVLEKDSVTLKCQGAYSPEDNSTQWFHNESLISSQASSYFIDAATVDDSGEYRCQTNLSTLSDPVQLEVHIGWLLLQAPRWVFKEEDPIHLRCHSWKNTALHKVTYLQNGKGRKYFHHNSDFYIPKATLKDSGSYFCRGLVGSKNVSSETVNITITQGLAVPTISSFFPPGYQVSFCLVMVLLFAVDTGLYFYV

SEQ ID NO: 10542 - protein, 355 aa, synthetic construct
MALPVTALLLPLALLLHAARPEVQLLESGGGLIQPGGSLRLSCAASGFTFSSHAMTWVRQAPGKGLEWVSAISSGGSYTYYADSVKGRFTISRDNSKNTLYLQMNSLRAEDTAVYYCAKDEDGGSLLGHRGQGTLVTVSSTRGMRTEDLPKAVVFLEPQWYRVLEKDSVTLKCQGAYSPEDNSTQWFHNESLISSQASSYFIDAATVDDSGEYRCQTNLSTLSDPVQLEVHIGWLLLQAPRWVFKEEDPIHLRCHSWKNTALHKVTYLQNGKGRKYFHHNSDFYIPKATLKDSGSYFCRGLVGSKNVSSETVNITITQGLAVPTISSFFPPGYQVSFCLVMVLLFAVDTGLYFYV

SEQ ID NO: 10543 - protein, 355 aa, synthetic construct
MALPVTALLLPLALLLHAARPEVQLVESGGGLVQPGGSLRLSCAASGFSFSDFWMSWVRQAPGKGLEWVSAISGSGDYTHYADSVKGRFTISRDNSKNTVYLQMNSLRAEDSAVYYCAKDEDGGSLLGHRGQGTLVTVSSTRGMRTEDLPKAVVFLEPQWYRVLEKDSVTLKCQGAYSPEDNSTQWFHNESLISSQASSYFIDAATVDDSGEYRCQTNLSTLSDPVQLEVHIGWLLLQAPRWVFKEEDPIHLRCHSWKNTALHKVTYLQNGKGRKYFHHNSDFYIPKATLKDSGSYFCRGLVGSKNVSSETVNITITQGLAVPTISSFFPPGYQVSFCLVMVLLFAVDTGLYFYV

SEQ ID NO: 10544 - protein, 357 aa, synthetic construct
MALPVTALLLPLALLLHAARPEVQLLESGGGLVQPGGSLRLSCAASGFAFSIYDMSWVRQAPGKGLEWVSSISGSGDYIYYADSVKGRFTISRDISKNTLYLQMNSLRAEDTAVYYCAKEGTGANSSLADYRGQGTLVTVSSTRGMRTEDLPKAVVFLEPQWYRVLEKDSVTLKCQGAYSPEDNSTQWFHNESLISSQASSYFIDAATVDDSGEYRCQTNLSTLSDPVQLEVHIGWLLLQAPRWVFKEEDPIHLRCHSWKNTALHKVTYLQNGKGRKYFHHNSDFYIPKATLKDSGSYFCRGLVGSKNVSSETVNITITQGLAVPTISSFFPPGYQVSFCLVMVLLFAVDTGLYFYV

SEQ ID NO: 10545 - protein, 357 aa, synthetic construct
MALPVTALLLPLALLLHAARPEVQLLESGGGLVQPGGSLRLSCAASGFTFSSYAMSWVRQAPGKGLEWVSSISGSGDYIYYADSVKGRFTISRDISKNTLYLQMNSLRAEDTAVYYCAKEGTGANSSLADYRGQGTLVTVSSTRGMRTEDLPKAVVFLEPQWYRVLEKDSVTLKCQGAYSPEDNSTQWFHNESLISSQASSYFIDAATVDDSGEYRCQTNLSTLSDPVQLEVHIGWLLLQAPRWVFKEEDPIHLRCHSWKNTALHKVTYLQNGKGRKYFHHNSDFYIPKATLKDSGSYFCRGLVGSKNVSSETVNITITQGLAVPTISSFFPPGYQVSFCLVMVLLFAVDTGLYFYV

SEQ ID NO: 10546 - protein, 354 aa, synthetic construct
MALPVTALLLPLALLLHAARPQVQLVESGGGLVQPGGSLRLSCAASGFTFTNHAMSWVRQAPGKGLELVSSISGNGRTTYYADSVKGRFTISRDISKNTLDLQMNSLRAEDTAVYYCAKDGGETLVDSRGQGTLVTVSSTRGMRTEDLPKAVVFLEPQWYRVLEKDSVTLKCQGAYSPEDNSTQWFHNESLISSQASSYFIDAATVDDSGEYRCQTNLSTLSDPVQLEVHIGWLLLQAPRWVFKEEDPIHLRCHSWKNTALHKVTYLQNGKGRKYFHHNSDFYIPKATLKDSGSYFCRGLVGSKNVSSETVNITITQGLAVPTISSFFPPGYQVSFCLVMVLLFAVDTGLYFYV

SEQ ID NO: 10547 - protein, 355 aa, synthetic construct
MALPVTALLLPLALLLHAARPEVQLLESGGGLIQPGGSLRLSCAASGFTFSSHAMTWVRQAPGKGLEWVSAISGSGDYTHYADSVKGRFTISRDNSKNTVYLQMNSLRAEDSAVYYCAKDEDGGSLLGHRGQGTLVTVSSTRGMRTEDLPKAVVFLEPQWYRVLEKDSVTLKCQGAYSPEDNSTQWFHNESLISSQASSYFIDAATVDDSGEYRCQTNLSTLSDPVQLEVHIGWLLLQAPRWVFKEEDPIHLRCHSWKNTALHKVTYLQNGKGRKYFHHNSDFYIPKATLKDSGSYFCRGLVGSKNVSSETVNITITQGLAVPTISSFFPPGYQVSFCLVMVLLFAVDTGLYFYV

SEQ ID NO: 10548 - protein, 356 aa, synthetic construct
MALPVTALLLPLALLLHAARPQVQLQESGGGLVQAGDSLRLSCAASGRAVSSLFMGWFRRAPGKERELVAAISRYSLYTYYADSVKGRFTISADNAKNAVYLQMNSLKPEDTAVYYCASKLEYTSNDYDSWGQGTQVTVSSTRGMRTEDLPKAVVFLEPQWYRVLEKDSVTLKCQGAYSPEDNSTQWFHNESLISSQASSYFIDAATVDDSGEYRCQTNLSTLSDPVQLEVHIGWLLLQAPRWVFKEEDPIHLRCHSWKNTALHKVTYLQNGKGRKYFHHNSDFYIPKATLKDSGSYFCRGLVGSKNVSSETVNITITQGLAVPTISSFFPPGYQVSFCLVMVLLFAVDTGLYFYV

SEQ ID NO: 10549 - protein, 356 aa, synthetic construct
MALPVTALLLPLALLLHAARPEVQLQESGGGLVQPGGSLRLSCAASGRTFSSLFMGWFRQAPGKERELVAAISRYSLYTYYADSVKGRFTISADNAKNAVYLQMNSLKPEDTAVYYCASKLEYTSNDYDSWGQGTQVTVSSTRGMRTEDLPKAVVFLEPQWYRVLEKDSVTLKCQGAYSPEDNSTQWFHNESLISSQASSYFIDAATVDDSGEYRCQTNLSTLSDPVQLEVHIGWLLLQAPRWVFKEEDPIHLRCHSWKNTALHKVTYLQNGKGRKYFHHNSDFYIPKATLKDSGSYFCRGLVGSKNVSSETVNITITQGLAVPTISSFFPPGYQVSFCLVMVLLFAVDTGLYFYV

SEQ ID NO: 10550 - protein, 356 aa, synthetic construct
MALPVTALLLPLALLLHAARPEVQLQESGGGLVQPGGSLRLSCAASGRTFSSLFMGWVRQAPGKGLELVSAISRYSLYTYYADSVKGRFTISRDNAKNTLYLQMNSLRPEDTAVYYCASKLEYTSNDYDSWGQGTLVTVSSTRGMRTEDLPKAVVFLEPQWYRVLEKDSVTLKCQGAYSPEDNSTQWFHNESLISSQASSYFIDAATVDDSGEYRCQTNLSTLSDPVQLEVHIGWLLLQAPRWVFKEEDPIHLRCHSWKNTALHKVTYLQNGKGRKYFHHNSDFYIPKATLKDSGSYFCRGLVGSKNVSSETVNITITQGLAVPTISSFFPPGYQVSFCLVMVLLFAVDTGLYFYV

SEQ ID NO: 10551 - protein, 364 aa, synthetic construct
MALPVTALLLPLALLLHAARPEVQLVESGGGLVQPGGSLRLSCEASGFASDDYIIGWFRQAPGKEREGVSCISSKYANTVYTDSVKGRFRLSRGTAKNTVYLQMSALKPEDTAVYYCAMDSRRVTCPEISTMHRNFDSWGQGTLVTVSSTRGMRTEDLPKAVVFLEPQWYRVLEKDSVTLKCQGAYSPEDNSTQWFHNESLISSQASSYFIDAATVDDSGEYRCQTNLSTLSDPVQLEVHIGWLLLQAPRWVFKEEDPIHLRCHSWKNTALHKVTYLQNGKGRKYFHHNSDFYIPKATLKDSGSYFCRGLVGSKNVSSETVNITITQGLAVPTISSFFPPGYQVSFCLVMVLLFAVDTGLYFYV

SEQ ID NO: 10552 - protein, 364 aa, synthetic construct
MALPVTALLLPLALLLHAARPEVQLVESGGGLVQPGGSLRLSCAASGFASDYYIIGWFRQAPGKEREGVSCISSRYANTNYADSVKGRFTISRDNAKNTVYLQMNSLKPEDTAVYYCAADTRRYTCPDIATMHRNFDSWGQGTLVTVSSTRGMRTEDLPKAVVFLEPQWYRVLEKDSVTLKCQGAYSPEDNSTQWFHNESLISSQASSYFIDAATVDDSGEYRCQTNLSTLSDPVQLEVHIGWLLLQAPRWVFKEEDPIHLRCHSWKNTALHKVTYLQNGKGRKYFHHNSDFYIPKATLKDSGSYFCRGLVGSKNVSSETVNITITQGLAVPTISSFFPPGYQVSFCLVMVLLFAVDTGLYFYV

SEQ ID NO: 10553 - protein, 360 aa, synthetic construct
MALPVTALLLPLALLLHAARPEVQLVESGGSLVQPGGSLRLSCAASGFTFDDYAMSWVRQVPGKGLEWVSSINWSGTHTDYADSVKGRFTISRNNANNTLYLQMNSLKSEDTAVYYCAKNWRDAGTTWFEKSGSAGQGTQVTVSSTRGMRTEDLPKAVVFLEPQWYRVLEKDSVTLKCQGAYSPEDNSTQWFHNESLISSQASSYFIDAATVDDSGEYRCQTNLSTLSDPVQLEVHIGWLLLQAPRWVFKEEDPIHLRCHSWKNTALHKVTYLQNGKGRKYFHHNSDFYIPKATLKDSGSYFCRGLVGSKNVSSETVNITITQGLAVPTISSFFPPGYQVSFCLVMVLLFAVDTGLYFYV

SEQ ID NO: 10554 - protein, 354 aa, synthetic construct
MALPVTALLLPLALLLHAARPEVQLVESGGGLVQAGGSLRLSCAASGITFSINTMGWYRQAPGKQRELVALISSIGDTYYADSVKGRFTISRDNAKNTVYLQMNSLKPEDTAVYYCKRFRTAAQGTDYWGQGTQVTVSSTRGMRTEDLPKAVVFLEPQWYRVLEKDSVTLKCQGAYSPEDNSTQWFHNESLISSQASSYFIDAATVDDSGEYRCQTNLSTLSDPVQLEVHIGWLLLQAPRWVFKEEDPIHLRCHSWKNTALHKVTYLQNGKGRKYFHHNSDFYIPKATLKDSGSYFCRGLVGSKNVSSETVNITITQGLAVPTISSFFPPGYQVSFCLVMVLLFAVDTGLYFYV

SEQ ID NO: 10555 - protein, 355 aa, synthetic construct
MALPVTALLLPLALLLHAARPEVQLVESGGGLVQPGGSLRLSCAASGSIFGFNDMAWYRQAPGKQRELVALISRVGVTSSADSVKGRFTISRVNAKDTVYLQMNSLKPEDTAVYYCYMDQRLDGSTLAYWGQGTQVTVSSTRGMRTEDLPKAVVFLEPQWYRVLEKDSVTLKCQGAYSPEDNSTQWFHNESLISSQASSYFIDAATVDDSGEYRCQTNLSTLSDPVQLEVHIGWLLLQAPRWVFKEEDPIHLRCHSWKNTALHKVTYLQNGKGRKYFHHNSDFYIPKATLKDSGSYFCRGLVGSKNVSSETVNITITQGLAVPTISSFFPPGYQVSFCLVMVLLFAVDTGLYFYV

SEQ ID NO: 10556 - protein, 356 aa, synthetic construct
MALPVTALLLPLALLLHAARPDVQLVESGGGLVQPGGSLRLSCAASGSIGGLNAMAWYRQAPGKERELVAGIFGVGSTRYADSVKGRFTISRDNSKNTVYLQMNSLRPEDTAVYYCRMSSVTRGSSDYWGQGTLVTVSSLETRGMRTEDLPKAVVFLEPQWYRVLEKDSVTLKCQGAYSPEDNSTQWFHNESLISSQASSYFIDAATVDDSGEYRCQTNLSTLSDPVQLEVHIGWLLLQAPRWVFKEEDPIHLRCHSWKNTALHKVTYLQNGKGRKYFHHNSDFYIPKATLKDSGSYFCRGLVGSKNVSSETVNITITQGLAVPTISSFFPPGYQVSFCLVMVLLFAVDTGLYFYV

SEQ ID NO: 10557 - protein, 361 aa, synthetic construct
MALPVTALLLPLALLLHAARPEVQLVESGGGLVQPGGSLRLSCAASGRTYYLNAMGWFRQAPGKEREFVAAIDWSEGNKDYADSVKGRFTISRDNSKNTVYLQMNSLRPEDTAVYYCAADTPPWGPLIYIESYDSWGQGTLVTVSSTRGMRTEDLPKAVVFLEPQWYRVLEKDSVTLKCQGAYSPEDNSTQWFHNESLISSQASSYFIDAATVDDSGEYRCQTNLSTLSDPVQLEVHIGWLLLQAPRWVFKEEDPIHLRCHSWKNTALHKVTYLQNGKGRKYFHHNSDFYIPKATLKDSGSYFCRGLVGSKNVSSETVNITITQGLAVPTISSFFPPGYQVSFCLVMVLLFAVDTGLYFYV

SEQ ID NO: 10558 - protein, 359 aa, synthetic construct
MALPVTALLLPLALLLHAARPEVQLVESGGGSVQAGGSLRLSCAASGDTYGSYWMGWFRQAPGKEREGVAAINRGGGYTVYADSVKGRFTISRDTAKNTVYLQMNSLRPDDTADYYCAASGVLGGLHEDWFNYWGQGTLVTVSSTRGMRTEDLPKAVVFLEPQWYRVLEKDSVTLKCQGAYSPEDNSTQWFHNESLISSQASSYFIDAATVDDSGEYRCQTNLSTLSDPVQLEVHIGWLLLQAPRWVFKEEDPIHLRCHSWKNTALHKVTYLQNGKGRKYFHHNSDFYIPKATLKDSGSYFCRGLVGSKNVSSETVNITITQGLAVPTISSFFPPGYQVSFCLVMVLLFAVDTGLYFYV

SEQ ID NO: 10559 - protein, 358 aa, synthetic construct
MALPVTALLLPLALLLHAARPVQLVESGGGSVQAGGSLRLSCAASGDTYGSYWMGWFRQAPGQEREAVAAINRGGGYTVYADSVKGRFTISRDNAKNTLYLQMNSLRPDDTADYYCAASGVLGGLHEDWFNYWGQGTLVTVSSTRGMRTEDLPKAVVFLEPQWYRVLEKDSVTLKCQGAYSPEDNSTQWFHNESLISSQASSYFIDAATVDDSGEYRCQTNLSTLSDPVQLEVHIGWLLLQAPRWVFKEEDPIHLRCHSWKNTALHKVTYLQNGKGRKYFHHNSDFYIPKATLKDSGSYFCRGLVGSKNVSSETVNITITQGLAVPTISSFFPPGYQVSFCLVMVLLFAVDTGLYFYV

SEQ ID NO: 10560 - protein, 360 aa, synthetic construct
MALPVTALLLPLALLLHAARPEVQLVESGGGSVQTGGSLRLTCAASGRTSRSYGMGWFRQAPGKEREFVSGISWRGDSTGYADSVKGRFTISRDNAKNTVDLQMNSLKPEDTAIYYCAAAAGSAWYGTLYEYDYWGQGTLVTVSSTRGMRTEDLPKAVVFLEPQWYRVLEKDSVTLKCQGAYSPEDNSTQWFHNESLISSQASSYFIDAATVDDSGEYRCQTNLSTLSDPVQLEVHIGWLLLQAPRWVFKEEDPIHLRCHSWKNTALHKVTYLQNGKGRKYFHHNSDFYIPKATLKDSGSYFCRGLVGSKNVSSETVNITITQGLAVPTISSFFPPGYQVSFCLVMVLLFAVDTGLYFYV

SEQ ID NO: 10561 - protein, 360 aa, synthetic construct
MALPVTALLLPLALLLHAARPEVQLVESGGGSVQAGGSLRLTCAASGSTSRSYGMGWFRQAPGKEREFVSGISWRGDSTGYADSVKGRFTISRDNAKNTVDLQMNSLKPEDTAIYYCAAAAGSTWYGTLYEYDYWGQGTLVTVSSTRGMRTEDLPKAVVFLEPQWYRVLEKDSVTLKCQGAYSPEDNSTQWFHNESLISSQASSYFIDAATVDDSGEYRCQTNLSTLSDPVQLEVHIGWLLLQAPRWVFKEEDPIHLRCHSWKNTALHKVTYLQNGKGRKYFHHNSDFYIPKATLKDSGSYFCRGLVGSKNVSSETVNITITQGLAVPTISSFFPPGYQVSFCLVMVLLFAVDTGLYFYV

SEQ ID NO: 10562 - protein, 361 aa, synthetic construct
MALPVTALLLPLALLLHAARPDVQLVESGGGLVQPGGSLRLSCAASGFILDYYAIGWFRQAPGKEREGVLCIDASDDITYYADSVKGRFTISRDNSKNTVYLQMNSLRPEDTAVYYCATPIGLSSSCLLEYDYDYWGQGTLVTVSSTRGMRTEDLPKAVVFLEPQWYRVLEKDSVTLKCQGAYSPEDNSTQWFHNESLISSQASSYFIDAATVDDSGEYRCQTNLSTLSDPVQLEVHIGWLLLQAPRWVFKEEDPIHLRCHSWKNTALHKVTYLQNGKGRKYFHHNSDFYIPKATLKDSGSYFCRGLVGSKNVSSETVNITITQGLAVPTISSFFPPGYQVSFCLVMVLLFAVDTGLYFYV

SEQ ID NO: 10563 - protein, 362 aa, synthetic construct
MALPVTALLLPLALLLHAARPEVQLVESGGGLVQAGDSLRLSCAASGRAFSRYAMGWFRQAPGKEREFVAAIGWGPSKTNYADSVKGRFTISRDNAKNTVYLQMNTLKPEDTAVYSCAAKFVNTDSTWSRSEMYTYWGQGTLVTVSSTRGMRTEDLPKAVVFLEPQWYRVLEKDSVTLKCQGAYSPEDNSTQWFHNESLISSQASSYFIDAATVDDSGEYRCQTNLSTLSDPVQLEVHIGWLLLQAPRWVFKEEDPIHLRCHSWKNTALHKVTYLQNGKGRKYFHHNSDFYIPKATLKDSGSYFCRGLVGSKNVSSETVNITITQGLAVPTISSFFPPGYQVSFCLVMVLLFAVDTGLYFYV

SEQ ID NO: 10564 - protein, 358 aa, synthetic construct
MALPVTALLLPLALLLHAARPEVQLVESGGGLVQAGGSLRLSCVASGISSSKRNMGWYRQAPGKQRESVATISSGGNKDYTDAVKDRFTISRDTTKNTVYLQMNSLKPEDTAVYYCKIEAGTGWATRRGYTYWGQGTLVTVSSTRGMRTEDLPKAVVFLEPQWYRVLEKDSVTLKCQGAYSPEDNSTQWFHNESLISSQASSYFIDAATVDDSGEYRCQTNLSTLSDPVQLEVHIGWLLLQAPRWVFKEEDPIHLRCHSWKNTALHKVTYLQNGKGRKYFHHNSDFYIPKATLKDSGSYFCRGLVGSKNVSSETVNITITQGLAVPTISSFFPPGYQVSFCLVMVLLFAVDTGLYFYV

SEQ ID NO: 10565 - protein, 348 aa, synthetic construct
MALPVTALLLPLALLLHAARPQVQLVQSGGGLVQPGGSLRLSCAASDFDFAAYEMSWVRQAPGQGLEWVAIISHDGIDKYYTDSVKGRFTISRDNSKNTLYLQMNTLRAEDTATYYCLRLGAVGQGTLVTVSSTRGMRTEDLPKAVVFLEPQWYRVLEKDSVTLKCQGAYSPEDNSTQWFHNESLISSQASSYFIDAATVDDSGEYRCQTNLSTLSDPVQLEVHIGWLLLQAPRWVFKEEDPIHLRCHSWKNTALHKVTYLQNGKGRKYFHHNSDFYIPKATLKDSGSYFCRGLVGSKNVSSETVNITITQGLAVPTISSFFPPGYQVSFCLVMVLLFAVDTGLYFYV

SEQ ID NO: 10566 - protein, 356 aa, synthetic construct
MALPVTALLLPLALLLHAARPQVQLVQSGGGLVQPGGSLRLSCAASDFAFDDYEMSWVRQAPGKALEWIGDINHSGTTIYNPSLKSRVTISRDNSKNTLYLQMNTLRAEDTAIYYCARPHYGDYSDAFDIWGQGTMVTVSSTRGMRTEDLPKAVVFLEPQWYRVLEKDSVTLKCQGAYSPEDNSTQWFHNESLISSQASSYFIDAATVDDSGEYRCQTNLSTLSDPVQLEVHIGWLLLQAPRWVFKEEDPIHLRCHSWKNTALHKVTYLQNGKGRKYFHHNSDFYIPKATLKDSGSYFCRGLVGSKNVSSETVNITITQGLAVPTISSFFPPGYQVSFCLVMVLLFAVDTGLYFYV

SEQ ID NO: 10567 - protein, 351 aa, synthetic construct
MALPVTALLLPLALLLHAARPEVQLVESGGGLVQPGNSLRLSCAASGFTFSSFGMSWVRQAPGKGLEWVSSISGSGSDTLYADSVKGRFTISRDNAKTTLYLQMNSLRPEDTAVYYCTIGGSLSRSSQGTLVTVSSTRGMRTEDLPKAVVFLEPQWYRVLEKDSVTLKCQGAYSPEDNSTQWFHNESLISSQASSYFIDAATVDDSGEYRCQTNLSTLSDPVQLEVHIGWLLLQAPRWVFKEEDPIHLRCHSWKNTALHKVTYLQNGKGRKYFHHNSDFYIPKATLKDSGSYFCRGLVGSKNVSSETVNITITQGLAVPTISSFFPPGYQVSFCLVMVLLFAVDTGLYFYV

SEQ ID NO: 10568 - protein, 352 aa, synthetic construct
MALPVTALLLPLALLLHAARPEVQLVESGGGLVQAGGSLRLSCAASGSIFSGNVMGWYRRQAPGKEREWVAAIASGGSIYYRDSVKGRFTISRDNAKNTVYLQMNSLKPEDTAVYYCNSHPPTLPYWGLGTQVTVSSTRGMRTEDLPKAVVFLEPQWYRVLEKDSVTLKCQGAYSPEDNSTQWFHNESLISSQASSYFIDAATVDDSGEYRCQTNLSTLSDPVQLEVHIGWLLLQAPRWVFKEEDPIHLRCHSWKNTALHKVTYLQNGKGRKYFHHNSDFYIPKATLKDSGSYFCRGLVGSKNVSSETVNITITQGLAVPTISSFFPPGYQVSFCLVMVLLFAVDTGLYFYV

SEQ ID NO: 10569 - protein, 362 aa, synthetic construct
MALPVTALLLPLALLLHAARPEVQLVESGGGSVQAGGSLRLSCTTSGRALNMYVMGWFRQAPGNEREFVAATSSSGGSTSYPDSVKGRFTISRDNAKNTVYLQMNSLKPEDTAAYRCAASPYVSTPTMNILEEYRYWGLGTQVTVSSTRGMRTEDLPKAVVFLEPQWYRVLEKDSVTLKCQGAYSPEDNSTQWFHNESLISSQASSYFIDAATVDDSGEYRCQTNLSTLSDPVQLEVHIGWLLLQAPRWVFKEEDPIHLRCHSWKNTALHKVTYLQNGKGRKYFHHNSDFYIPKATLKDSGSYFCRGLVGSKNVSSETVNITITQGLAVPTISSFFPPGYQVSFCLVMVLLFAVDTGLYFYV

SEQ ID NO: 10570 - protein, 357 aa, synthetic construct
MALPVTALLLPLALLLHAARPEVQLVESGGGLVQPGGSLRLSCAASGSVFKINVMAWYRQAPGKGRELVAGIISGGSTSYADSVKGRFTISRDNAKNTLYLQMNSLRPEDTAVYYCAFITTESDYDLGRRYWGQGTLVTVSSTRGMRTEDLPKAVVFLEPQWYRVLEKDSVTLKCQGAYSPEDNSTQWFHNESLISSQASSYFIDAATVDDSGEYRCQTNLSTLSDPVQLEVHIGWLLLQAPRWVFKEEDPIHLRCHSWKNTALHKVTYLQNGKGRKYFHHNSDFYIPKATLKDSGSYFCRGLVGSKNVSSETVNITITQGLAVPTISSFFPPGYQVSFCLVMVLLFAVDTGLYFYV

SEQ ID NO: 10571 - protein, 502 aa, synthetic construct
MALPVTALLLPLALLLHAARPEVQLVESGGGSVQTGGSLRLTCAASGRTSRSYGMGWFRQAPGKEREFVSGISWRGDSTGYADSVKGRFTISRDNAKNTVDLQMNSLKPEDTAIYYCAAAAGSAWYGTLYEYDYWGQGTLVTVSSLEGGGGSGGGGSGGGGSFEEVQLVESGGGSVQAGGSLRLSCAASGDTYGSYWMGWFRQAPGKEREGVAAINRGGGYTVYADSVKGRFTISRDTAKNTVYLQMNSLRPDDTADYYCAASGVLGGLHEDWFNYWGQGTLVTVSSTRGMRTEDLPKAVVFLEPQWYRVLEKDSVTLKCQGAYSPEDNSTQWFHNESLISSQASSYFIDAATVDDSGEYRCQTNLSTLSDPVQLEVHIGWLLLQAPRWVFKEEDPIHLRCHSWKNTALHKVTYLQNGKGRKYFHHNSDFYIPKATLKDSGSYFCRGLVGSKNVSSETVNITITQGLAVPTISSFFPPGYQVSFCLVMVLLFAVDTGLYFYV

SEQ ID NO: 10572 - protein, 521 aa, synthetic construct
MALPVTALLLPLALLLHAARPEVQLVESGGGSVQAGGSLRLTCAASGSTSRSYGMGWFRQAPGKEREFVSGISWRGDSTGYADSVKGRFTISRDNAKNTVDLQMNSLKPEDTAIYYCAAAAGSTWYGTLYEYDYWGQGTLVTVSSLEGGGGSGGGGSGGGGSGSGGSGSGGSGSGGSGSGGSFEVQLVESGGGSVQAGGSLRLSCAASGDTYGSYWMGWFRQAPGQEREAVAAINRGGGYTVYADSVKGRFTISRDNAKNTLYLQMNSLRPDDTADYYCAASGVLGGLHEDWFNYWGQGTLVTVSSTRGMRTEDLPKAVVFLEPQWYRVLEKDSVTLKCQGAYSPEDNSTQWFHNESLISSQASSYFIDAATVDDSGEYRCQTNLSTLSDPVQLEVHIGWLLLQAPRWVFKEEDPIHLRCHSWKNTALHKVTYLQNGKGRKYFHHNSDFYIPKATLKDSGSYFCRGLVGSKNVSSETVNITITQGLAVPTISSFFPPGYQVSFCLVMVLLFAVDTGLYFYV

SEQ ID NO: 10573 - protein, 511 aa, synthetic construct
MALPVTALLLPLALLLHAARPEVQLVESGGGLVQAGGSLRLSCAASGITFSINTMGWYRQAPGKQRELVALISSIGDTYYADSVKGRFTISRDNAKNTVYLQMNSLKPEDTAVYYCKRFRTAAQGTDYWGQGTQVTVSSLEGGGGSGGGGSGGGGSGSGGSGSGGSGSGGSGSGGSFEVQLVESGGGLVQPGGSLRLSCAASGSIFGFNDMAWYRQAPGKQRELVALISRVGVTSSADSVKGRFTISRVNAKDTVYLQMNSLKPEDTAVYYCYMDQRLDGSTLAYWGQGTQVTVSSTRGMRTEDLPKAVVFLEPQWYRVLEKDSVTLKCQGAYSPEDNSTQWFHNESLISSQASSYFIDAATVDDSGEYRCQTNLSTLSDPVQLEVHIGWLLLQAPRWVFKEEDPIHLRCHSWKNTALHKVTYLQNGKGRKYFHHNSDFYIPKATLKDSGSYFCRGLVGSKNVSSETVNITITQGLAVPTISSFFPPGYQVSFCLVMVLLFAVDTGLYFYV

SEQ ID NO: 10574 - protein, 478 aa, synthetic construct; identical to SEQ ID NO: 10389

SEQ ID NO: 10575 - protein, 516 aa, synthetic construct
MALPVTALLLPLALLLHAARPDVQLVESGGGLVQPGGSLRLSCAASGSIGGLNAMAWYRQAPGKERELVAGIFGVGSTRYADSVKGRFTISRDNSKNTVYLQMNSLRPEDTAVYYCRMSSVTRGSSDYWGQGTLVTVSSLEGGGGSGGGGSGGGGSGSGGSGSGGSGSGGSGSGGSFEVQLVESGGSLVQPGGSLRLSCAASGFTFDDYAMSWVRQVPGKGLEWVSSINWSGTHTDYADSVKGRFTISRNNANNTLYLQMNSLKSEDTAVYYCAKNWRDAGTTWFEKSGSAGQGTQVTVSSTRGMRTEDLPKAVVFLEPQWYRVLEKDSVTLKCQGAYSPEDNSTQWFHNESLISSQASSYFIDAATVDDSGEYRCQTNLSTLSDPVQLEVHIGWLLLQAPRWVFKEEDPIHLRCHSWKNTALHKVTYLQNGKGRKYFHHNSDFYIPKATLKDSGSYFCRGLVGSKNVSSETVNITITQGLAVPTISSFFPPGYQVSFCLVMVLLFAVDTGLYFYV

SEQ ID NO: 10576 - protein, 524 aa, synthetic construct
MALPVTALLLPLALLLHAARPDVQLVESGGGLVQPGGSLRLSCAASGFILDYYAIGWFRQAPGKEREGVLCIDASDDITYYADSVKGRFTISRDNSKNTVYLQMNSLRPEDTAVYYCATPIGLSSSCLLEYDYDYWGQGTLVTVSSLEGGSGSGGGGSGGGGSGSGGSGSGGSGSGGSGSGGSFEVQLVESGGGLVQPGGSLRLSCAASGRTYYLNAMGWFRQAPGKEREFVAAIDWSEGNKDYADSVKGRFTISRDNSKNTVYLQMNSLRPEDTAVYYCAADTPPWGPLIYIESYDSWGQGTLVTVSSTRGMRTEDLPKAVVFLEPQWYRVLEKDSVTLKCQGAYSPEDNSTQWFHNESLISSQASSYFIDAATVDDSGEYRCQTNLSTLSDPVQLEVHIGWLLLQAPRWVFKEEDPIHLRCHSWKNTALHKVTYLQNGKGRKYFHHNSDFYIPKATLKDSGSYFCRGLVGSKNVSSETVNITITQGLAVPTISSFFPPGYQVSFCLVMVLLFAVDTGLYFYV

SEQ ID NO: 10577 - protein, 507 aa, synthetic construct
MALPVTALLLPLALLLHAARPQVQLVQSGGGLVQPGGSLRLSCAASDFDFAAYEMSWVRQAPGQGLEWVAIISHDGIDKYYTDSVKGRFTISRDNSKNTLYLQMNTLRAEDTATYYCLRLGAVGQGTLVTVSSLEGGGGSGGGGSGGGGSGSGGSGSGGSGSGGSGSGGSFEQVQLVQSGGGLVQPGGSLRLSCAASDFAFDDYEMSWVRQAPGKALEWIGDINHSGTTIYNPSLKSRVTISRDNSKNTLYLQMNTLRAEDTAIYYCARPHYGDYSDAFDIWGQGTMVTVSSTRGMRTEDLPKAVVFLEPQWYRVLEKDSVTLKCQGAYSPEDNSTQWFHNESLISSQASSYFIDAATVDDSGEYRCQTNLSTLSDPVQLEVHIGWLLLQAPRWVFKEEDPIHLRCHSWKNTALHKVTYLQNGKGRKYFHHNSDFYIPKATLKDSGSYFCRGLVGSKNVSSETVNITITQGLAVPTISSFFPPGYQVSFCLVMVLLFAVDTGLYFYV

SEQ ID NO: 10578 - protein, 355 aa, synthetic construct
MALPVTALLLPLALLLHAARPQVKLEESGGGLVQAGRSLRLSCAASEHTFSSHVMGWFRQAPGKERESVAVIGWRDISTSYADSVKGRFTISRDNAKKTLYLQMNSLKPEDTAVYYCAARRIDAADFDSWGQGTQVTVSSTRGMRTEDLPKAVVFLEPQWYRVLEKDSVTLKCQGAYSPEDNSTQWFHNESLISSQASSYFIDAATVDDSGEYRCQTNLSTLSDPVQLEVHIGWLLLQAPRWVFKEEDPIHLRCHSWKNTALHKVTYLQNGKGRKYFHHNSDFYIPKATLKDSGSYFCRGLVGSKNVSSETVNITITQGLAVPTISSFFPPGYQVSFCLVMVLLFAVDTGLYFYV

SEQ ID NO: 10579 - protein, 354 aa, synthetic construct
MALPVTALLLPLALLLHAARPEVQLVESGGGLVQAGGSLRLSCAASGRTFTMGWFRQAPGKEREFVAAISLSPTLAYYAESVKGRFTISRDNAKNTVVLQMNSLKPEDTALYYCAADRKSVMSIRPDYWGQGTQVTVSSTRGMRTEDLPKAVVFLEPQWYRVLEKDSVTLKCQGAYSPEDNSTQWFHNESLISSQASSYFIDAATVDDSGEYRCQTNLSTLSDPVQLEVHIGWLLLQAPRWVFKEEDPIHLRCHSWKNTALHKVTYLQNGKGRKYFHHNSDFYIPKATLKDSGSYFCRGLVGSKNVSSETVNITITQGLAVPTISSFFPPGYQVSFCLVMVLLFAVDTGLYFYV

SEQ ID NO: 10580 - protein, 488 aa, synthetic construct
MALPVTALLLPLALLLHAARPQVKLEESGGGLVQAGRSLRLSCAASEHTFSSHVMGWFRQAPGKERESVAVIGWRDISTSYADSVKGRFTISRDNAKKTLYLQMNSLKPEDTAVYYCAARRIDAADFDSWGQGTQVTVSSGGGGSGGGGSGGGGSEVQLVESGGGLVQAGGSLRLSCAASGRTFTMGWFRQAPGKEREFVAAISLSPTLAYYAESVKGRFTISRDNAKNTVVLQMNSLKPEDTALYYCAADRKSVMSIRPDYWGQGTQVTVSSTRGMRTEDLPKAVVFLEPQWYRVLEKDSVTLKCQGAYSPEDNSTQWFHNESLISSQASSYFIDAATVDDSGEYRCQTNLSTLSDPVQLEVHIGWLLLQAPRWVFKEEDPIHLRCHSWKNTALHKVTYLQNGKGRKYFHHNSDFYIPKATLKDSGSYFCRGLVGSKNVSSETVNITITQGLAVPTISSFFPPGYQVSFCLVMVLLFAVDTGLYFYV

SEQ ID NO: 10581 - protein, 352 aa, synthetic construct
MALPVTALLLPLALLLHAARPEVQLVESGGGLVQAGGSLRLSCIATGKVFSIYDMGWYRQAPGKQRELVAEITSSGTTHYDDFVSGRFTISRDNAKNTVYLQMNTLKAEDTAVYYCRANHVFGGSYWGQGTQVTVSSTRGMRTEDLPKAVVFLEPQWYRVLEKDSVTLKCQGAYSPEDNSTQWFHNESLISSQASSYFIDAATVDDSGEYRCQTNLSTLSDPVQLEVHIGWLLLQAPRWVFKEEDPIHLRCHSWKNTALHKVTYLQNGKGRKYFHHNSDFYIPKATLKDSGSYFCRGLVGSKNVSSETVNITITQGLAVPTISSFFPPGYQVSFCLVMVLLFAVDTGLYFYV

SEQ ID NO: 10582 - protein, 358 aa, synthetic construct
MALPVTALLLPLALLLHAARPQVQLVESGGGLVQPGGSLRLSCEASGFTLDYYAIGWFRQAPGKEREGVICISRSDGSTYYADSVKGRFTISRDNAKKTVYLQMISLKPEDTAAYYCAAGADCSGYLRDYEFRGQGTQVTVSSTRGMRTEDLPKAVVFLEPQWYRVLEKDSVTLKCQGAYSPEDNSTQWFHNESLISSQASSYFIDAATVDDSGEYRCQTNLSTLSDPVQLEVHIGWLLLQAPRWVFKEEDPIHLRCHSWKNTALHKVTYLQNGKGRKYFHHNSDFYIPKATLKDSGSYFCRGLVGSKNVSSETVNITITQGLAVPTISSFFPPGYQVSFCLVMVLLFAVDTGLYFYV

SEQ ID NO: 10583 - protein, 481 aa, synthetic construct
MALPVTALLLPLALLLHAARPEVQLVESGGGLVQAGGSLRLSCIATGKVFSIYDMGWYRQAPGKQRELVAEITSSGTTHYDDFVSGRFTISRDNAKNTVYLQMNTLKAEDTAVYYCRANHVFGGSYWGQGTQVTVSSEVAALEKQVQLVESGGGLVQPGGSLRLSCEASGFTLDYYAIGWFRQAPGKEREGVICISRSDGSTYYADSVKGRFTISRDNAKKTVYLQMISLKPEDTAAYYCAAGADCSGYLRDYEFRGQGTQVTVSSTRGMRTEDLPKAVVFLEPQWYRVLEKDSVTLKCQGAYSPEDNSTQWFHNESLISSQASSYFIDAATVDDSGEYRCQTNLSTLSDPVQLEVHIGWLLLQAPRWVFKEEDPIHLRCHSWKNTALHKVTYLQNGKGRKYFHHNSDFYIPKATLKDSGSYFCRGLVGSKNVSSETVNITITQGLAVPTISSFFPPGYQVSFCLVMVLLFAVDTGLYFYV

SEQ ID NO: 10584 - protein, 364 aa, synthetic construct
MALPVTALLLPLALLLHAARPQVKLEESGGRLVQPRGSLRLSCAGSGRTFSTYGMAWFRQAPGKEREFVASKASMNYSGRTYYADSVKGRFTIARDNAKNMVFLQMNNLKPEDTAVYYCAAGTGCSTYGCFDAQIIDYWGKGTLVTVSSTRGMRTEDLPKAVVFLEPQWYRVLEKDSVTLKCQGAYSPEDNSTQWFHNESLISSQASSYFIDAATVDDSGEYRCQTNLSTLSDPVQLEVHIGWLLLQAPRWVFKEEDPIHLRCHSWKNTALHKVTYLQNGKGRKYFHHNSDFYIPKATLKDSGSYFCRGLVGSKNVSSETVNITITQGLAVPTISSFFPPGYQVSFCLVMVLLFAVDTGLYFYV

SEQ ID NO: 10585 - protein, 355 aa, synthetic construct
MALPVTALLLPLALLLHAARPQVKLEESGGGLVQPGESLRLSCSASGSIFKVFRVFAMSWYRQGPGKQRELVASISSGETTTYADSVKGRFTISRDNAKNTAYLQMDSLKPEDTAVYYCNADHTFTGDFWGQGTQVTVSSTRGMRTEDLPKAVVFLEPQWYRVLEKDSVTLKCQGAYSPEDNSTQWFHNESLISSQASSYFIDAATVDDSGEYRCQTNLSTLSDPVQLEVHIGWLLLQAPRWVFKEEDPIHLRCHSWKNTALHKVTYLQNGKGRKYFHHNSDFYIPKATLKDSGSYFCRGLVGSKNVSSETVNITITQGLAVPTISSFFPPGYQVSFCLVMVLLFAVDTGLYFYV

SEQ ID NO: 10586 - protein, 490 aa, synthetic construct
MALPVTALLLPLALLLHAARPQVKLEESGGRLVQPRGSLRLSCAGSGRTFSTYGMAWFRQAPGKEREFVASKASMNYSGRTYYADSVKGRFTIARDNAKNMVFLQMNNLKPEDTAVYYCAAGTGCSTYGCFDAQIIDYWGKGTLVTVSSEVAALEKQVKLEESGGGLVQPGESLRLSCSASGSIFKVFRVFAMSWYRQGPGKQRELVASISSGETTTYADSVKGRFTISRDNAKNTAYLQMDSLKPEDTAVYYCNADHTFTGDFWGQGTQVTVSSTRGMRTEDLPKAVVFLEPQWYRVLEKDSVTLKCQGAYSPEDNSTQWFHNESLISSQASSYFIDAATVDDSGEYRCQTNLSTLSDPVQLEVHIGWLLLQAPRWVFKEEDPIHLRCHSWKNTALHKVTYLQNGKGRKYFHHNSDFYIPKATLKDSGSYFCRGLVGSKNVSSETVNITITQGLAVPTISSFFPPGYQVSFCLVMVLLFAVDTGLYFYV

SEQ ID NO: 10587 - protein, 353 aa, synthetic construct
MALPVTALLLPLALLLHAARPQVKLEESGGELVQPGGPLRLSCAASGNIFSINRMGWYRQAPGKQRAFVASITVRGITNYADSVKGRFTISVDKSKNTIYLQMNALKPEDTAVYYCNAVSSNRDPDYWGQGTQVTVSSTRGMRTEDLPKAVVFLEPQWYRVLEKDSVTLKCQGAYSPEDNSTQWFHNESLISSQASSYFIDAATVDDSGEYRCQTNLSTLSDPVQLEVHIGWLLLQAPRWVFKEEDPIHLRCHSWKNTALHKVTYLQNGKGRKYFHHNSDFYIPKATLKDSGSYFCRGLVGSKNVSSETVNITITQGLAVPTISSFFPPGYQVSFCLVMVLLFAVDTGLYFYV

SEQ ID NO: 10588 - protein, 365 aa, synthetic construct
MALPVTALLLPLALLLHAARPPVQLVESGGGLVQAGDSLRLSCAASGRTFGIGTMGWFRQPPGKEREFVAAIRWSTGGTRYADSVKGRFTISRDNAKLTVDLQMDSLKPEDTAVYYCAADRLSLDLSGRYHYNPAVYDYWGQGTQVTVSSTRGMRTEDLPKAVVFLEPQWYRVLEKDSVTLKCQGAYSPEDNSTQWFHNESLISSQASSYFIDAATVDDSGEYRCQTNLSTLSDPVQLEVHIGWLLLQAPRWVFKEEDPIHLRCHSWKNTALHKVTYLQNGKGRKYFHHNSDFYIPKATLKDSGSYFCRGLVGSKNVSSETVNITITQGLAVPTISSFFPPGYQVSFCLVMVLLFAVDTGLYFYV

SEQ ID NO: 10589 - protein, 497 aa, synthetic construct
MALPVTALLLPLALLLHAARPQVKLEESGGELVQPGGPLRLSCAASGNIFSINRMGWYRQAPGKQRAFVASITVRGITNYADSVKGRFTISVDKSKNTIYLQMNALKPEDTAVYYCNAVSSNRDPDYWGQGTQVTVSSGGGGSGGGGSGGGGSPVQLVESGGGLVQAGDSLRLSCAASGRTFGIGTMGWFRQPPGKEREFVAAIRWSTGGTRYADSVKGRFTISRDNAKLTVDLQMDSLKPEDTAVYYCAADRLSLDLSGRYHYNPAVYDYWGQGTQVTVSSTRGMRTEDLPKAVVFLEPQWYRVLEKDSVTLKCQGAYSPEDNSTQWFHNESLISSQASSYFIDAATVDDSGEYRCQTNLSTLSDPVQLEVHIGWLLLQAPRWVFKEEDPIHLRCHSWKNTALHKVTYLQNGKGRKYFHHNSDFYIPKATLKDSGSYFCRGLVGSKNVSSETVNITITQGLAVPTISSFFPPGYQVSFCLVMVLLFAVDTGLYFYV

SEQ ID NO: 10590 - protein, 355 aa, synthetic construct
MALPVTALLLPLALLLHAARPAVQLVESGGGLVQAGDSLRLTCTASGRAFSTYFMAWFRQAPGKEREFVAGIAWSGGSTAYADSVKGRFTISRDNAKNTVYLQMNSLKSEDTAVYYCASRGIEVEEFGAWGQGTQVTVSSTRGMRTEDLPKAVVFLEPQWYRVLEKDSVTLKCQGAYSPEDNSTQWFHNESLISSQASSYFIDAATVDDSGEYRCQTNLSTLSDPVQLEVHIGWLLLQAPRWVFKEEDPIHLRCHSWKNTALHKVTYLQNGKGRKYFHHNSDFYIPKATLKDSGSYFCRGLVGSKNVSSETVNITITQGLAVPTISSFFPPGYQVSFCLVMVLLFAVDTGLYFYV

SEQ ID NO: 10591 - protein, 356 aa, synthetic construct
MALPVTALLLPLALLLHAARPQVQLVESGGGLVQAGGSLRLSCAASGGTLSKNTVAWFRQAPGKERGFVASITWDGRTTYYADSVKGRFTISRDNAKNTVYLQMNSLKPEDTAVYVCADLGKWPAGPADYWGQGTQVTVSSTRGMRTEDLPKAVVFLEPQWYRVLEKDSVTLKCQGAYSPEDNSTQWFHNESLISSQASSYFIDAATVDDSGEYRCQTNLSTLSDPVQLEVHIGWLLLQAPRWVFKEEDPIHLRCHSWKNTALHKVTYLQNGKGRKYFHHNSDFYIPKATLKDSGSYFCRGLVGSKNVSSETVNITITQGLAVPTISSFFPPGYQVSFCLVMVLLFAVDTGLYFYV

SEQ ID NO: 10592 - protein, 360 aa, synthetic construct
MALPVTALLLPLALLLHAARPGSDLGIKLLFAAAKGQDDEVRILLAAGADVNAKDFEGYTPLHVAAYDGHLEIVEVLLKAGADVNAKDSQGRTPLHEAAYSGHLEIVEVLLKAGADVNAQDDAGETPADLAAAWGHEDIAEVLQKTRGMRTEDLPKAVVFLEPQWYRVLEKDSVTLKCQGAYSPEDNSTQWFHNESLISSQASSYFIDAATVDDSGEYRCQTNLSTLSDPVQLEVHIGWLLLQAPRWVFKEEDPIHLRCHSWKNTALHKVTYLQNGKGRKYFHHNSDFYIPKATLKDSGSYFCRGLVGSKNVSSETVNITITQGLAVPTISSFFPPGYQVSFCLVMVLLFAVDTGLYFYV

SEQ ID NO: 10593 - protein, 362 aa, synthetic construct
MALPVTALLLPLALLLHAARPRSDLGKKLLEAARAGQDDEVRILMANGADVNAKDEYGLTPLYLATAHGHLEIVEVLLKNGADVNAVDAIGFTPLHLAAFIGHLEIAEVLLKHGADVNAQDKFGKTAFDISIGNGNEDLAEILQKLNTRGMRTEDLPKAVVFLEPQWYRVLEKDSVTLKCQGAYSPEDNSTQWFHNESLISSQASSYFIDAATVDDSGEYRCQTNLSTLSDPVQLEVHIGWLLLQAPRWVFKEEDPIHLRCHSWKNTALHKVTYLQNGKGRKYFHHNSDFYIPKATLKDSGSYFCRGLVGSKNVSSETVNITITQGLAVPTISSFFPPGYQVSFCLVMVLLFAVDTGLYFYV

SEQ ID NO: 10594 - protein, 294 aa, synthetic construct
MALPVTALLLPLALLLHAARPVDNKFNKERYSAYYEIWQLPNLNVRQKAAFIGSLQDDPSQSANLLAEAKKLNDAQAPKTRGMRTEDLPKAVVFLEPQWYRVLEKDSVTLKCQGAYSPEDNSTQWFHNESLISSQASSYFIDAATVDDSGEYRCQTNLSTLSDPVQLEVHIGWLLLQAPRWVFKEEDPIHLRCHSWKNTALHKVTYLQNGKGRKYFHHNSDFYIPKATLKDSGSYFCRGLVGSKNVSSETVNITITQGLAVPTISSFFPPGYQVSFCLVMVLLFAVDTGLYFYV

SEQ ID NO: 10595 - protein, 287 aa, synthetic construct
MALPVTALLLPLALLLHAARPYAKEMRNAYWEIALLPNLTNQQKRAPIRKLYDDPSQSSELLSEAKKLNDSQTRGMRTEDLPKAVVFLEPQWYRVLEKDSVTLKCQGAYSPEDNSTQWFHNESLISSQASSYFIDAATVDDSGEYRCQTNLSTLSDPVQLEVHIGWLLLQAPRWVFKEEDPIHLRCHSWKNTALHKVTYLQNGKGRKYFHHNSDFYIPKATLKDSGSYFCRGLVGSKNVSSETVNITITQGLAVPTISSFFPPGYQVSFCLVMVLLFAVDTGLYFYV

SEQ ID NO: 10596 - protein, 287 aa, synthetic construct
MALPVTALLLPLALLLHAARPYAKEMWIAWEEIRNLPNLNGWQMTAFIAKLLDDPSQSSELLSEAKKLNDSQTRGMRTEDLPKAVVFLEPQWYRVLEKDSVTLKCQGAYSPEDNSTQWFHNESLISSQASSYFIDAATVDDSGEYRCQTNLSTLSDPVQLEVHIGWLLLQAPRWVFKEEDPIHLRCHSWKNTALHKVTYLQNGKGRKYFHHNSDFYIPKATLKDSGSYFCRGLVGSKNVSSETVNITITQGLAVPTISSFFPPGYQVSFCLVMVLLFAVDTGLYFYV

SEQ ID NO: 10597 - protein, 325 aa, synthetic construct
MALPVTALLLPLALLLHAARPLPAPKNLVVSRVTEDSARLSWTAPDAAFDSFAIGYWEWDDDGEAIVLTVPGSERSYDLTGLKPGTEYPVYIAGVKGGQWSFPLSAIFTTTRGMRTEDLPKAVVFLEPQWYRVLEKDSVTLKCQGAYSPEDNSTQWFHNESLISSQASSYFIDAATVDDSGEYRCQTNLSTLSDPVQLEVHIGWLLLQAPRWVFKEEDPIHLRCHSWKNTALHKVTYLQNGKGRKYFHHNSDFYIPKATLKDSGSYFCRGLVGSKNVSSETVNITITQGLAVPTISSFFPPGYQVSFCLVMVLLFAVDTGLYFYV

SEQ ID NO: 10598 - protein, 327 aa, synthetic construct
MALPVTALLLPLALLLHAARPLPAPKNLVVSRVTEDSARLSWAIDEQRDWFESFLIQYQESEKVGEAIVLTVPGSERSYDLTGLKPGTEYTVSIYGVYHVYRSNPLSAIFTTTRGMRTEDLPKAVVFLEPQWYRVLEKDSVTLKCQGAYSPEDNSTQWFHNESLISSQASSYFIDAATVDDSGEYRCQTNLSTLSDPVQLEVHIGWLLLQAPRWVFKEEDPIHLRCHSWKNTALHKVTYLQNGKGRKYFHHNSDFYIPKATLKDSGSYFCRGLVGSKNVSSETVNITITQGLAVPTISSFFPPGYQVSFCLVMVLLFAVDTGLYFYV

SEQ ID NO: 10599 - protein, 325 aa, synthetic construct
MALPVTALLLPLALLLHAARPLPAPKNLVVSRVTEDSARLSWTAPDAAFDSFPIGYWEWDDDGEAIVLTVPGSERSYDLTGLKPGTEYHVYIAGVKGGQWSFPLSAIFTTTRGMRTEDLPKAVVFLEPQWYRVLEKDSVTLKCQGAYSPEDNSTQWFHNESLISSQASSYFIDAATVDDSGEYRCQTNLSTLSDPVQLEVHIGWLLLQAPRWVFKEEDPIHLRCHSWKNTALHKVTYLQNGKGRKYFHHNSDFYIPKATLKDSGSYFCRGLVGSKNVSSETVNITITQGLAVPTISSFFPPGYQVSFCLVMVLLFAVDTGLYFYV

SEQ ID NO: 10600 - protein, 330 aa, synthetic construct
MALPVTALLLPLALLLHAARPLPAPKNLVVSEVTEDSARLSWDDPWAFYESFLIQYQESEKVGEAIVLTVPGSERSYDLTGLKPGTEYTVSIYGVHNVYKDTNMRGLPLSAIFTTTRGMRTEDLPKAVVFLEPQWYRVLEKDSVTLKCQGAYSPEDNSTQWFHNESLISSQASSYFIDAATVDDSGEYRCQTNLSTLSDPVQLEVHIGWLLLQAPRWVFKEEDPIHLRCHSWKNTALHKVTYLQNGKGRKYFHHNSDFYIPKATLKDSGSYFCRGLVGSKNVSSETVNITITQGLAVPTISSFFPPGYQVSFCLVMVLLFAVDTGLYFYV

SEQ ID NO: 10601 - protein, 325 aa, synthetic construct
MALPVTALLLPLALLLHAARPLPAPKNLVVSRVTEDSARLSWTAPDAAFDSFWIRYFEFLGSGEAIVLTVPGSERSYDLTGLKPGTEYVVNIMGVKGGKISPPLSAIFTTTRGMRTEDLPKAVVFLEPQWYRVLEKDSVTLKCQGAYSPEDNSTQWFHNESLISSQASSYFIDAATVDDSGEYRCQTNLSTLSDPVQLEVHIGWLLLQAPRWVFKEEDPIHLRCHSWKNTALHKVTYLQNGKGRKYFHHNSDFYIPKATLKDSGSYFCRGLVGSKNVSSETVNITITQGLAVPTISSFFPPGYQVSFCLVMVLLFAVDTGLYFYV

SEQ ID NO: 10602 - protein, 429 aa, synthetic construct
MALPVTALLLPLALLLHAARPLPAPKNLVVSEVTEDSARLSWDDPWAFYESFLIQYQESEKVGEAIVLTVPGSERSYDLTGLKPGTEYTVSIYGVHNVYKDTNMRGLPLSAIFTTAPAPAPAPAPLPAPKNLVVSRVTEDSARLSWTAPDAAFDSFWIRYFEFLGSGEAIVLTVPGSERSYDLTGLKPGTEYVVNIMGVKGGKISPPLSAIFTTTRGMRTEDLPKAVVFLEPQWYRVLEKDSVTLKCQGAYSPEDNSTQWFHNESLISSQASSYFIDAATVDDSGEYRCQTNLSTLSDPVQLEVHIGWLLLQAPRWVFKEEDPIHLRCHSWKNTALHKVTYLQNGKGRKYFHHNSDFYIPKATLKDSGSYFCRGLVGSKNVSSETVNITITQGLAVPTISSFFPPGYQVSFCLVMVLLFAVDTGLYFYV

SEQ ID NO: 10603 - protein, 326 aa, synthetic construct
MALPVTALLLPLALLLHAARPMLPAPKNLVVSRITEDSARLSWTAPDAAFDSFPIRYIETLIWGEAIWLDVPGSERSYDLTGLKPGTEYAVVITGVKGGRFSSPLVASFTTTRGMRTEDLPKAVVFLEPQWYRVLEKDSVTLKCQGAYSPEDNSTQWFHNESLISSQASSYFIDAATVDDSGEYRCQTNLSTLSDPVQLEVHIGWLLLQAPRWVFKEEDPIHLRCHSWKNTALHKVTYLQNGKGRKYFHHNSDFYIPKATLKDSGSYFCRGLVGSKNVSSETVNITITQGLAVPTISSFFPPGYQVSFCLVMVLLFAVDTGLYFYV

SEQ ID NO: 10604 - protein, 802 aa, synthetic construct
MALPVTALLLPLALLLHAARPEWVKFAKPCREGEDNSKRNPIAKITSDYQATQKITYRISGVGIDQPPFGIFVVDKNTGDINITAIVDREETPSFLITCRALNAQGLDVEKPLILTVKILDINDNPPVFSQQIFMGEIEENSASNSLVMILNATDADEPNHLNSKIAFKIVSQEPAGTPMFLLSRNTGEVRTLTNSLDREQASSYRLVVSGADKDGEGLSTQCECNIKVKDVNDNFPMFRDSQYSARIEENILSSELLRFQVTDLDEEYTDNWLAVYFFTSGNEGNWFEIQTDPRTNEGILKVVKALDYEQLQSVKLSIAVKNKAEFHQSVISRYRVQSTPVTIQVINVREGIAFRPASKTFTVQKGISSKKLVDYILGTYQAIDEDTNKAASNVKYVMGRNDGGYLMIDSKTAEIKFVKNMNRDSTFIVNKTITAEVLAIDEYTGKTSTGTVYVRVPDFNDNCPTAVLEKDAVCSSSPSVVVSARTLNNRYTGPYTFALEDQPVKLPAVWSITTLNATSALLRAQEQIPPGVYHISLVLTDSQNNRCEMPRSLTLEVCQCDNRGICGTSYPTTSPGTRYGRPHSGRTRGMRTEDLPKAVVFLEPQWYRVLEKDSVTLKCQGAYSPEDNSTQWFHNESLISSQASSYFIDAATVDDSGEYRCQTNLSTLSDPVQLEVHIGWLLLQAPRWVFKEEDPIHLRCHSWKNTALHKVTYLQNGKGRKYFHHNSDFYIPKATLKDSGSYFCRGLVGSKNVSSETVNITITQGLAVPTISSFFPPGYQVSFCLVMVLLFAVDTGLYFYV

SEQ ID NO: 10605 - protein, 543 aa, synthetic construct
MALPVTALLLPLALLLHAARPMALPVTALLLPLALLLHAARPLFNQEVQIPLTESYCGPCPKNWICYKNNCYQFFDESKNWYESQASCMSQNASLLKVYSKEDQDLLKLVKSYHWMGLVHIPTNGSWQWEDGSILSPNLLTIIEMQKGDCALYASSFKGYIENCSTPNTYICMQRTVGGGGSGGGGSGGGGSDLFNQEVQIPLTESYCGPCPKNWICYKNNCYQFFDESKNWYESQASCMSQNASLLKVYSKEDQDLLKLVKSYHWMGLVHIPTNGSWQWEDGSILSPNLLTIIEMQKGDCALYASSFKGYIENCSTPNTYICMQRTVTRGMRTEDLPKAVVFLEPQWYRVLEKDSVTLKCQGAYSPEDNSTQWFHNESLISSQASSYFIDAATVDDSGEYRCQTNLSTLSDPVQLEVHIGWLLLQAPRWVFKEEDPIHLRCHSWKNTALHKVTYLQNGKGRKYFHHNSDFYIPKATLKDSGSYFCRGLVGSKNVSSETVNITITQGLAVPTISSFFPPGYQVSFCLVMVLLFAVDTGLYFYV

SEQ ID NO: 10606 - protein, 423 aa, synthetic construct
MALPVTALLLPLALLLHAARPMELTDLLLAAMLLAVARLTLSSPVAPACDPRLLNKLLRDSHLLHSRLSQCPDVDPLSIPVLLPAVDFSLGEWKTQTEQSKAQDILGAVSLLLEGVMAARGQLEPSCLSSLLGQLSGQVRLLLGALQGLLGTQLPLQGRTTAHKDPNALFLSLQQLLRGKVRFLLLVEGPTLCVRRTLPTTAVPSSTSTRGMRTEDLPKAVVFLEPQWYRVLEKDSVTLKCQGAYSPEDNSTQWFHNESLISSQASSYFIDAATVDDSGEYRCQTNLSTLSDPVQLEVHIGWLLLQAPRWVFKEEDPIHLRCHSWKNTALHKVTYLQNGKGRKYFHHNSDFYIPKATLKDSGSYFCRGLVGSKNVSSETVNITITQGLAVPTISSFFPPGYQVSFCLVMVLLFAVDTGLYFYV

SEQ ID NO: 10607 - protein, 289 aa, synthetic construct
MALPVTALLLPLALLLHAARPMDPDLEIRAAFLRQRNTALRTEVAELEQEVQRLENEVSQYETRYGPLGGGKTRTRGMRTEDLPKAVVFLEPQWYRVLEKDSVTLKCQGAYSPEDNSTQWFHNESLISSQASSYFIDAATVDDSGEYRCQTNLSTLSDPVQLEVHIGWLLLQAPRWVFKEEDPIHLRCHSWKNTALHKVTYLQNGKGRKYFHHNSDFYIPKATLKDSGSYFCRGLVGSKNVSSETVNITITQGLAVPTISSFFPPGYQVSFCLVMVLLFAVDTGLYFYV

SEQ ID NO: 10608 - protein, 264 aa, synthetic construct
MALPVTALLLPLALLLHAARPEVAALEKEVAALEKEVAALEKEVAALEKTRGMRTEDLPKAVVFLEPQWYRVLEKDSVTLKCQGAYSPEDNSTQWFHNESLISSQASSYFIDAATVDDSGEYRCQTNLSTLSDPVQLEVHIGWLLLQAPRWVFKEEDPIHLRCHSWKNTALHKVTYLQNGKGRKYFHHNSDFYIPKATLKDSGSYFCRGLVGSKNVSSETVNITITQGLAVPTISSFFPPGYQVSFCLVMVLLFAVDTGLYFYV

SEQ ID NO: 10609 - protein, 522 aa, synthetic construct
MALPVTALLLPLALLLHAARPLFNQEVQIPLTESYCGPCPKNWICYKNNCYQFFDESKNWYESQASCMSQNASLLKVYSKEDQDLLKLVKSAHWMGLVHIPTNGSWQWEDGSILSPNLLTIIEMQKGDCALYASSFKGFIENCSTPNTYICMQRTVGGGGSGGGGSGGGGSDLFNQEVQIPLTESYCGPCPKNWICYKNNCYQFFDESKNWYESQASCMSQNASLLKVYSKEDQDLLKLVKSAHWMGLVHIPTNGSWQWEDGSILSPNLLTIIEMQKGDCALYASSFKGFIENCSTPNTYICMQRTVTRGMRTEDLPKAVVFLEPQWYRVLEKDSVTLKCQGAYSPEDNSTQWFHNESLISSQASSYFIDAATVDDSGEYRCQTNLSTLSDPVQLEVHIGWLLLQAPRWVFKEEDPIHLRCHSWKNTALHKVTYLQNGKGRKYFHHNSDFYIPKATLKDSGSYFCRGLVGSKNVSSETVNITITQGLAVPTISSFFPPGYQVSFCLVMVLLFAVDTGLYFYV

SEQ ID NO: 10610 - protein, 522 aa, synthetic construct
MALPVTALLLPLALLLHAARPLFNQEVQIPLTESYCGPCPKNWICYKNNCYQFFDESKNWYESQASCMSQNASLLKVYSKEDQDLLKLVKSAHWMGLVHIPTNGSWQWEDGSILSPNLLTIIEMQKGDCALYASSFKGYIENCSTPNTYICMQRTVSGGGGSGGGGSGGGGDLFNQEVQIPLTESYCGPCPKNWICYKNNCYQFFDESKNWYESQASCMSQNASLLKVYSKEDQDLLKLVKSAHWMGLVHIPTNGSWQWEDGSILSPNLLTIIEMQKGDCALYASSFKGYIENCSTPNTYICMQRTVTRGMRTEDLPKAVVFLEPQWYRVLEKDSVTLKCQGAYSPEDNSTQWFHNESLISSQASSYFIDAATVDDSGEYRCQTNLSTLSDPVQLEVHIGWLLLQAPRWVFKEEDPIHLRCHSWKNTALHKVTYLQNGKGRKYFHHNSDFYIPKATLKDSGSYFCRGLVGSKNVSSETVNITITQGLAVPTISSFFPPGYQVSFCLVMVLLFAVDTGLYFYV

SEQ ID NO: 10611 - protein, 708 aa, synthetic construct
MALPVTALLLPLALLLHAARPDIQMTQSPSSLSASVGDRVTITCKASQDVGTAVDWYQQKPGKAPKLLIYWASTRHTGVPSRFSGSGSGTDFTLTISSLQPEDFATYYCQQYNSYPLTFGQGTKVEIKRLEDLKNVFPPEVAVFEPSEAEISHTQKATLVCLATGFYPDHVELSWWVNGKEVHSGVSTDPQPLKEQPALNDSRYCLSSRLRVSATFWQNPRNHFRCQVQFYGLSENDEWTQDRAKPVTQIVSAEAWGRADCGSQSFGLLDPKLCYLLDGILFIYGVILTALFLRVKFSRSADAPAYQQGQNQLYNELNLGRREEYDVLDKRRGRDPEMGGKPQRRKNPQEGLYNELQKDKMAEAYSEIGMKGERRRGKGHDGLYQGLSTATKDTYDALHMQALPPRRAKRSGSGATNFSLLKQAGDVEENPGPTSMDWIWRILFLVGAATGAHSFEVQLVESGGGLVQPGGSLRLSCAASGYTFTEYTIHWVRQAPGKGLEWVANINPNNGGTTYNQKFEDRFTISRDNSKNTLYLQMNSLRAEDTAVYYCARGWNFDYWGQGTLVTVSSTRIQNPDPAVYQLRDSKSSDKSVCLFTDFDSQTNVSQSKDSDVYITDKTVLDMRSMDFKSNSAVAWSNKSDFACANAFNNSIIPEDTFFPSPESSCGTITQGLAVPTISSFFPPGYQVSFCLVMVLLFAVDTGLYFYV

SEQ ID NO: 10612 - protein, 633 aa, synthetic construct
MALPVTALLLPLALLLHAARPDIQMTQSPSSLSASVGDRVTITCKASQDVGTAVDWYQQKPGKAPKLLIYWASTRHTGVPSRFSGSGSGTDFTLTISSLQPEDFATYYCQQYNSYPLTFGQGTKVEIKRLEDLKNVFPPEVAVFEPSEAEISHTQKATLVCLATGFYPDHVELSWWVNGKEVHSGVSTDPQPLKEQPALNDSRYCLSSRLRVSATFWQNPRNHFRCQVQFYGLSENDEWTQDRAKPVTQIVSAEAWGRADCGSLGEPQLCYILDAILFLYGIVLTLLYCRLKIQVRKAAITSYEKSDGVYTGLSTRNQETYETLKHEKPPQRAKRSGSGATNFSLLKQAGDVEENPGPTSMDWIWRILFLVGAATGAHSFEVQLVESGGGLVQPGGSLRLSCAASGYTFTEYTIHWVRQAPGKGLEWVANINPNNGGTTYNQKFEDRFTISRDNSKNTLYLQMNSLRAEDTAVYYCARGWNFDYWGQGTLVTVSSTRIQNPDPAVYQLRDSKSSDKSVCLFTDFDSQTNVSQSKDSDVYITDKTVLDMRSMDFKSNSAVAWSNKSDFACANAFNNSIIPEDTFFPSPESSCGTITQGLAVPTISSFFPPGYQVSFCLVMVLLFAVDTGLYFYV

SEQ ID NO: 10613 - protein, 609 aa, synthetic construct
MALPVTALLLPLALLLHAARPDIQMTQSPSSLSASVGDRVTITCKASQDVGTAVDWYQQKPGKAPKLLIYWASTRHTGVPSRFSGSGSGTDFTLTISSLQPEDFATYYCQQYNSYPLTFGQGTKVEIKRLEGQPKANPTVTLFPPSSEELQANKATLVCLISDFYPGAVTVAWKADGSPVKAGVETTKPSKQSNNKYAASSYLSLTPEQWKSHRSYSCQVTHEGSTVEKTVAPTECSGSLGEPQLCYILDAILFLYGIVLTLLYCRLKIQVRKAAITSYEKSDGVYTGLSTRNQETYETLKHEKPPQRAKRSGSGATNFSLLKQAGDVEENPGPTSMDWIWRILFLVGAATGAHSFEVQLVESGGGLVQPGGSLRLSCAASGYTFTEYTIHWVRQAPGKGLEWVANINPNNGGTTYNQKFEDRFTISRDNSKNTLYLQMNSLRAEDTAVYYCARGWNFDYWGQGTLVTVSSTRIQNPDPAVYQLRDSKSSDKSVCLFTDFDSQTNVSQSKDSDVYITDKTVLDMRSMDFKSNSAVAWSNKSDFACANAFNNSIIPEDTFFPSPESSCGTITQGLAVPTISSFFPPGYQVSFCLVMVLLFAVDTGLYFYV

SEQ ID NO: 10614 - protein, 618 aa, synthetic construct
MALPVTALLLPLALLLHAARPDIQMTQSPSSLSASVGDRVTITCKASQDVGTAVDWYQQKPGKAPKLLIYWASTRHTGVPSRFSGSGSGTDFTLTISSLQPEDFATYYCQQYNSYPLTFGQGTKVEIKRLEGQPKANPTVTLFPPSSEELQANKATLVCLISDFYPGAVTVAWKADGSPVKAGVETTKPSKQSNNKYAASSYLSLTPEQWKSHRSYSCQVTHEGSTVEKTVAPTECSGSLGEPQLCYILDAILFLYGIVLTLLYCRLKIQVRKAAITSYEKSDGVYTGLSTRNQETYETLKHEKPPQRAKRSGSGATNFSLLKQAGDVEENPGPTSMDWIWRILFLVGAATGAHSFEVQLVESGGGLVQPGGSLRLSCAASGYTFTEYTIHWVRQAPGKGLEWVANINPNNGGTTYNQKFEDRFTISRDNSKNTLYLQMNSLRAEDTAVYYCARGWNFDYWGQGTLVTVSSTRASTKGPSVFPLAPSSKSTSGGTAALGCLVKDYFPEPVTVSWNSGALTSGVHTFPAVLQSSGLYSLSSVVTVPSSSLGTQTYICNVNHKPSNTKVDKRVEPKSCGTITQGLAVPTISSFFPPGYQVSFCLVMVLLFAVDTGLYFYV

SEQ ID NO: 10615 - protein, 11 aa, synthetic construct
GGGGGGGGGGG

SEQ ID NO: 10616 - protein, 11 aa, synthetic construct
GGGGGGGGGGG

SEQ ID NO: 10617 - protein, 11 aa, synthetic construct
GGGGGGGGGGG

SEQ ID NO: 10618 - protein, 11 aa, synthetic construct
GGGGGGGGGGG

SEQ ID NO: 10619 - protein, 11 aa, synthetic construct
GGGGGGGGGGG

SEQ ID NO: 10620 - protein, 11 aa, synthetic construct
GGGGGGGGGGG

SEQ ID NO: 10621 - protein, 796 aa, synthetic construct
MALPVTALLLPLALLLHAARPNAGVTQTPKFQVLKTGQSMTLQCAQDMNHEYMSWYRQDPGMGLRLIHYSVAIQTTDQGEVPNGYNVSRSTIEDFPLRLLSAAPSQTSVYFCASSYLGNTGELFFGEGSRLTVGQPKANPTVTLFPPSSEELQANKATLVCLISDFYPGAVTVAWKADGSPVKAGVETTKPSKQSNNKYAASSYLSLTPEQWKSHRSYSCQVTHEGSTVEKTVAPTECSGSQSFGLLDPKLCYLLDGILFIYGVILTALFLRVKFSRSADAPAYQQGQNQLYNELNLGRREEYDVLDKRRGRDPEMGGKPQRRKNPQEGLYNELQKDKMAEAYSEIGMKGERRRGKGHDGLYQGLSTATKDTYDALHMQALPPRRAKRSGSGATNFSLLKQAGDVEENPGPTSMDWIWRILFLVGAATGAHSFEQEVTQIPAALSVPEGENLVLNCSFTDSAIYNLQWFRQDPGKGLTSLLLIQSSQREQTSGRLNASLDKSSGRSTLYIAASQPGDSATYLCAVRPTSGGSYIPTFGRGTSLIVHPYASTKGPSVFPLAPSSKSTSGGTAALGCLVKDYFPEPVTVSWNSGALTSGVHTFPAVLQSSGLYSLSSVVTVPSSSLGTQTYICNVNHKPSNTKVDKRVEPKSCGTQSFGLLDPKLCYLLDGILFIYGVILTALFLRVKFSRSADAPAYQQGQNQLYNELNLGRREEYDVLDKRRGRDPEMGGKPQRRKNPQEGLYNELQKDKMAEAYSEIGMKGERRRGKGHDGLYQGLSTATKDTYDALHMQALPPR

SEQ ID NO: 10622 - protein, 562 aa, synthetic construct
MALPVTALLLPLALLLHAARPNAGVTQTPKFQVLKTGQSMTLQCAQDMNHEYMSWYRQDPGMGLRLIHYSVAIQTTDQGEVPNGYNVSRSTIEDFPLRLLSAAPSQTSVYFCASSYLGNTGELFFGEGSRLTVLEQSFGLLDPKLCYLLDGILFIYGVILTALFLRVKFSRSADAPAYQQGQNQLYNELNLGRREEYDVLDKRRGRDPEMGGKPQRRKNPQEGLYNELQKDKMAEAYSEIGMKGERRRGKGHDGLYQGLSTATKDTYDALHMQALPPRRAKRSGSGATNFSLLKQAGDVEENPGPTSMDWIWRILFLVGAATGAHSFEQEVTQIPAALSVPEGENLVLNCSFTDSAIYNLQWFRQDPGKGLTSLLLIQSSQREQTSGRLNASLDKSSGRSTLYIAASQPGDSATYLCAVRPTSGGSYIPTFGRGTSLIVHPYTRQSFGLLDPKLCYLLDGILFIYGVILTALFLRVKFSRSADAPAYQQGQNQLYNELNLGRREEYDVLDKRRGRDPEMGGKPQRRKNPQEGLYNELQKDKMAEAYSEIGMKGERRRGKGHD

SEQ ID NO: 10623 - protein, 946 aa, synthetic construct
MALPVTALLLPLALLLHAARPNAGVTQTPKFQVLKTGQSMTLQCAQDMNHEYMSWYRQDPGMGLRLIHYSVAIQTTDQGEVPNGYNVSRSTIEDFPLRLLSAAPSQTSVYFCASSYLGNTGELFFGEGSRLTVLETTPGERSSLPAFYPGTSGSCSGCGSLSLPLLAGLVAADAVASLLIVGAVFLCARPRRSPAQEDGKVYINMPGRGSTSRVKFSRSADAPAYQQGQNQLYNELNLGRREEYDVLDKRRGRDPEMGGKPQRRKNPQEGLYNELQKDKMAEAYSEIGMKGERRRGKGHDGLYQGLSTATKDTYDALHMQALPPRRAKRSGSGATNFSLLKQAGDVEENPGPMDWIWRILFLVGAATGAHSFEQEVTQIPAALSVPEGENLVLNCSFTDSAIYNLQWFRQDPGKGLTSLLLIQSSQREQTSGRLNASLDKSSGRSTLYIAASQPGDSATYLCAVRPTSGGSYIPTFGRGTSLIVHPYTRTTPGERSSLPAFYPGTSGSCSGCGSLSLPLLAGLVAADAVASLLIVGAVFLCARPRRSPAQEDGKVYINMPGRGSSRRVKFSRSADAPAYQQGQNQLYNELNLGRREEYDVLDKRRGRDPEMGGKPQRRKNPQEGLYNELQKDKMAEAYSEIGMKGERRRGKGHDGLYQGLSTATKDTYDALHMQALPPRRAKRSGSGVKQTLNFDLLKLAGDVESNPGPGHMALPVTALLLPLALLLHAARPSQFRVSPLDRTWNLGETVELKCQVLLSNPTSGCSWLFQPRGAAASPTFLLYLSQNKPKAAEGLDTQRFSGKRLGDTFVLTLSDFRRENEGYYFCSALSNSIMYFSHFVPVFLPAKPTTTPAPRPPTPAPTIASQPLSLRPEACRPAAGGAVHTRGLDFACDIYIWAPLAGTCGVLLLSLVITLYCNHRNRRRVCKCPRPVVKSGDKPSLSARYV

SEQ ID NO: 10624 - protein, 946 aa, synthetic construct; identical to SEQ ID NO: 10623

SEQ ID NO: 10625 - protein, 1112 aa, synthetic construct
MALPVTALLLPLALLLHAARPNAGVTQTPKFQVLKTGQSMTLQCAQDMNHEYMSWYRQDPGMGLRLIHYSVAIQTTDQGEVPNGYNVSRSTIEDFPLRLLSAAPSQTSVYFCASSYLGNTGELFFGEGSRLTVLEGQPKANPTVTLFPPSSEELQANKATLVCLISDFYPGAVTVAWKADGSPVKAGVETTKPSKQSNNKYAASSYLSLTPEQWKSHRSYSCQVTHEGSTVEKTVAPTECSGSTTPGERSSLPAFYPGTSGSCSGCGSLSLPLLAGLVAADAVASLLIVGAVFLCARPRRSPAQEDGKVYINMPGRGSTSRVKFSRSADAPAYQQGQNQLYNELNLGRREEYDVLDKRRGRDPEMGGKPQRRKNPQEGLYNELQKDKMAEAYSEIGMKGERRRGKGHDGLYQGLSTATKDTYDALHMQALPPRRAKRSGSGATNFSLLKQAGDVEENPGPMDWIWRILFLVGAATGAHSFEQEVTQIPAALSVPEGENLVLNCSFTDSAIYNLQWFRQDPGKGLTSLLLIQSSQREQTSGRLNASLDKSSGRSTLYIAASQPGDSATYLCAVRPTSGGSYIPTFGRGTSLIVHPYTRASTKGPSVFPLAPSSKSTSGGTAALGCLVKDYFPEPVTVSWNSGALTSGVHTFPAVLQSSGLYSLSSVVTVPSSSLGTQTYICNVNHKPSNTKVDKRVEPKSCGTTTPGERSSLPAFYPGTSGSCSGCGSLSLPLLAGLVAADAVASLLIVGAVFLCARPRRSPAQEDGKVYINMPGRGSSRRVKFSRSADAPAYQQGQNQLYNELNLGRREEYDVLDKRRGRDPEMGGKPQRRKNPQEGLYNELQKDKMAEAYSEIGMKGERRRGKGHDGLYQGLSTATKDTYDALHMQALPPRRAKRSGSGVKQTLNFDLLKLAGDVESNPGPGHMATYEVLCEVARKLGTDDREVVLFLLNVFIPQPTLAQLIGALRALKEEGRLTFPLLAECLFRAGRRDLLRDLLHLDPRFLERHLAGTMSYFSPYQLTVLHVDGELCARDIRSLIFLSKDTIGSRSTPQTFLHWVYCMENLDLLGPTDVDALMSMLRSLSRVDLQRQVQTLMGLHLSGPSHSQHYRHTP

SEQ ID NO: 10626 - protein, 1165 aa, synthetic construct
MALPVTALLLPLALLLHAARPNAGVTQTPKFQVLKTGQSMTLQCAQDMNHEYMSWYRQDPGMGLRLIHYSVAIQTTDQGEVPNGYNVSRSTIEDFPLRLLSAAPSQTSVYFCASSYLGNTGELFFGEGSRLTVLEGQPKANPTVTLFPPSSEELQANKATLVCLISDFYPGAVTVAWKADGSPVKAGVETTKPSKQSNNKYAASSYLSLTPEQWKSHRSYSCQVTHEGSTVEKTVAPTECSGSTTPGERSSLPAFYPGTSGSCSGCGSLSLPLLAGLVAADAVASLLIVGAVFLCARPRRSPAQEDGKVYINMPGRGSTSRVKFSRSADAPAYQQGQNQLYNELNLGRREEYDVLDKRRGRDPEMGGKPQRRKNPQEGLYNELQKDKMAEAYSEIGMKGERRRGKGHDGLYQGLSTATKDTYDALHMQALPPRRAKRSGSGATNFSLLKQAGDVEENPGPMDWIWRILFLVGAATGAHSFEQEVTQIPAALSVPEGENLVLNCSFTDSAIYNLQWFRQDPGKGLTSLLLIQSSQREQTSGRLNASLDKSSGRSTLYIAASQPGDSATYLCAVRPTSGGSYIPTFGRGTSLIVHPYTRASTKGPSVFPLAPSSKSTSGGTAALGCLVKDYFPEPVTVSWNSGALTSGVHTFPAVLQSSGLYSLSSVVTVPSSSLGTQTYICNVNHKPSNTKVDKRVEPKSCGTTTPGERSSLPAFYPGTSGSCSGCGSLSLPLLAGLVAADAVASLLIVGAVFLCARPRRSPAQEDGKVYINMPGRGSSRRVKFSRSADAPAYQQGQNQLYNELNLGRREEYDVLDKRRGRDPEMGGKPQRRKNPQEGLYNELQKDKMAEAYSEIGMKGERRRGKGHDGLYQGLSTATKDTYDALHMQALPPRRAKRSGSGVKQTLNFDLLKLAGDVESNPGPGHMSDSKEVPSLPFLRHLLEELDSHEDSLLLFLCHDAAPGCTTVTQALCSLSQQRKLTLAALVEMLYVLQRMDLLKSRFGLSKEGAEQLLGTSFLTRYRKLMVCVGEELDSSELRALRLFACNLNPSLSTALSESSRFVELVLALENVGLVSPSSVSVLADMLRTLRRLDLCQQLVEYEQQEQARYRYCYAASPSLPVRTLRRGHGASEHEQLCMPVQESSDSPELLRTPVQESSSDSPEQTT

SEQ ID NO: 10627 - protein, 1159 aa, synthetic construct
MALPVTALLLPLALLLHAARPNAGVTQTPKFQVLKTGQSMTLQCAQDMNHEYMSWYRQDPGMGLRLIHYSVAIQTTDQGEVPNGYNVSRSTIEDFPLRLLSAAPSQTSVYFCASSYLGNTGELFFGEGSRLTVLEGQPKANPTVTLFPPSSEELQANKATLVCLISDFYPGAVTVAWKADGSPVKAGVETTKPSKQSNNKYAASSYLSLTPEQWKSHRSYSCQVTHEGSTVEKTVAPTECSGSTTPGERSSLPAFYPGTSGSCSGCGSLSLPLLAGLVAADAVASLLIVGAVFLCARPRRSPAQEDGKVYINMPGRGSTSRVKFSRSADAPAYQQGQNQLYNELNLGRREEYDVLDKRRGRDPEMGGKPQRRKNPQEGLYNELQKDKMAEAYSEIGMKGERRRGKGHDGLYQGLSTATKDTYDALHMQALPPRRAKRSGSGATNFSLLKQAGDVEENPGPMDWIWRILFLVGAATGAHSFEQEVTQIPAALSVPEGENLVLNCSFTDSAIYNLQWFRQDPGKGLTSLLLIQSSQREQTSGRLNASLDKSSGRSTLYIAASQPGDSATYLCAVRPTSGGSYIPTFGRGTSLIVHPYTRASTKGPSVFPLAPSSKSTSGGTAALGCLVKDYFPEPVTVSWNSGALTSGVHTFPAVLQSSGLYSLSSVVTVPSSSLGTQTYICNVNHKPSNTKVDKRVEPKSCGTTTPGERSSLPAFYPGTSGSCSGCGSLSLPLLAGLVAADAVASLLIVGAVFLCARPRRSPAQEDGKVYINMPGRGSSRRVKFSRSADAPAYQQGQNQLYNELNLGRREEYDVLDKRRGRDPEMGGKPQRRKNPQEGLYNELQKDKMAEAYSEIGMKGERRRGKGHDGLYQGLSTATKDTYDALHMQALPPRRAKRSGSGVKQTLNFDLLKLAGDVESNPGPGHMALPVTALLLPLALLLHAARPSQFRVSPLDRTWNLGETVELKCQVLLSNPTSGCSWLFQPRGAAASPTFLLYLSQNKPKAAEGLDTQRFSGKRLGDTFVLTLSDFRRENEGYYFCSALSNSIMYFSHFVPVFLPAKPTTTPAPRPPTPAPTIASQPLSLRPEACRPAAGGAVHTRGLDFACDIYIWAPLAGTCGVLLLSLVITLYCNHRNRRRVCKCPRPVVKSGDKPSLSARYV

SEQ ID NO: 10628 - protein, 1296 aa, synthetic construct
MALPVTALLLPLALLLHAARPEVQLVESGGGLVQAGGSLRLSCAASGRTFSMGWFRQAPGKEREFVAAITYSGGSPYYADSVKGRFTISRDNAKNTVYLQMNSLKPEDTAVYYCAANPTYGSDWNAENWGQGTQVTVSSGTGGGGSGGGGSGGGGSEFNAGVTQTPKFQVLKTGQSMTLQCAQDMNHEYMSWYRQDPGMGLRLIHYSVAIQTTDQGEVPNGYNVSRSTIEDFPLRLLSAAPSQTSVYFCASSYLGNTGELFFGEGSRLTVLEGQPKANPTVTLFPPSSEELQANKATLVCLISDFYPGAVTVAWKADGSPVKAGVETTKPSKQSNNKYAASSYLSLTPEQWKSHRSYSCQVTHEGSTVEKTVAPTECSGSTTPGERSSLPAFYPGTSGSCSGCGSLSLPLLAGLVAADAVASLLIVGAVFLCARPRRSPAQEDGKVYINMPGRGSTSRVKFSRSADAPAYQQGQNQLYNELNLGRREEYDVLDKRRGRDPEMGGKPQRRKNPQEGLYNELQKDKMAEAYSEIGMKGERRRGKGHDGLYQGLSTATKDTYDALHMQALPPRRAKRSGSGATNFSLLKQAGDVEENPGPMDWIWRILFLVGAATGAHSFEQEVTQIPAALSVPEGENLVLNCSFTDSAIYNLQWFRQDPGKGLTSLLLIQSSQREQTSGRLNASLDKSSGRSTLYIAASQPGDSATYLCAVRPTSGGSYIPTFGRGTSLIVHPYTRASTKGPSVFPLAPSSKSTSGGTAALGCLVKDYFPEPVTVSWNSGALTSGVHTFPAVLQSSGLYSLSSVVTVPSSSLGTQTYICNVNHKPSNTKVDKRVEPKSCGTTTPGERSSLPAFYPGTSGSCSGCGSLSLPLLAGLVAADAVASLLIVGAVFLCARPRRSPAQEDGKVYINMPGRGSSRRVKFSRSADAPAYQQGQNQLYNELNLGRREEYDVLDKRRGRDPEMGGKPQRRKNPQEGLYNELQKDKMAEAYSEIGMKGERRRGKGHDGLYQGLSTATKDTYDALHMQALPPRRAKRSGSGVKQTLNFDLLKLAGDVESNPGPGHMALPVTALLLPLALLLHAARPSQFRVSPLDRTWNLGETVELKCQVLLSNPTSGCSWLFQPRGAAASPTFLLYLSQNKPKAAEGLDTQRFSGKRLGDTFVLTLSDFRRENEGYYFCSALSNSIMYFSHFVPVFLPAKPTTTPAPRPPTPAPTIASQPLSLRPEACRPAAGGAVHTRGLDFACDIYIWAPLAGTCGVLLLSLVITLYCNHRNRRRVCKCPRPVVKSGDKPSLSARYV

SEQ ID NO: 10629 - protein, 1433 aa, synthetic construct
MALPVTALLLPLALLLHAARPEVQLVESGGGLVQAGGSLRLSCAASGRTFSMGWFRQAPGKEREFVAAITYSGGSPYYADSVKGRFTISRDNAKNTVYLQMNSLKPEDTAVYYCAANPTYGSDWNAENWGQGTQVTVSSGTGGGGSGGGGSGGGGSEFNAGVTQTPKFQVLKTGQSMTLQCAQDMNHEYMSWYRQDPGMGLRLIHYSVAIQTTDQGEVPNGYNVSRSTIEDFPLRLLSAAPSQTSVYFCASSYLGNTGELFFGEGSRLTVLEGQPKANPTVTLFPPSSEELQANKATLVCLISDFYPGAVTVAWKADGSPVKAGVETTKPSKQSNNKYAASSYLSLTPEQWKSHRSYSCQVTHEGSTVEKTVAPTECSGSTTPGERSSLPAFYPGTSGSCSGCGSLSLPLLAGLVAADAVASLLIVGAVFLCARPRRSPAQEDGKVYINMPGRGSTSRVKFSRSADAPAYQQGQNQLYNELNLGRREEYDVLDKRRGRDPEMGGKPQRRKNPQEGLYNELQKDKMAEAYSEIGMKGERRRGKGHDGLYQGLSTATKDTYDALHMQALPPRRAKRSGSGATNFSLLKQAGDVEENPGPMDWIWRILFLVGAATGAHSGPEVQLVESGGGLVQAGGSLRLSCAASGRTFTMGWFRQAPGKEREFVAAISLSPTLAYYADSVKGRFTISRDNAKNTVVLQMNSLKPEDTALYYCAADRKSVMSIRPDYWGQGTQVTVSSGSGGGGSGGGGSGGGGSFEQEVTQIPAALSVPEGENLVLNCSFTDSAIYNLQWFRQDPGKGLTSLLLIQSSQREQTSGRLNASLDKSSGRSTLYIAASQPGDSATYLCAVRPTSGGSYIPTFGRGTSLIVHPYTRASTKGPSVFPLAPSSKSTSGGTAALGCLVKDYFPEPVTVSWNSGALTSGVHTFPAVLQSSGLYSLSSVVTVPSSSLGTQTYICNVNHKPSNTKVDKRVEPKSCGTTTPGERSSLPAFYPGTSGSCSGCGSLSLPLLAGLVAADAVASLLIVGAVFLCARPRRSPAQEDGKVYINMPGRGSSRRVKFSRSADAPAYQQGQNQLYNELNLGRREEYDVLDKRRGRDPEMGGKPQRRKNPQEGLYNELQKDKMAEAYSEIGMKGERRRGKGHDGLYQGLSTATKDTYDALHMQALPPRRAKRSGSGVKQTLNFDLLKLAGDVESNPGPGHMALPVTALLLPLALLLHAARPSQFRVSPLDRTWNLGETVELKCQVLLSNPTSGCSWLFQPRGAAASPTFLLYLSQNKPKAAEGLDTQRFSGKRLGDTFVLTLSDFRRENEGYYFCSALSNSIMYFSHFVPVFLPAKPTTTPAPRPPTPAPTIASQPLSLRPEACRPAAGGAVHTRGLDFACDIYIWAPLAGTCGVLLLSLVITLYCNHRNRRRVCKCPRPVVKSGDKPSLSARYV

SEQ ID NO: 10630 - protein, 817 aa, synthetic construct; identical to SEQ ID NO: 9380

SEQ ID NO: 10631 - protein, 859 aa, synthetic construct
MALPVTALLLPLALLLHAARPEFNAGVTQTPKFQVLKTGQSMTLQCAQDMNHEYMSWYRQDPGMGLRLIHYSVAIQTTDQGEVPNGYNVSRSTIEDFPLRLLSAAPSQTSVYFCASSYLGNTGELFFGEGSRLTVLEDLKNVFPPEVAVFEPSEAEISHTQKATLVCLATGFYPDHVELSWWVNGKEVHSGVSTDPQPLKEQPALNDSRYCLSSRLRVSATFWQNPRNHFRCQVQFYGLSENDEWTQDRAKPVTQIVSAEAWGRADCGSQSFGLLDPKLCYLLDGILFIYGVILTALFLRVKFSRSADAPAYQQGQNQLYNELNLGRREEYDVLDKRRGRDPEMGGKPQRRKNPQEGLYNELQKDKMAEAYSEIGMKGERRRGKGHDGLYQGLSTATKDTYDALHMQALPPRRAKRSGSGATNFSLLKQAGDVEENPGPTSMDWIWRILFLVGAATGAHSFEQEVTQIPAALSVPEGENLVLNCSFTDSAIYNLQWFRQDPGKGLTSLLLIQSSQREQTSGRLNASLDKSSGRSTLYIAASQPGDSATYLCAVRPTSGGSYIPTFGRGTSLIVHPYTRIQNPDPAVYQLRDSKSSDKSVCLFTDFDSQTNVSQSKDSDVYITDKTVLDMRSMDFKSNSAVAWSNKSDFACANAFNNSIIPEDTFFPSPESSCGTQSFGLLDPKLCYLLDGILFIYGVILTALFLKRGRKKLLYIFKQPFMRPVQTTQEEDGCSCRFPEEEEGGCELRVKFSRSADAPAYQQGQNQLYNELNLGRREEYDVLDKRRGRDPEMGGKPQRRKNPQEGLYNELQKDKMAEAYSEIGMKGERRRGKGHDGLYQGLSTATKDTYDALHMQALPPR

SEQ ID NO: 10632 - protein, 858 aa, synthetic construct
MALPVTALLLPLALLLHAARPEFNAGVTQTPKFQVLKTGQSMTLQCAQDMNHEYMSWYRQDPGMGLRLIHYSVAIQTTDQGEVPNGYNVSRSTIEDFPLRLLSAAPSQTSVYFCASSYLGNTGELFFGEGSRLTVLEDLKNVFPPEVAVFEPSEAEISHTQKATLVCLATGFYPDHVELSWWVNGKEVHSGVSTDPQPLKEQPALNDSRYCLSSRLRVSATFWQNPRNHFRCQVQFYGLSENDEWTQDRAKPVTQIVSAEAWGRADCGSQSFGLLDPKLCYLLDGILFIYGVILTALFLRVKFSRSADAPAYQQGQNQLYNELNLGRREEYDVLDKRRGRDPEMGGKPQRRKNPQEGLYNELQKDKMAEAYSEIGMKGERRRGKGHDGLYQGLSTATKDTYDALHMQALPPRRAKRSGSGATNFSLLKQAGDVEENPGPTSMDWIWRILFLVGAATGAHSFEQEVTQIPAALSVPEGENLVLNCSFTDSAIYNLQWFRQDPGKGLTSLLLIQSSQREQTSGRLNASLDKSSGRSTLYIAASQPGDSATYLCAVRPTSGGSYIPTFGRGTSLIVHPYTRIQNPDPAVYQLRDSKSSDKSVCLFTDFDSQTNVSQSKDSDVYITDKTVLDMRSMDFKSNSAVAWSNKSDFACANAFNNSIIPEDTFFPSPESSCGTQSFGLLDPKLCYLLDGILFIYGVILTALFLRSKRSRLLHSDYMNMTPRRPGPTRKHYQPYAPPRDFAAYRSRVKFSRSADAPAYQQGQNQLYNELNLGRREEYDVLDKRRGRDPEMGGKPQRRKNPQEGLYNELQKDKMAEAYSEIGMKGERRRGKGHDGLYQGLSTATKDTYDALHMQALPPR

SEQ ID NO: 10633 - protein, 853 aa, synthetic construct
MALPVTALLLPLALLLHAARPEFNAGVTQTPKFQVLKTGQSMTLQCAQDMNHEYMSWYRQDPGMGLRLIHYSVAIQTTDQGEVPNGYNVSRSTIEDFPLRLLSAAPSQTSVYFCASSYLGNTGELFFGEGSRLTVLEDLKNVFPPEVAVFEPSEAEISHTQKATLVCLATGFYPDHVELSWWVNGKEVHSGVSTDPQPLKEQPALNDSRYCLSSRLRVSATFWQNPRNHFRCQVQFYGLSENDEWTQDRAKPVTQIVSAEAWGRADCGSQSFGLLDPKLCYLLDGILFIYGVILTALFLRVKFSRSADAPAYQQGQNQLYNELNLGRREEYDVLDKRRGRDPEMGGKPQRRKNPQEGLYNELQKDKMAEAYSEIGMKGERRRGKGHDGLYQGLSTATKDTYDALHMQALPPRRAKRSGSGATNFSLLKQAGDVEENPGPTSMDWIWRILFLVGAATGAHSFEQEVTQIPAALSVPEGENLVLNCSFTDSAIYNLQWFRQDPGKGLTSLLLIQSSQREQTSGRLNASLDKSSGRSTLYIAASQPGDSATYLCAVRPTSGGSYIPTFGRGTSLIVHPYTRIQNPDPAVYQLRDSKSSDKSVCLFTDFDSQTNVSQSKDSDVYITDKTVLDMRSMDFKSNSAVAWSNKSDFACANAFNNSIIPEDTFFPSPESSCGTQSFGLLDPKLCYLLDGILFIYGVILTALFLRDQRLPPDAHKPPGGGSFRTPIQEEQADAHSTLAKIRVKFSRSADAPAYQQGQNQLYNELNLGRREEYDVLDKRRGRDPEMGGKPQRRKNPQEGLYNELQKDKMAEAYSEIGMKGERRRGKGHDGLYQGLSTATKDTYDALHMQALPPR

SEQ ID NO: 10634 - protein, 937 aa, synthetic construct
MALPVTALLLPLALLLHAARPEFNAGVTQTPKFQVLKTGQSMTLQCAQDMNHEYMSWYRQDPGMGLRLIHYSVAIQTTDQGEVPNGYNVSRSTIEDFPLRLLSAAPSQTSVYFCASSYLGNTGELFFGEGSRLTVLEDLKNVFPPEVAVFEPSEAEISHTQKATLVCLATGFYPDHVELSWWVNGKEVHSGVSTDPQPLKEQPALNDSRYCLSSRLRVSATFWQNPRNHFRCQVQFYGLSENDEWTQDRAKPVTQIVSAEAWGRADCGSQSFGLLDPKLCYLLDGILFIYGVILTALFLRVKFSRSADAPAYQQGQNQLYNELNLGRREEYDVLDKRRGRDPEMGGKPQRRKNPQEGLYNELQKDKMAEAYSEIGMKGERRRGKGHDGLYQGLSTATKDTYDALHMQALPPRRAKRSGSGATNFSLLKQAGDVEENPGPTSMDWIWRILFLVGAATGAHSFEQEVTQIPAALSVPEGENLVLNCSFTDSAIYNLQWFRQDPGKGLTSLLLIQSSQREQTSGRLNASLDKSSGRSTLYIAASQPGDSATYLCAVRPTSGGSYIPTFGRGTSLIVHPYTRIQNPDPAVYQLRDSKSSDKSVCLFTDFDSQTNVSQSKDSDVYITDKTVLDMRSMDFKSNSAVAWSNKSDFACANAFNNSIIPEDTFFPSPESSCGTQSFGLLDPKLCYLLDGILFIYGVILTALFLWRRKRKEKQSETSPKEFLTIYEDVKDLKTRRNHEQEQTFPGGGSTIYSMIQSQSSAPTSQEPAYTLYSLIQPSRKSGSRKRNHSPSFNSTIYEVIGKSQPKAQNPARLSRKELENFDVYSRVKFSRSADAPAYQQGQNQLYNELNLGRREEYDVLDKRRGRDPEMGGKPQRRKNPQEGLYNELQKDKMAEAYSEIGMKGERRRGKGHDGLYQGLSTATKDTYDALHMQALPPR

SEQ ID NO: 10635 - protein, 900 aa, synthetic construct
MALPVTALLLPLALLLHAARPEFNAGVTQTPKFQVLKTGQSMTLQCAQDMNHEYMSWYRQDPGMGLRLIHYSVAIQTTDQGEVPNGYNVSRSTIEDFPLRLLSAAPSQTSVYFCASSYLGNTGELFFGEGSRLTVLEDLKNVFPPEVAVFEPSEAEISHTQKATLVCLATGFYPDHVELSWWVNGKEVHSGVSTDPQPLKEQPALNDSRYCLSSRLRVSATFWQNPRNHFRCQVQFYGLSENDEWTQDRAKPVTQIVSAEAWGRADCGSQSFGLLDPKLCYLLDGILFIYGVILTALFLRSKRSRLLHSDYMNMTPRRPGPTRKHYQPYAPPRDFAAYRSRVKFSRSADAPAYQQGQNQLYNELNLGRREEYDVLDKRRGRDPEMGGKPQRRKNPQEGLYNELQKDKMAEAYSEIGMKGERRRGKGHDGLYQGLSTATKDTYDALHMQALPPRRAKRSGSGATNFSLLKQAGDVEENPGPTSMDWIWRILFLVGAATGAHSFEQEVTQIPAALSVPEGENLVLNCSFTDSAIYNLQWFRQDPGKGLTSLLLIQSSQREQTSGRLNASLDKSSGRSTLYIAASQPGDSATYLCAVRPTSGGSYIPTFGRGTSLIVHPYTRIQNPDPAVYQLRDSKSSDKSVCLFTDFDSQTNVSQSKDSDVYITDKTVLDMRSMDFKSNSAVAWSNKSDFACANAFNNSIIPEDTFFPSPESSCGTQSFGLLDPKLCYLLDGILFIYGVILTALFLKRGRKKLLYIFKQPFMRPVQTTQEEDGCSCRFPEEEEGGCELRVKFSRSADAPAYQQGQNQLYNELNLGRREEYDVLDKRRGRDPEMGGKPQRRKNPQEGLYNELQKDKMAEAYSEIGMKGERRRGKGHDGLYQGLSTATKDTYDALHMQALPPR

SEQ ID NO: 10636 - protein, 899 aa, synthetic construct
MALPVTALLLPLALLLHAARPEFNAGVTQTPKFQVLKTGQSMTLQCAQDMNHEYMSWYRQDPGMGLRLIHYSVAIQTTDQGEVPNGYNVSRSTIEDFPLRLLSAAPSQTSVYFCASSYLGNTGELFFGEGSRLTVLEDLKNVFPPEVAVFEPSEAEISHTQKATLVCLATGFYPDHVELSWWVNGKEVHSGVSTDPQPLKEQPALNDSRYCLSSRLRVSATFWQNPRNHFRCQVQFYGLSENDEWTQDRAKPVTQIVSAEAWGRADCGSQSFGLLDPKLCYLLDGILFIYGVILTALFLRSKRSRLLHSDYMNMTPRRPGPTRKHYQPYAPPRDFAAYRSRVKFSRSADAPAYQQGQNQLYNELNLGRREEYDVLDKRRGRDPEMGGKPQRRKNPQEGLYNELQKDKMAEAYSEIGMKGERRRGKGHDGLYQGLSTATKDTYDALHMQALPPRRAKRSGSGATNFSLLKQAGDVEENPGPTSMDWIWRILFLVGAATGAHSFEQEVTQIPAALSVPEGENLVLNCSFTDSAIYNLQWFRQDPGKGLTSLLLIQSSQREQTSGRLNASLDKSSGRSTLYIAASQPGDSATYLCAVRPTSGGSYIPTFGRGTSLIVHPYTRIQNPDPAVYQLRDSKSSDKSVCLFTDFDSQTNVSQSKDSDVYITDKTVLDMRSMDFKSNSAVAWSNKSDFACANAFNNSIIPEDTFFPSPESSCGTQSFGLLDPKLCYLLDGILFIYGVILTALFLRSKRSRLLHSDYMNMTPRRPGPTRKHYQPYAPPRDFAAYRSRVKFSRSADAPAYQQGQNQLYNELNLGRREEYDVLDKRRGRDPEMGGKPQRRKNPQEGLYNELQKDKMAEAYSEIGMKGERRRGKGHDGLYQGLSTATKDTYDALHMQALPPR

SEQ ID NO: 10637 - protein, 900 aa, synthetic construct; identical to SEQ ID NO: 10635

SEQ ID NO: 10638 - protein, 817 aa, synthetic construct
MALPVTALLLPLALLLHAARPEFNAGVTQTPKFQVLKTGQSMTLQCAQDMNHEYMSWYRQDPGMGLRLIHYSVAIQTTDQGEVPNGYNVSRSTIEDFPLRLLSAAPSQTSVYFCASSYLGNTGELFFGEGSRLTVLEDLKNVFPPEVAVFEPSEAEISHTQKATLVCLATGFYPDHVELSWWVNGKEVHSGVSTDPQPLKEQPALNDSRYCLSSRLRVSATFWQNPRNHFRCQVQFYGLSENDEWTQDRAKPVTQIVSAEAWGRADCGSQSFGLLDPKLCYLLDGILFIYGVILTALFLRVKFSRSADAPAYQQGQNQLYNELNLGRREEYDVLDKRRGRDPEMGGKPQRRKNPQEGLFNELQKDKMAEAFSEIGMKGERRRGKGHDGLFQGLSTATKDTFDALHMQALPPRRAKRSGSGATNFSLLKQAGDVEENPGPTSMDWIWRILFLVGAATGAHSFEQEVTQIPAALSVPEGENLVLNCSFTDSAIYNLQWFRQDPGKGLTSLLLIQSSQREQTSGRLNASLDKSSGRSTLYIAASQPGDSATYLCAVRPTSGGSYIPTFGRGTSLIVHPYTRIQNPDPAVYQLRDSKSSDKSVCLFTDFDSQTNVSQSKDSDVYITDKTVLDMRSMDFKSNSAVAWSNKSDFACANAFNNSIIPEDTFFPSPESSCGTQSFGLLDPKLCYLLDGILFIYGVILTALFLRVKFSRSADAPAYQQGQNQLYNELNLGRREEYDVLDKRRGRDPEMGGKPQRRKNPQEGLYNELQKDKMAEAYSEIGMKGERRRGKGHDGLYQGLSTATKDTYDALHMQALPPR

SEQ ID NO: 10639 - protein, 817 aa, synthetic construct; identical to SEQ ID NO: 10638

SEQ ID NO: 10640 - protein, 859 aa, synthetic construct
MALPVTALLLPLALLLHAARPEFNAGVTQTPKFQVLKTGQSMTLQCAQDMNHEYMSWYRQDPGMGLRLIHYSVAIQTTDQGEVPNGYNVSRSTIEDFPLRLLSAAPSQTSVYFCASSYLGNTGELFFGEGSRLTVLEDLKNVFPPEVAVFEPSEAEISHTQKATLVCLATGFYPDHVELSWWVNGKEVHSGVSTDPQPLKEQPALNDSRYCLSSRLRVSATFWQNPRNHFRCQVQFYGLSENDEWTQDRAKPVTQIVSAEAWGRADCGSQSFGLLDPKLCYLLDGILFIYGVILTALFLRVKFSRSADAPAYQQGQNQLYNELNLGRREEYDVLDKRRGRDPEMGGKPQRRKNPQEGLFNELQKDKMAEAFSEIGMKGERRRGKGHDGLFQGLSTATKDTFDALHMQALPPRRAKRSGSGATNFSLLKQAGDVEENPGPTSMDWIWRILFLVGAATGAHSFEQEVTQIPAALSVPEGENLVLNCSFTDSAIYNLQWFRQDPGKGLTSLLLIQSSQREQTSGRLNASLDKSSGRSTLYIAASQPGDSATYLCAVRPTSGGSYIPTFGRGTSLIVHPYTRIQNPDPAVYQLRDSKSSDKSVCLFTDFDSQTNVSQSKDSDVYITDKTVLDMRSMDFKSNSAVAWSNKSDFACANAFNNSIIPEDTFFPSPESSCGTQSFGLLDPKLCYLLDGILFIYGVILTALFLKRGRKKLLYIFKQPFMRPVQTTQEEDGCSCRFPEEEEGGCELRVKFSRSADAPAYQQGQNQLYNELNLGRREEYDVLDKRRGRDPEMGGKPQRRKNPQEGLYNELQKDKMAEAYSEIGMKGERRRGKGHDGLYQGLSTATKDTYDALHMQALPPR

SEQ ID NO: 10641 - protein, 858 aa, synthetic construct
MALPVTALLLPLALLLHAARPEFNAGVTQTPKFQVLKTGQSMTLQCAQDMNHEYMSWYRQDPGMGLRLIHYSVAIQTTDQGEVPNGYNVSRSTIEDFPLRLLSAAPSQTSVYFCASSYLGNTGELFFGEGSRLTVLEDLKNVFPPEVAVFEPSEAEISHTQKATLVCLATGFYPDHVELSWWVNGKEVHSGVSTDPQPLKEQPALNDSRYCLSSRLRVSATFWQNPRNHFRCQVQFYGLSENDEWTQDRAKPVTQIVSAEAWGRADCGSQSFGLLDPKLCYLLDGILFIYGVILTALFLRVKFSRSADAPAYQQGQNQLYNELNLGRREEYDVLDKRRGRDPEMGGKPQRRKNPQEGLFNELQKDKMAEAFSEIGMKGERRRGKGHDGLFQGLSTATKDTFDALHMQALPPRRAKRSGSGATNFSLLKQAGDVEENPGPTSMDWIWRILFLVGAATGAHSFEQEVTQIPAALSVPEGENLVLNCSFTDSAIYNLQWFRQDPGKGLTSLLLIQSSQREQTSGRLNASLDKSSGRSTLYIAASQPGDSATYLCAVRPTSGGSYIPTFGRGTSLIVHPYTRIQNPDPAVYQLRDSKSSDKSVCLFTDFDSQTNVSQSKDSDVYITDKTVLDMRSMDFKSNSAVAWSNKSDFACANAFNNSIIPEDTFFPSPESSCGTQSFGLLDPKLCYLLDGILFIYGVILTALFLRSKRSRLLHSDYMNMTPRRPGPTRKHYQPYAPPRDFAAYRSRVKFSRSADAPAYQQGQNQLYNELNLGRREEYDVLDKRRGRDPEMGGKPQRRKNPQEGLYNELQKDKMAEAYSEIGMKGERRRGKGHDGLYQGLSTATKDTYDALHMQALPPR

SEQ ID NO: 10642 - protein, 853 aa, synthetic construct
MALPVTALLLPLALLLHAARPEFNAGVTQTPKFQVLKTGQSMTLQCAQDMNHEYMSWYRQDPGMGLRLIHYSVAIQTTDQGEVPNGYNVSRSTIEDFPLRLLSAAPSQTSVYFCASSYLGNTGELFFGEGSRLTVLEDLKNVFPPEVAVFEPSEAEISHTQKATLVCLATGFYPDHVELSWWVNGKEVHSGVSTDPQPLKEQPALNDSRYCLSSRLRVSATFWQNPRNHFRCQVQFYGLSENDEWTQDRAKPVTQIVSAEAWGRADCGSQSFGLLDPKLCYLLDGILFIYGVILTALFLRVKFSRSADAPAYQQGQNQLYNELNLGRREEYDVLDKRRGRDPEMGGKPQRRKNPQEGLFNELQKDKMAEAFSEIGMKGERRRGKGHDGLFQGLSTATKDTFDALHMQALPPRRAKRSGSGATNFSLLKQAGDVEENPGPTSMDWIWRILFLVGAATGAHSFEQEVTQIPAALSVPEGENLVLNCSFTDSAIYNLQWFRQDPGKGLTSLLLIQSSQREQTSGRLNASLDKSSGRSTLYIAASQPGDSATYLCAVRPTSGGSYIPTFGRGTSLIVHPYTRIQNPDPAVYQLRDSKSSDKSVCLFTDFDSQTNVSQSKDSDVYITDKTVLDMRSMDFKSNSAVAWSNKSDFACANAFNNSIIPEDTFFPSPESSCGTQSFGLLDPKLCYLLDGILFIYGVILTALFLRDQRLPPDAHKPPGGGSFRTPIQEEQADAHSTLAKIRVKFSRSADAPAYQQGQNQLYNELNLGRREEYDVLDKRRGRDPEMGGKPQRRKNPQEGLYNELQKDKMAEAYSEIGMKGERRRGKGHDGLYQGLSTATKDTYDALHMQALPPR

SEQ ID NO: 10643 - protein, 937 aa, synthetic construct
MALPVTALLLPLALLLHAARPEFNAGVTQTPKFQVLKTGQSMTLQCAQDMNHEYMSWYRQDPGMGLRLIHYSVAIQTTDQGEVPNGYNVSRSTIEDFPLRLLSAAPSQTSVYFCASSYLGNTGELFFGEGSRLTVLEDLKNVFPPEVAVFEPSEAEISHTQKATLVCLATGFYPDHVELSWWVNGKEVHSGVSTDPQPLKEQPALNDSRYCLSSRLRVSATFWQNPRNHFRCQVQFYGLSENDEWTQDRAKPVTQIVSAEAWGRADCGSQSFGLLDPKLCYLLDGILFIYGVILTALFLRVKFSRSADAPAYQQGQNQLYNELNLGRREEYDVLDKRRGRDPEMGGKPQRRKNPQEGLFNELQKDKMAEAFSEIGMKGERRRGKGHDGLFQGLSTATKDTFDALHMQALPPRRAKRSGSGATNFSLLKQAGDVEENPGPTSMDWIWRILFLVGAATGAHSFEQEVTQIPAALSVPEGENLVLNCSFTDSAIYNLQWFRQDPGKGLTSLLLIQSSQREQTSGRLNASLDKSSGRSTLYIAASQPGDSATYLCAVRPTSGGSYIPTFGRGTSLIVHPYTRIQNPDPAVYQLRDSKSSDKSVCLFTDFDSQTNVSQSKDSDVYITDKTVLDMRSMDFKSNSAVAWSNKSDFACANAFNNSIIPEDTFFPSPESSCGTQSFGLLDPKLCYLLDGILFIYGVILTALFLWRRKRKEKQSETSPKEFLTIYEDVKDLKTRRNHEQEQTFPGGGSTIYSMIQSQSSAPTSQEPAYTLYSLIQPSRKSGSRKRNHSPSFNSTIYEVIGKSQPKAQNPARLSRKELENFDVYSRVKFSRSADAPAYQQGQNQLYNELNLGRREEYDVLDKRRGRDPEMGGKPQRRKNPQEGLYNELQKDKMAEAYSEIGMKGERRRGKGHDGLYQGLSTATKDTYDALHMQALPPR

SEQ ID NO: 10644 - protein, 858 aa, synthetic construct; identical to SEQ ID NO: 10641

SEQ ID NO: 10645 - protein, 859 aa, synthetic construct; identical to SEQ ID NO: 10640

SEQ ID NO: 10646 - protein, 817 aa, synthetic construct
MALPVTALLLPLALLLHAARPEFNAGVTQTPKFQVLKTGQSMTLQCAQDMNHEYMSWYRQDPGMGLRLIHYSVAIQTTDQGEVPNGYNVSRSTIEDFPLRLLSAAPSQTSVYFCASSYLGNTGELFFGEGSRLTVLEDLKNVFPPEVAVFEPSEAEISHTQKATLVCLATGFYPDHVELSWWVNGKEVHSGVSTDPQPLKEQPALNDSRYCLSSRLRVSATFWQNPRNHFRCQVQFYGLSENDEWTQDRAKPVTQIVSAEAWGRADCGSQSFGLLDPKLCYLLDGILFIYGVILTALFLRVKFSRSADAPAYQQGQNQLYNELNLGRREEYDVLDKRRGRDPEMGGKPQRRKNPQEGLFNELQKDKMAEAFSEIGMKGERRRGKGHDGLFQGLSTATKDTFDALHMQALPPRRAKRSGSGATNFSLLKQAGDVEENPGPTSMDWIWRILFLVGAATGAHSFEQEVTQIPAALSVPEGENLVLNCSFTDSAIYNLQWFRQDPGKGLTSLLLIQSSQREQTSGRLNASLDKSSGRSTLYIAASQPGDSATYLCAVRPTSGGSYIPTFGRGTSLIVHPYTRIQNPDPAVYQLRDSKSSDKSVCLFTDFDSQTNVSQSKDSDVYITDKTVLDMRSMDFKSNSAVAWSNKSDFACANAFNNSIIPEDTFFPSPESSCGTQSFGLLDPKLSYLLDGILFIYGVILTALFLRVKFSRSADAPAYQQGQNQLYNELNLGRREEYDVLDKRRGRDPEMGGKPQRRKNPQEGLYNELQKDKMAEAYSEIGMKGERRRGKGHDGLYQGLSTATKDTYDALHMQALPPR

SEQ ID NO: 10647 - protein, 817 aa, synthetic construct; identical to SEQ ID NO: 10646

SEQ ID NO: 10648 - protein, 817 aa, synthetic construct
MALPVTALLLPLALLLHAARPEFNAGVTQTPKFQVLKTGQSMTLQCAQDMNHEYMSWYRQDPGMGLRLIHYSVAIQTTDQGEVPNGYNVSRSTIEDFPLRLLSAAPSQTSVYFCASSYLGNTGELFFGEGSRLTVLEDLKNVFPPEVAVFEPSEAEISHTQKATLVCLATGFYPDHVELSWWVNGKEVHSGVSTDPQPLKEQPALNDSRYCLSSRLRVSATFWQNPRNHFRCQVQFYGLSENDEWTQDRAKPVTQIVSAEAWGRADCGSQSFGLLDPKLSYLLDGILFIYGVILTALFLRVKFSRSADAPAYQQGQNQLYNELNLGRREEYDVLDKRRGRDPEMGGKPQRRKNPQEGLYNELQKDKMAEAYSEIGMKGERRRGKGHDGLYQGLSTATKDTYDALHMQALPPRRAKRSGSGATNFSLLKQAGDVEENPGPTSMDWIWRILFLVGAATGAHSFEQEVTQIPAALSVPEGENLVLNCSFTDSAIYNLQWFRQDPGKGLTSLLLIQSSQREQTSGRLNASLDKSSGRSTLYIAASQPGDSATYLCAVRPTSGGSYIPTFGRGTSLIVHPYTRIQNPDPAVYQLRDSKSSDKSVCLFTDFDSQTNVSQSKDSDVYITDKTVLDMRSMDFKSNSAVAWSNKSDFACANAFNNSIIPEDTFFPSPESSCGTQSFGLLDPKLSYLLDGILFIYGVILTALFLRVKFSRSADAPAYQQGQNQLYNELNLGRREEYDVLDKRRGRDPEMGGKPQRRKNPQEGLYNELQKDKMAEAYSEIGMKGERRRGKGHDGLYQGLSTATKDTYDALHMQALPPR

SEQ ID NO: 10649 - protein, 721 aa, synthetic construct
MALPVTALLLPLALLLHAARPEFNAGVTQTPKFQVLKTGQSMTLQCAQDMNHEYMSWYRQDPGMGLRLIHYSVAIQTTDQGEVPNGYNVSRSTIEDFPLRLLSAAPSQTSVYFCASSYLGNTGELFFGEGSRLTVLEDLKNVFPPEVAVFEPSEAEISHTQKATLVCLATGFYPDHVELSWWVNGKEVHSGVSTDPQPLKEQPALNDSRYCLSSRLRVSATFWQNPRNHFRCQVQFYGLSENDEWTQDRAKPVTQIVSAEAWGRADCGSTTPGERSSLPAFYPGTSGSCSGCGSLSLPLLAGLVAADAVASLLIVGAVFLCARPRRSPAQEDGKVYINMPGRGRAKRSGSGATNFSLLKQAGDVEENPGPTSMDWIWRILFLVGAATGAHSFEQEVTQIPAALSVPEGENLVLNCSFTDSAIYNLQWFRQDPGKGLTSLLLIQSSQREQTSGRLNASLDKSSGRSTLYIAASQPGDSATYLCAVRPTSGGSYIPTFGRGTSLIVHPYTRIQNPDPAVYQLRDSKSSDKSVCLFTDFDSQTNVSQSKDSDVYITDKTVLDMRSMDFKSNSAVAWSNKSDFACANAFNNSIIPEDTFFPSPESSCGTTTPGERSSLPAFYPGTSGSCSGCGSLSLPLLAGLVAADAVASLLIVGAVFKRGRKKLLYIFKQPFMRPVQTTQEEDGCSCRFPEEEEGGCELLCARPRRSPAQEDGKVYINMPGRG

SEQ ID NO: 10650 - protein, 720 aa, synthetic construct
MALPVTALLLPLALLLHAARPEFNAGVTQTPKFQVLKTGQSMTLQCAQDMNHEYMSWYRQDPGMGLRLIHYSVAIQTTDQGEVPNGYNVSRSTIEDFPLRLLSAAPSQTSVYFCASSYLGNTGELFFGEGSRLTVLEDLKNVFPPEVAVFEPSEAEISHTQKATLVCLATGFYPDHVELSWWVNGKEVHSGVSTDPQPLKEQPALNDSRYCLSSRLRVSATFWQNPRNHFRCQVQFYGLSENDEWTQDRAKPVTQIVSAEAWGRADCGSTTPGERSSLPAFYPGTSGSCSGCGSLSLPLLAGLVAADAVASLLIVGAVFLCARPRRSPAQEDGKVYINMPGRGRAKRSGSGATNFSLLKQAGDVEENPGPTSMDWIWRILFLVGAATGAHSFEQEVTQIPAALSVPEGENLVLNCSFTDSAIYNLQWFRQDPGKGLTSLLLIQSSQREQTSGRLNASLDKSSGRSTLYIAASQPGDSATYLCAVRPTSGGSYIPTFGRGTSLIVHPYTRIQNPDPAVYQLRDSKSSDKSVCLFTDFDSQTNVSQSKDSDVYITDKTVLDMRSMDFKSNSAVAWSNKSDFACANAFNNSIIPEDTFFPSPESSCGTTTPGERSSLPAFYPGTSGSCSGCGSLSLPLLAGLVAADAVASLLIVGAVFRSKRSRLLHSDYMNMTPRRPGPTRKHYQPYAPPRDFAAYRSLCARPRRSPAQEDGKVYINMPGRG

SEQ ID NO: 10651 - protein, 715 aa, synthetic construct
MALPVTALLLPLALLLHAARPEFNAGVTQTPKFQVLKTGQSMTLQCAQDMNHEYMSWYRQDPGMGLRLIHYSVAIQTTDQGEVPNGYNVSRSTIEDFPLRLLSAAPSQTSVYFCASSYLGNTGELFFGEGSRLTVLEDLKNVFPPEVAVFEPSEAEISHTQKATLVCLATGFYPDHVELSWWVNGKEVHSGVSTDPQPLKEQPALNDSRYCLSSRLRVSATFWQNPRNHFRCQVQFYGLSENDEWTQDRAKPVTQIVSAEAWGRADCGSTTPGERSSLPAFYPGTSGSCSGCGSLSLPLLAGLVAADAVASLLIVGAVFLCARPRRSPAQEDGKVYINMPGRGRAKRSGSGATNFSLLKQAGDVEENPGPTSMDWIWRILFLVGAATGAHSFEQEVTQIPAALSVPEGENLVLNCSFTDSAIYNLQWFRQDPGKGLTSLLLIQSSQREQTSGRLNASLDKSSGRSTLYIAASQPGDSATYLCAVRPTSGGSYIPTFGRGTSLIVHPYTRIQNPDPAVYQLRDSKSSDKSVCLFTDFDSQTNVSQSKDSDVYITDKTVLDMRSMDFKSNSAVAWSNKSDFACANAFNNSIIPEDTFFPSPESSCGTTTPGERSSLPAFYPGTSGSCSGCGSLSLPLLAGLVAADAVASLLIVGAVFRDQRLPPDAHKPPGGGSFRTPIQEEQADAHSTLAKILCARPRRSPAQEDGKVYINMPGRG

SEQ ID NO: 10652 - protein, 799 aa, synthetic construct
MALPVTALLLPLALLLHAARPEFNAGVTQTPKFQVLKTGQSMTLQCAQDMNHEYMSWYRQDPGMGLRLIHYSVAIQTTDQGEVPNGYNVSRSTIEDFPLRLLSAAPSQTSVYFCASSYLGNTGELFFGEGSRLTVLEDLKNVFPPEVAVFEPSEAEISHTQKATLVCLATGFYPDHVELSWWVNGKEVHSGVSTDPQPLKEQPALNDSRYCLSSRLRVSATFWQNPRNHFRCQVQFYGLSENDEWTQDRAKPVTQIVSAEAWGRADCGSTTPGERSSLPAFYPGTSGSCSGCGSLSLPLLAGLVAADAVASLLIVGAVFLCARPRRSPAQEDGKVYINMPGRGRAKRSGSGATNFSLLKQAGDVEENPGPTSMDWIWRILFLVGAATGAHSFEQEVTQIPAALSVPEGENLVLNCSFTDSAIYNLQWFRQDPGKGLTSLLLIQSSQREQTSGRLNASLDKSSGRSTLYIAASQPGDSATYLCAVRPTSGGSYIPTFGRGTSLIVHPYTRIQNPDPAVYQLRDSKSSDKSVCLFTDFDSQTNVSQSKDSDVYITDKTVLDMRSMDFKSNSAVAWSNKSDFACANAFNNSIIPEDTFFPSPESSCGTTTPGERSSLPAFYPGTSGSCSGCGSLSLPLLAGLVAADAVASLLIVGAVFWRRKRKEKQSETSPKEFLTIYEDVKDLKTRRNHEQEQTFPGGGSTIYSMIQSQSSAPTSQEPAYTLYSLIQPSRKSGSRKRNHSPSFNSTIYEVIGKSQPKAQNPARLSRKELENFDVYSLCARPRRSPAQEDGKVYINMPGRG

SEQ ID NO: 10653 - protein, 750 aa, synthetic construct
MALPVTALLLPLALLLHAARPEFNAGVTQTPKFQVLKTGQSMTLQCAQDMNHEYMSWYRQDPGMGLRLIHYSVAIQTTDQGEVPNGYNVSRSTIEDFPLRLLSAAPSQTSVYFCASSYLGNTGELFFGEGSRLTVLEDLKNVFPPEVAVFEPSEAEISHTQKATLVCLATGFYPDHVELSWWVNGKEVHSGVSTDPQPLKEQPALNDSRYCLSSRLRVSATFWQNPRNHFRCQVQFYGLSENDEWTQDRAKPVTQIVSAEAWGRADCGSLGEPQLCYILDAILFLYGIVLTLLYCKRGRKKLLYIFKQPFMRPVQTTQEEDGCSCRFPEEEEGGCELRLKIQVRKAAITSYEKSDGVYTGLSTRNQETYETLKHEKPPQRAKRSGSGATNFSLLKQAGDVEENPGPTSMDWIWRILFLVGAATGAHSFEQEVTQIPAALSVPEGENLVLNCSFTDSAIYNLQWFRQDPGKGLTSLLLIQSSQREQTSGRLNASLDKSSGRSTLYIAASQPGDSATYLCAVRPTSGGSYIPTFGRGTSLIVHPYTRIQNPDPAVYQLRDSKSSDKSVCLFTDFDSQTNVSQSKDSDVYITDKTVLDMRSMDFKSNSAVAWSNKSDFACANAFNNSIIPEDTFFPSPESSCGTLGEPQLCYILDAILFLYGIVLTLLYCRSKRSRLLHSDYMNMTPRRPGPTRKHYQPYAPPRDFAAYRSRLKIQVRKAAITSYEKSDGVYTGLSTRNQETYETLKHEKPPQ

SEQ ID NO: 10654 - protein, 745 aa, synthetic construct
MALPVTALLLPLALLLHAARPEFNAGVTQTPKFQVLKTGQSMTLQCAQDMNHEYMSWYRQDPGMGLRLIHYSVAIQTTDQGEVPNGYNVSRSTIEDFPLRLLSAAPSQTSVYFCASSYLGNTGELFFGEGSRLTVLEDLKNVFPPEVAVFEPSEAEISHTQKATLVCLATGFYPDHVELSWWVNGKEVHSGVSTDPQPLKEQPALNDSRYCLSSRLRVSATFWQNPRNHFRCQVQFYGLSENDEWTQDRAKPVTQIVSAEAWGRADCGSLGEPQLCYILDAILFLYGIVLTLLYCKRGRKKLLYIFKQPFMRPVQTTQEEDGCSCRFPEEEEGGCELRLKIQVRKAAITSYEKSDGVYTGLSTRNQETYETLKHEKPPQRAKRSGSGATNFSLLKQAGDVEENPGPTSMDWIWRILFLVGAATGAHSFEQEVTQIPAALSVPEGENLVLNCSFTDSAIYNLQWFRQDPGKGLTSLLLIQSSQREQTSGRLNASLDKSSGRSTLYIAASQPGDSATYLCAVRPTSGGSYIPTFGRGTSLIVHPYTRIQNPDPAVYQLRDSKSSDKSVCLFTDFDSQTNVSQSKDSDVYITDKTVLDMRSMDFKSNSAVAWSNKSDFACANAFNNSIIPEDTFFPSPESSCGTLGEPQLCYILDAILFLYGIVLTLLYCRDQRLPPDAHKPPGGGSFRTPIQEEQADAHSTLAKIRLKIQVRKAAITSYEKSDGVYTGLSTRNQETYETLKHEKPPQ

SEQ ID NO: 10655 - protein, 829 aa, synthetic construct
MALPVTALLLPLALLLHAARPEFNAGVTQTPKFQVLKTGQSMTLQCAQDMNHEYMSWYRQDPGMGLRLIHYSVAIQTTDQGEVPNGYNVSRSTIEDFPLRLLSAAPSQTSVYFCASSYLGNTGELFFGEGSRLTVLEDLKNVFPPEVAVFEPSEAEISHTQKATLVCLATGFYPDHVELSWWVNGKEVHSGVSTDPQPLKEQPALNDSRYCLSSRLRVSATFWQNPRNHFRCQVQFYGLSENDEWTQDRAKPVTQIVSAEAWGRADCGSLGEPQLCYILDAILFLYGIVLTLLYCKRGRKKLLYIFKQPFMRPVQTTQEEDGCSCRFPEEEEGGCELRLKIQVRKAAITSYEKSDGVYTGLSTRNQETYETLKHEKPPQRAKRSGSGATNFSLLKQAGDVEENPGPTSMDWIWRILFLVGAATGAHSFEQEVTQIPAALSVPEGENLVLNCSFTDSAIYNLQWFRQDPGKGLTSLLLIQSSQREQTSGRLNASLDKSSGRSTLYIAASQPGDSATYLCAVRPTSGGSYIPTFGRGTSLIVHPYTRIQNPDPAVYQLRDSKSSDKSVCLFTDFDSQTNVSQSKDSDVYITDKTVLDMRSMDFKSNSAVAWSNKSDFACANAFNNSIIPEDTFFPSPESSCGTLGEPQLCYILDAILFLYGIVLTLLYCWRRKRKEKQSETSPKEFLTIYEDVKDLKTRRNHEQEQTFPGGGSTIYSMIQSQSSAPTSQEPAYTLYSLIQPSRKSGSRKRNHSPSFNSTIYEVIGKSQPKAQNPARLSRKELENFDVYSRLKIQVRKAAITSYEKSDGVYTGLSTRNQETYETLKHEKPPQ

SEQ ID NO: 10656 - protein, 751 aa, synthetic construct
MALPVTALLLPLALLLHAARPEFNAGVTQTPKFQVLKTGQSMTLQCAQDMNHEYMSWYRQDPGMGLRLIHYSVAIQTTDQGEVPNGYNVSRSTIEDFPLRLLSAAPSQTSVYFCASSYLGNTGELFFGEGSRLTVLEDLKNVFPPEVAVFEPSEAEISHTQKATLVCLATGFYPDHVELSWWVNGKEVHSGVSTDPQPLKEQPALNDSRYCLSSRLRVSATFWQNPRNHFRCQVQFYGLSENDEWTQDRAKPVTQIVSAEAWGRADCGSLGEPQLCYILDAILFLYGIVLTLLYCKRGRKKLLYIFKQPFMRPVQTTQEEDGCSCRFPEEEEGGCELRLKIQVRKAAITSYEKSDGVYTGLSTRNQETYETLKHEKPPQRAKRSGSGATNFSLLKQAGDVEENPGPTSMDWIWRILFLVGAATGAHSFEQEVTQIPAALSVPEGENLVLNCSFTDSAIYNLQWFRQDPGKGLTSLLLIQSSQREQTSGRLNASLDKSSGRSTLYIAASQPGDSATYLCAVRPTSGGSYIPTFGRGTSLIVHPYTRIQNPDPAVYQLRDSKSSDKSVCLFTDFDSQTNVSQSKDSDVYITDKTVLDMRSMDFKSNSAVAWSNKSDFACANAFNNSIIPEDTFFPSPESSCGTLGEPQLCYILDAILFLYGIVLTLLYCKRGRKKLLYIFKQPFMRPVQTTQEEDGCSCRFPEEEEGGCELRLKIQVRKAAITSYEKSDGVYTGLSTRNQETYETLKHEKPPQ

SEQ ID NO: 10657 - protein, 750 aa, synthetic construct; identical to SEQ ID NO: 10653

SEQ ID NO: 10658 - protein, 749 aa, synthetic construct
MALPVTALLLPLALLLHAARPEFNAGVTQTPKFQVLKTGQSMTLQCAQDMNHEYMSWYRQDPGMGLRLIHYSVAIQTTDQGEVPNGYNVSRSTIEDFPLRLLSAAPSQTSVYFCASSYLGNTGELFFGEGSRLTVLEDLKNVFPPEVAVFEPSEAEISHTQKATLVCLATGFYPDHVELSWWVNGKEVHSGVSTDPQPLKEQPALNDSRYCLSSRLRVSATFWQNPRNHFRCQVQFYGLSENDEWTQDRAKPVTQIVSAEAWGRADCGSLGEPQLCYILDAILFLYGIVLTLLYCRSKRSRLLHSDYMNMTPRRPGPTRKHYQPYAPPRDFAAYRSRLKIQVRKAAITSYEKSDGVYTGLSTRNQETYETLKHEKPPQRAKRSGSGATNFSLLKQAGDVEENPGPTSMDWIWRILFLVGAATGAHSFEQEVTQIPAALSVPEGENLVLNCSFTDSAIYNLQWFRQDPGKGLTSLLLIQSSQREQTSGRLNASLDKSSGRSTLYIAASQPGDSATYLCAVRPTSGGSYIPTFGRGTSLIVHPYTRIQNPDPAVYQLRDSKSSDKSVCLFTDFDSQTNVSQSKDSDVYITDKTVLDMRSMDFKSNSAVAWSNKSDFACANAFNNSIIPEDTFFPSPESSCGTLGEPQLCYILDAILFLYGIVLTLLYCRSKRSRLLHSDYMNMTPRRPGPTRKHYQPYAPPRDFAAYRSRLKIQVRKAAITSYEKSDGVYTGLSTRNQETYETLKHEKPPQ

SEQ ID NO: 10659 - protein, 667 aa, synthetic construct
MALPVTALLLPLALLLHAARPEFNAGVTQTPKFQVLKTGQSMTLQCAQDMNHEYMSWYRQDPGMGLRLIHYSVAIQTTDQGEVPNGYNVSRSTIEDFPLRLLSAAPSQTSVYFCASSYLGNTGELFFGEGSRLTVLEDLKNVFPPEVAVFEPSEAEISHTQKATLVCLATGFYPDHVELSWWVNGKEVHSGVSTDPQPLKEQPALNDSRYCLSSRLRVSATFWQNPRNHFRCQVQFYGLSENDEWTQDRAKPVTQIVSAEAWGRADCGSLGEPQLSYILDAILFLYGIVLTLLYCRLKIQVRKAAITSYEKSDGVYTGLSTRNQETYETLKHEKPPQRAKRSGSGATNFSLLKQAGDVEENPGPTSMDWIWRILFLVGAATGAHSFEQEVTQIPAALSVPEGENLVLNCSFTDSAIYNLQWFRQDPGKGLTSLLLIQSSQREQTSGRLNASLDKSSGRSTLYIAASQPGDSATYLCAVRPTSGGSYIPTFGRGTSLIVHPYTRIQNPDPAVYQLRDSKSSDKSVCLFTDFDSQTNVSQSKDSDVYITDKTVLDMRSMDFKSNSAVAWSNKSDFACANAFNNSIIPEDTFFPSPESSCGTLGEPQLSYILDAILFLYGIVLTLLYCRLKIQVRKAAITSYEKSDGVYTGLSTRNQETYETLKHEKPPQ

SEQ ID NO: 10660 - protein, 703 aa, synthetic construct
MALPVTALLLPLALLLHAARPEFNAGVTQTPKFQVLKTGQSMTLQCAQDMNHEYMSWYRQDPGMGLRLIHYSVAIQTTDQGEVPNGYNVSRSTIEDFPLRLLSAAPSQTSVYFCASSYLGNTGELFFGEGSRLTVLEDLKNVFPPEVAVFEPSEAEISHTQKATLVCLATGFYPDHVELSWWVNGKEVHSGVSTDPQPLKEQPALNDSRYCLSSRLRVSATFWQNPRNHFRCQVQFYGLSENDEWTQDRAKPVTQIVSAEAWGRADCGSQAQSDCSCSTVSPGVLAGIVMGDLVLTVLIALAVYFLGRLVPRGRGAAEAATRKQRITETESPYQELQGQRSDVYSDLNTQRPYYKRAKRSGSGATNFSLLKQAGDVEENPGPTSMDWIWRILFLVGAATGAHSFEQEVTQIPAALSVPEGENLVLNCSFTDSAIYNLQWFRQDPGKGLTSLLLIQSSQREQTSGRLNASLDKSSGRSTLYIAASQPGDSATYLCAVRPTSGGSYIPTFGRGTSLIVHPYTRIQNPDPAVYQLRDSKSSDKSVCLFTDFDSQTNVSQSKDSDVYITDKTVLDMRSMDFKSNSAVAWSNKSDFACANAFNNSIIPEDTFFPSPESSCGTQAQSDCSSSTVSPGVLAGIVMGDLVLTVLIALAVYFLGRLVPRGRGAAEAATRKQRITETESPYQELQGQRSDVYSDLNTQRPYYK

SEQ ID NO: 10661 - protein, 745 aa, synthetic construct
MALPVTALLLPLALLLHAARPEFNAGVTQTPKFQVLKTGQSMTLQCAQDMNHEYMSWYRQDPGMGLRLIHYSVAIQTTDQGEVPNGYNVSRSTIEDFPLRLLSAAPSQTSVYFCASSYLGNTGELFFGEGSRLTVLEDLKNVFPPEVAVFEPSEAEISHTQKATLVCLATGFYPDHVELSWWVNGKEVHSGVSTDPQPLKEQPALNDSRYCLSSRLRVSATFWQNPRNHFRCQVQFYGLSENDEWTQDRAKPVTQIVSAEAWGRADCGSQAQSDCSCSTVSPGVLAGIVMGDLVLTVLIALAVYFLGRLVPRGRGAAEAATRKQRITETESPYQELQGQRSDVYSDLNTQRPYYKRAKRSGSGATNFSLLKQAGDVEENPGPTSMDWIWRILFLVGAATGAHSFEQEVTQIPAALSVPEGENLVLNCSFTDSAIYNLQWFRQDPGKGLTSLLLIQSSQREQTSGRLNASLDKSSGRSTLYIAASQPGDSATYLCAVRPTSGGSYIPTFGRGTSLIVHPYTRIQNPDPAVYQLRDSKSSDKSVCLFTDFDSQTNVSQSKDSDVYITDKTVLDMRSMDFKSNSAVAWSNKSDFACANAFNNSIIPEDTFFPSPESSCGTQAQSDCSCSTVSPGVLAGIVMGDLVLTVLIALAVYFLGRLVPRGRGAAEAATRKQRITETESPYQELQGQRSDVYSDLNTQKRGRKKLLYIFKQPFMRPVQTTQEEDGCSCRFPEEEEGGCELRPYYK

SEQ ID NO: 10662 - protein, 744 aa, synthetic construct
MALPVTALLLPLALLLHAARPEFNAGVTQTPKFQVLKTGQSMTLQCAQDMNHEYMSWYRQDPGMGLRLIHYSVAIQTTDQGEVPNGYNVSRSTIEDFPLRLLSAAPSQTSVYFCASSYLGNTGELFFGEGSRLTVLEDLKNVFPPEVAVFEPSEAEISHTQKATLVCLATGFYPDHVELSWWVNGKEVHSGVSTDPQPLKEQPALNDSRYCLSSRLRVSATFWQNPRNHFRCQVQFYGLSENDEWTQDRAKPVTQIVSAEAWGRADCGSQAQSDCSCSTVSPGVLAGIVMGDLVLTVLIALAVYFLGRLVPRGRGAAEAATRKQRITETESPYQELQGQRSDVYSDLNTQRPYYKRAKRSGSGATNFSLLKQAGDVEENPGPTSMDWIWRILFLVGAATGAHSFEQEVTQIPAALSVPEGENLVLNCSFTDSAIYNLQWFRQDPGKGLTSLLLIQSSQREQTSGRLNASLDKSSGRSTLYIAASQPGDSATYLCAVRPTSGGSYIPTFGRGTSLIVHPYTRIQNPDPAVYQLRDSKSSDKSVCLFTDFDSQTNVSQSKDSDVYITDKTVLDMRSMDFKSNSAVAWSNKSDFACANAFNNSIIPEDTFFPSPESSCGTQAQSDCSCSTVSPGVLAGIVMGDLVLTVLIALAVYFLGRLVPRGRGAAEAATRKQRITETESPYQELQGQRSDVYSDLNTQRSKRSRLLHSDYMNMTPRRPGPTRKHYQPYAPPRDFAAYRSRPYYK

SEQ ID NO: 10663 - protein, 739 aa, synthetic construct
MALPVTALLLPLALLLHAARPEFNAGVTQTPKFQVLKTGQSMTLQCAQDMNHEYMSWYRQDPGMGLRLIHYSVAIQTTDQGEVPNGYNVSRSTIEDFPLRLLSAAPSQTSVYFCASSYLGNTGELFFGEGSRLTVLEDLKNVFPPEVAVFEPSEAEISHTQKATLVCLATGFYPDHVELSWWVNGKEVHSGVSTDPQPLKEQPALNDSRYCLSSRLRVSATFWQNPRNHFRCQVQFYGLSENDEWTQDRAKPVTQIVSAEAWGRADCGSQAQSDCSCSTVSPGVLAGIVMGDLVLTVLIALAVYFLGRLVPRGRGAAEAATRKQRITETESPYQELQGQRSDVYSDLNTQRPYYKRAKRSGSGATNFSLLKQAGDVEENPGPTSMDWIWRILFLVGAATGAHSFEQEVTQIPAALSVPEGENLVLNCSFTDSAIYNLQWFRQDPGKGLTSLLLIQSSQREQTSGRLNASLDKSSGRSTLYIAASQPGDSATYLCAVRPTSGGSYIPTFGRGTSLIVHPYTRIQNPDPAVYQLRDSKSSDKSVCLFTDFDSQTNVSQSKDSDVYITDKTVLDMRSMDFKSNSAVAWSNKSDFACANAFNNSIIPEDTFFPSPESSCGTQAQSDCSCSTVSPGVLAGIVMGDLVLTVLIALAVYFLGRLVPRGRGAAEAATRKQRITETESPYQELQGQRSDVYSDLNTQRDQRLPPDAHKPPGGGSFRTPIQEEQADAHSTLAKIRPYYK

SEQ ID NO: 10664 - protein, 823 aa, synthetic construct
MALPVTALLLPLALLLHAARPEFNAGVTQTPKFQVLKTGQSMTLQCAQDMNHEYMSWYRQDPGMGLRLIHYSVAIQTTDQGEVPNGYNVSRSTIEDFPLRLLSAAPSQTSVYFCASSYLGNTGELFFGEGSRLTVLEDLKNVFPPEVAVFEPSEAEISHTQKATLVCLATGFYPDHVELSWWVNGKEVHSGVSTDPQPLKEQPALNDSRYCLSSRLRVSATFWQNPRNHFRCQVQFYGLSENDEWTQDRAKPVTQIVSAEAWGRADCGSQAQSDCSCSTVSPGVLAGIVMGDLVLTVLIALAVYFLGRLVPRGRGAAEAATRKQRITETESPYQELQGQRSDVYSDLNTQRPYYKRAKRSGSGATNFSLLKQAGDVEENPGPTSMDWIWRILFLVGAATGAHSFEQEVTQIPAALSVPEGENLVLNCSFTDSAIYNLQWFRQDPGKGLTSLLLIQSSQREQTSGRLNASLDKSSGRSTLYIAASQPGDSATYLCAVRPTSGGSYIPTFGRGTSLIVHPYTRIQNPDPAVYQLRDSKSSDKSVCLFTDFDSQTNVSQSKDSDVYITDKTVLDMRSMDFKSNSAVAWSNKSDFACANAFNNSIIPEDTFFPSPESSCGTQAQSDCSCSTVSPGVLAGIVMGDLVLTVLIALAVYFLGRLVPRGRGAAEAATRKQRITETESPYQELQGQRSDVYSDLNTQWRRKRKEKQSETSPKEFLTIYEDVKDLKTRRNHEQEQTFPGGGSTIYSMIQSQSSAPTSQEPAYTLYSLIQPSRKSGSRKRNHSPSFNSTIYEVIGKSQPKAQNPARLSRKELENFDVYSRPYYK

SEQ ID NO: 10665 - protein, 915 aa, synthetic construct
MALPVTALLLPLALLLHAARPEFNAGVTQTPKFQVLKTGQSMTLQCAQDMNHEYMSWYRQDPGMGLRLIHYSVAIQTTDQGEVPNGYNVSRSTIEDFPLRLLSAAPSQTSVYFCASSYLGNTGELFFGEGSRLTVLEDLKNVFPPEVAVFEPSEAEISHTQKATLVCLATGFYPDHVELSWWVNGKEVHSGVSTDPQPLKEQPALNDSRYCLSSRLRVSATFWQNPRNHFRCQVQFYGLSENDEWTQDRAKPVTQIVSAEAWGRADCGSQAQSDCSCSTVSPGVLAGIVMGDLVLTVLIALAVYFLGRLVPRGRGAAEAATRKQRITETESPYQELQGQRSDVYSDLNTQRVKFSRSADAPAYQQGQNQLYNELNLGRREEYDVLDKRRGRDPEMGGKPQRRKNPQEGLYNELQKDKMAEAYSEIGMKGERRRGKGHDGLYQGLSTATKDTYDALHMQALPPRRAKRSGSGATNFSLLKQAGDVEENPGPTSMDWIWRILFLVGAATGAHSFEQEVTQIPAALSVPEGENLVLNCSFTDSAIYNLQWFRQDPGKGLTSLLLIQSSQREQTSGRLNASLDKSSGRSTLYIAASQPGDSATYLCAVRPTSGGSYIPTFGRGTSLIVHPYTRIQNPDPAVYQLRDSKSSDKSVCLFTDFDSQTNVSQSKDSDVYITDKTVLDMRSMDFKSNSAVAWSNKSDFACANAFNNSIIPEDTFFPSPESSCGTTTPGERSSLPAFYPGTSGSCSGCGSLSLPLLAGLVAADAVASLLIVGAVFLCARPRRSPAQEDGKVYINMPGRGSSRRVKFSRSADAPAYQQGQNQLYNELNLGRREEYDVLDKRRGRDPEMGGKPQRRKNPQEGLYNELQKDKMAEAYSEIGMKGERRRGKGHDGLYQGLSTATKDTYDALHMQALPPR

SEQ ID NO: 10666 - protein, 841 aa, synthetic construct
MALPVTALLLPLALLLHAARPEFNAGVTQTPKFQVLKTGQSMTLQCAQDMNHEYMSWYRQDPGMGLRLIHYSVAIQTTDQGEVPNGYNVSRSTIEDFPLRLLSAAPSQTSVYFCASSYLGNTGELFFGEGSRLTVLEDLKNVFPPEVAVFEPSEAEISHTQKATLVCLATGFYPDHVELSWWVNGKEVHSGVSTDPQPLKEQPALNDSRYCLSSRLRVSATFWQNPRNHFRCQVQFYGLSENDEWTQDRAKPVTQIVSAEAWGRADCGSQAQSDCSCSTVSPGVLAGIVMGDLVLTVLIALAVYFLGRLVPRGRGAAEAATRKQRITETESPYQELQGQRSDVYSDLNTQRVKFSRSADAPAYQQGQNQLYNELNLGRREEYDVLDKRRGRDPEMGGKPQRRKNPQEGLYNELQKDKMAEAYSEIGMKGERRRGKGHDGLYQGLSTATKDTYDALHMQALPPRRAKRSGSGATNFSLLKQAGDVEENPGPTSMDWIWRILFLVGAATGAHSFEQEVTQIPAALSVPEGENLVLNCSFTDSAIYNLQWFRQDPGKGLTSLLLIQSSQREQTSGRLNASLDKSSGRSTLYIAASQPGDSATYLCAVRPTSGGSYIPTFGRGTSLIVHPYTRIQNPDPAVYQLRDSKSSDKSVCLFTDFDSQTNVSQSKDSDVYITDKTVLDMRSMDFKSNSAVAWSNKSDFACANAFNNSIIPEDTFFPSPESSCGTTTPGERSSLPAFYPGTSGSCSGCGSLSLPLLAGLVAADAVASLLIVGAVFKRGRKKLLYIFKQPFMRPVQTTQEEDGCSCRFPEEEEGGCELLCARPRRSPAQEDGKVYINMPGRG

SEQ ID NO: 10667 - protein, 840 aa, synthetic construct
MALPVTALLLPLALLLHAARPEFNAGVTQTPKFQVLKTGQSMTLQCAQDMNHEYMSWYRQDPGMGLRLIHYSVAIQTTDQGEVPNGYNVSRSTIEDFPLRLLSAAPSQTSVYFCASSYLGNTGELFFGEGSRLTVLEDLKNVFPPEVAVFEPSEAEISHTQKATLVCLATGFYPDHVELSWWVNGKEVHSGVSTDPQPLKEQPALNDSRYCLSSRLRVSATFWQNPRNHFRCQVQFYGLSENDEWTQDRAKPVTQIVSAEAWGRADCGSQAQSDCSCSTVSPGVLAGIVMGDLVLTVLIALAVYFLGRLVPRGRGAAEAATRKQRITETESPYQELQGQRSDVYSDLNTQRVKFSRSADAPAYQQGQNQLYNELNLGRREEYDVLDKRRGRDPEMGGKPQRRKNPQEGLYNELQKDKMAEAYSEIGMKGERRRGKGHDGLYQGLSTATKDTYDALHMQALPPRRAKRSGSGATNFSLLKQAGDVEENPGPTSMDWIWRILFLVGAATGAHSFEQEVTQIPAALSVPEGENLVLNCSFTDSAIYNLQWFRQDPGKGLTSLLLIQSSQREQTSGRLNASLDKSSGRSTLYIAASQPGDSATYLCAVRPTSGGSYIPTFGRGTSLIVHPYTRIQNPDPAVYQLRDSKSSDKSVCLFTDFDSQTNVSQSKDSDVYITDKTVLDMRSMDFKSNSAVAWSNKSDFACANAFNNSIIPEDTFFPSPESSCGTTTPGERSSLPAFYPGTSGSCSGCGSLSLPLLAGLVAADAVASLLIVGAVFRSKRSRLLHSDYMNMTPRRPGPTRKHYQPYAPPRDFAAYRSLCARPRRSPAQEDGKVYINMPGRG

SEQ ID NO: 10668 - protein, 1086 aa, synthetic construct
MALPVTALLLPLALLLHAARPEFNAGVTQTPKFQVLKTGQSMTLQCAQDMNHEYMSWYRQDPGMGLRLIHYSVAIQTTDQGEVPNGYNVSRSTIEDFPLRLLSAAPSQTSVYFCASSYLGNTGELFFGEGSRLTVLEDLKNVFPPEVAVFEPSEAEISHTQKATLVCLATGFYPDHVELSWWVNGKEVHSGVSTDPQPLKEQPALNDSRYCLSSRLRVSATFWQNPRNHFRCQVQFYGLSENDEWTQDRAKPVTQIVSAEAWGRADCGSQSFGLLDPKLCYLLDGILFIYGVILTALFLRVKFSRSADAPAYQQGQNQLYNELNLGRREEYDVLDKRRGRDPEMGGKPQRRKNPQEGLYNELQKDKMAEAYSEIGMKGERRRGKGHDGLYQGLSTATKDTYDALHMQALPPRRAKRSGSGATNFSLLKQAGDVEENPGPTSMDWIWRILFLVGAATGAHSFEQEVTQIPAALSVPEGENLVLNCSFTDSAIYNLQWFRQDPGKGLTSLLLIQSSQREQTSGRLNASLDKSSGRSTLYIAASQPGDSATYLCAVRPTSGGSYIPTFGRGTSLIVHPYTRIQNPDPAVYQLRDSKSSDKSVCLFTDFDSQTNVSQSKDSDVYITDKTVLDMRSMDFKSNSAVAWSNKSDFACANAFNNSIIPEDTFFPSPESSCGTQSFGLLDPKLCYLLDGILFIYGVILTALFLRVKFSRSADAPAYQQGQNQLYNELNLGRREEYDVLDKRRGRDPEMGGKPQRRKNPQEGLYNELQKDKMAEAYSEIGMKGERRRGKGHDGLYQGLSTATKDTYDALHMQALPPRRAKRSGSGVKQTLNFDLLKLAGDVESNPGPSRGHMALPVTALLLPLALLLHAARPSQFRVSPLDRTWNLGETVELKCQVLLSNPTSGCSWLFQPRGAAASPTFLLYLSQNKPKAAEGLDTQRFSGKRLGDTFVLTLSDFRRENEGYYFCSALSNSIMYFSHFVPVFLPAKPTTTPAPRPPTPAPTIASQPLSLRPEACRPAAGGAVHTRGLDFACDIYIWAPLAGTCGVLLLSLVITLYCNHRNRRRVCKCPRPVVKSGDKPSLSARYV

SEQ ID NO: 10669 - protein, 826 aa, synthetic construct
MALPVTALLLPLALLLHAARPEFNAGVTQTPKFQVLKTGQSMTLQCAQDMNHEYMSWYRQDPGMGLRLIHYSVAIQTTDQGEVPNGYNVSRSTIEDFPLRLLSAAPSQTSVYFCASSYLGNTGELFFGEGSRLTVLEDLKNVFPPEVAVFEPSEAEISHTQKATLVCLATGFYPDHVELSWWVNGKEVHSGVSTDPQPLKEQPALNDSRYCLSSRLRVSATFWQNPRNHFRCQVQFYGLSENDEWTQDRAKPVTQIVSAEAWGRADCGSQSFGLLDPKLCYLLDGILFIYGVILTALFLRVKFSRSADAPAYQQGQNQLYNELNLGRREEYDVLDKRRGRDPEMGGKPQRRKNPQEGLYNELQKDKMAEAYSEIGMKGERRRGKGHDGLYQGLSTATKDTYDALHMQALPPRRAKRSGSGATNFSLLKQAGDVEENPGPTSMDWIWRILFLVGAATGAHSFEQEVTQIPAALSVPEGENLVLNCSFTDSAIYNLQWFRQDPGKGLTSLLLIQSSQREQTSGRLNASLDKSSGRSTLYIAASQPGDSATYLCAVRPTSGGSYIPTFGRGTSLIVHPYTRASTKGPSVFPLAPSSKSTSGGTAALGCLVKDYFPEPVTVSWNSGALTSGVHTFPAVLQSSGLYSLSSVVTVPSSSLGTQTYICNVNHKPSNTKVDKRVEPKSCGTQSFGLLDPKLSYLLDGILFIYGVILTALFLRVKFSRSADAPAYQQGQNQLYNELNLGRREEYDVLDKRRGRDPEMGGKPQRRKNPQEGLYNELQKDKMAEAYSEIGMKGERRRGKGHDGLYQGLSTATKDTYDALHMQALPPR

SEQ ID NO: 10670 - protein, 817 aa, synthetic construct
MALPVTALLLPLALLLHAARPEFNAGVTQTPKFQVLKTGQSMTLQCAQDMNHEYMSWYRQDPGMGLRLIHYSVAIQTTDQGEVPNGYNVSRSTIEDFPLRLLSAAPSQTSVYFCASSYLGNTGELFFGEGSRLTVLEDLKNVFPPEVAVFEPSEAEISHTQKATLVCLATGFYPDHVELSWWVNGKEVHSGVSTDPQPLKEQPALNDSRYCLSSRLRVSATFWQNPRNHFRCQVQFYGLSENDEWTQDRAKPVTQIVSAEAWGRADCGSQSFGLLDPKLCYLLDGILFIYGVILTALFLRVKFSRSADAPAYQQGQNQLYNELNLGRREEYDVLDKRRGRDPEMGGKPQRRKNPQEGLYNELQKDKMAEAYSEIGMKGERRRGKGHDGLYQGLSTATKDTYDALHMQALPPRRAKRSGSGATNFSLLKQAGDVEENPGPTSMDWIWRILFLVGAATGAHSFEQEVTQIPAALSVPEGENLVLNCSFTDSAIYNLQWFRQDPGKGLTSLLLIQSSQREQTSGRLNASLDKSSGRSTLYIAASQPGDSATYLCAVRPTSGGSYIPTFGRGTSLIVHPYTRIQNPDPAVYQLRDSKSSDKSVCLFTDFDSQTNVSQSKDSDVYITDKTVLDMRSMDFKSNSAVAWSNKSDFACANAFNNSIIPEDTFFPSPESSCGTQSFGLLDPKLSYLLDGILFIYGVILTALFLRVKFSRSADAPAYQQGQNQLYNELNLGRREEYDVLDKRRGRDPEMGGKPQRRKNPQEGLYNELQKDKMAEAYSEIGMKGERRRGKGHDGLYQGLSTATKDTYDALHMQALPPR

SEQ ID NO: 10671 - protein, 987 aa, synthetic construct
MALPVTALLLPLALLLHAARPEFNAGVTQTPKFQVLKTGQSMTLQCAQDMNHEYMSWYRQDPGMGLRLIHYSVAIQTTDQGEVPNGYNVSRSTIEDFPLRLLSAAPSQTSVYFCASSYLGNTGELFFGEGSRLTVLEGQPKANPTVTLFPPSSEELQANKATLVCLISDFYPGAVTVAWKADGSPVKAGVETTKPSKQSNNKYAASSYLSLTPEQWKSHRSYSCQVTHEGSTVEKTVAPTECSGSLGEPQLCYILDAILFLYGIVLTLLYCRLKIQVRKAAITSYEKSDGVYTGLSTRNQETYETLKHEKPPQRAKRSGSGATNFSLLKQAGDVEENPGPTSMDWIWRILFLVGAATGAHSFEQEVTQIPAALSVPEGENLVLNCSFTDSAIYNLQWFRQDPGKGLTSLLLIQSSQREQTSGRLNASLDKSSGRSTLYIAASQPGDSATYLCAVRPTSGGSYIPTFGRGTSLIVHPYTRIQNPDPAVYQLRDSKSSDKSVCLFTDFDSQTNVSQSKDSDVYITDKTVLDMRSMDFKSNSAVAWSNKSDFACANAFNNSIIPEDTFFPSPESSCGTQSFGLLDPKLCYLLDGILFIYGVILTALFLRVKFSRSADAPAYQQGQNQLYNELNLGRREEYDVLDKRRGRDPEMGGKPQRRKNPQEGLYNELQKDKMAEAYSEIGMKGERRRGKGHDGLYQGLSTATKDTYDALHMQALPPRRAKRSGSGVKQTLNFDLLKLAGDVESNPGPSRGHMALPVTALLLPLALLLHAARPSQFRVSPLDRTWNLGETVELKCQVLLSNPTSGCSWLFQPRGAAASPTFLLYLSQNKPKAAEGLDTQRFSGKRLGDTFVLTLSDFRRENEGYYFCSALSNSIMYFSHFVPVFLPAKPTTTPAPRPPTPAPTIASQPLSLRPEACRPAAGGAVHTRGLDFACDIYIWAPLAGTCGVLLLSLVITLYCNHRNRRRVCKCPRPVVKSGDKPSLSARYV

SEQ ID NO: 10672 - protein, 751 aa, synthetic construct; identical to SEQ ID NO: 9363

SEQ ID NO: 10673 - protein, 751 aa, synthetic construct; identical to SEQ ID NO: 9363

SEQ ID NO: 10674 - protein, 742 aa, synthetic construct; identical to SEQ ID NO: 9368

SEQ ID NO: 10675 - protein, 991 aa, synthetic construct
MALPVTALLLPLALLLHAARPEFNAGVTQTPKFQVLKTGQSMTLQCAQDMNHEYMSWYRQDPGMGLRLIHYSVAIQTTDQGEVPNGYNVSRSTIEDFPLRLLSAAPSQTSVYFCASSYLGNTGELFFGEGSRLTVLEGQPKANPTVTLFPPSSEELQANKATLVCLISDFYPGAVTVAWKADGSPVKAGVETTKPSKQSNNKYAASSYLSLTPEQWKSHRSYSCQVTHEGSTVEKTVAPTECSTTPGERSSLPAFYPGTSGSCSGCGSLSLPLLAGLVAADAVASLLIVGAVFLCARPRRSPAQEDGKVYINMPGRGRAKRSGSGATNFSLLKQAGDVEENPGPTSMDWIWRILFLVGAATGAHSFEQEVTQIPAALSVPEGENLVLNCSFTDSAIYNLQWFRQDPGKGLTSLLLIQSSQREQTSGRLNASLDKSSGRSTLYIAASQPGDSATYLCAVRPTSGGSYIPTFGRGTSLIVHPYTRIQNPDPAVYQLRDSKSSDKSVCLFTDFDSQTNVSQSKDSDVYITDKTVLDMRSMDFKSNSAVAWSNKSDFACANAFNNSIIPEDTFFPSPESSCGTQSFGLLDPKLCYLLDGILFIYGVILTALFLRVKFSRSADAPAYQQGQNQLYNELNLGRREEYDVLDKRRGRDPEMGGKPQRRKNPQEGLYNELQKDKMAEAYSEIGMKGERRRGKGHDGLYQGLSTATKDTYDALHMQALPPRRAKRSGSGVKQTLNFDLLKLAGDVESNPGPSRGHMALPVTALLLPLALLLHAARPSQFRVSPLDRTWNLGETVELKCQVLLSNPTSGCSWLFQPRGAAASPTFLLYLSQNKPKAAEGLDTQRFSGKRLGDTFVLTLSDFRRENEGYYFCSALSNSIMYFSHFVPVFLPAKPTTTPAPRPPTPAPTIASQPLSLRPEACRPAAGGAVHTRGLDFACDIYIWAPLAGTCGVLLLSLVITLYCNHRNRRRVCKCPRPVVKSGDKPSLSARYV

SEQ ID NO: 10676 - protein, 1024 aa, synthetic construct
MALPVTALLLPLALLLHAARPEFNAGVTQTPKFQVLKTGQSMTLQCAQDMNHEYMSWYRQDPGMGLRLIHYSVAIQTTDQGEVPNGYNVSRSTIEDFPLRLLSAAPSQTSVYFCASSYLGNTGELFFGEGSRLTVLEDLKNVFPPEVAVFEPSEAEISHTQKATLVCLATGFYPDHVELSWWVNGKEVHSGVSTDPQPLKEQPALNDSRYCLSSRLRVSATFWQNPRNHFRCQVQFYGLSENDEWTQDRAKPVTQIVSAEAWGRADCGSQSFGLLDPKLCYLLDGILFIYGVILTALFLRVKFSRSADAPAYQQGQNQLYNELNLGRREEYDVLDKRRGRDPEMGGKPQRRKNPQEGLYNELQKDKMAEAYSEIGMKGERRRGKGHDGLYQGLSTATKDTYDALHMQALPPRRAKRSGSGATNFSLLKQAGDVEENPGPTSMDWIWRILFLVGAATGAHSFEQEVTQIPAALSVPEGENLVLNCSFTDSAIYNLQWFRQDPGKGLTSLLLIQSSQREQTSGRLNASLDKSSGRSTLYIAASQPGDSATYLCAVRPTSGGSYIPTFGRGTSLIVHPYTRASTKGPSVFPLAPSSKSTSGGTAALGCLVKDYFPEPVTVSWNSGALTSGVHTFPAVLQSSGLYSLSSVVTVPSSSLGTQTYICNVNHKPSNTKVDKRVEPKSCTTPGERSSLPAFYPGTSGSCSGCGSLSLPLLAGLVAADAVASLLIVGAVFLCARPRRSPAQEDGKVYINMPGRGRAKRSGSGVKQTLNFDLLKLAGDVESNPGPSRGHMALPVTALLLPLALLLHAARPSQFRVSPLDRTWNLGETVELKCQVLLSNPTSGCSWLFQPRGAAASPTFLLYLSQNKPKAAEGLDTQRFSGKRLGDTFVLTLSDFRRENEGYYFCSALSNSIMYFSHFVPVFLPAKPTTTPAPRPPTPAPTIASQPLSLRPEACRPAAGGAVHTRGLDFACDIYIWAPLAGTCGVLLLSLVITLYCNHRNRRRVCKCPRPVVKSGDKPSLSARYV

SEQ ID NO: 10677 - protein, 936 aa, synthetic construct
MALPVTALLLPLALLLHAARPNAGVTQTPKFQVLKTGQSMTLQCAQDMNHEYMSWYRQDPGMGLRLIHYSVAIQTTDQGEVPNGYNVSRSTIEDFPLRLLSAAPSQTSVYFCASSYLGNTGELFFGEGSRLTVLELWVSQPPEIRTLEGSSAFLPCSFNASQGRLAIGSVTWFRDEVVPGKEVRNGTPEFRGRLAPLASSRFLHDHQAELHIRDVRGHDASIYVCRVEVLGLGVGTGNGTRLVVEKEHPQLGAGTVLLLRAGFYAVSFLSVAVGSTVYYQGKCLTWKGPRRQLPAVVPAPLPPPCGSSAHLLPPVPGGRAKRSGSGATNFSLLKQAGDVEENPGPTSMDWIWRILFLVGAATGAHSFEQEVTQIPAALSVPEGENLVLNCSFTDSAIYNLQWFRQDPGKGLTSLLLIQSSQREQTSGRLNASLDKSSGRSTLYIAASQPGDSATYLCAVRPTSGGSYIPTFGRGTSLIVHPYTRLWVSQPPEIRTLEGSSAFLPCSFNASQGRLAIGSVTWFRDEVVPGKEVRNGTPEFRGRLAPLASSRFLHDHQAELHIRDVRGHDASIYVCRVEVLGLGVGTGNGTRLVVEKEHPQLGAGTVLLLRAGFYAVSFLSVAVGSTVYYQGKCLTWKGPRRQLPAVVPAPLPPPCGSSAHLLPPVPGGRAKRSGSGVKQTLNFDLLKLAGDVESNPGPSRGHMALPVTALLLPLALLLHAARPSQFRVSPLDRTWNLGETVELKCQVLLSNPTSGCSWLFQPRGAAASPTFLLYLSQNKPKAAEGLDTQRFSGKRLGDTFVLTLSDFRRENEGYYFCSALSNSIMYFSHFVPVFLPAKPTTTPAPRPPTPAPTIASQPLSLRPEACRPAAGGAVHTRGLDFACDIYIWAPLAGTCGVLLLSLVITLYCNHRNRRRVCKCPRPVVKSGDKPSLSARYV

SEQ ID NO: 10678 - protein, 1071 aa, synthetic construct
MALPVTALLLPLALLLHAARPEFNAGVTQTPKFQVLKTGQSMTLQCAQDMNHEYMSWYRQDPGMGLRLIHYSVAIQTTDQGEVPNGYNVSRSTIEDFPLRLLSAAPSQTSVYFCASSYLGNTGELFFGEGSRLTVLEGQPKANPTVTLFPPSSEELQANKATLVCLISDFYPGAVTVAWKADGSPVKAGVETTKPSKQSNNKYAASSYLSLTPEQWKSHRSYSCQVTHEGSTVEKTVAPTECSGSQSFGLLDPKLCYLLDGILFIYGVILTALFLRVKFSRSADAPAYQQGQNQLYNELNLGRREEYDVLDKRRGRDPEMGGKPQRRKNPQEGLYNELQKDKMAEAYSEIGMKGERRRGKGHDGLYQGLSTATKDTYDALHMQALPPRRAKRSGSGATNFSLLKQAGDVEENPGPTSMDWIWRILFLVGAATGAHSFEQEVTQIPAALSVPEGENLVLNCSFTDSAIYNLQWFRQDPGKGLTSLLLIQSSQREQTSGRLNASLDKSSGRSTLYIAASQPGDSATYLCAVRPTSGGSYIPTFGRGTSLIVHPYTRASTKGPSVFPLAPSSKSTSGGTAALGCLVKDYFPEPVTVSWNSGALTSGVHTFPAVLQSSGLYSLSSVVTVPSSSLGTQTYICNVNHKPSNTKVDKRVEPKSCGTQSFGLLDPKLCYLLDGILFIYGVILTALFLRVKFSRSADAPAYQQGQNQLYNELNLGRREEYDVLDKRRGRDPEMGGKPQRRKNPQEGLYNELQKDKMAEAYSEIGMKGERRRGKGHDGLYQGLSTATKDTYDALHMQALPPRRAKRSGSGVKQTLNFDLLKLAGDVESNPGPSRGHMALPVTALLLPLALLLHAARPSQFRVSPLDRTWNLGETVELKCQVLLSNPTSGCSWLFQPRGAAASPTFLLYLSQNKPKAAEGLDTQRFSGKRLGDTFVLTLSDFRRENEGYYFCSALSNSIMYFSHFVPVFLPAKPTTTPAPRPPTPAPTIASQPLSLRPEACRPAAGGAVHTRGLDFACDIYIWAPLAGTCGVLLLSLVITLYCNHRNRRRVCKCPRPVVKSGDKPSLSARYV

SEQ ID NO: 10679 - protein, 1089 aa, synthetic construct
MALPVTALLLPLALLLHAARPEFNAGVTQTPKFQVLKTGQSMTLQCAQDMNHEYMSWYRQDPGMGLRLIHYSVAIQTTDQGEVPNGYNVSRSTIEDFPLRLLSAAPSQTSVYFCASSYLGNTGELFFGEGSRLTVLEGQPKANPTVTLFPPSSEELQANKATLVCLISDFYPGAVTVAWKADGSPVKAGVETTKPSKQSNNKYAASSYLSLTPEQWKSHRSYSCQVTHEGSTVEKTVAPTECSGSQSFGLLDPKLCYLLDGILFIYGVILTALFLRVKFSRSADAPAYQQGQNQLYNELNLGRREEYDVLDKRRGRDPEMGGKPQRRKNPQEGLYNELQKDKMAEAYSEIGMKGERRRGKGHDGLYQGLSTATKDTYDALHMQALPPRRAKRSGSGATNFSLLKQAGDVEENPGPTSMDWIWRILFLVGAATGAHSFEQEVTQIPAALSVPEGENLVLNCSFTDSAIYNLQWFRQDPGKGLTSLLLIQSSQREQTSGRLNASLDKSSGRSTLYIAASQPGDSATYLCAVRPTSGGSYIPTFGRGTSLIVHPYTRASPTSPKVFPLSLCSTQPDGNVVIACLVQGFFPQEPLSVTWSESGQGVTARNFPPSQDASGDLYTTSSQLTLPATQCLAGKSVTCHVKHYTNPSQDVTVPCPVPSTPPTPSPSTPPTPSPSGTQSFGLLDPKLCYLLDGILFIYGVILTALFLRVKFSRSADAPAYQQGQNQLYNELNLGRREEYDVLDKRRGRDPEMGGKPQRRKNPQEGLYNELQKDKMAEAYSEIGMKGERRRGKGHDGLYQGLSTATKDTYDALHMQALPPRRAKRSGSGVKQTLNFDLLKLAGDVESNPGPSRGHMALPVTALLLPLALLLHAARPSQFRVSPLDRTWNLGETVELKCQVLLSNPTSGCSWLFQPRGAAASPTFLLYLSQNKPKAAEGLDTQRFSGKRLGDTFVLTLSDFRRENEGYYFCSALSNSIMYFSHFVPVFLPAKPTTTPAPRPPTPAPTIASQPLSLRPEACRPAAGGAVHTRGLDFACDIYIWAPLAGTCGVLLLSLVITLYCNHRNRRRVCKCPRPVVKSGDKPSLSARYV

SEQ ID NO: 10680 - protein, 1070 aa, synthetic construct
MALPVTALLLPLALLLHAARPEFNAGVTQTPKFQVLKTGQSMTLQCAQDMNHEYMSWYRQDPGMGLRLIHYSVAIQTTDQGEVPNGYNVSRSTIEDFPLRLLSAAPSQTSVYFCASSYLGNTGELFFGEGSRLTVLEGQPKANPTVTLFPPSSEELQANKATLVCLISDFYPGAVTVAWKADGSPVKAGVETTKPSKQSNNKYAASSYLSLTPEQWKSHRSYSCQVTHEGSTVEKTVAPTECSGSQSFGLLDPKLCYLLDGILFIYGVILTALFLRVKFSRSADAPAYQQGQNQLYNELNLGRREEYDVLDKRRGRDPEMGGKPQRRKNPQEGLYNELQKDKMAEAYSEIGMKGERRRGKGHDGLYQGLSTATKDTYDALHMQALPPRRAKRSGSGATNFSLLKQAGDVEENPGPTSMDWIWRILFLVGAATGAHSFEQEVTQIPAALSVPEGENLVLNCSFTDSAIYNLQWFRQDPGKGLTSLLLIQSSQREQTSGRLNASLDKSSGRSTLYIAASQPGDSATYLCAVRPTSGGSYIPTFGRGTSLIVHPYTRASTKGPSVFPLAPCSRSTSESTAALGCLVKDYFPEPVTVSWNSGALTSGVHTFPAVLQSSGLYSLSSVVTVPSSNFGTQTYTCNVDHKPSNTKVDKTVERKCGTQSFGLLDPKLCYLLDGILFIYGVILTALFLRVKFSRSADAPAYQQGQNQLYNELNLGRREEYDVLDKRRGRDPEMGGKPQRRKNPQEGLYNELQKDKMAEAYSEIGMKGERRRGKGHDGLYQGLSTATKDTYDALHMQALPPRRAKRSGSGVKQTLNFDLLKLAGDVESNPGPSRGHMALPVTALLLPLALLLHAARPSQFRVSPLDRTWNLGETVELKCQVLLSNPTSGCSWLFQPRGAAASPTFLLYLSQNKPKAAEGLDTQRFSGKRLGDTFVLTLSDFRRENEGYYFCSALSNSIMYFSHFVPVFLPAKPTTTPAPRPPTPAPTIASQPLSLRPEACRPAAGGAVHTRGLDFACDIYIWAPLAGTCGVLLLSLVITLYCNHRNRRRVCKCPRPVVKSGDKPSLSARYV

SEQ ID NO: 10681 - protein, 1125 aa, synthetic construct
MALPVTALLLPLALLLHAARPNAGVTQTPKFQVLKTGQSMTLQCAQDMNHEYMSWYRQDPGMGLRLIHYSVAIQTTDQGEVPNGYNVSRSTIEDFPLRLLSAAPSQTSVYFCASSYLGNTGELFFGEGSRLTVLEGQPKANPTVTLFPPSSEELQANKATLVCLISDFYPGAVTVAWKADGSPVKAGVETTKPSKQSNNKYAASSYLSLTPEQWKSHRSYSCQVTHEGSTVEKTVAPTECSGSQSFGLLDPKLCYLLDGILFIYGVILTALFLRVKFSRSADAPAYQQGQNQLYNELNLGRREEYDVLDKRRGRDPEMGGKPQRRKNPQEGLYNELQKDKMAEAYSEIGMKGERRRGKGHDGLYQGLSTATKDTYDALHMQALPPRRAKRSGSGATNFSLLKQAGDVEENPGPTSMDWIWRILFLVGAATGAHSFEQEVTQIPAALSVPEGENLVLNCSFTDSAIYNLQWFRQDPGKGLTSLLLIQSSQREQTSGRLNASLDKSSGRSTLYIAASQPGDSATYLCAVRPTSGGSYIPTFGRGTSLIVHPYTRAPTKAPDVFPIISGCRHPKDNSPVVLACLITGYHPTSVTVTWYMGTQSQPQRTFPEIQRRDSYYMTSSQLSTPLQQWRQGEYKCVVQHTASKSKKEIFRWPESPKAQASSVPTAQPQAEGSLAKATTAPATTRNTGRGGEEKKKEKEKEEQEERETKTPGTQSFGLLDPKLCYLLDGILFIYGVILTALFLRVKFSRSADAPAYQQGQNQLYNELNLGRREEYDVLDKRRGRDPEMGGKPQRRKNPQEGLYNELQKDKMAEAYSEIGMKGERRRGKGHDGLYQGLSTATKDTYDALHMQALPPRRAKRSGSGVKQTLNFDLLKLAGDVESNPGPSRGHMALPVTALLLPLALLLHAARPSQFRVSPLDRTWNLGETVELKCQVLLSNPTSGCSWLFQPRGAAASPTFLLYLSQNKPKAAEGLDTQRFSGKRLGDTFVLTLSDFRRENEGYYFCSALSNSIMYFSHFVPVFLPAKPTTTPAPRPPTPAPTIASQPLSLRPEACRPAAGGAVHTRGLDFACDIYIWAPLAGTCGVLLLSLVITLYCNHRNRRRVCKCPRPVVKSGDKPSLSARYV

SEQ ID NO: 10682 - protein, 1067 aa, synthetic construct
MALPVTALLLPLALLLHAARPNAGVTQTPKFQVLKTGQSMTLQCAQDMNHEYMSWYRQDPGMGLRLIHYSVAIQTTDQGEVPNGYNVSRSTIEDFPLRLLSAAPSQTSVYFCASSYLGNTGELFFGEGSRLTVLEGQPKANPTVTLFPPSSEELQANKATLVCLISDFYPGAVTVAWKADGSPVKAGVETTKPSKQSNNKYAASSYLSLTPEQWKSHRSYSCQVTHEGSTVEKTVAPTECSGSQSFGLLDPKLCYLLDGILFIYGVILTALFLRVKFSRSADAPAYQQGQNQLYNELNLGRREEYDVLDKRRGRDPEMGGKPQRRKNPQEGLYNELQKDKMAEAYSEIGMKGERRRGKGHDGLYQGLSTATKDTYDALHMQALPPRRAKRSGSGATNFSLLKQAGDVEENPGPTSMDWIWRILFLVGAATGAHSFEQEVTQIPAALSVPEGENLVLNCSFTDSAIYNLQWFRQDPGKGLTSLLLIQSSQREQTSGRLNASLDKSSGRSTLYIAASQPGDSATYLCAVRPTSGGSYIPTFGRGTSLIVHPYTRASTKGPSVFPLAPCSRSTSESTAALGCLVKDYFPEPVTVSWNSGALTSGVHTFPAVLQSSGLYSLSSVVTVPSSNFGTQTYTCNVDHKPSNTKVDKTVERKGTQSFGLLDPKLCYLLDGILFIYGVILTALFLRVKFSRSADAPAYQQGQNQLYNELNLGRREEYDVLDKRRGRDPEMGGKPQRRKNPQEGLYNELQKDKMAEAYSEIGMKGERRRGKGHDGLYQGLSTATKDTYDALHMQALPPRRAKRSGSGVKQTLNFDLLKLAGDVESNPGPSRGHMALPVTALLLPLALLLHAARPSQFRVSPLDRTWNLGETVELKCQVLLSNPTSGCSWLFQPRGAAASPTFLLYLSQNKPKAAEGLDTQRFSGKRLGDTFVLTLSDFRRENEGYYFCSALSNSIMYFSHFVPVFLPAKPTTTPAPRPPTPAPTIASQPLSLRPEACRPAAGGAVHTRGLDFACDIYIWAPLAGTCGVLLLSLVITLYCNHRNRRRVCKCPRPVVKSGDKPSLSARYV

SEQ ID NO: 10683 - protein, 1074 aa, synthetic construct
MALPVTALLLPLALLLHAARPNAGVTQTPKFQVLKTGQSMTLQCAQDMNHEYMSWYRQDPGMGLRLIHYSVAIQTTDQGEVPNGYNVSRSTIEDFPLRLLSAAPSQTSVYFCASSYLGNTGELFFGEGSRLTVLEGQPKANPTVTLFPPSSEELQANKATLVCLISDFYPGAVTVAWKADGSPVKAGVETTKPSKQSNNKYAASSYLSLTPEQWKSHRSYSCQVTHEGSTVEKTVAPTECSGSQSFGLLDPKLCYLLDGILFIYGVILTALFLRVKFSRSADAPAYQQGQNQLYNELNLGRREEYDVLDKRRGRDPEMGGKPQRRKNPQEGLYNELQKDKMAEAYSEIGMKGERRRGKGHDGLYQGLSTATKDTYDALHMQALPPRRAKRSGSGATNFSLLKQAGDVEENPGPTSMDWIWRILFLVGAATGAHSFEQEVTQIPAALSVPEGENLVLNCSFTDSAIYNLQWFRQDPGKGLTSLLLIQSSQREQTSGRLNASLDKSSGRSTLYIAASQPGDSATYLCAVRPTSGGSYIPTFGRGTSLIVHPYTRASPTSPKVFPLSLDSTPQDGNVVVACLVQGFFPQEPLSVTWSESGQNVTARNFPPSQDASGDLYTTSSQLTLPATQCPDGKSVTCHVKHYTNPSQDVTVPCPVPPPPPGTQSFGLLDPKLCYLLDGILFIYGVILTALFLRVKFSRSADAPAYQQGQNQLYNELNLGRREEYDVLDKRRGRDPEMGGKPQRRKNPQEGLYNELQKDKMAEAYSEIGMKGERRRGKGHDGLYQGLSTATKDTYDALHMQALPPRRAKRSGSGVKQTLNFDLLKLAGDVESNPGPSRGHMALPVTALLLPLALLLHAARPSQFRVSPLDRTWNLGETVELKCQVLLSNPTSGCSWLFQPRGAAASPTFLLYLSQNKPKAAEGLDTQRFSGKRLGDTFVLTLSDFRRENEGYYFCSALSNSIMYFSHFVPVFLPAKPTTTPAPRPPTPAPTIASQPLSLRPEACRPAAGGAVHTRGLDFACDIYIWAPLAGTCGVLLLSLVITLYCNHRNRRRVCKCPRPVVKSGDKPSLSARYV

SEQ ID NO: 10684 - protein, 1069 aa, synthetic construct
MALPVTALLLPLALLLHAARPNAGVTQTPKFQVLKTGQSMTLQCAQDMNHEYMSWYRQDPGMGLRLIHYSVAIQTTDQGEVPNGYNVSRSTIEDFPLRLLSAAPSQTSVYFCASSYLGNTGELFFGEGSRLTVLEGQPKANPTVTLFPPSSEELQANKATLVCLISDFYPGAVTVAWKADGSPVKAGVETTKPSKQSNNKYAASSYLSLTPEQWKSHRSYSCQVTHEGSTVEKTVAPTECSGSQSFGLLDPKLCYLLDGILFIYGVILTALFLRVKFSRSADAPAYQQGQNQLYNELNLGRREEYDVLDKRRGRDPEMGGKPQRRKNPQEGLYNELQKDKMAEAYSEIGMKGERRRGKGHDGLYQGLSTATKDTYDALHMQALPPRRAKRSGSGATNFSLLKQAGDVEENPGPTSMDWIWRILFLVGAATGAHSFEQEVTQIPAALSVPEGENLVLNCSFTDSAIYNLQWFRQDPGKGLTSLLLIQSSQREQTSGRLNASLDKSSGRSTLYIAASQPGDSATYLCAVRPTSGGSYIPTFGRGTSLIVHPYTRASTQSPSVFPLTRCCKNIPSNATSVTLGCLATGYFPEPVMVTWDTGSLNGTTMTLPATTLTLSGHYATISLLTVSGAWAKQMFTCRVAHTPSSTDWVDNKTFSGTQSFGLLDPKLCYLLDGILFIYGVILTALFLRVKFSRSADAPAYQQGQNQLYNELNLGRREEYDVLDKRRGRDPEMGGKPQRRKNPQEGLYNELQKDKMAEAYSEIGMKGERRRGKGHDGLYQGLSTATKDTYDALHMQALPPRRAKRSGSGVKQTLNFDLLKLAGDVESNPGPSRGHMALPVTALLLPLALLLHAARPSQFRVSPLDRTWNLGETVELKCQVLLSNPTSGCSWLFQPRGAAASPTFLLYLSQNKPKAAEGLDTQRFSGKRLGDTFVLTLSDFRRENEGYYFCSALSNSIMYFSHFVPVFLPAKPTTTPAPRPPTPAPTIASQPLSLRPEACRPAAGGAVHTRGLDFACDIYIWAPLAGTCGVLLLSLVITLYCNHRNRRRVCKCPRPVVKSGDKPSLSARYV

SEQ ID NO: 10685 - protein, 1069 aa, synthetic construct
MALPVTALLLPLALLLHAARPNAGVTQTPKFQVLKTGQSMTLQCAQDMNHEYMSWYRQDPGMGLRLIHYSVAIQTTDQGEVPNGYNVSRSTIEDFPLRLLSAAPSQTSVYFCASSYLGNTGELFFGEGSRLTVLEGQPKANPTVTLFPPSSEELQANKATLVCLISDFYPGAVTVAWKADGSPVKAGVETTKPSKQSNNKYAASSYLSLTPEQWKSHRSYSCQVTHEGSTVEKTVAPTECSGSQSFGLLDPKLCYLLDGILFIYGVILTALFLRVKFSRSADAPAYQQGQNQLYNELNLGRREEYDVLDKRRGRDPEMGGKPQRRKNPQEGLYNELQKDKMAEAYSEIGMKGERRRGKGHDGLYQGLSTATKDTYDALHMQALPPRRAKRSGSGATNFSLLKQAGDVEENPGPTSMDWIWRILFLVGAATGAHSFEQEVTQIPAALSVPEGENLVLNCSFTDSAIYNLQWFRQDPGKGLTSLLLIQSSQREQTSGRLNASLDKSSGRSTLYIAASQPGDSATYLCAVRPTSGGSYIPTFGRGTSLIVHPYTRASTKGPSVFPLAPCSRSTSESTAALGCLVKDYFPEPVTVSWNSGALTSGVHTFPAVLQSSGLYSLSSVVTVPSSSLGTKTYTCNVDHKPSNTKVDKRVESKYGGTQSFGLLDPKLCYLLDGILFIYGVILTALFLRVKFSRSADAPAYQQGQNQLYNELNLGRREEYDVLDKRRGRDPEMGGKPQRRKNPQEGLYNELQKDKMAEAYSEIGMKGERRRGKGHDGLYQGLSTATKDTYDALHMQALPPRRAKRSGSGVKQTLNFDLLKLAGDVESNPGPSRGHMALPVTALLLPLALLLHAARPSQFRVSPLDRTWNLGETVELKCQVLLSNPTSGCSWLFQPRGAAASPTFLLYLSQNKPKAAEGLDTQRFSGKRLGDTFVLTLSDFRRENEGYYFCSALSNSIMYFSHFVPVFLPAKPTTTPAPRPPTPAPTIASQPLSLRPEACRPAAGGAVHTRGLDFACDIYIWAPLAGTCGVLLLSLVITLYCNHRNRRRVCKCPRPVVKSGDKPSLSARYV

SEQ ID NO: 10686 - protein, 1069 aa, synthetic construct
MALPVTALLLPLALLLHAARPNAGVTQTPKFQVLKTGQSMTLQCAQDMNHEYMSWYRQDPGMGLRLIHYSVAIQTTDQGEVPNGYNVSRSTIEDFPLRLLSAAPSQTSVYFCASSYLGNTGELFFGEGSRLTVLEGQPKANPTVTLFPPSSEELQANKATLVCLISDFYPGAVTVAWKADGSPVKAGVETTKPSKQSNNKYAASSYLSLTPEQWKSHRSYSCQVTHEGSTVEKTVAPTECSGSQSFGLLDPKLCYLLDGILFIYGVILTALFLRVKFSRSADAPAYQQGQNQLYNELNLGRREEYDVLDKRRGRDPEMGGKPQRRKNPQEGLYNELQKDKMAEAYSEIGMKGERRRGKGHDGLYQGLSTATKDTYDALHMQALPPRRAKRSGSGATNFSLLKQAGDVEENPGPTSMDWIWRILFLVGAATGAHSFEQEVTQIPAALSVPEGENLVLNCSFTDSAIYNLQWFRQDPGKGLTSLLLIQSSQREQTSGRLNASLDKSSGRSTLYIAASQPGDSATYLCAVRPTSGGSYIPTFGRGTSLIVHPYTRASTKGPSVFPLAPCSRSTSESTAALGCLVKDYFPEPVTVSWNSGALTSGVHTFPAVLQSSGLYSLSSVVTVPSSNFGTQTYTCNVDHKPSNTKVDKTVERKCCGTQSFGLLDPKLCYLLDGILFIYGVILTALFLRVKFSRSADAPAYQQGQNQLYNELNLGRREEYDVLDKRRGRDPEMGGKPQRRKNPQEGLYNELQKDKMAEAYSEIGMKGERRRGKGHDGLYQGLSTATKDTYDALHMQALPPRRAKRSGSGVKQTLNFDLLKLAGDVESNPGPSRGHMALPVTALLLPLALLLHAARPSQFRVSPLDRTWNLGETVELKCQVLLSNPTSGCSWLFQPRGAAASPTFLLYLSQNKPKAAEGLDTQRFSGKRLGDTFVLTLSDFRRENEGYYFCSALSNSIMYFSHFVPVFLPAKPTTTPAPRPPTPAPTIASQPLSLRPEACRPAAGGAVHTRGLDFACDIYIWAPLAGTCGVLLLSLVITLYCNHRNRRRVCKCPRPVVKSGDKPSLSARYV

SEQ ID NO: 10687 - protein, 1084 aa, synthetic construct
MALPVTALLLPLALLLHAARPNAGVTQTPKFQVLKTGQSMTLQCAQDMNHEYMSWYRQDPGMGLRLIHYSVAIQTTDQGEVPNGYNVSRSTIEDFPLRLLSAAPSQTSVYFCASSYLGNTGELFFGEGSRLTVLEDLKNVFPPEVAVFEPSEAEISHTQKATLVCLATGFYPDHVELSWWVNGKEVHSGVSTDPQPLKEQPALNDSRYCLSSRLRVSATFWQNPRNHFRCQVQFYGLSENDEWTQDRAKPVTQIVSAEAWGRADCGSQSFGLLDPKLCYLLDGILFIYGVILTALFLRVKFSRSADAPAYQQGQNQLYNELNLGRREEYDVLDKRRGRDPEMGGKPQRRKNPQEGLYNELQKDKMAEAYSEIGMKGERRRGKGHDGLYQGLSTATKDTYDALHMQALPPRRAKRSGSGATNFSLLKQAGDVEENPGPTSMDWIWRILFLVGAATGAHSFEQEVTQIPAALSVPEGENLVLNCSFTDSAIYNLQWFRQDPGKGLTSLLLIQSSQREQTSGRLNASLDKSSGRSTLYIAASQPGDSATYLCAVRPTSGGSYIPTFGRGTSLIVHPYTRIQNPDPAVYQLRDSKSSDKSVCLFTDFDSQTNVSQSKDSDVYITDKTVLDMRSMDFKSNSAVAWSNKSDFACANAFNNSIIPEDTFFPSPESSCGTQSFGLLDPKLCYLLDGILFIYGVILTALFLRVKFSRSADAPAYQQGQNQLYNELNLGRREEYDVLDKRRGRDPEMGGKPQRRKNPQEGLYNELQKDKMAEAYSEIGMKGERRRGKGHDGLYQGLSTATKDTYDALHMQALPPRRAKRSGSGVKQTLNFDLLKLAGDVESNPGPSRGHMALPVTALLLPLALLLHAARPSQFRVSPLDRTWNLGETVELKCQVLLSNPTSGCSWLFQPRGAAASPTFLLYLSQNKPKAAEGLDTQRFSGKRLGDTFVLTLSDFRRENEGYYFCSALSNSIMYFSHFVPVFLPAKPTTTPAPRPPTPAPTIASQPLSLRPEACRPAAGGAVHTRGLDFACDIYIWAPLAGTCGVLLLSLVITLYCNHRNRRRVCKCPRPVVKSGDKPSLSARYV

SEQ ID NO: 10688 - protein, 1084 aa, synthetic construct
MALPVTALLLPLALLLHAARPNAGVTQTPKFQVLKTGQSMTLQCAQDMNHEYMSWYRQDPGMGLRLIHYSVAIQTTDQGEVPNGYNVSRSTIEDFPLRLLSAAPSQTSVYFCASSYLGNTGELFFGEGSRLTVLEDLKNVFPPEVAVFEPSKAEIAHTQKATLVCLATGFYPDHVELSWWVNGKEVHSGVCTDPQPLKEQPALNDSRYCLSSRLRVSATFWQNPRNHFRCQVQFYGLSENDEWTQDRAKPVTQIVSAEAWGRADCGSQSFGLLDPKLCYLLDGILFIYGVILTALFLRVKFSRSADAPAYQQGQNQLYNELNLGRREEYDVLDKRRGRDPEMGGKPQRRKNPQEGLYNELQKDKMAEAYSEIGMKGERRRGKGHDGLYQGLSTATKDTYDALHMQALPPRRAKRSGSGATNFSLLKQAGDVEENPGPTSMDWIWRILFLVGAATGAHSFEQEVTQIPAALSVPEGENLVLNCSFTDSAIYNLQWFRQDPGKGLTSLLLIQSSQREQTSGRLNASLDKSSGRSTLYIAASQPGDSATYLCAVRPTSGGSYIPTFGRGTSLIVHPYTRIQNPDPAVYQLRDSKSSDKSVCLFTDFDSQTNVSQSKDSDVYITDKCVLDMRSMDFKSNSAVAWSNKSDFACANAFNNSIIPEDTFFPSSDVPCGTQSFGLLDPKLCYLLDGILFIYGVILTALFLRVKFSRSADAPAYQQGQNQLYNELNLGRREEYDVLDKRRGRDPEMGGKPQRRKNPQEGLYNELQKDKMAEAYSEIGMKGERRRGKGHDGLYQGLSTATKDTYDALHMQALPPRRAKRSGSGVKQTLNFDLLKLAGDVESNPGPSRGHMALPVTALLLPLALLLHAARPSQFRVSPLDRTWNLGETVELKCQVLLSNPTSGCSWLFQPRGAAASPTFLLYLSQNKPKAAEGLDTQRFSGKRLGDTFVLTLSDFRRENEGYYFCSALSNSIMYFSHFVPVFLPAKPTTTPAPRPPTPAPTIASQPLSLRPEACRPAAGGAVHTRGLDFACDIYIWAPLAGTCGVLLLSLVITLYCNHRNRRRVCKCPRPVVKSGDKPSLSARYV

SEQ ID NO: 10689 - protein, 815 aa, synthetic construct
MALPVTALLLPLALLLHAARPNAGVTQTPKFQVLKTGQSMTLQCAQDMNHEYMSWYRQDPGMGLRLIHYSVAIQTTDQGEVPNGYNVSRSTIEDFPLRLLSAAPSQTSVYFCASSYLGNTGELFFGEGSRLTVLEDLKNVFPPEVAVFEPSEAEISHTQKATLVCLATGFYPDHVELSWWVNGKEVHSGVCTDPQPLKEQPALNDSRYCLSSRLRVSATFWQNPRNHFRCQVQFYGLSENDEWTQDRAKPVTQIVSAEAWGRADCGSQSFGLLDPKLCYLLDGILFIYGVILTALFLRVKFSRSADAPAYQQGQNQLYNELNLGRREEYDVLDKRRGRDPEMGGKPQRRKNPQEGLYNELQKDKMAEAYSEIGMKGERRRGKGHDGLYQGLSTATKDTYDALHMQALPPRRAKRSGSGATNFSLLKQAGDVEENPGPTSMDWIWRILFLVGAATGAHSFEQEVTQIPAALSVPEGENLVLNCSFTDSAIYNLQWFRQDPGKGLTSLLLIQSSQREQTSGRLNASLDKSSGRSTLYIAASQPGDSATYLCAVRPTSGGSYIPTFGRGTSLIVHPYTRIQNPDPAVYQLRDSKSSDKSVCLFTDFDSQTNVSQSKDSDVYITDKCVLDMRSMDFKSNSAVAWSNKSDFACANAFNNSIIPEDTFFPSPESSCGTQSFGLLDPKLCYLLDGILFIYGVILTALFLRVKFSRSADAPAYQQGQNQLYNELNLGRREEYDVLDKRRGRDPEMGGKPQRRKNPQEGLYNELQKDKMAEAYSEIGMKGERRRGKGHDGLYQGLSTATKDTYDALHMQALPPR

SEQ ID NO: 10690 - protein, 856 aa, synthetic construct
MALPVTALLLPLALLLHAARPNAGVTQTPKFQVLKTGQSMTLQCAQDMNHEYMSWYRQDPGMGLRLIHYSVAIQTTDQGEVPNGYNVSRSTIEDFPLRLLSAAPSQTSVYFCASSYLGNTGELFFGEGSRLTVLEQSFGLLDPKLCYLLDGILFIYGVILTALFLRVKFSRSADAPAYQQGQNQLYNELNLGRREEYDVLDKRRGRDPEMGGKPQRRKNPQEGLYNELQKDKMAEAYSEIGMKGERRRGKGHDGLYQGLSTATKDTYDALHMQALPPRRAKRSGSGATNFSLLKQAGDVEENPGPTSMDWIWRILFLVGAATGAHSFEQEVTQIPAALSVPEGENLVLNCSFTDSAIYNLQWFRQDPGKGLTSLLLIQSSQREQTSGRLNASLDKSSGRSTLYIAASQPGDSATYLCAVRPTSGGSYIPTFGRGTSLIVHPYTRQSFGLLDPKLCYLLDGILFIYGVILTALFLRVKFSRSADAPAYQQGQNQLYNELNLGRREEYDVLDKRRGRDPEMGGKPQRRKNPQEGLYNELQKDKMAEAYSEIGMKGERRRGKGHDGLYQGLSTATKDTYDALHMQALPPRRAKRSGSGVKQTLNFDLLKLAGDVESNPGPSRGHMALPVTALLLPLALLLHAARPSQFRVSPLDRTWNLGETVELKCQVLLSNPTSGCSWLFQPRGAAASPTFLLYLSQNKPKAAEGLDTQRFSGKRLGDTFVLTLSDFRRENEGYYFCSALSNSIMYFSHFVPVFLPAKPTTTPAPRPPTPAPTIASQPLSLRPEACRPAAGGAVHTRGLDFACDIYIWAPLAGTCGVLLLSLVITLYCNHRNRRRVCKCPRPVVKSGDKPSLSARYV

SEQ ID NO: 10691 - protein, 856 aa, synthetic construct
MALPVTALLLPLALLLHAARPNAGVTQTPKFQVLKTGQSMTLQCAQDMNHEYMSWYRQDPGMGLRLIHYSVAIQTTDQGEVPNGYNVSRSTIEDFPLRLLSAAPSQTSVYFCASSYLGNTGELFFGEGSRLTVLEDLKNVFPPEVAVFEPSEAEISHTQKATLVCLATGFYPDHVELSWWVNGKEVHSGVCTDPQPLKEQPALNDSRYCLSSRLRVSATFWQNPRNHFRCQVQFYGLSENDEWTQDRAKPVTQIVSAEAWGRADCGSQSFGLLDPKLCYLLDGILFIYGVILTALFLRSKRSRLLHSDYMNMTPRRPGPTRKHYQPYAPPRDFAAYRSRVKFSRSADAPAYQQGQNQLYNELNLGRREEYDVLDKRRGRDPEMGGKPQRRKNPQEGLYNELQKDKMAEAYSEIGMKGERRRGKGHDGLYQGLSTATKDTYDALHMQALPPRRAKRSGSGATNFSLLKQAGDVEENPGPTSMDWIWRILFLVGAATGAHSFEQEVTQIPAALSVPEGENLVLNCSFTDSAIYNLQWFRQDPGKGLTSLLLIQSSQREQTSGRLNASLDKSSGRSTLYIAASQPGDSATYLCAVRPTSGGSYIPTFGRGTSLIVHPYTRIQNPDPAVYQLRDSKSSDKSVCLFTDFDSQTNVSQSKDSDVYITDKCVLDMRSMDFKSNSAVAWSNKSDFACANAFNNSIIPEDTFFPSPESSCGTQSFGLLDPKLCYLLDGILFIYGVILTALFLRVKFSRSADAPAYQQGQNQLYNELNLGRREEYDVLDKRRGRDPEMGGKPQRRKNPQEGLYNELQKDKMAEAYSEIGMKGERRRGKGHDGLYQGLSTATKDTYDALHMQALPPR

SEQ ID NO: 10692 - protein, 897 aa, synthetic construct
MALPVTALLLPLALLLHAARPNAGVTQTPKFQVLKTGQSMTLQCAQDMNHEYMSWYRQDPGMGLRLIHYSVAIQTTDQGEVPNGYNVSRSTIEDFPLRLLSAAPSQTSVYFCASSYLGNTGELFFGEGSRLTVLEDLKNVFPPEVAVFEPSEAEISHTQKATLVCLATGFYPDHVELSWWVNGKEVHSGVCTDPQPLKEQPALNDSRYCLSSRLRVSATFWQNPRNHFRCQVQFYGLSENDEWTQDRAKPVTQIVSAEAWGRADCGSQSFGLLDPKLCYLLDGILFIYGVILTALFLRSKRSRLLHSDYMNMTPRRPGPTRKHYQPYAPPRDFAAYRSRVKFSRSADAPAYQQGQNQLYNELNLGRREEYDVLDKRRGRDPEMGGKPQRRKNPQEGLYNELQKDKMAEAYSEIGMKGERRRGKGHDGLYQGLSTATKDTYDALHMQALPPRRAKRSGSGATNFSLLKQAGDVEENPGPTSMDWIWRILFLVGAATGAHSFEQEVTQIPAALSVPEGENLVLNCSFTDSAIYNLQWFRQDPGKGLTSLLLIQSSQREQTSGRLNASLDKSSGRSTLYIAASQPGDSATYLCAVRPTSGGSYIPTFGRGTSLIVHPYTRIQNPDPAVYQLRDSKSSDKSVCLFTDFDSQTNVSQSKDSDVYITDKCVLDMRSMDFKSNSAVAWSNKSDFACANAFNNSIIPEDTFFPSPESSCGTQSFGLLDPKLCYLLDGILFIYGVILTALFLRSKRSRLLHSDYMNMTPRRPGPTRKHYQPYAPPRDFAAYRSRVKFSRSADAPAYQQGQNQLYNELNLGRREEYDVLDKRRGRDPEMGGKPQRRKNPQEGLYNELQKDKMAEAYSEIGMKGERRRGKGHDGLYQGLSTATKDTYDALHMQALPPR

SEQ ID NO: 10693 - protein, 815 aa, synthetic construct
MALPVTALLLPLALLLHAARPNAGVTQTPKFQVLKTGQSMTLQCAQDMNHEYMSWYRQDPGMGLRLIHYSVAIQTTDQGEVPNGYNVSRSTIEDFPLRLLSAAPSQTSVYFCASSYLGNTGELFFGEGSRLTVLEDLKNVFPPEVAVFEPSEAEISHTQKATLVCLATGFYPDHVELSWWVNGKEVHSGVSTDPQPLKEQPALNDSRYCLSSRLRVSATFWQNPRNHFRCQVQFYGLSENDEWTQDRAKPVTQIVSAEAWGRADCGSQSFGLLDPKLCYLLDGILFIYGVILTALFLRVKFSRSADAPAYQQGQNQLYNELNLGRREEYDVLDKRRGRDPEMGGKPQRRKNPQEGLYNELQKDKMAEAYSEIGMKGERRRGKGHDGLYQGLSTATKDTYDALHMQALPPRRAKRSGSGATNFSLLKQAGDVEENPGPTSMDWIWRILFLVGAATGAHSFEQEVTQIPAALSVPEGENLVLNCSFTDSAIYNLQWFRQDPGKGLTSLLLIQSSQREQTSGRLNASLDKSSGRSTLYIAASQPGDSATYLCAVRPTSGGSYIPTFGRGTSLIVHPYTRIQNPDPAVYQLRDSKSSDKSVCLFTDFDSQTNVSQSKDSDVYITDKTVLDMRSMDFKSNSAVAWSNKSDFACANAFNNSIIPEDTFFPSPESSCGTQSFGLLDPKLCYLLDGILFIYGVILTALFLRVKFSRSADAPAYQQGQNQLYNELNLGRREEYDVLDKRRGRDPEMGGKPQRRKNPQEGLYNELQKDKMAEAYSEIGMKGERRRGKGHDGLYQGLSTATKDTYDALHMQALPPR

SEQ ID NO: 10694 - protein, 1059 aa, synthetic construct
MALPVTALLLPLALLLHAARPNAGVTQTPKFQVLKTGQSMTLQCAQDMNHEYMSWYRQDPGMGLRLIHYSVAIQTTDQGEVPNGYNVSRSTIEDFPLRLLSAAPSQTSVYFCASSYLGNTGELFFGEGSRLTVLEDKQLDADVSPKPTIFLPSIAETKLQKAGTYLCLLEKFFPDVIKIHWQEKKSNTILGSQEGNTMKTNDTYMKFSWLTVPEKSLDKEHRCIVRHENNKNGVDQEIIFPPIKTDVITGSQSFGLLDPKLCYLLDGILFIYGVILTALFLRVKFSRSADAPAYQQGQNQLYNELNLGRREEYDVLDKRRGRDPEMGGKPQRRKNPQEGLYNELQKDKMAEAYSEIGMKGERRRGKGHDGLYQGLSTATKDTYDALHMQALPPRRAKRSGSGATNFSLLKQAGDVEENPGPTSMDWIWRILFLVGAATGAHSFEQEVTQIPAALSVPEGENLVLNCSFTDSAIYNLQWFRQDPGKGLTSLLLIQSSQREQTSGRLNASLDKSSGRSTLYIAASQPGDSATYLCAVRPTSGGSYIPTFGRGTSLIVHPYTRSQPHTKPSVFVMKNGTNVACLVKEFYPKDIRINLVSSKKITEFDPAIVISPSGKYNAVKLGKYEDSNSVTCSVQHDNKTVHSTDFGTQSFGLLDPKLCYLLDGILFIYGVILTALFLRVKFSRSADAPAYQQGQNQLYNELNLGRREEYDVLDKRRGRDPEMGGKPQRRKNPQEGLYNELQKDKMAEAYSEIGMKGERRRGKGHDGLYQGLSTATKDTYDALHMQALPPRRAKRSGSGVKQTLNFDLLKLAGDVESNPGPSRGHMALPVTALLLPLALLLHAARPSQFRVSPLDRTWNLGETVELKCQVLLSNPTSGCSWLFQPRGAAASPTFLLYLSQNKPKAAEGLDTQRFSGKRLGDTFVLTLSDFRRENEGYYFCSALSNSIMYFSHFVPVFLPAKPTTTPAPRPPTPAPTIASQPLSLRPEACRPAAGGAVHTRGLDFACDIYIWAPLAGTCGVLLLSLVITLYCNHRNRRRVCKCPRPVVKSGDKPSLSARYV

SEQ ID NO: 10695 - protein, 927 aa, synthetic construct
MALPVTALLLPLALLLHAARPNAGVTQTPKFQVLKTGQSMTLQCAQDMNHEYMSWYRQDPGMGLRLIHYSVAIQTTDQGEVPNGYNVSRSTIEDFPLRLLSAAPSQTSVYFCASSYLGNTGELFFGEGSRLTVLEGQPKANPTVTLFPPSSEELQANKATLVCLISDFYPGAVTVAWKADGSPVKAGVETTKPSKQSNNKYAASSYLSLTPEQWKSHRSYSCQVTHEGSTVEKTVAPTECSTTPGERSSLPAFYPGTSGSCSGCGSLSLPLLAGLVAADAVASLLIVGAVFLCARPRRSPAQEDGKVYINMPGRGRAKRSGSGATNFSLLKQAGDVEENPGPTSMDWIWRILFLVGAATGAHSFEQEVTQIPAALSVPEGENLVLNCSFTDSAIYNLQWFRQDPGKGLTSLLLIQSSQREQTSGRLNASLDKSSGRSTLYIAASQPGDSATYLCAVRPTSGGSYIPTFGRGTSLIVHPYTRASTKGPSVFPLAPSSKSTSGGTAALGCLVKDYFPEPVTVSWNSGALTSGVHTFPAVLQSSGLYSLSSVVTVPSSSLGTQTYICNVNHKPSNTKVDKRVEPKSCTTPGERSSLPAFYPGTSGSCSGCGSLSLPLLAGLVAADAVASLLIVGAVFLCARPRRSPAQEDGKVYINMPGRGRAKRSGSGVKQTLNFDLLKLAGDVESNPGPSRGHMALPVTALLLPLALLLHAARPSQFRVSPLDRTWNLGETVELKCQVLLSNPTSGCSWLFQPRGAAASPTFLLYLSQNKPKAAEGLDTQRFSGKRLGDTFVLTLSDFRRENEGYYFCSALSNSIMYFSHFVPVFLPAKPTTTPAPRPPTPAPTIASQPLSLRPEACRPAAGGAVHTRGLDFACDIYIWAPLAGTCGVLLLSLVITLYCNHRNRRRVCKCPRPVVKSGDKPSLSARYV

SEQ ID NO: 10696 - protein, 756 aa, synthetic construct
MALPVTALLLPLALLLHAARPNAGVTQTPKFQVLKTGQSMTLQCAQDMNHEYMSWYRQDPGMGLRLIHYSVAIQTTDQGEVPNGYNVSRSTIEDFPLRLLSAAPSQTSVYFCASSYLGNTGELFFGEGSRLTVLEGDIENTSLAPEDPTFPADTWGTYLLTTETGLQKDHALWDHTAQNLLRMGLAFLVLVALVWFLVEDWLSRKRTRERASRASTWEGRRRLNTQTLRAKRSGSGATNFSLLKQAGDVEENPGPTSMDWIWRILFLVGAATGAHSFEQEVTQIPAALSVPEGENLVLNCSFTDSAIYNLQWFRQDPGKGLTSLLLIQSSQREQTSGRLNASLDKSSGRSTLYIAASQPGDSATYLCAVRPTSGGSYIPTFGRGTSLIVHPYTRGDIENTSLAPEDPTFPADTWGTYLLTTETGLQKDHALWDHTAQNLLRMGLAFLVLVALVWFLVEDWLSRKRTRERASRASTWEGRRRLNTQTLRAKRSGSGVKQTLNFDLLKLAGDVESNPGPSRGHMALPVTALLLPLALLLHAARPSQFRVSPLDRTWNLGETVELKCQVLLSNPTSGCSWLFQPRGAAASPTFLLYLSQNKPKAAEGLDTQRFSGKRLGDTFVLTLSDFRRENEGYYFCSALSNSIMYFSHFVPVFLPAKPTTTPAPRPPTPAPTIASQPLSLRPEACRPAAGGAVHTRGLDFACDIYIWAPLAGTCGVLLLSLVITLYCNHRNRRRVCKCPRPVVKSGDKPSLSARYV

SEQ ID NO: 10697 - protein, 700 aa, synthetic construct
MALPVTALLLPLALLLHAARPNAGVTQTPKFQVLKTGQSMTLQCAQDMNHEYMSWYRQDPGMGLRLIHYSVAIQTTDQGEVPNGYNVSRSTIEDFPLRLLSAAPSQTSVYFCASSYLGNTGELFFGEGSRLTVLEITQGLAVSTISSFFPPGYQVSFCLVMVLLFAVDTGLYFSVKTNIRSSTRDWKDHKFKWRKDPQDKRAKRSGSGATNFSLLKQAGDVEENPGPTSMDWIWRILFLVGAATGAHSFEQEVTQIPAALSVPEGENLVLNCSFTDSAIYNLQWFRQDPGKGLTSLLLIQSSQREQTSGRLNASLDKSSGRSTLYIAASQPGDSATYLCAVRPTSGGSYIPTFGRGTSLIVHPYTRITQGLAVSTISSFFPPGYQVSFCLVMVLLFAVDTGLYFSVKTNIRSSTRDWKDHKFKWRKDPQDKRAKRSGSGVKQTLNFDLLKLAGDVESNPGPSRGHMALPVTALLLPLALLLHAARPSQFRVSPLDRTWNLGETVELKCQVLLSNPTSGCSWLFQPRGAAASPTFLLYLSQNKPKAAEGLDTQRFSGKRLGDTFVLTLSDFRRENEGYYFCSALSNSIMYFSHFVPVFLPAKPTTTPAPRPPTPAPTIASQPLSLRPEACRPAAGGAVHTRGLDFACDIYIWAPLAGTCGVLLLSLVITLYCNHRNRRRVCKCPRPVVKSGDKPSLSARYV

SEQ ID NO: 10698 - protein, 790 aa, synthetic construct
MALPVTALLLPLALLLHAARPDGGITQSPKYLFRKEGQNVTLSCEQNLNHDAMYWYRQDPGQGLRLIYYSWAQGDFQKGDIAEGYSVSREKKESFPLTVTSAQKNPTAFYLCASSWGAPYEQYFGPGTRLTVGQPKANPTVTLFPPSSEELQANKATLVCLISDFYPGAVTVAWKADGSPVKAGVETTKPSKQSNNKYAASSYLSLTPEQWKSHRSYSCQVTHEGSTVEKTVAPTECSGSQSFGLLDPKLCYLLDGILFIYGVILTALFLRVKFSRSADAPAYQQGQNQLYNELNLGRREEYDVLDKRRGRDPEMGGKPQRRKNPQEGLYNELQKDKMAEAYSEIGMKGERRRGKGHDGLYQGLSTATKDTYDALHMQALPPRRAKRSGSGATNFSLLKQAGDVEENPGPTSMDWIWRILFLVGAATGAHSFEQQGEEDPQALSIQEGENATMNCSYKTSINNLQWYRQNSGRGLVHLILIRSNEREKHSGRLRVTLDTSKKSSSLLITASRAADTASYFCATDGDTPLVFGKGTRLSVIANASTKGPSVFPLAPSSKSTSGGTAALGCLVKDYFPEPVTVSWNSGALTSGVHTFPAVLQSSGLYSLSSVVTVPSSSLGTQTYICNVNHKPSNTKVDKRVEPKSCGTQSFGLLDPKLCYLLDGILFIYGVILTALFLRVKFSRSADAPAYQQGQNQLYNELNLGRREEYDVLDKRRGRDPEMGGKPQRRKNPQEGLYNELQKDKMAEAYSEIGMKGERRRGKGHDGLYQGLSTATKDTYDALHMQALPPR

SEQ ID NO: 10699 - protein, 556 aa, synthetic construct
MALPVTALLLPLALLLHAARPDGGITQSPKYLFRKEGQNVTLSCEQNLNHDAMYWYRQDPGQGLRLIYYSWAQGDFQKGDIAEGYSVSREKKESFPLTVTSAQKNPTAFYLCASSWGAPYEQYFGPGTRLTVLEQSFGLLDPKLCYLLDGILFIYGVILTALFLRVKFSRSADAPAYQQGQNQLYNELNLGRREEYDVLDKRRGRDPEMGGKPQRRKNPQEGLYNELQKDKMAEAYSEIGMKGERRRGKGHDGLYQGLSTATKDTYDALHMQALPPRRAKRSGSGATNFSLLKQAGDVEENPGPTSMDWIWRILFLVGAATGAHSFEQQGEEDPQALSIQEGENATMNCSYKTSINNLQWYRQNSGRGLVHLILIRSNEREKHSGRLRVTLDTSKKSSSLLITASRAADTASYFCATDGDTPLVFGKGTRLSVIANTRQSFGLLDPKLCYLLDGILFIYGVILTALFLRVKFSRSADAPAYQQGQNQLYNELNLGRREEYDVLDKRRGRDPEMGGKPQRRKNPQEGLYNELQKDKMAEAYSEIGMKGERRRGKGHD

SEQ ID NO: 10700 - protein, 940 aa, synthetic construct
MALPVTALLLPLALLLHAARPDGGITQSPKYLFRKEGQNVTLSCEQNLNHDAMYWYRQDPGQGLRLIYYSWAQGDFQKGDIAEGYSVSREKKESFPLTVTSAQKNPTAFYLCASSWGAPYEQYFGPGTRLTVLETTPGERSSLPAFYPGTSGSCSGCGSLSLPLLAGLVAADAVASLLIVGAVFLCARPRRSPAQEDGKVYINMPGRGSTSRVKFSRSADAPAYQQGQNQLYNELNLGRREEYDVLDKRRGRDPEMGGKPQRRKNPQEGLYNELQKDKMAEAYSEIGMKGERRRGKGHDGLYQGLSTATKDTYDALHMQALPPRRAKRSGSGATNFSLLKQAGDVEENPGPMDWIWRILFLVGAATGAHSFEQQGEEDPQALSIQEGENATMNCSYKTSINNLQWYRQNSGRGLVHLILIRSNEREKHSGRLRVTLDTSKKSSSLLITASRAADTASYFCATDGDTPLVFGKGTRLSVIANTRTTPGERSSLPAFYPGTSGSCSGCGSLSLPLLAGLVAADAVASLLIVGAVFLCARPRRSPAQEDGKVYINMPGRGSSRRVKFSRSADAPAYQQGQNQLYNELNLGRREEYDVLDKRRGRDPEMGGKPQRRKNPQEGLYNELQKDKMAEAYSEIGMKGERRRGKGHDGLYQGLSTATKDTYDALHMQALPPRRAKRSGSGVKQTLNFDLLKLAGDVESNPGPGHMALPVTALLLPLALLLHAARPSQFRVSPLDRTWNLGETVELKCQVLLSNPTSGCSWLFQPRGAAASPTFLLYLSQNKPKAAEGLDTQRFSGKRLGDTFVLTLSDFRRENEGYYFCSALSNSIMYFSHFVPVFLPAKPTTTPAPRPPTPAPTIASQPLSLRPEACRPAAGGAVHTRGLDFACDIYIWAPLAGTCGVLLLSLVITLYCNHRNRRRVCKCPRPVVKSGDKPSLSARYV

SEQ ID NO: 10701 - protein, 940 aa, synthetic construct; identical to SEQ ID NO: 10700

SEQ ID NO: 10702 - protein, 1106 aa, synthetic construct
MALPVTALLLPLALLLHAARPDGGITQSPKYLFRKEGQNVTLSCEQNLNHDAMYWYRQDPGQGLRLIYYSWAQGDFQKGDIAEGYSVSREKKESFPLTVTSAQKNPTAFYLCASSWGAPYEQYFGPGTRLTVLEGQPKANPTVTLFPPSSEELQANKATLVCLISDFYPGAVTVAWKADGSPVKAGVETTKPSKQSNNKYAASSYLSLTPEQWKSHRSYSCQVTHEGSTVEKTVAPTECSGSTTPGERSSLPAFYPGTSGSCSGCGSLSLPLLAGLVAADAVASLLIVGAVFLCARPRRSPAQEDGKVYINMPGRGSTSRVKFSRSADAPAYQQGQNQLYNELNLGRREEYDVLDKRRGRDPEMGGKPQRRKNPQEGLYNELQKDKMAEAYSEIGMKGERRRGKGHDGLYQGLSTATKDTYDALHMQALPPRRAKRSGSGATNFSLLKQAGDVEENPGPMDWIWRILFLVGAATGAHSFEQQGEEDPQALSIQEGENATMNCSYKTSINNLQWYRQNSGRGLVHLILIRSNEREKHSGRLRVTLDTSKKSSSLLITASRAADTASYFCATDGDTPLVFGKGTRLSVIANTRASTKGPSVFPLAPSSKSTSGGTAALGCLVKDYFPEPVTVSWNSGALTSGVHTFPAVLQSSGLYSLSSVVTVPSSSLGTQTYICNVNHKPSNTKVDKRVEPKSCGTTTPGERSSLPAFYPGTSGSCSGCGSLSLPLLAGLVAADAVASLLIVGAVFLCARPRRSPAQEDGKVYINMPGRGSSRRVKFSRSADAPAYQQGQNQLYNELNLGRREEYDVLDKRRGRDPEMGGKPQRRKNPQEGLYNELQKDKMAEAYSEIGMKGERRRGKGHDGLYQGLSTATKDTYDALHMQALPPRRAKRSGSGVKQTLNFDLLKLAGDVESNPGPGHMATYEVLCEVARKLGTDDREVVLFLLNVFIPQPTLAQLIGALRALKEEGRLTFPLLAECLFRAGRRDLLRDLLHLDPRFLERHLAGTMSYFSPYQLTVLHVDGELCARDIRSLIFLSKDTIGSRSTPQTFLHWVYCMENLDLLGPTDVDALMSMLRSLSRVDLQRQVQTLMGLHLSGPSHSQHYRHTP

SEQ ID NO: 10703 - protein, 1159 aa, synthetic construct
MALPVTALLLPLALLLHAARPDGGITQSPKYLFRKEGQNVTLSCEQNLNHDAMYWYRQDPGQGLRLIYYSWAQGDFQKGDIAEGYSVSREKKESFPLTVTSAQKNPTAFYLCASSWGAPYEQYFGPGTRLTVLEGQPKANPTVTLFPPSSEELQANKATLVCLISDFYPGAVTVAWKADGSPVKAGVETTKPSKQSNNKYAASSYLSLTPEQWKSHRSYSCQVTHEGSTVEKTVAPTECSGSTTPGERSSLPAFYPGTSGSCSGCGSLSLPLLAGLVAADAVASLLIVGAVFLCARPRRSPAQEDGKVYINMPGRGSTSRVKFSRSADAPAYQQGQNQLYNELNLGRREEYDVLDKRRGRDPEMGGKPQRRKNPQEGLYNELQKDKMAEAYSEIGMKGERRRGKGHDGLYQGLSTATKDTYDALHMQALPPRRAKRSGSGATNFSLLKQAGDVEENPGPMDWIWRILFLVGAATGAHSFEQQGEEDPQALSIQEGENATMNCSYKTSINNLQWYRQNSGRGLVHLILIRSNEREKHSGRLRVTLDTSKKSSSLLITASRAADTASYFCATDGDTPLVFGKGTRLSVIANTRASTKGPSVFPLAPSSKSTSGGTAALGCLVKDYFPEPVTVSWNSGALTSGVHTFPAVLQSSGLYSLSSVVTVPSSSLGTQTYICNVNHKPSNTKVDKRVEPKSCGTTTPGERSSLPAFYPGTSGSCSGCGSLSLPLLAGLVAADAVASLLIVGAVFLCARPRRSPAQEDGKVYINMPGRGSSRRVKFSRSADAPAYQQGQNQLYNELNLGRREEYDVLDKRRGRDPEMGGKPQRRKNPQEGLYNELQKDKMAEAYSEIGMKGERRRGKGHDGLYQGLSTATKDTYDALHMQALPPRRAKRSGSGVKQTLNFDLLKLAGDVESNPGPGHMSDSKEVPSLPFLRHLLEELDSHEDSLLLFLCHDAAPGCTTVTQALCSLSQQRKLTLAALVEMLYVLQRMDLLKSRFGLSKEGAEQLLGTSFLTRYRKLMVCVGEELDSSELRALRLFACNLNPSLSTALSESSRFVELVLALENVGLVSPSSVSVLADMLRTLRRLDLCQQLVEYEQQEQARYRYCYAASPSLPVRTLRRGHGASEHEQLCMPVQESSDSPELLRTPVQESSSDSPEQTT

SEQ ID NO: 10704 - protein, 1153 aa, synthetic construct
MALPVTALLLPLALLLHAARPDGGITQSPKYLFRKEGQNVTLSCEQNLNHDAMYWYRQDPGQGLRLIYYSWAQGDFQKGDIAEGYSVSREKKESFPLTVTSAQKNPTAFYLCASSWGAPYEQYFGPGTRLTVLEGQPKANPTVTLFPPSSEELQANKATLVCLISDFYPGAVTVAWKADGSPVKAGVETTKPSKQSNNKYAASSYLSLTPEQWKSHRSYSCQVTHEGSTVEKTVAPTECSGSTTPGERSSLPAFYPGTSGSCSGCGSLSLPLLAGLVAADAVASLLIVGAVFLCARPRRSPAQEDGKVYINMPGRGSTSRVKFSRSADAPAYQQGQNQLYNELNLGRREEYDVLDKRRGRDPEMGGKPQRRKNPQEGLYNELQKDKMAEAYSEIGMKGERRRGKGHDGLYQGLSTATKDTYDALHMQALPPRRAKRSGSGATNFSLLKQAGDVEENPGPMDWIWRILFLVGAATGAHSFEQQGEEDPQALSIQEGENATMNCSYKTSINNLQWYRQNSGRGLVHLILIRSNEREKHSGRLRVTLDTSKKSSSLLITASRAADTASYFCATDGDTPLVFGKGTRLSVIANTRASTKGPSVFPLAPSSKSTSGGTAALGCLVKDYFPEPVTVSWNSGALTSGVHTFPAVLQSSGLYSLSSVVTVPSSSLGTQTYICNVNHKPSNTKVDKRVEPKSCGTTTPGERSSLPAFYPGTSGSCSGCGSLSLPLLAGLVAADAVASLLIVGAVFLCARPRRSPAQEDGKVYINMPGRGSSRRVKFSRSADAPAYQQGQNQLYNELNLGRREEYDVLDKRRGRDPEMGGKPQRRKNPQEGLYNELQKDKMAEAYSEIGMKGERRRGKGHDGLYQGLSTATKDTYDALHMQALPPRRAKRSGSGVKQTLNFDLLKLAGDVESNPGPGHMALPVTALLLPLALLLHAARPSQFRVSPLDRTWNLGETVELKCQVLLSNPTSGCSWLFQPRGAAASPTFLLYLSQNKPKAAEGLDTQRFSGKRLGDTFVLTLSDFRRENEGYYFCSALSNSIMYFSHFVPVFLPAKPTTTPAPRPPTPAPTIASQPLSLRPEACRPAAGGAVHTRGLDFACDIYIWAPLAGTCGVLLLSLVITLYCNHRNRRRVCKCPRPVVKSGDKPSLSARYV

SEQ ID NO: 10705 - protein, 1290 aa, synthetic construct
MALPVTALLLPLALLLHAARPEVQLVESGGGLVQAGGSLRLSCAASGRTFSMGWFRQAPGKEREFVAAITYSGGSPYYADSVKGRFTISRDNAKNTVYLQMNSLKPEDTAVYYCAANPTYGSDWNAENWGQGTQVTVSSGTGGGGSGGGGSGGGGSEFDGGITQSPKYLFRKEGQNVTLSCEQNLNHDAMYWYRQDPGQGLRLIYYSWAQGDFQKGDIAEGYSVSREKKESFPLTVTSAQKNPTAFYLCASSWGAPYEQYFGPGTRLTVLEGQPKANPTVTLFPPSSEELQANKATLVCLISDFYPGAVTVAWKADGSPVKAGVETTKPSKQSNNKYAASSYLSLTPEQWKSHRSYSCQVTHEGSTVEKTVAPTECSGSTTPGERSSLPAFYPGTSGSCSGCGSLSLPLLAGLVAADAVASLLIVGAVFLCARPRRSPAQEDGKVYINMPGRGSTSRVKFSRSADAPAYQQGQNQLYNELNLGRREEYDVLDKRRGRDPEMGGKPQRRKNPQEGLYNELQKDKMAEAYSEIGMKGERRRGKGHDGLYQGLSTATKDTYDALHMQALPPRRAKRSGSGATNFSLLKQAGDVEENPGPMDWIWRILFLVGAATGAHSFEQQGEEDPQALSIQEGENATMNCSYKTSINNLQWYRQNSGRGLVHLILIRSNEREKHSGRLRVTLDTSKKSSSLLITASRAADTASYFCATDGDTPLVFGKGTRLSVIANTRASTKGPSVFPLAPSSKSTSGGTAALGCLVKDYFPEPVTVSWNSGALTSGVHTFPAVLQSSGLYSLSSVVTVPSSSLGTQTYICNVNHKPSNTKVDKRVEPKSCGTTTPGERSSLPAFYPGTSGSCSGCGSLSLPLLAGLVAADAVASLLIVGAVFLCARPRRSPAQEDGKVYINMPGRGSSRRVKFSRSADAPAYQQGQNQLYNELNLGRREEYDVLDKRRGRDPEMGGKPQRRKNPQEGLYNELQKDKMAEAYSEIGMKGERRRGKGHDGLYQGLSTATKDTYDALHMQALPPRRAKRSGSGVKQTLNFDLLKLAGDVESNPGPGHMALPVTALLLPLALLLHAARPSQFRVSPLDRTWNLGETVELKCQVLLSNPTSGCSWLFQPRGAAASPTFLLYLSQNKPKAAEGLDTQRFSGKRLGDTFVLTLSDFRRENEGYYFCSALSNSIMYFSHFVPVFLPAKPTTTPAPRPPTPAPTIASQPLSLRPEACRPAAGGAVHTRGLDFACDIYIWAPLAGTCGVLLLSLVITLYCNHRNRRRVCKCPRPVVKSGDKPSLSARYV

SEQ ID NO: 10706 - protein, 1427 aa, synthetic construct
MALPVTALLLPLALLLHAARPEVQLVESGGGLVQAGGSLRLSCAASGRTFSMGWFRQAPGKEREFVAAITYSGGSPYYADSVKGRFTISRDNAKNTVYLQMNSLKPEDTAVYYCAANPTYGSDWNAENWGQGTQVTVSSGTGGGGSGGGGSGGGGSEFDGGITQSPKYLFRKEGQNVTLSCEQNLNHDAMYWYRQDPGQGLRLIYYSWAQGDFQKGDIAEGYSVSREKKESFPLTVTSAQKNPTAFYLCASSWGAPYEQYFGPGTRLTVLEGQPKANPTVTLFPPSSEELQANKATLVCLISDFYPGAVTVAWKADGSPVKAGVETTKPSKQSNNKYAASSYLSLTPEQWKSHRSYSCQVTHEGSTVEKTVAPTECSGSTTPGERSSLPAFYPGTSGSCSGCGSLSLPLLAGLVAADAVASLLIVGAVFLCARPRRSPAQEDGKVYINMPGRGSTSRVKFSRSADAPAYQQGQNQLYNELNLGRREEYDVLDKRRGRDPEMGGKPQRRKNPQEGLYNELQKDKMAEAYSEIGMKGERRRGKGHDGLYQGLSTATKDTYDALHMQALPPRRAKRSGSGATNFSLLKQAGDVEENPGPMDWIWRILFLVGAATGAHSGPEVQLVESGGGLVQAGGSLRLSCAASGRTFTMGWFRQAPGKEREFVAAISLSPTLAYYADSVKGRFTISRDNAKNTVVLQMNSLKPEDTALYYCAADRKSVMSIRPDYWGQGTQVTVSSGSGGGGSGGGGSGGGGSFEQQGEEDPQALSIQEGENATMNCSYKTSINNLQWYRQNSGRGLVHLILIRSNEREKHSGRLRVTLDTSKKSSSLLITASRAADTASYFCATDGDTPLVFGKGTRLSVIANTRASTKGPSVFPLAPSSKSTSGGTAALGCLVKDYFPEPVTVSWNSGALTSGVHTFPAVLQSSGLYSLSSVVTVPSSSLGTQTYICNVNHKPSNTKVDKRVEPKSCGTTTPGERSSLPAFYPGTSGSCSGCGSLSLPLLAGLVAADAVASLLIVGAVFLCARPRRSPAQEDGKVYINMPGRGSSRRVKFSRSADAPAYQQGQNQLYNELNLGRREEYDVLDKRRGRDPEMGGKPQRRKNPQEGLYNELQKDKMAEAYSEIGMKGERRRGKGHDGLYQGLSTATKDTYDALHMQALPPRRAKRSGSGVKQTLNFDLLKLAGDVESNPGPGHMALPVTALLLPLALLLHAARPSQFRVSPLDRTWNLGETVELKCQVLLSNPTSGCSWLFQPRGAAASPTFLLYLSQNKPKAAEGLDTQRFSGKRLGDTFVLTLSDFRRENEGYYFCSALSNSIMYFSHFVPVFLPAKPTTTPAPRPPTPAPTIASQPLSLRPEACRPAAGGAVHTRGLDFACDIYIWAPLAGTCGVLLLSLVITLYCNHRNRRRVCKCPRPVVKSGDKPSLSARYV

SEQ ID NO: 10707 - protein, 811 aa, synthetic construct
MALPVTALLLPLALLLHAARPEFDGGITQSPKYLFRKEGQNVTLSCEQNLNHDAMYWYRQDPGQGLRLIYYSWAQGDFQKGDIAEGYSVSREKKESFPLTVTSAQKNPTAFYLCASSWGAPYEQYFGPGTRLTVLEDLKNVFPPEVAVFEPSEAEISHTQKATLVCLATGFYPDHVELSWWVNGKEVHSGVSTDPQPLKEQPALNDSRYCLSSRLRVSATFWQNPRNHFRCQVQFYGLSENDEWTQDRAKPVTQIVSAEAWGRADCGSQSFGLLDPKLCYLLDGILFIYGVILTALFLRVKFSRSADAPAYQQGQNQLYNELNLGRREEYDVLDKRRGRDPEMGGKPQRRKNPQEGLYNELQKDKMAEAYSEIGMKGERRRGKGHDGLYQGLSTATKDTYDALHMQALPPRRAKRSGSGATNFSLLKQAGDVEENPGPTSMDWIWRILFLVGAATGAHSFEQQGEEDPQALSIQEGENATMNCSYKTSINNLQWYRQNSGRGLVHLILIRSNEREKHSGRLRVTLDTSKKSSSLLITASRAADTASYFCATDGDTPLVFGKGTRLSVIANTRIQNPDPAVYQLRDSKSSDKSVCLFTDFDSQTNVSQSKDSDVYITDKTVLDMRSMDFKSNSAVAWSNKSDFACANAFNNSIIPEDTFFPSPESSCGTQSFGLLDPKLCYLLDGILFIYGVILTALFLRVKFSRSADAPAYQQGQNQLYNELNLGRREEYDVLDKRRGRDPEMGGKPQRRKNPQEGLYNELQKDKMAEAYSEIGMKGERRRGKGHDGLYQGLSTATKDTYDALHMQALPPR

SEQ ID NO: 10708 - protein, 853 aa, synthetic construct
MALPVTALLLPLALLLHAARPEFDGGITQSPKYLFRKEGQNVTLSCEQNLNHDAMYWYRQDPGQGLRLIYYSWAQGDFQKGDIAEGYSVSREKKESFPLTVTSAQKNPTAFYLCASSWGAPYEQYFGPGTRLTVLEDLKNVFPPEVAVFEPSEAEISHTQKATLVCLATGFYPDHVELSWWVNGKEVHSGVSTDPQPLKEQPALNDSRYCLSSRLRVSATFWQNPRNHFRCQVQFYGLSENDEWTQDRAKPVTQIVSAEAWGRADCGSQSFGLLDPKLCYLLDGILFIYGVILTALFLRVKFSRSADAPAYQQGQNQLYNELNLGRREEYDVLDKRRGRDPEMGGKPQRRKNPQEGLYNELQKDKMAEAYSEIGMKGERRRGKGHDGLYQGLSTATKDTYDALHMQALPPRRAKRSGSGATNFSLLKQAGDVEENPGPTSMDWIWRILFLVGAATGAHSFEQQGEEDPQALSIQEGENATMNCSYKTSINNLQWYRQNSGRGLVHLILIRSNEREKHSGRLRVTLDTSKKSSSLLITASRAADTASYFCATDGDTPLVFGKGTRLSVIANTRIQNPDPAVYQLRDSKSSDKSVCLFTDFDSQTNVSQSKDSDVYITDKTVLDMRSMDFKSNSAVAWSNKSDFACANAFNNSIIPEDTFFPSPESSCGTQSFGLLDPKLCYLLDGILFIYGVILTALFLKRGRKKLLYIFKQPFMRPVQTTQEEDGCSCRFPEEEEGGCELRVKFSRSADAPAYQQGQNQLYNELNLGRREEYDVLDKRRGRDPEMGGKPQRRKNPQEGLYNELQKDKMAEAYSEIGMKGERRRGKGHDGLYQGLSTATKDTYDALHMQALPPR

SEQ ID NO: 10709 - protein, 852 aa, synthetic construct
MALPVTALLLPLALLLHAARPEFDGGITQSPKYLFRKEGQNVTLSCEQNLNHDAMYWYRQDPGQGLRLIYYSWAQGDFQKGDIAEGYSVSREKKESFPLTVTSAQKNPTAFYLCASSWGAPYEQYFGPGTRLTVLEDLKNVFPPEVAVFEPSEAEISHTQKATLVCLATGFYPDHVELSWWVNGKEVHSGVSTDPQPLKEQPALNDSRYCLSSRLRVSATFWQNPRNHFRCQVQFYGLSENDEWTQDRAKPVTQIVSAEAWGRADCGSQSFGLLDPKLCYLLDGILFIYGVILTALFLRVKFSRSADAPAYQQGQNQLYNELNLGRREEYDVLDKRRGRDPEMGGKPQRRKNPQEGLYNELQKDKMAEAYSEIGMKGERRRGKGHDGLYQGLSTATKDTYDALHMQALPPRRAKRSGSGATNFSLLKQAGDVEENPGPTSMDWIWRILFLVGAATGAHSFEQQGEEDPQALSIQEGENATMNCSYKTSINNLQWYRQNSGRGLVHLILIRSNEREKHSGRLRVTLDTSKKSSSLLITASRAADTASYFCATDGDTPLVFGKGTRLSVIANTRIQNPDPAVYQLRDSKSSDKSVCLFTDFDSQTNVSQSKDSDVYITDKTVLDMRSMDFKSNSAVAWSNKSDFACANAFNNSIIPEDTFFPSPESSCGTQSFGLLDPKLCYLLDGILFIYGVILTALFLRSKRSRLLHSDYMNMTPRRPGPTRKHYQPYAPPRDFAAYRSRVKFSRSADAPAYQQGQNQLYNELNLGRREEYDVLDKRRGRDPEMGGKPQRRKNPQEGLYNELQKDKMAEAYSEIGMKGERRRGKGHDGLYQGLSTATKDTYDALHMQALPPR

SEQ ID NO: 10710 - protein, 847 aa, synthetic construct
MALPVTALLLPLALLLHAARPEFDGGITQSPKYLFRKEGQNVTLSCEQNLNHDAMYWYRQDPGQGLRLIYYSWAQGDFQKGDIAEGYSVSREKKESFPLTVTSAQKNPTAFYLCASSWGAPYEQYFGPGTRLTVLEDLKNVFPPEVAVFEPSEAEISHTQKATLVCLATGFYPDHVELSWWVNGKEVHSGVSTDPQPLKEQPALNDSRYCLSSRLRVSATFWQNPRNHFRCQVQFYGLSENDEWTQDRAKPVTQIVSAEAWGRADCGSQSFGLLDPKLCYLLDGILFIYGVILTALFLRVKFSRSADAPAYQQGQNQLYNELNLGRREEYDVLDKRRGRDPEMGGKPQRRKNPQEGLYNELQKDKMAEAYSEIGMKGERRRGKGHDGLYQGLSTATKDTYDALHMQALPPRRAKRSGSGATNFSLLKQAGDVEENPGPTSMDWIWRILFLVGAATGAHSFEQQGEEDPQALSIQEGENATMNCSYKTSINNLQWYRQNSGRGLVHLILIRSNEREKHSGRLRVTLDTSKKSSSLLITASRAADTASYFCATDGDTPLVFGKGTRLSVIANTRIQNPDPAVYQLRDSKSSDKSVCLFTDFDSQTNVSQSKDSDVYITDKTVLDMRSMDFKSNSAVAWSNKSDFACANAFNNSIIPEDTFFPSPESSCGTQSFGLLDPKLCYLLDGILFIYGVILTALFLRDQRLPPDAHKPPGGGSFRTPIQEEQADAHSTLAKIRVKFSRSADAPAYQQGQNQLYNELNLGRREEYDVLDKRRGRDPEMGGKPQRRKNPQEGLYNELQKDKMAEAYSEIGMKGERRRGKGHDGLYQGLSTATKDTYDALHMQALPPR

SEQ ID NO: 10711 - protein, 931 aa, synthetic construct
MALPVTALLLPLALLLHAARPEFDGGITQSPKYLFRKEGQNVTLSCEQNLNHDAMYWYRQDPGQGLRLIYYSWAQGDFQKGDIAEGYSVSREKKESFPLTVTSAQKNPTAFYLCASSWGAPYEQYFGPGTRLTVLEDLKNVFPPEVAVFEPSEAEISHTQKATLVCLATGFYPDHVELSWWVNGKEVHSGVSTDPQPLKEQPALNDSRYCLSSRLRVSATFWQNPRNHFRCQVQFYGLSENDEWTQDRAKPVTQIVSAEAWGRADCGSQSFGLLDPKLCYLLDGILFIYGVILTALFLRVKFSRSADAPAYQQGQNQLYNELNLGRREEYDVLDKRRGRDPEMGGKPQRRKNPQEGLYNELQKDKMAEAYSEIGMKGERRRGKGHDGLYQGLSTATKDTYDALHMQALPPRRAKRSGSGATNFSLLKQAGDVEENPGPTSMDWIWRILFLVGAATGAHSFEQQGEEDPQALSIQEGENATMNCSYKTSINNLQWYRQNSGRGLVHLILIRSNEREKHSGRLRVTLDTSKKSSSLLITASRAADTASYFCATDGDTPLVFGKGTRLSVIANTRIQNPDPAVYQLRDSKSSDKSVCLFTDFDSQTNVSQSKDSDVYITDKTVLDMRSMDFKSNSAVAWSNKSDFACANAFNNSIIPEDTFFPSPESSCGTQSFGLLDPKLCYLLDGILFIYGVILTALFLWRRKRKEKQSETSPKEFLTIYEDVKDLKTRRNHEQEQTFPGGGSTIYSMIQSQSSAPTSQEPAYTLYSLIQPSRKSGSRKRNHSPSFNSTIYEVIGKSQPKAQNPARLSRKELENFDVYSRVKFSRSADAPAYQQGQNQLYNELNLGRREEYDVLDKRRGRDPEMGGKPQRRKNPQEGLYNELQKDKMAEAYSEIGMKGERRRGKGHDGLYQGLSTATKDTYDALHMQALPPR

SEQ ID NO: 10712 - protein, 894 aa, synthetic construct
MALPVTALLLPLALLLHAARPEFDGGITQSPKYLFRKEGQNVTLSCEQNLNHDAMYWYRQDPGQGLRLIYYSWAQGDFQKGDIAEGYSVSREKKESFPLTVTSAQKNPTAFYLCASSWGAPYEQYFGPGTRLTVLEDLKNVFPPEVAVFEPSEAEISHTQKATLVCLATGFYPDHVELSWWVNGKEVHSGVSTDPQPLKEQPALNDSRYCLSSRLRVSATFWQNPRNHFRCQVQFYGLSENDEWTQDRAKPVTQIVSAEAWGRADCGSQSFGLLDPKLCYLLDGILFIYGVILTALFLRSKRSRLLHSDYMNMTPRRPGPTRKHYQPYAPPRDFAAYRSRVKFSRSADAPAYQQGQNQLYNELNLGRREEYDVLDKRRGRDPEMGGKPQRRKNPQEGLYNELQKDKMAEAYSEIGMKGERRRGKGHDGLYQGLSTATKDTYDALHMQALPPRRAKRSGSGATNFSLLKQAGDVEENPGPTSMDWIWRILFLVGAATGAHSFEQQGEEDPQALSIQEGENATMNCSYKTSINNLQWYRQNSGRGLVHLILIRSNEREKHSGRLRVTLDTSKKSSSLLITASRAADTASYFCATDGDTPLVFGKGTRLSVIANTRIQNPDPAVYQLRDSKSSDKSVCLFTDFDSQTNVSQSKDSDVYITDKTVLDMRSMDFKSNSAVAWSNKSDFACANAFNNSIIPEDTFFPSPESSCGTQSFGLLDPKLCYLLDGILFIYGVILTALFLKRGRKKLLYIFKQPFMRPVQTTQEEDGCSCRFPEEEEGGCELRVKFSRSADAPAYQQGQNQLYNELNLGRREEYDVLDKRRGRDPEMGGKPQRRKNPQEGLYNELQKDKMAEAYSEIGMKGERRRGKGHDGLYQGLSTATKDTYDALHMQALPPR

SEQ ID NO: 10713 - protein, 893 aa, synthetic construct
MALPVTALLLPLALLLHAARPEFDGGITQSPKYLFRKEGQNVTLSCEQNLNHDAMYWYRQDPGQGLRLIYYSWAQGDFQKGDIAEGYSVSREKKESFPLTVTSAQKNPTAFYLCASSWGAPYEQYFGPGTRLTVLEDLKNVFPPEVAVFEPSEAEISHTQKATLVCLATGFYPDHVELSWWVNGKEVHSGVSTDPQPLKEQPALNDSRYCLSSRLRVSATFWQNPRNHFRCQVQFYGLSENDEWTQDRAKPVTQIVSAEAWGRADCGSQSFGLLDPKLCYLLDGILFIYGVILTALFLRSKRSRLLHSDYMNMTPRRPGPTRKHYQPYAPPRDFAAYRSRVKFSRSADAPAYQQGQNQLYNELNLGRREEYDVLDKRRGRDPEMGGKPQRRKNPQEGLYNELQKDKMAEAYSEIGMKGERRRGKGHDGLYQGLSTATKDTYDALHMQALPPRRAKRSGSGATNFSLLKQAGDVEENPGPTSMDWIWRILFLVGAATGAHSFEQQGEEDPQALSIQEGENATMNCSYKTSINNLQWYRQNSGRGLVHLILIRSNEREKHSGRLRVTLDTSKKSSSLLITASRAADTASYFCATDGDTPLVFGKGTRLSVIANTRIQNPDPAVYQLRDSKSSDKSVCLFTDFDSQTNVSQSKDSDVYITDKTVLDMRSMDFKSNSAVAWSNKSDFACANAFNNSIIPEDTFFPSPESSCGTQSFGLLDPKLCYLLDGILFIYGVILTALFLRSKRSRLLHSDYMNMTPRRPGPTRKHYQPYAPPRDFAAYRSRVKFSRSADAPAYQQGQNQLYNELNLGRREEYDVLDKRRGRDPEMGGKPQRRKNPQEGLYNELQKDKMAEAYSEIGMKGERRRGKGHDGLYQGLSTATKDTYDALHMQALPPR

SEQ ID NO: 10714 - protein, 894 aa, synthetic construct; identical to SEQ ID NO: 10712

SEQ ID NO: 10715 - protein, 811 aa, synthetic construct
MALPVTALLLPLALLLHAARPEFDGGITQSPKYLFRKEGQNVTLSCEQNLNHDAMYWYRQDPGQGLRLIYYSWAQGDFQKGDIAEGYSVSREKKESFPLTVTSAQKNPTAFYLCASSWGAPYEQYFGPGTRLTVLEDLKNVFPPEVAVFEPSEAEISHTQKATLVCLATGFYPDHVELSWWVNGKEVHSGVSTDPQPLKEQPALNDSRYCLSSRLRVSATFWQNPRNHFRCQVQFYGLSENDEWTQDRAKPVTQIVSAEAWGRADCGSQSFGLLDPKLCYLLDGILFIYGVILTALFLRVKFSRSADAPAYQQGQNQLYNELNLGRREEYDVLDKRRGRDPEMGGKPQRRKNPQEGLFNELQKDKMAEAFSEIGMKGERRRGKGHDGLFQGLSTATKDTFDALHMQALPPRRAKRSGSGATNFSLLKQAGDVEENPGPTSMDWIWRILFLVGAATGAHSFEQQGEEDPQALSIQEGENATMNCSYKTSINNLQWYRQNSGRGLVHLILIRSNEREKHSGRLRVTLDTSKKSSSLLITASRAADTASYFCATDGDTPLVFGKGTRLSVIANTRIQNPDPAVYQLRDSKSSDKSVCLFTDFDSQTNVSQSKDSDVYITDKTVLDMRSMDFKSNSAVAWSNKSDFACANAFNNSIIPEDTFFPSPESSCGTQSFGLLDPKLCYLLDGILFIYGVILTALFLRVKFSRSADAPAYQQGQNQLYNELNLGRREEYDVLDKRRGRDPEMGGKPQRRKNPQEGLYNELQKDKMAEAYSEIGMKGERRRGKGHDGLYQGLSTATKDTYDALHMQALPPR

SEQ ID NO: 10716 - protein, 811 aa, synthetic construct; identical to SEQ ID NO: 10715

SEQ ID NO: 10717 - protein, 853 aa, synthetic construct
MALPVTALLLPLALLLHAARPEFDGGITQSPKYLFRKEGQNVTLSCEQNLNHDAMYWYRQDPGQGLRLIYYSWAQGDFQKGDIAEGYSVSREKKESFPLTVTSAQKNPTAFYLCASSWGAPYEQYFGPGTRLTVLEDLKNVFPPEVAVFEPSEAEISHTQKATLVCLATGFYPDHVELSWWVNGKEVHSGVSTDPQPLKEQPALNDSRYCLSSRLRVSATFWQNPRNHFRCQVQFYGLSENDEWTQDRAKPVTQIVSAEAWGRADCGSQSFGLLDPKLCYLLDGILFIYGVILTALFLRVKFSRSADAPAYQQGQNQLYNELNLGRREEYDVLDKRRGRDPEMGGKPQRRKNPQEGLFNELQKDKMAEAFSEIGMKGERRRGKGHDGLFQGLSTATKDTFDALHMQALPPRRAKRSGSGATNFSLLKQAGDVEENPGPTSMDWIWRILFLVGAATGAHSFEQQGEEDPQALSIQEGENATMNCSYKTSINNLQWYRQNSGRGLVHLILIRSNEREKHSGRLRVTLDTSKKSSSLLITASRAADTASYFCATDGDTPLVFGKGTRLSVIANTRIQNPDPAVYQLRDSKSSDKSVCLFTDFDSQTNVSQSKDSDVYITDKTVLDMRSMDFKSNSAVAWSNKSDFACANAFNNSIIPEDTFFPSPESSCGTQSFGLLDPKLCYLLDGILFIYGVILTALFLKRGRKKLLYIFKQPFMRPVQTTQEEDGCSCRFPEEEEGGCELRVKFSRSADAPAYQQGQNQLYNELNLGRREEYDVLDKRRGRDPEMGGKPQRRKNPQEGLYNELQKDKMAEAYSEIGMKGERRRGKGHDGLYQGLSTATKDTYDALHMQALPPR

SEQ ID NO: 10718 - protein, 852 aa, synthetic construct
MALPVTALLLPLALLLHAARPEFDGGITQSPKYLFRKEGQNVTLSCEQNLNHDAMYWYRQDPGQGLRLIYYSWAQGDFQKGDIAEGYSVSREKKESFPLTVTSAQKNPTAFYLCASSWGAPYEQYFGPGTRLTVLEDLKNVFPPEVAVFEPSEAEISHTQKATLVCLATGFYPDHVELSWWVNGKEVHSGVSTDPQPLKEQPALNDSRYCLSSRLRVSATFWQNPRNHFRCQVQFYGLSENDEWTQDRAKPVTQIVSAEAWGRADCGSQSFGLLDPKLCYLLDGILFIYGVILTALFLRVKFSRSADAPAYQQGQNQLYNELNLGRREEYDVLDKRRGRDPEMGGKPQRRKNPQEGLFNELQKDKMAEAFSEIGMKGERRRGKGHDGLFQGLSTATKDTFDALHMQALPPRRAKRSGSGATNFSLLKQAGDVEENPGPTSMDWIWRILFLVGAATGAHSFEQQGEEDPQALSIQEGENATMNCSYKTSINNLQWYRQNSGRGLVHLILIRSNEREKHSGRLRVTLDTSKKSSSLLITASRAADTASYFCATDGDTPLVFGKGTRLSVIANTRIQNPDPAVYQLRDSKSSDKSVCLFTDFDSQTNVSQSKDSDVYITDKTVLDMRSMDFKSNSAVAWSNKSDFACANAFNNSIIPEDTFFPSPESSCGTQSFGLLDPKLCYLLDGILFIYGVILTALFLRSKRSRLLHSDYMNMTPRRPGPTRKHYQPYAPPRDFAAYRSRVKFSRSADAPAYQQGQNQLYNELNLGRREEYDVLDKRRGRDPEMGGKPQRRKNPQEGLYNELQKDKMAEAYSEIGMKGERRRGKGHDGLYQGLSTATKDTYDALHMQALPPR

SEQ ID NO: 10719 - protein, 847 aa, synthetic construct
MALPVTALLLPLALLLHAARPEFDGGITQSPKYLFRKEGQNVTLSCEQNLNHDAMYWYRQDPGQGLRLIYYSWAQGDFQKGDIAEGYSVSREKKESFPLTVTSAQKNPTAFYLCASSWGAPYEQYFGPGTRLTVLEDLKNVFPPEVAVFEPSEAEISHTQKATLVCLATGFYPDHVELSWWVNGKEVHSGVSTDPQPLKEQPALNDSRYCLSSRLRVSATFWQNPRNHFRCQVQFYGLSENDEWTQDRAKPVTQIVSAEAWGRADCGSQSFGLLDPKLCYLLDGILFIYGVILTALFLRVKFSRSADAPAYQQGQNQLYNELNLGRREEYDVLDKRRGRDPEMGGKPQRRKNPQEGLFNELQKDKMAEAFSEIGMKGERRRGKGHDGLFQGLSTATKDTFDALHMQALPPRRAKRSGSGATNFSLLKQAGDVEENPGPTSMDWIWRILFLVGAATGAHSFEQQGEEDPQALSIQEGENATMNCSYKTSINNLQWYRQNSGRGLVHLILIRSNEREKHSGRLRVTLDTSKKSSSLLITASRAADTASYFCATDGDTPLVFGKGTRLSVIANTRIQNPDPAVYQLRDSKSSDKSVCLFTDFDSQTNVSQSKDSDVYITDKTVLDMRSMDFKSNSAVAWSNKSDFACANAFNNSIIPEDTFFPSPESSCGTQSFGLLDPKLCYLLDGILFIYGVILTALFLRDQRLPPDAHKPPGGGSFRTPIQEEQADAHSTLAKIRVKFSRSADAPAYQQGQNQLYNELNLGRREEYDVLDKRRGRDPEMGGKPQRRKNPQEGLYNELQKDKMAEAYSEIGMKGERRRGKGHDGLYQGLSTATKDTYDALHMQALPPR

SEQ ID NO: 10720 - protein, 931 aa, synthetic construct
MALPVTALLLPLALLLHAARPEFDGGITQSPKYLFRKEGQNVTLSCEQNLNHDAMYWYRQDPGQGLRLIYYSWAQGDFQKGDIAEGYSVSREKKESFPLTVTSAQKNPTAFYLCASSWGAPYEQYFGPGTRLTVLEDLKNVFPPEVAVFEPSEAEISHTQKATLVCLATGFYPDHVELSWWVNGKEVHSGVSTDPQPLKEQPALNDSRYCLSSRLRVSATFWQNPRNHFRCQVQFYGLSENDEWTQDRAKPVTQIVSAEAWGRADCGSQSFGLLDPKLCYLLDGILFIYGVILTALFLRVKFSRSADAPAYQQGQNQLYNELNLGRREEYDVLDKRRGRDPEMGGKPQRRKNPQEGLFNELQKDKMAEAFSEIGMKGERRRGKGHDGLFQGLSTATKDTFDALHMQALPPRRAKRSGSGATNFSLLKQAGDVEENPGPTSMDWIWRILFLVGAATGAHSFEQQGEEDPQALSIQEGENATMNCSYKTSINNLQWYRQNSGRGLVHLILIRSNEREKHSGRLRVTLDTSKKSSSLLITASRAADTASYFCATDGDTPLVFGKGTRLSVIANTRIQNPDPAVYQLRDSKSSDKSVCLFTDFDSQTNVSQSKDSDVYITDKTVLDMRSMDFKSNSAVAWSNKSDFACANAFNNSIIPEDTFFPSPESSCGTQSFGLLDPKLCYLLDGILFIYGVILTALFLWRRKRKEKQSETSPKEFLTIYEDVKDLKTRRNHEQEQTFPGGGSTIYSMIQSQSSAPTSQEPAYTLYSLIQPSRKSGSRKRNHSPSFNSTIYEVIGKSQPKAQNPARLSRKELENFDVYSRVKFSRSADAPAYQQGQNQLYNELNLGRREEYDVLDKRRGRDPEMGGKPQRRKNPQEGLYNELQKDKMAEAYSEIGMKGERRRGKGHDGLYQGLSTATKDTYDALHMQALPPR

SEQ ID NO: 10721 - protein, 852 aa, synthetic construct; identical to SEQ ID NO: 10718

SEQ ID NO: 10722 - protein, 853 aa, synthetic construct; identical to SEQ ID NO: 10717

SEQ ID NO: 10723 - protein, 811 aa, synthetic construct
MALPVTALLLPLALLLHAARPEFDGGITQSPKYLFRKEGQNVTLSCEQNLNHDAMYWYRQDPGQGLRLIYYSWAQGDFQKGDIAEGYSVSREKKESFPLTVTSAQKNPTAFYLCASSWGAPYEQYFGPGTRLTVLEDLKNVFPPEVAVFEPSEAEISHTQKATLVCLATGFYPDHVELSWWVNGKEVHSGVSTDPQPLKEQPALNDSRYCLSSRLRVSATFWQNPRNHFRCQVQFYGLSENDEWTQDRAKPVTQIVSAEAWGRADCGSQSFGLLDPKLCYLLDGILFIYGVILTALFLRVKFSRSADAPAYQQGQNQLYNELNLGRREEYDVLDKRRGRDPEMGGKPQRRKNPQEGLFNELQKDKMAEAFSEIGMKGERRRGKGHDGLFQGLSTATKDTFDALHMQALPPRRAKRSGSGATNFSLLKQAGDVEENPGPTSMDWIWRILFLVGAATGAHSFEQQGEEDPQALSIQEGENATMNCSYKTSINNLQWYRQNSGRGLVHLILIRSNEREKHSGRLRVTLDTSKKSSSLLITASRAADTASYFCATDGDTPLVFGKGTRLSVIANTRIQNPDPAVYQLRDSKSSDKSVCLFTDFDSQTNVSQSKDSDVYITDKTVLDMRSMDFKSNSAVAWSNKSDFACANAFNNSIIPEDTFFPSPESSCGTQSFGLLDPKLSYLLDGILFIYGVILTALFLRVKFSRSADAPAYQQGQNQLYNELNLGRREEYDVLDKRRGRDPEMGGKPQRRKNPQEGLYNELQKDKMAEAYSEIGMKGERRRGKGHDGLYQGLSTATKDTYDALHMQALPPR

SEQ ID NO: 10724 - protein, 811 aa, synthetic construct; identical to SEQ ID NO: 10723

SEQ ID NO: 10725 - protein, 811 aa, synthetic construct
MALPVTALLLPLALLLHAARPEFDGGITQSPKYLFRKEGQNVTLSCEQNLNHDAMYWYRQDPGQGLRLIYYSWAQGDFQKGDIAEGYSVSREKKESFPLTVTSAQKNPTAFYLCASSWGAPYEQYFGPGTRLTVLEDLKNVFPPEVAVFEPSEAEISHTQKATLVCLATGFYPDHVELSWWVNGKEVHSGVSTDPQPLKEQPALNDSRYCLSSRLRVSATFWQNPRNHFRCQVQFYGLSENDEWTQDRAKPVTQIVSAEAWGRADCGSQSFGLLDPKLSYLLDGILFIYGVILTALFLRVKFSRSADAPAYQQGQNQLYNELNLGRREEYDVLDKRRGRDPEMGGKPQRRKNPQEGLYNELQKDKMAEAYSEIGMKGERRRGKGHDGLYQGLSTATKDTYDALHMQALPPRRAKRSGSGATNFSLLKQAGDVEENPGPTSMDWIWRILFLVGAATGAHSFEQQGEEDPQALSIQEGENATMNCSYKTSINNLQWYRQNSGRGLVHLILIRSNEREKHSGRLRVTLDTSKKSSSLLITASRAADTASYFCATDGDTPLVFGKGTRLSVIANTRIQNPDPAVYQLRDSKSSDKSVCLFTDFDSQTNVSQSKDSDVYITDKTVLDMRSMDFKSNSAVAWSNKSDFACANAFNNSIIPEDTFFPSPESSCGTQSFGLLDPKLSYLLDGILFIYGVILTALFLRVKFSRSADAPAYQQGQNQLYNELNLGRREEYDVLDKRRGRDPEMGGKPQRRKNPQEGLYNELQKDKMAEAYSEIGMKGERRRGKGHDGLYQGLSTATKDTYDALHMQALPPR

SEQ ID NO: 10726 - protein, 715 aa, synthetic construct
MALPVTALLLPLALLLHAARPEFDGGITQSPKYLFRKEGQNVTLSCEQNLNHDAMYWYRQDPGQGLRLIYYSWAQGDFQKGDIAEGYSVSREKKESFPLTVTSAQKNPTAFYLCASSWGAPYEQYFGPGTRLTVLEDLKNVFPPEVAVFEPSEAEISHTQKATLVCLATGFYPDHVELSWWVNGKEVHSGVSTDPQPLKEQPALNDSRYCLSSRLRVSATFWQNPRNHFRCQVQFYGLSENDEWTQDRAKPVTQIVSAEAWGRADCGSTTPGERSSLPAFYPGTSGSCSGCGSLSLPLLAGLVAADAVASLLIVGAVFLCARPRRSPAQEDGKVYINMPGRGRAKRSGSGATNFSLLKQAGDVEENPGPTSMDWIWRILFLVGAATGAHSFEQQGEEDPQALSIQEGENATMNCSYKTSINNLQWYRQNSGRGLVHLILIRSNEREKHSGRLRVTLDTSKKSSSLLITASRAADTASYFCATDGDTPLVFGKGTRLSVIANTRIQNPDPAVYQLRDSKSSDKSVCLFTDFDSQTNVSQSKDSDVYITDKTVLDMRSMDFKSNSAVAWSNKSDFACANAFNNSIIPEDTFFPSPESSCGTTTPGERSSLPAFYPGTSGSCSGCGSLSLPLLAGLVAADAVASLLIVGAVFKRGRKKLLYIFKQPFMRPVQTTQEEDGCSCRFPEEEEGGCELLCARPRRSPAQEDGKVYINMPGRG

SEQ ID NO: 10727 - protein, 714 aa, synthetic construct
MALPVTALLLPLALLLHAARPEFDGGITQSPKYLFRKEGQNVTLSCEQNLNHDAMYWYRQDPGQGLRLIYYSWAQGDFQKGDIAEGYSVSREKKESFPLTVTSAQKNPTAFYLCASSWGAPYEQYFGPGTRLTVLEDLKNVFPPEVAVFEPSEAEISHTQKATLVCLATGFYPDHVELSWWVNGKEVHSGVSTDPQPLKEQPALNDSRYCLSSRLRVSATFWQNPRNHFRCQVQFYGLSENDEWTQDRAKPVTQIVSAEAWGRADCGSTTPGERSSLPAFYPGTSGSCSGCGSLSLPLLAGLVAADAVASLLIVGAVFLCARPRRSPAQEDGKVYINMPGRGRAKRSGSGATNFSLLKQAGDVEENPGPTSMDWIWRILFLVGAATGAHSFEQQGEEDPQALSIQEGENATMNCSYKTSINNLQWYRQNSGRGLVHLILIRSNEREKHSGRLRVTLDTSKKSSSLLITASRAADTASYFCATDGDTPLVFGKGTRLSVIANTRIQNPDPAVYQLRDSKSSDKSVCLFTDFDSQTNVSQSKDSDVYITDKTVLDMRSMDFKSNSAVAWSNKSDFACANAFNNSIIPEDTFFPSPESSCGTTTPGERSSLPAFYPGTSGSCSGCGSLSLPLLAGLVAADAVASLLIVGAVFRSKRSRLLHSDYMNMTPRRPGPTRKHYQPYAPPRDFAAYRSLCARPRRSPAQEDGKVYINMPGRG

SEQ ID NO: 10728 - protein, 709 aa, synthetic construct
MALPVTALLLPLALLLHAARPEFDGGITQSPKYLFRKEGQNVTLSCEQNLNHDAMYWYRQDPGQGLRLIYYSWAQGDFQKGDIAEGYSVSREKKESFPLTVTSAQKNPTAFYLCASSWGAPYEQYFGPGTRLTVLEDLKNVFPPEVAVFEPSEAEISHTQKATLVCLATGFYPDHVELSWWVNGKEVHSGVSTDPQPLKEQPALNDSRYCLSSRLRVSATFWQNPRNHFRCQVQFYGLSENDEWTQDRAKPVTQIVSAEAWGRADCGSTTPGERSSLPAFYPGTSGSCSGCGSLSLPLLAGLVAADAVASLLIVGAVFLCARPRRSPAQEDGKVYINMPGRGRAKRSGSGATNFSLLKQAGDVEENPGPTSMDWIWRILFLVGAATGAHSFEQQGEEDPQALSIQEGENATMNCSYKTSINNLQWYRQNSGRGLVHLILIRSNEREKHSGRLRVTLDTSKKSSSLLITASRAADTASYFCATDGDTPLVFGKGTRLSVIANTRIQNPDPAVYQLRDSKSSDKSVCLFTDFDSQTNVSQSKDSDVYITDKTVLDMRSMDFKSNSAVAWSNKSDFACANAFNNSIIPEDTFFPSPESSCGTTTPGERSSLPAFYPGTSGSCSGCGSLSLPLLAGLVAADAVASLLIVGAVFRDQRLPPDAHKPPGGGSFRTPIQEEQADAHSTLAKILCARPRRSPAQEDGKVYINMPGRG

SEQ ID NO: 10729 - protein, 793 aa, synthetic construct
MALPVTALLLPLALLLHAARPEFDGGITQSPKYLFRKEGQNVTLSCEQNLNHDAMYWYRQDPGQGLRLIYYSWAQGDFQKGDIAEGYSVSREKKESFPLTVTSAQKNPTAFYLCASSWGAPYEQYFGPGTRLTVLEDLKNVFPPEVAVFEPSEAEISHTQKATLVCLATGFYPDHVELSWWVNGKEVHSGVSTDPQPLKEQPALNDSRYCLSSRLRVSATFWQNPRNHFRCQVQFYGLSENDEWTQDRAKPVTQIVSAEAWGRADCGSTTPGERSSLPAFYPGTSGSCSGCGSLSLPLLAGLVAADAVASLLIVGAVFLCARPRRSPAQEDGKVYINMPGRGRAKRSGSGATNFSLLKQAGDVEENPGPTSMDWIWRILFLVGAATGAHSFEQQGEEDPQALSIQEGENATMNCSYKTSINNLQWYRQNSGRGLVHLILIRSNEREKHSGRLRVTLDTSKKSSSLLITASRAADTASYFCATDGDTPLVFGKGTRLSVIANTRIQNPDPAVYQLRDSKSSDKSVCLFTDFDSQTNVSQSKDSDVYITDKTVLDMRSMDFKSNSAVAWSNKSDFACANAFNNSIIPEDTFFPSPESSCGTTTPGERSSLPAFYPGTSGSCSGCGSLSLPLLAGLVAADAVASLLIVGAVFWRRKRKEKQSETSPKEFLTIYEDVKDLKTRRNHEQEQTFPGGGSTIYSMIQSQSSAPTSQEPAYTLYSLIQPSRKSGSRKRNHSPSFNSTIYEVIGKSQPKAQNPARLSRKELENFDVYSLCARPRRSPAQEDGKVYINMPGRG

SEQ ID NO: 10730 - protein, 744 aa, synthetic construct
MALPVTALLLPLALLLHAARPEFDGGITQSPKYLFRKEGQNVTLSCEQNLNHDAMYWYRQDPGQGLRLIYYSWAQGDFQKGDIAEGYSVSREKKESFPLTVTSAQKNPTAFYLCASSWGAPYEQYFGPGTRLTVLEDLKNVFPPEVAVFEPSEAEISHTQKATLVCLATGFYPDHVELSWWVNGKEVHSGVSTDPQPLKEQPALNDSRYCLSSRLRVSATFWQNPRNHFRCQVQFYGLSENDEWTQDRAKPVTQIVSAEAWGRADCGSLGEPQLCYILDAILFLYGIVLTLLYCKRGRKKLLYIFKQPFMRPVQTTQEEDGCSCRFPEEEEGGCELRLKIQVRKAAITSYEKSDGVYTGLSTRNQETYETLKHEKPPQRAKRSGSGATNFSLLKQAGDVEENPGPTSMDWIWRILFLVGAATGAHSFEQQGEEDPQALSIQEGENATMNCSYKTSINNLQWYRQNSGRGLVHLILIRSNEREKHSGRLRVTLDTSKKSSSLLITASRAADTASYFCATDGDTPLVFGKGTRLSVIANTRIQNPDPAVYQLRDSKSSDKSVCLFTDFDSQTNVSQSKDSDVYITDKTVLDMRSMDFKSNSAVAWSNKSDFACANAFNNSIIPEDTFFPSPESSCGTLGEPQLCYILDAILFLYGIVLTLLYCRSKRSRLLHSDYMNMTPRRPGPTRKHYQPYAPPRDFAAYRSRLKIQVRKAAITSYEKSDGVYTGLSTRNQETYETLKHEKPPQ

SEQ ID NO: 10731 - protein, 739 aa, synthetic construct
MALPVTALLLPLALLLHAARPEFDGGITQSPKYLFRKEGQNVTLSCEQNLNHDAMYWYRQDPGQGLRLIYYSWAQGDFQKGDIAEGYSVSREKKESFPLTVTSAQKNPTAFYLCASSWGAPYEQYFGPGTRLTVLEDLKNVFPPEVAVFEPSEAEISHTQKATLVCLATGFYPDHVELSWWVNGKEVHSGVSTDPQPLKEQPALNDSRYCLSSRLRVSATFWQNPRNHFRCQVQFYGLSENDEWTQDRAKPVTQIVSAEAWGRADCGSLGEPQLCYILDAILFLYGIVLTLLYCKRGRKKLLYIFKQPFMRPVQTTQEEDGCSCRFPEEEEGGCELRLKIQVRKAAITSYEKSDGVYTGLSTRNQETYETLKHEKPPQRAKRSGSGATNFSLLKQAGDVEENPGPTSMDWIWRILFLVGAATGAHSFEQQGEEDPQALSIQEGENATMNCSYKTSINNLQWYRQNSGRGLVHLILIRSNEREKHSGRLRVTLDTSKKSSSLLITASRAADTASYFCATDGDTPLVFGKGTRLSVIANTRIQNPDPAVYQLRDSKSSDKSVCLFTDFDSQTNVSQSKDSDVYITDKTVLDMRSMDFKSNSAVAWSNKSDFACANAFNNSIIPEDTFFPSPESSCGTLGEPQLCYILDAILFLYGIVLTLLYCRDQRLPPDAHKPPGGGSFRTPIQEEQADAHSTLAKIRLKIQVRKAAITSYEKSDGVYTGLSTRNQETYETLKHEKPPQ

SEQ ID NO: 10732 - protein, 823 aa, synthetic construct
MALPVTALLLPLALLLHAARPEFDGGITQSPKYLFRKEGQNVTLSCEQNLNHDAMYWYRQDPGQGLRLIYYSWAQGDFQKGDIAEGYSVSREKKESFPLTVTSAQKNPTAFYLCASSWGAPYEQYFGPGTRLTVLEDLKNVFPPEVAVFEPSEAEISHTQKATLVCLATGFYPDHVELSWWVNGKEVHSGVSTDPQPLKEQPALNDSRYCLSSRLRVSATFWQNPRNHFRCQVQFYGLSENDEWTQDRAKPVTQIVSAEAWGRADCGSLGEPQLCYILDAILFLYGIVLTLLYCKRGRKKLLYIFKQPFMRPVQTTQEEDGCSCRFPEEEEGGCELRLKIQVRKAAITSYEKSDGVYTGLSTRNQETYETLKHEKPPQRAKRSGSGATNFSLLKQAGDVEENPGPTSMDWIWRILFLVGAATGAHSFEQQGEEDPQALSIQEGENATMNCSYKTSINNLQWYRQNSGRGLVHLILIRSNEREKHSGRLRVTLDTSKKSSSLLITASRAADTASYFCATDGDTPLVFGKGTRLSVIANTRIQNPDPAVYQLRDSKSSDKSVCLFTDFDSQTNVSQSKDSDVYITDKTVLDMRSMDFKSNSAVAWSNKSDFACANAFNNSIIPEDTFFPSPESSCGTLGEPQLCYILDAILFLYGIVLTLLYCWRRKRKEKQSETSPKEFLTIYEDVKDLKTRRNHEQEQTFPGGGSTIYSMIQSQSSAPTSQEPAYTLYSLIQPSRKSGSRKRNHSPSFNSTIYEVIGKSQPKAQNPARLSRKELENFDVYSRLKIQVRKAAITSYEKSDGVYTGLSTRNQETYETLKHEKPPQ

SEQ ID NO: 10733 - protein, 745 aa, synthetic construct
MALPVTALLLPLALLLHAARPEFDGGITQSPKYLFRKEGQNVTLSCEQNLNHDAMYWYRQDPGQGLRLIYYSWAQGDFQKGDIAEGYSVSREKKESFPLTVTSAQKNPTAFYLCASSWGAPYEQYFGPGTRLTVLEDLKNVFPPEVAVFEPSEAEISHTQKATLVCLATGFYPDHVELSWWVNGKEVHSGVSTDPQPLKEQPALNDSRYCLSSRLRVSATFWQNPRNHFRCQVQFYGLSENDEWTQDRAKPVTQIVSAEAWGRADCGSLGEPQLCYILDAILFLYGIVLTLLYCKRGRKKLLYIFKQPFMRPVQTTQEEDGCSCRFPEEEEGGCELRLKIQVRKAAITSYEKSDGVYTGLSTRNQETYETLKHEKPPQRAKRSGSGATNFSLLKQAGDVEENPGPTSMDWIWRILFLVGAATGAHSFEQQGEEDPQALSIQEGENATMNCSYKTSINNLQWYRQNSGRGLVHLILIRSNEREKHSGRLRVTLDTSKKSSSLLITASRAADTASYFCATDGDTPLVFGKGTRLSVIANTRIQNPDPAVYQLRDSKSSDKSVCLFTDFDSQTNVSQSKDSDVYITDKTVLDMRSMDFKSNSAVAWSNKSDFACANAFNNSIIPEDTFFPSPESSCGTLGEPQLCYILDAILFLYGIVLTLLYCKRGRKKLLYIFKQPFMRPVQTTQEEDGCSCRFPEEEEGGCELRLKIQVRKAAITSYEKSDGVYTGLSTRNQETYETLKHEKPPQ

SEQ ID NO: 10734 - protein, 744 aa, synthetic construct; identical to SEQ ID NO: 10730

SEQ ID NO: 10735 - protein, 743 aa, synthetic construct
MALPVTALLLPLALLLHAARPEFDGGITQSPKYLFRKEGQNVTLSCEQNLNHDAMYWYRQDPGQGLRLIYYSWAQGDFQKGDIAEGYSVSREKKESFPLTVTSAQKNPTAFYLCASSWGAPYEQYFGPGTRLTVLEDLKNVFPPEVAVFEPSEAEISHTQKATLVCLATGFYPDHVELSWWVNGKEVHSGVSTDPQPLKEQPALNDSRYCLSSRLRVSATFWQNPRNHFRCQVQFYGLSENDEWTQDRAKPVTQIVSAEAWGRADCGSLGEPQLCYILDAILFLYGIVLTLLYCRSKRSRLLHSDYMNMTPRRPGPTRKHYQPYAPPRDFAAYRSRLKIQVRKAAITSYEKSDGVYTGLSTRNQETYETLKHEKPPQRAKRSGSGATNFSLLKQAGDVEENPGPTSMDWIWRILFLVGAATGAHSFEQQGEEDPQALSIQEGENATMNCSYKTSINNLQWYRQNSGRGLVHLILIRSNEREKHSGRLRVTLDTSKKSSSLLITASRAADTASYFCATDGDTPLVFGKGTRLSVIANTRIQNPDPAVYQLRDSKSSDKSVCLFTDFDSQTNVSQSKDSDVYITDKTVLDMRSMDFKSNSAVAWSNKSDFACANAFNNSIIPEDTFFPSPESSCGTLGEPQLCYILDAILFLYGIVLTLLYCRSKRSRLLHSDYMNMTPRRPGPTRKHYQPYAPPRDFAAYRSRLKIQVRKAAITSYEKSDGVYTGLSTRNQETYETLKHEKPPQ

SEQ ID NO: 10736 - protein, 661 aa, synthetic construct
MALPVTALLLPLALLLHAARPEFDGGITQSPKYLFRKEGQNVTLSCEQNLNHDAMYWYRQDPGQGLRLIYYSWAQGDFQKGDIAEGYSVSREKKESFPLTVTSAQKNPTAFYLCASSWGAPYEQYFGPGTRLTVLEDLKNVFPPEVAVFEPSEAEISHTQKATLVCLATGFYPDHVELSWWVNGKEVHSGVSTDPQPLKEQPALNDSRYCLSSRLRVSATFWQNPRNHFRCQVQFYGLSENDEWTQDRAKPVTQIVSAEAWGRADCGSLGEPQLSYILDAILFLYGIVLTLLYCRLKIQVRKAAITSYEKSDGVYTGLSTRNQETYETLKHEKPPQRAKRSGSGATNFSLLKQAGDVEENPGPTSMDWIWRILFLVGAATGAHSFEQQGEEDPQALSIQEGENATMNCSYKTSINNLQWYRQNSGRGLVHLILIRSNEREKHSGRLRVTLDTSKKSSSLLITASRAADTASYFCATDGDTPLVFGKGTRLSVIANTRIQNPDPAVYQLRDSKSSDKSVCLFTDFDSQTNVSQSKDSDVYITDKTVLDMRSMDFKSNSAVAWSNKSDFACANAFNNSIIPEDTFFPSPESSCGTLGEPQLSYILDAILFLYGIVLTLLYCRLKIQVRKAAITSYEKSDGVYTGLSTRNQETYETLKHEKPPQ

SEQ ID NO: 10737 - protein, 697 aa, synthetic construct
MALPVTALLLPLALLLHAARPEFDGGITQSPKYLFRKEGQNVTLSCEQNLNHDAMYWYRQDPGQGLRLIYYSWAQGDFQKGDIAEGYSVSREKKESFPLTVTSAQKNPTAFYLCASSWGAPYEQYFGPGTRLTVLEDLKNVFPPEVAVFEPSEAEISHTQKATLVCLATGFYPDHVELSWWVNGKEVHSGVSTDPQPLKEQPALNDSRYCLSSRLRVSATFWQNPRNHFRCQVQFYGLSENDEWTQDRAKPVTQIVSAEAWGRADCGSQAQSDCSCSTVSPGVLAGIVMGDLVLTVLIALAVYFLGRLVPRGRGAAEAATRKQRITETESPYQELQGQRSDVYSDLNTQRPYYKRAKRSGSGATNFSLLKQAGDVEENPGPTSMDWIWRILFLVGAATGAHSFEQQGEEDPQALSIQEGENATMNCSYKTSINNLQWYRQNSGRGLVHLILIRSNEREKHSGRLRVTLDTSKKSSSLLITASRAADTASYFCATDGDTPLVFGKGTRLSVIANTRIQNPDPAVYQLRDSKSSDKSVCLFTDFDSQTNVSQSKDSDVYITDKTVLDMRSMDFKSNSAVAWSNKSDFACANAFNNSIIPEDTFFPSPESSCGTQAQSDCSSSTVSPGVLAGIVMGDLVLTVLIALAVYFLGRLVPRGRGAAEAATRKQRITETESPYQELQGQRSDVYSDLNTQRPYYK

SEQ ID NO: 10738 - protein, 739 aa, synthetic construct
MALPVTALLLPLALLLHAARPEFDGGITQSPKYLFRKEGQNVTLSCEQNLNHDAMYWYRQDPGQGLRLIYYSWAQGDFQKGDIAEGYSVSREKKESFPLTVTSAQKNPTAFYLCASSWGAPYEQYFGPGTRLTVLEDLKNVFPPEVAVFEPSEAEISHTQKATLVCLATGFYPDHVELSWWVNGKEVHSGVSTDPQPLKEQPALNDSRYCLSSRLRVSATFWQNPRNHFRCQVQFYGLSENDEWTQDRAKPVTQIVSAEAWGRADCGSQAQSDCSCSTVSPGVLAGIVMGDLVLTVLIALAVYFLGRLVPRGRGAAEAATRKQRITETESPYQELQGQRSDVYSDLNTQRPYYKRAKRSGSGATNFSLLKQAGDVEENPGPTSMDWIWRILFLVGAATGAHSFEQQGEEDPQALSIQEGENATMNCSYKTSINNLQWYRQNSGRGLVHLILIRSNEREKHSGRLRVTLDTSKKSSSLLITASRAADTASYFCATDGDTPLVFGKGTRLSVIANTRIQNPDPAVYQLRDSKSSDKSVCLFTDFDSQTNVSQSKDSDVYITDKTVLDMRSMDFKSNSAVAWSNKSDFACANAFNNSIIPEDTFFPSPESSCGTQAQSDCSCSTVSPGVLAGIVMGDLVLTVLIALAVYFLGRLVPRGRGAAEAATRKQRITETESPYQELQGQRSDVYSDLNTQKRGRKKLLYIFKQPFMRPVQTTQEEDGCSCRFPEEEEGGCELRPYYK

SEQ ID NO: 10739 - protein, 738 aa, synthetic construct
MALPVTALLLPLALLLHAARPEFDGGITQSPKYLFRKEGQNVTLSCEQNLNHDAMYWYRQDPGQGLRLIYYSWAQGDFQKGDIAEGYSVSREKKESFPLTVTSAQKNPTAFYLCASSWGAPYEQYFGPGTRLTVLEDLKNVFPPEVAVFEPSEAEISHTQKATLVCLATGFYPDHVELSWWVNGKEVHSGVSTDPQPLKEQPALNDSRYCLSSRLRVSATFWQNPRNHFRCQVQFYGLSENDEWTQDRAKPVTQIVSAEAWGRADCGSQAQSDCSCSTVSPGVLAGIVMGDLVLTVLIALAVYFLGRLVPRGRGAAEAATRKQRITETESPYQELQGQRSDVYSDLNTQRPYYKRAKRSGSGATNFSLLKQAGDVEENPGPTSMDWIWRILFLVGAATGAHSFEQQGEEDPQALSIQEGENATMNCSYKTSINNLQWYRQNSGRGLVHLILIRSNEREKHSGRLRVTLDTSKKSSSLLITASRAADTASYFCATDGDTPLVFGKGTRLSVIANTRIQNPDPAVYQLRDSKSSDKSVCLFTDFDSQTNVSQSKDSDVYITDKTVLDMRSMDFKSNSAVAWSNKSDFACANAFNNSIIPEDTFFPSPESSCGTQAQSDCSCSTVSPGVLAGIVMGDLVLTVLIALAVYFLGRLVPRGRGAAEAATRKQRITETESPYQELQGQRSDVYSDLNTQRSKRSRLLHSDYMNMTPRRPGPTRKHYQPYAPPRDFAAYRSRPYYK

SEQ ID NO: 10740 - protein, 733 aa, synthetic construct
MALPVTALLLPLALLLHAARPEFDGGITQSPKYLFRKEGQNVTLSCEQNLNHDAMYWYRQDPGQGLRLIYYSWAQGDFQKGDIAEGYSVSREKKESFPLTVTSAQKNPTAFYLCASSWGAPYEQYFGPGTRLTVLEDLKNVFPPEVAVFEPSEAEISHTQKATLVCLATGFYPDHVELSWWVNGKEVHSGVSTDPQPLKEQPALNDSRYCLSSRLRVSATFWQNPRNHFRCQVQFYGLSENDEWTQDRAKPVTQIVSAEAWGRADCGSQAQSDCSCSTVSPGVLAGIVMGDLVLTVLIALAVYFLGRLVPRGRGAAEAATRKQRITETESPYQELQGQRSDVYSDLNTQRPYYKRAKRSGSGATNFSLLKQAGDVEENPGPTSMDWIWRILFLVGAATGAHSFEQQGEEDPQALSIQEGENATMNCSYKTSINNLQWYRQNSGRGLVHLILIRSNEREKHSGRLRVTLDTSKKSSSLLITASRAADTASYFCATDGDTPLVFGKGTRLSVIANTRIQNPDPAVYQLRDSKSSDKSVCLFTDFDSQTNVSQSKDSDVYITDKTVLDMRSMDFKSNSAVAWSNKSDFACANAFNNSIIPEDTFFPSPESSCGTQAQSDCSCSTVSPGVLAGIVMGDLVLTVLIALAVYFLGRLVPRGRGAAEAATRKQRITETESPYQELQGQRSDVYSDLNTQRDQRLPPDAHKPPGGGSFRTPIQEEQADAHSTLAKIRPYYK

SEQ ID NO: 10741 - protein, 817 aa, synthetic construct
MALPVTALLLPLALLLHAARPEFDGGITQSPKYLFRKEGQNVTLSCEQNLNHDAMYWYRQDPGQGLRLIYYSWAQGDFQKGDIAEGYSVSREKKESFPLTVTSAQKNPTAFYLCASSWGAPYEQYFGPGTRLTVLEDLKNVFPPEVAVFEPSEAEISHTQKATLVCLATGFYPDHVELSWWVNGKEVHSGVSTDPQPLKEQPALNDSRYCLSSRLRVSATFWQNPRNHFRCQVQFYGLSENDEWTQDRAKPVTQIVSAEAWGRADCGSQAQSDCSCSTVSPGVLAGIVMGDLVLTVLIALAVYFLGRLVPRGRGAAEAATRKQRITETESPYQELQGQRSDVYSDLNTQRPYYKRAKRSGSGATNFSLLKQAGDVEENPGPTSMDWIWRILFLVGAATGAHSFEQQGEEDPQALSIQEGENATMNCSYKTSINNLQWYRQNSGRGLVHLILIRSNEREKHSGRLRVTLDTSKKSSSLLITASRAADTASYFCATDGDTPLVFGKGTRLSVIANTRIQNPDPAVYQLRDSKSSDKSVCLFTDFDSQTNVSQSKDSDVYITDKTVLDMRSMDFKSNSAVAWSNKSDFACANAFNNSIIPEDTFFPSPESSCGTQAQSDCSCSTVSPGVLAGIVMGDLVLTVLIALAVYFLGRLVPRGRGAAEAATRKQRITETESPYQELQGQRSDVYSDLNTQWRRKRKEKQSETSPKEFLTIYEDVKDLKTRRNHEQEQTFPGGGSTIYSMIQSQSSAPTSQEPAYTLYSLIQPSRKSGSRKRNHSPSFNSTIYEVIGKSQPKAQNPARLSRKELENFDVYSRPYYK

SEQ ID NO: 10742 - protein, 909 aa, synthetic construct
MALPVTALLLPLALLLHAARPEFDGGITQSPKYLFRKEGQNVTLSCEQNLNHDAMYWYRQDPGQGLRLIYYSWAQGDFQKGDIAEGYSVSREKKESFPLTVTSAQKNPTAFYLCASSWGAPYEQYFGPGTRLTVLEDLKNVFPPEVAVFEPSEAEISHTQKATLVCLATGFYPDHVELSWWVNGKEVHSGVSTDPQPLKEQPALNDSRYCLSSRLRVSATFWQNPRNHFRCQVQFYGLSENDEWTQDRAKPVTQIVSAEAWGRADCGSQAQSDCSCSTVSPGVLAGIVMGDLVLTVLIALAVYFLGRLVPRGRGAAEAATRKQRITETESPYQELQGQRSDVYSDLNTQRVKFSRSADAPAYQQGQNQLYNELNLGRREEYDVLDKRRGRDPEMGGKPQRRKNPQEGLYNELQKDKMAEAYSEIGMKGERRRGKGHDGLYQGLSTATKDTYDALHMQALPPRRAKRSGSGATNFSLLKQAGDVEENPGPTSMDWIWRILFLVGAATGAHSFEQQGEEDPQALSIQEGENATMNCSYKTSINNLQWYRQNSGRGLVHLILIRSNEREKHSGRLRVTLDTSKKSSSLLITASRAADTASYFCATDGDTPLVFGKGTRLSVIANTRIQNPDPAVYQLRDSKSSDKSVCLFTDFDSQTNVSQSKDSDVYITDKTVLDMRSMDFKSNSAVAWSNKSDFACANAFNNSIIPEDTFFPSPESSCGTTTPGERSSLPAFYPGTSGSCSGCGSLSLPLLAGLVAADAVASLLIVGAVFLCARPRRSPAQEDGKVYINMPGRGSSRRVKFSRSADAPAYQQGQNQLYNELNLGRREEYDVLDKRRGRDPEMGGKPQRRKNPQEGLYNELQKDKMAEAYSEIGMKGERRRGKGHDGLYQGLSTATKDTYDALHMQALPPR

SEQ ID NO: 10743 - protein, 835 aa, synthetic construct
MALPVTALLLPLALLLHAARPEFDGGITQSPKYLFRKEGQNVTLSCEQNLNHDAMYWYRQDPGQGLRLIYYSWAQGDFQKGDIAEGYSVSREKKESFPLTVTSAQKNPTAFYLCASSWGAPYEQYFGPGTRLTVLEDLKNVFPPEVAVFEPSEAEISHTQKATLVCLATGFYPDHVELSWWVNGKEVHSGVSTDPQPLKEQPALNDSRYCLSSRLRVSATFWQNPRNHFRCQVQFYGLSENDEWTQDRAKPVTQIVSAEAWGRADCGSQAQSDCSCSTVSPGVLAGIVMGDLVLTVLIALAVYFLGRLVPRGRGAAEAATRKQRITETESPYQELQGQRSDVYSDLNTQRVKFSRSADAPAYQQGQNQLYNELNLGRREEYDVLDKRRGRDPEMGGKPQRRKNPQEGLYNELQKDKMAEAYSEIGMKGERRRGKGHDGLYQGLSTATKDTYDALHMQALPPRRAKRSGSGATNFSLLKQAGDVEENPGPTSMDWIWRILFLVGAATGAHSFEQQGEEDPQALSIQEGENATMNCSYKTSINNLQWYRQNSGRGLVHLILIRSNEREKHSGRLRVTLDTSKKSSSLLITASRAADTASYFCATDGDTPLVFGKGTRLSVIANTRIQNPDPAVYQLRDSKSSDKSVCLFTDFDSQTNVSQSKDSDVYITDKTVLDMRSMDFKSNSAVAWSNKSDFACANAFNNSIIPEDTFFPSPESSCGTTTPGERSSLPAFYPGTSGSCSGCGSLSLPLLAGLVAADAVASLLIVGAVFKRGRKKLLYIFKQPFMRPVQTTQEEDGCSCRFPEEEEGGCELLCARPRRSPAQEDGKVYINMPGRG

SEQ ID NO: 10744 - protein, 834 aa, synthetic construct
MALPVTALLLPLALLLHAARPEFDGGITQSPKYLFRKEGQNVTLSCEQNLNHDAMYWYRQDPGQGLRLIYYSWAQGDFQKGDIAEGYSVSREKKESFPLTVTSAQKNPTAFYLCASSWGAPYEQYFGPGTRLTVLEDLKNVFPPEVAVFEPSEAEISHTQKATLVCLATGFYPDHVELSWWVNGKEVHSGVSTDPQPLKEQPALNDSRYCLSSRLRVSATFWQNPRNHFRCQVQFYGLSENDEWTQDRAKPVTQIVSAEAWGRADCGSQAQSDCSCSTVSPGVLAGIVMGDLVLTVLIALAVYFLGRLVPRGRGAAEAATRKQRITETESPYQELQGQRSDVYSDLNTQRVKFSRSADAPAYQQGQNQLYNELNLGRREEYDVLDKRRGRDPEMGGKPQRRKNPQEGLYNELQKDKMAEAYSEIGMKGERRRGKGHDGLYQGLSTATKDTYDALHMQALPPRRAKRSGSGATNFSLLKQAGDVEENPGPTSMDWIWRILFLVGAATGAHSFEQQGEEDPQALSIQEGENATMNCSYKTSINNLQWYRQNSGRGLVHLILIRSNEREKHSGRLRVTLDTSKKSSSLLITASRAADTASYFCATDGDTPLVFGKGTRLSVIANTRIQNPDPAVYQLRDSKSSDKSVCLFTDFDSQTNVSQSKDSDVYITDKTVLDMRSMDFKSNSAVAWSNKSDFACANAFNNSIIPEDTFFPSPESSCGTTTPGERSSLPAFYPGTSGSCSGCGSLSLPLLAGLVAADAVASLLIVGAVFRSKRSRLLHSDYMNMTPRRPGPTRKHYQPYAPPRDFAAYRSLCARPRRSPAQEDGKVYINMPGRG

SEQ ID NO: 10745 - protein, 1080 aa, synthetic construct
MALPVTALLLPLALLLHAARPEFDGGITQSPKYLFRKEGQNVTLSCEQNLNHDAMYWYRQDPGQGLRLIYYSWAQGDFQKGDIAEGYSVSREKKESFPLTVTSAQKNPTAFYLCASSWGAPYEQYFGPGTRLTVLEDLKNVFPPEVAVFEPSEAEISHTQKATLVCLATGFYPDHVELSWWVNGKEVHSGVSTDPQPLKEQPALNDSRYCLSSRLRVSATFWQNPRNHFRCQVQFYGLSENDEWTQDRAKPVTQIVSAEAWGRADCGSQSFGLLDPKLCYLLDGILFIYGVILTALFLRVKFSRSADAPAYQQGQNQLYNELNLGRREEYDVLDKRRGRDPEMGGKPQRRKNPQEGLYNELQKDKMAEAYSEIGMKGERRRGKGHDGLYQGLSTATKDTYDALHMQALPPRRAKRSGSGATNFSLLKQAGDVEENPGPTSMDWIWRILFLVGAATGAHSFEQQGEEDPQALSIQEGENATMNCSYKTSINNLQWYRQNSGRGLVHLILIRSNEREKHSGRLRVTLDTSKKSSSLLITASRAADTASYFCATDGDTPLVFGKGTRLSVIANTRIQNPDPAVYQLRDSKSSDKSVCLFTDFDSQTNVSQSKDSDVYITDKTVLDMRSMDFKSNSAVAWSNKSDFACANAFNNSIIPEDTFFPSPESSCGTQSFGLLDPKLCYLLDGILFIYGVILTALFLRVKFSRSADAPAYQQGQNQLYNELNLGRREEYDVLDKRRGRDPEMGGKPQRRKNPQEGLYNELQKDKMAEAYSEIGMKGERRRGKGHDGLYQGLSTATKDTYDALHMQALPPRRAKRSGSGVKQTLNFDLLKLAGDVESNPGPSRGHMALPVTALLLPLALLLHAARPSQFRVSPLDRTWNLGETVELKCQVLLSNPTSGCSWLFQPRGAAASPTFLLYLSQNKPKAAEGLDTQRFSGKRLGDTFVLTLSDFRRENEGYYFCSALSNSIMYFSHFVPVFLPAKPTTTPAPRPPTPAPTIASQPLSLRPEACRPAAGGAVHTRGLDFACDIYIWAPLAGTCGVLLLSLVITLYCNHRNRRRVCKCPRPVVKSGDKPSLSARYV

SEQ ID NO: 10746 - protein, 820 aa, synthetic construct
MALPVTALLLPLALLLHAARPEFDGGITQSPKYLFRKEGQNVTLSCEQNLNHDAMYWYRQDPGQGLRLIYYSWAQGDFQKGDIAEGYSVSREKKESFPLTVTSAQKNPTAFYLCASSWGAPYEQYFGPGTRLTVLEDLKNVFPPEVAVFEPSEAEISHTQKATLVCLATGFYPDHVELSWWVNGKEVHSGVSTDPQPLKEQPALNDSRYCLSSRLRVSATFWQNPRNHFRCQVQFYGLSENDEWTQDRAKPVTQIVSAEAWGRADCGSQSFGLLDPKLCYLLDGILFIYGVILTALFLRVKFSRSADAPAYQQGQNQLYNELNLGRREEYDVLDKRRGRDPEMGGKPQRRKNPQEGLYNELQKDKMAEAYSEIGMKGERRRGKGHDGLYQGLSTATKDTYDALHMQALPPRRAKRSGSGATNFSLLKQAGDVEENPGPTSMDWIWRILFLVGAATGAHSFEQQGEEDPQALSIQEGENATMNCSYKTSINNLQWYRQNSGRGLVHLILIRSNEREKHSGRLRVTLDTSKKSSSLLITASRAADTASYFCATDGDTPLVFGKGTRLSVIANTRASTKGPSVFPLAPSSKSTSGGTAALGCLVKDYFPEPVTVSWNSGALTSGVHTFPAVLQSSGLYSLSSVVTVPSSSLGTQTYICNVNHKPSNTKVDKRVEPKSCGTQSFGLLDPKLSYLLDGILFIYGVILTALFLRVKFSRSADAPAYQQGQNQLYNELNLGRREEYDVLDKRRGRDPEMGGKPQRRKNPQEGLYNELQKDKMAEAYSEIGMKGERRRGKGHDGLYQGLSTATKDTYDALHMQALPPR

SEQ ID NO: 10747 - protein, 811 aa, synthetic construct
MALPVTALLLPLALLLHAARPEFDGGITQSPKYLFRKEGQNVTLSCEQNLNHDAMYWYRQDPGQGLRLIYYSWAQGDFQKGDIAEGYSVSREKKESFPLTVTSAQKNPTAFYLCASSWGAPYEQYFGPGTRLTVLEDLKNVFPPEVAVFEPSEAEISHTQKATLVCLATGFYPDHVELSWWVNGKEVHSGVSTDPQPLKEQPALNDSRYCLSSRLRVSATFWQNPRNHFRCQVQFYGLSENDEWTQDRAKPVTQIVSAEAWGRADCGSQSFGLLDPKLCYLLDGILFIYGVILTALFLRVKFSRSADAPAYQQGQNQLYNELNLGRREEYDVLDKRRGRDPEMGGKPQRRKNPQEGLYNELQKDKMAEAYSEIGMKGERRRGKGHDGLYQGLSTATKDTYDALHMQALPPRRAKRSGSGATNFSLLKQAGDVEENPGPTSMDWIWRILFLVGAATGAHSFEQQGEEDPQALSIQEGENATMNCSYKTSINNLQWYRQNSGRGLVHLILIRSNEREKHSGRLRVTLDTSKKSSSLLITASRAADTASYFCATDGDTPLVFGKGTRLSVIANTRIQNPDPAVYQLRDSKSSDKSVCLFTDFDSQTNVSQSKDSDVYITDKTVLDMRSMDFKSNSAVAWSNKSDFACANAFNNSIIPEDTFFPSPESSCGTQSFGLLDPKLSYLLDGILFIYGVILTALFLRVKFSRSADAPAYQQGQNQLYNELNLGRREEYDVLDKRRGRDPEMGGKPQRRKNPQEGLYNELQKDKMAEAYSEIGMKGERRRGKGHDGLYQGLSTATKDTYDALHMQALPPR

SEQ ID NO: 10748 - protein, 981 aa, synthetic construct
MALPVTALLLPLALLLHAARPEFDGGITQSPKYLFRKEGQNVTLSCEQNLNHDAMYWYRQDPGQGLRLIYYSWAQGDFQKGDIAEGYSVSREKKESFPLTVTSAQKNPTAFYLCASSWGAPYEQYFGPGTRLTVLEGQPKANPTVTLFPPSSEELQANKATLVCLISDFYPGAVTVAWKADGSPVKAGVETTKPSKQSNNKYAASSYLSLTPEQWKSHRSYSCQVTHEGSTVEKTVAPTECSGSLGEPQLCYILDAILFLYGIVLTLLYCRLKIQVRKAAITSYEKSDGVYTGLSTRNQETYETLKHEKPPQRAKRSGSGATNFSLLKQAGDVEENPGPTSMDWIWRILFLVGAATGAHSFEQQGEEDPQALSIQEGENATMNCSYKTSINNLQWYRQNSGRGLVHLILIRSNEREKHSGRLRVTLDTSKKSSSLLITASRAADTASYFCATDGDTPLVFGKGTRLSVIANTRIQNPDPAVYQLRDSKSSDKSVCLFTDFDSQTNVSQSKDSDVYITDKTVLDMRSMDFKSNSAVAWSNKSDFACANAFNNSIIPEDTFFPSPESSCGTQSFGLLDPKLCYLLDGILFIYGVILTALFLRVKFSRSADAPAYQQGQNQLYNELNLGRREEYDVLDKRRGRDPEMGGKPQRRKNPQEGLYNELQKDKMAEAYSEIGMKGERRRGKGHDGLYQGLSTATKDTYDALHMQALPPRRAKRSGSGVKQTLNFDLLKLAGDVESNPGPSRGHMALPVTALLLPLALLLHAARPSQFRVSPLDRTWNLGETVELKCQVLLSNPTSGCSWLFQPRGAAASPTFLLYLSQNKPKAAEGLDTQRFSGKRLGDTFVLTLSDFRRENEGYYFCSALSNSIMYFSHFVPVFLPAKPTTTPAPRPPTPAPTIASQPLSLRPEACRPAAGGAVHTRGLDFACDIYIWAPLAGTCGVLLLSLVITLYCNHRNRRRVCKCPRPVVKSGDKPSLSARYV

SEQ ID NO: 10749 - protein, 745 aa, synthetic construct
MALPVTALLLPLALLLHAARPEFDGGITQSPKYLFRKEGQNVTLSCEQNLNHDAMYWYRQDPGQGLRLIYYSWAQGDFQKGDIAEGYSVSREKKESFPLTVTSAQKNPTAFYLCASSWGAPYEQYFGPGTRLTVLEDLKNVFPPEVAVFEPSEAEISHTQKATLVCLATGFYPDHVELSWWVNGKEVHSGVSTDPQPLKEQPALNDSRYCLSSRLRVSATFWQNPRNHFRCQVQFYGLSENDEWTQDRAKPVTQIVSAEAWGRADCGSQSFGLLDPKLCYLLDGILFIYGVILTALFLRVKFSRSADAPAYQQGQNQLYNELNLGRREEYDVLDKRRGRDPEMGGKPQRRKNPQEGLYNELQKDKMAEAYSEIGMKGERRRGKGHDGLYQGLSTATKDTYDALHMQALPPRRAKRSGSGATNFSLLKQAGDVEENPGPTSMDWIWRILFLVGAATGAHSFEQQGEEDPQALSIQEGENATMNCSYKTSINNLQWYRQNSGRGLVHLILIRSNEREKHSGRLRVTLDTSKKSSSLLITASRAADTASYFCATDGDTPLVFGKGTRLSVIANTRASTKGPSVFPLAPSSKSTSGGTAALGCLVKDYFPEPVTVSWNSGALTSGVHTFPAVLQSSGLYSLSSVVTVPSSSLGTQTYICNVNHKPSNTKVDKRVEPKSCGTLGEPQLCYILDAILFLYGIVLTLLYCRLKIQVRKAAITSYEKSDGVYTGLSTRNQETYETLKHEKPPQ

SEQ ID NO: 10750 - protein, 745 aa, synthetic construct; identical to SEQ ID NO: 10749

SEQ ID NO: 10751 - protein, 736 aa, synthetic construct
MALPVTALLLPLALLLHAARPEFDGGITQSPKYLFRKEGQNVTLSCEQNLNHDAMYWYRQDPGQGLRLIYYSWAQGDFQKGDIAEGYSVSREKKESFPLTVTSAQKNPTAFYLCASSWGAPYEQYFGPGTRLTVLEDLKNVFPPEVAVFEPSEAEISHTQKATLVCLATGFYPDHVELSWWVNGKEVHSGVSTDPQPLKEQPALNDSRYCLSSRLRVSATFWQNPRNHFRCQVQFYGLSENDEWTQDRAKPVTQIVSAEAWGRADCGSQSFGLLDPKLCYLLDGILFIYGVILTALFLRVKFSRSADAPAYQQGQNQLYNELNLGRREEYDVLDKRRGRDPEMGGKPQRRKNPQEGLYNELQKDKMAEAYSEIGMKGERRRGKGHDGLYQGLSTATKDTYDALHMQALPPRRAKRSGSGATNFSLLKQAGDVEENPGPTSMDWIWRILFLVGAATGAHSFEQQGEEDPQALSIQEGENATMNCSYKTSINNLQWYRQNSGRGLVHLILIRSNEREKHSGRLRVTLDTSKKSSSLLITASRAADTASYFCATDGDTPLVFGKGTRLSVIANTRIQNPDPAVYQLRDSKSSDKSVCLFTDFDSQTNVSQSKDSDVYITDKTVLDMRSMDFKSNSAVAWSNKSDFACANAFNNSIIPEDTFFPSPESSCGTLGEPQLCYILDAILFLYGIVLTLLYCRLKIQVRKAAITSYEKSDGVYTGLSTRNQETYETLKHEKPPQ

SEQ ID NO: 10752 - protein, 985 aa, synthetic construct
MALPVTALLLPLALLLHAARPEFDGGITQSPKYLFRKEGQNVTLSCEQNLNHDAMYWYRQDPGQGLRLIYYSWAQGDFQKGDIAEGYSVSREKKESFPLTVTSAQKNPTAFYLCASSWGAPYEQYFGPGTRLTVLEGQPKANPTVTLFPPSSEELQANKATLVCLISDFYPGAVTVAWKADGSPVKAGVETTKPSKQSNNKYAASSYLSLTPEQWKSHRSYSCQVTHEGSTVEKTVAPTECSTTPGERSSLPAFYPGTSGSCSGCGSLSLPLLAGLVAADAVASLLIVGAVFLCARPRRSPAQEDGKVYINMPGRGRAKRSGSGATNFSLLKQAGDVEENPGPTSMDWIWRILFLVGAATGAHSFEQQGEEDPQALSIQEGENATMNCSYKTSINNLQWYRQNSGRGLVHLILIRSNEREKHSGRLRVTLDTSKKSSSLLITASRAADTASYFCATDGDTPLVFGKGTRLSVIANTRIQNPDPAVYQLRDSKSSDKSVCLFTDFDSQTNVSQSKDSDVYITDKTVLDMRSMDFKSNSAVAWSNKSDFACANAFNNSIIPEDTFFPSPESSCGTQSFGLLDPKLCYLLDGILFIYGVILTALFLRVKFSRSADAPAYQQGQNQLYNELNLGRREEYDVLDKRRGRDPEMGGKPQRRKNPQEGLYNELQKDKMAEAYSEIGMKGERRRGKGHDGLYQGLSTATKDTYDALHMQALPPRRAKRSGSGVKQTLNFDLLKLAGDVESNPGPSRGHMALPVTALLLPLALLLHAARPSQFRVSPLDRTWNLGETVELKCQVLLSNPTSGCSWLFQPRGAAASPTFLLYLSQNKPKAAEGLDTQRFSGKRLGDTFVLTLSDFRRENEGYYFCSALSNSIMYFSHFVPVFLPAKPTTTPAPRPPTPAPTIASQPLSLRPEACRPAAGGAVHTRGLDFACDIYIWAPLAGTCGVLLLSLVITLYCNHRNRRRVCKCPRPVVKSGDKPSLSARYV

SEQ ID NO: 10753 - protein, 1018 aa, synthetic construct
MALPVTALLLPLALLLHAARPEFDGGITQSPKYLFRKEGQNVTLSCEQNLNHDAMYWYRQDPGQGLRLIYYSWAQGDFQKGDIAEGYSVSREKKESFPLTVTSAQKNPTAFYLCASSWGAPYEQYFGPGTRLTVLEDLKNVFPPEVAVFEPSEAEISHTQKATLVCLATGFYPDHVELSWWVNGKEVHSGVSTDPQPLKEQPALNDSRYCLSSRLRVSATFWQNPRNHFRCQVQFYGLSENDEWTQDRAKPVTQIVSAEAWGRADCGSQSFGLLDPKLCYLLDGILFIYGVILTALFLRVKFSRSADAPAYQQGQNQLYNELNLGRREEYDVLDKRRGRDPEMGGKPQRRKNPQEGLYNELQKDKMAEAYSEIGMKGERRRGKGHDGLYQGLSTATKDTYDALHMQALPPRRAKRSGSGATNFSLLKQAGDVEENPGPTSMDWIWRILFLVGAATGAHSFEQQGEEDPQALSIQEGENATMNCSYKTSINNLQWYRQNSGRGLVHLILIRSNEREKHSGRLRVTLDTSKKSSSLLITASRAADTASYFCATDGDTPLVFGKGTRLSVIANTRASTKGPSVFPLAPSSKSTSGGTAALGCLVKDYFPEPVTVSWNSGALTSGVHTFPAVLQSSGLYSLSSVVTVPSSSLGTQTYICNVNHKPSNTKVDKRVEPKSCTTPGERSSLPAFYPGTSGSCSGCGSLSLPLLAGLVAADAVASLLIVGAVFLCARPRRSPAQEDGKVYINMPGRGRAKRSGSGVKQTLNFDLLKLAGDVESNPGPSRGHMALPVTALLLPLALLLHAARPSQFRVSPLDRTWNLGETVELKCQVLLSNPTSGCSWLFQPRGAAASPTFLLYLSQNKPKAAEGLDTQRFSGKRLGDTFVLTLSDFRRENEGYYFCSALSNSIMYFSHFVPVFLPAKPTTTPAPRPPTPAPTIASQPLSLRPEACRPAAGGAVHTRGLDFACDIYIWAPLAGTCGVLLLSLVITLYCNHRNRRRVCKCPRPVVKSGDKPSLSARYV

SEQ ID NO: 10754 - protein, 930 aa, synthetic construct
MALPVTALLLPLALLLHAARPDGGITQSPKYLFRKEGQNVTLSCEQNLNHDAMYWYRQDPGQGLRLIYYSWAQGDFQKGDIAEGYSVSREKKESFPLTVTSAQKNPTAFYLCASSWGAPYEQYFGPGTRLTVLELWVSQPPEIRTLEGSSAFLPCSFNASQGRLAIGSVTWFRDEVVPGKEVRNGTPEFRGRLAPLASSRFLHDHQAELHIRDVRGHDASIYVCRVEVLGLGVGTGNGTRLVVEKEHPQLGAGTVLLLRAGFYAVSFLSVAVGSTVYYQGKCLTWKGPRRQLPAVVPAPLPPPCGSSAHLLPPVPGGRAKRSGSGATNFSLLKQAGDVEENPGPTSMDWIWRILFLVGAATGAHSFEQQGEEDPQALSIQEGENATMNCSYKTSINNLQWYRQNSGRGLVHLILIRSNEREKHSGRLRVTLDTSKKSSSLLITASRAADTASYFCATDGDTPLVFGKGTRLSVIANTRLWVSQPPEIRTLEGSSAFLPCSFNASQGRLAIGSVTWFRDEVVPGKEVRNGTPEFRGRLAPLASSRFLHDHQAELHIRDVRGHDASIYVCRVEVLGLGVGTGNGTRLVVEKEHPQLGAGTVLLLRAGFYAVSFLSVAVGSTVYYQGKCLTWKGPRRQLPAVVPAPLPPPCGSSAHLLPPVPGGRAKRSGSGVKQTLNFDLLKLAGDVESNPGPSRGHMALPVTALLLPLALLLHAARPSQFRVSPLDRTWNLGETVELKCQVLLSNPTSGCSWLFQPRGAAASPTFLLYLSQNKPKAAEGLDTQRFSGKRLGDTFVLTLSDFRRENEGYYFCSALSNSIMYFSHFVPVFLPAKPTTTPAPRPPTPAPTIASQPLSLRPEACRPAAGGAVHTRGLDFACDIYIWAPLAGTCGVLLLSLVITLYCNHRNRRRVCKCPRPVVKSGDKPSLSARYV

SEQ ID NO: 10755 - protein, 1065 aa, synthetic construct
MALPVTALLLPLALLLHAARPEFDGGITQSPKYLFRKEGQNVTLSCEQNLNHDAMYWYRQDPGQGLRLIYYSWAQGDFQKGDIAEGYSVSREKKESFPLTVTSAQKNPTAFYLCASSWGAPYEQYFGPGTRLTVLEGQPKANPTVTLFPPSSEELQANKATLVCLISDFYPGAVTVAWKADGSPVKAGVETTKPSKQSNNKYAASSYLSLTPEQWKSHRSYSCQVTHEGSTVEKTVAPTECSGSQSFGLLDPKLCYLLDGILFIYGVILTALFLRVKFSRSADAPAYQQGQNQLYNELNLGRREEYDVLDKRRGRDPEMGGKPQRRKNPQEGLYNELQKDKMAEAYSEIGMKGERRRGKGHDGLYQGLSTATKDTYDALHMQALPPRRAKRSGSGATNFSLLKQAGDVEENPGPTSMDWIWRILFLVGAATGAHSFEQQGEEDPQALSIQEGENATMNCSYKTSINNLQWYRQNSGRGLVHLILIRSNEREKHSGRLRVTLDTSKKSSSLLITASRAADTASYFCATDGDTPLVFGKGTRLSVIANTRASTKGPSVFPLAPSSKSTSGGTAALGCLVKDYFPEPVTVSWNSGALTSGVHTFPAVLQSSGLYSLSSVVTVPSSSLGTQTYICNVNHKPSNTKVDKRVEPKSCGTQSFGLLDPKLCYLLDGILFIYGVILTALFLRVKFSRSADAPAYQQGQNQLYNELNLGRREEYDVLDKRRGRDPEMGGKPQRRKNPQEGLYNELQKDKMAEAYSEIGMKGERRRGKGHDGLYQGLSTATKDTYDALHMQALPPRRAKRSGSGVKQTLNFDLLKLAGDVESNPGPSRGHMALPVTALLLPLALLLHAARPSQFRVSPLDRTWNLGETVELKCQVLLSNPTSGCSWLFQPRGAAASPTFLLYLSQNKPKAAEGLDTQRFSGKRLGDTFVLTLSDFRRENEGYYFCSALSNSIMYFSHFVPVFLPAKPTTTPAPRPPTPAPTIASQPLSLRPEACRPAAGGAVHTRGLDFACDIYIWAPLAGTCGVLLLSLVITLYCNHRNRRRVCKCPRPVVKSGDKPSLSARYV

SEQ ID NO: 10756 - protein, 1083 aa, synthetic construct
MALPVTALLLPLALLLHAARPEFDGGITQSPKYLFRKEGQNVTLSCEQNLNHDAMYWYRQDPGQGLRLIYYSWAQGDFQKGDIAEGYSVSREKKESFPLTVTSAQKNPTAFYLCASSWGAPYEQYFGPGTRLTVLEGQPKANPTVTLFPPSSEELQANKATLVCLISDFYPGAVTVAWKADGSPVKAGVETTKPSKQSNNKYAASSYLSLTPEQWKSHRSYSCQVTHEGSTVEKTVAPTECSGSQSFGLLDPKLCYLLDGILFIYGVILTALFLRVKFSRSADAPAYQQGQNQLYNELNLGRREEYDVLDKRRGRDPEMGGKPQRRKNPQEGLYNELQKDKMAEAYSEIGMKGERRRGKGHDGLYQGLSTATKDTYDALHMQALPPRRAKRSGSGATNFSLLKQAGDVEENPGPTSMDWIWRILFLVGAATGAHSFEQQGEEDPQALSIQEGENATMNCSYKTSINNLQWYRQNSGRGLVHLILIRSNEREKHSGRLRVTLDTSKKSSSLLITASRAADTASYFCATDGDTPLVFGKGTRLSVIANTRASPTSPKVFPLSLCSTQPDGNVVIACLVQGFFPQEPLSVTWSESGQGVTARNFPPSQDASGDLYTTSSQLTLPATQCLAGKSVTCHVKHYTNPSQDVTVPCPVPSTPPTPSPSTPPTPSPSGTQSFGLLDPKLCYLLDGILFIYGVILTALFLRVKFSRSADAPAYQQGQNQLYNELNLGRREEYDVLDKRRGRDPEMGGKPQRRKNPQEGLYNELQKDKMAEAYSEIGMKGERRRGKGHDGLYQGLSTATKDTYDALHMQALPPRRAKRSGSGVKQTLNFDLLKLAGDVESNPGPSRGHMALPVTALLLPLALLLHAARPSQFRVSPLDRTWNLGETVELKCQVLLSNPTSGCSWLFQPRGAAASPTFLLYLSQNKPKAAEGLDTQRFSGKRLGDTFVLTLSDFRRENEGYYFCSALSNSIMYFSHFVPVFLPAKPTTTPAPRPPTPAPTIASQPLSLRPEACRPAAGGAVHTRGLDFACDIYIWAPLAGTCGVLLLSLVITLYCNHRNRRRVCKCPRPVVKSGDKPSLSARYV

SEQ ID NO: 10757 - protein, 1064 aa, synthetic construct
MALPVTALLLPLALLLHAARPEFDGGITQSPKYLFRKEGQNVTLSCEQNLNHDAMYWYRQDPGQGLRLIYYSWAQGDFQKGDIAEGYSVSREKKESFPLTVTSAQKNPTAFYLCASSWGAPYEQYFGPGTRLTVLEGQPKANPTVTLFPPSSEELQANKATLVCLISDFYPGAVTVAWKADGSPVKAGVETTKPSKQSNNKYAASSYLSLTPEQWKSHRSYSCQVTHEGSTVEKTVAPTECSGSQSFGLLDPKLCYLLDGILFIYGVILTALFLRVKFSRSADAPAYQQGQNQLYNELNLGRREEYDVLDKRRGRDPEMGGKPQRRKNPQEGLYNELQKDKMAEAYSEIGMKGERRRGKGHDGLYQGLSTATKDTYDALHMQALPPRRAKRSGSGATNFSLLKQAGDVEENPGPTSMDWIWRILFLVGAATGAHSFEQQGEEDPQALSIQEGENATMNCSYKTSINNLQWYRQNSGRGLVHLILIRSNEREKHSGRLRVTLDTSKKSSSLLITASRAADTASYFCATDGDTPLVFGKGTRLSVIANTRASTKGPSVFPLAPCSRSTSESTAALGCLVKDYFPEPVTVSWNSGALTSGVHTFPAVLQSSGLYSLSSVVTVPSSNFGTQTYTCNVDHKPSNTKVDKTVERKCGTQSFGLLDPKLCYLLDGILFIYGVILTALFLRVKFSRSADAPAYQQGQNQLYNELNLGRREEYDVLDKRRGRDPEMGGKPQRRKNPQEGLYNELQKDKMAEAYSEIGMKGERRRGKGHDGLYQGLSTATKDTYDALHMQALPPRRAKRSGSGVKQTLNFDLLKLAGDVESNPGPSRGHMALPVTALLLPLALLLHAARPSQFRVSPLDRTWNLGETVELKCQVLLSNPTSGCSWLFQPRGAAASPTFLLYLSQNKPKAAEGLDTQRFSGKRLGDTFVLTLSDFRRENEGYYFCSALSNSIMYFSHFVPVFLPAKPTTTPAPRPPTPAPTIASQPLSLRPEACRPAAGGAVHTRGLDFACDIYIWAPLAGTCGVLLLSLVITLYCNHRNRRRVCKCPRPVVKSGDKPSLSARYV

SEQ ID NO: 10758 - protein, 1064 aa, synthetic construct; identical to SEQ ID NO: 10757

SEQ ID NO: 10759 - protein, 1061 aa, synthetic construct
MALPVTALLLPLALLLHAARPDGGITQSPKYLFRKEGQNVTLSCEQNLNHDAMYWYRQDPGQGLRLIYYSWAQGDFQKGDIAEGYSVSREKKESFPLTVTSAQKNPTAFYLCASSWGAPYEQYFGPGTRLTVLEGQPKANPTVTLFPPSSEELQANKATLVCLISDFYPGAVTVAWKADGSPVKAGVETTKPSKQSNNKYAASSYLSLTPEQWKSHRSYSCQVTHEGSTVEKTVAPTECSGSQSFGLLDPKLCYLLDGILFIYGVILTALFLRVKFSRSADAPAYQQGQNQLYNELNLGRREEYDVLDKRRGRDPEMGGKPQRRKNPQEGLYNELQKDKMAEAYSEIGMKGERRRGKGHDGLYQGLSTATKDTYDALHMQALPPRRAKRSGSGATNFSLLKQAGDVEENPGPTSMDWIWRILFLVGAATGAHSFEQQGEEDPQALSIQEGENATMNCSYKTSINNLQWYRQNSGRGLVHLILIRSNEREKHSGRLRVTLDTSKKSSSLLITASRAADTASYFCATDGDTPLVFGKGTRLSVIANTRASTKGPSVFPLAPCSRSTSESTAALGCLVKDYFPEPVTVSWNSGALTSGVHTFPAVLQSSGLYSLSSVVTVPSSNFGTQTYTCNVDHKPSNTKVDKTVERKGTQSFGLLDPKLCYLLDGILFIYGVILTALFLRVKFSRSADAPAYQQGQNQLYNELNLGRREEYDVLDKRRGRDPEMGGKPQRRKNPQEGLYNELQKDKMAEAYSEIGMKGERRRGKGHDGLYQGLSTATKDTYDALHMQALPPRRAKRSGSGVKQTLNFDLLKLAGDVESNPGPSRGHMALPVTALLLPLALLLHAARPSQFRVSPLDRTWNLGETVELKCQVLLSNPTSGCSWLFQPRGAAASPTFLLYLSQNKPKAAEGLDTQRFSGKRLGDTFVLTLSDFRRENEGYYFCSALSNSIMYFSHFVPVFLPAKPTTTPAPRPPTPAPTIASQPLSLRPEACRPAAGGAVHTRGLDFACDIYIWAPLAGTCGVLLLSLVITLYCNHRNRRRVCKCPRPVVKSGDKPSLSARYV

SEQ ID NO: 10760 - protein, 1068 aa, synthetic construct
MALPVTALLLPLALLLHAARPDGGITQSPKYLFRKEGQNVTLSCEQNLNHDAMYWYRQDPGQGLRLIYYSWAQGDFQKGDIAEGYSVSREKKESFPLTVTSAQKNPTAFYLCASSWGAPYEQYFGPGTRLTVLEGQPKANPTVTLFPPSSEELQANKATLVCLISDFYPGAVTVAWKADGSPVKAGVETTKPSKQSNNKYAASSYLSLTPEQWKSHRSYSCQVTHEGSTVEKTVAPTECSGSQSFGLLDPKLCYLLDGILFIYGVILTALFLRVKFSRSADAPAYQQGQNQLYNELNLGRREEYDVLDKRRGRDPEMGGKPQRRKNPQEGLYNELQKDKMAEAYSEIGMKGERRRGKGHDGLYQGLSTATKDTYDALHMQALPPRRAKRSGSGATNFSLLKQAGDVEENPGPTSMDWIWRILFLVGAATGAHSFEQQGEEDPQALSIQEGENATMNCSYKTSINNLQWYRQNSGRGLVHLILIRSNEREKHSGRLRVTLDTSKKSSSLLITASRAADTASYFCATDGDTPLVFGKGTRLSVIANTRASPTSPKVFPLSLDSTPQDGNVVVACLVQGFFPQEPLSVTWSESGQNVTARNFPPSQDASGDLYTTSSQLTLPATQCPDGKSVTCHVKHYTNPSQDVTVPCPVPPPPPGTQSFGLLDPKLCYLLDGILFIYGVILTALFLRVKFSRSADAPAYQQGQNQLYNELNLGRREEYDVLDKRRGRDPEMGGKPQRRKNPQEGLYNELQKDKMAEAYSEIGMKGERRRGKGHDGLYQGLSTATKDTYDALHMQALPPRRAKRSGSGVKQTLNFDLLKLAGDVESNPGPSRGHMALPVTALLLPLALLLHAARPSQFRVSPLDRTWNLGETVELKCQVLLSNPTSGCSWLFQPRGAAASPTFLLYLSQNKPKAAEGLDTQRFSGKRLGDTFVLTLSDFRRENEGYYFCSALSNSIMYFSHFVPVFLPAKPTTTPAPRPPTPAPTIASQPLSLRPEACRPAAGGAVHTRGLDFACDIYIWAPLAGTCGVLLLSLVITLYCNHRNRRRVCKCPRPVVKSGDKPSLSARYV

SEQ ID NO: 10761 - protein, 1063 aa, synthetic construct
MALPVTALLLPLALLLHAARPDGGITQSPKYLFRKEGQNVTLSCEQNLNHDAMYWYRQDPGQGLRLIYYSWAQGDFQKGDIAEGYSVSREKKESFPLTVTSAQKNPTAFYLCASSWGAPYEQYFGPGTRLTVLEGQPKANPTVTLFPPSSEELQANKATLVCLISDFYPGAVTVAWKADGSPVKAGVETTKPSKQSNNKYAASSYLSLTPEQWKSHRSYSCQVTHEGSTVEKTVAPTECSGSQSFGLLDPKLCYLLDGILFIYGVILTALFLRVKFSRSADAPAYQQGQNQLYNELNLGRREEYDVLDKRRGRDPEMGGKPQRRKNPQEGLYNELQKDKMAEAYSEIGMKGERRRGKGHDGLYQGLSTATKDTYDALHMQALPPRRAKRSGSGATNFSLLKQAGDVEENPGPTSMDWIWRILFLVGAATGAHSFEQQGEEDPQALSIQEGENATMNCSYKTSINNLQWYRQNSGRGLVHLILIRSNEREKHSGRLRVTLDTSKKSSSLLITASRAADTASYFCATDGDTPLVFGKGTRLSVIANTRASTQSPSVFPLTRCCKNIPSNATSVTLGCLATGYFPEPVMVTWDTGSLNGTTMTLPATTLTLSGHYATISLLTVSGAWAKQMFTCRVAHTPSSTDWVDNKTFSGTQSFGLLDPKLCYLLDGILFIYGVILTALFLRVKFSRSADAPAYQQGQNQLYNELNLGRREEYDVLDKRRGRDPEMGGKPQRRKNPQEGLYNELQKDKMAEAYSEIGMKGERRRGKGHDGLYQGLSTATKDTYDALHMQALPPRRAKRSGSGVKQTLNFDLLKLAGDVESNPGPSRGHMALPVTALLLPLALLLHAARPSQFRVSPLDRTWNLGETVELKCQVLLSNPTSGCSWLFQPRGAAASPTFLLYLSQNKPKAAEGLDTQRFSGKRLGDTFVLTLSDFRRENEGYYFCSALSNSIMYFSHFVPVFLPAKPTTTPAPRPPTPAPTIASQPLSLRPEACRPAAGGAVHTRGLDFACDIYIWAPLAGTCGVLLLSLVITLYCNHRNRRRVCKCPRPVVKSGDKPSLSARYV

SEQ ID NO: 10762 - protein, 1063 aa, synthetic construct
MALPVTALLLPLALLLHAARPDGGITQSPKYLFRKEGQNVTLSCEQNLNHDAMYWYRQDPGQGLRLIYYSWAQGDFQKGDIAEGYSVSREKKESFPLTVTSAQKNPTAFYLCASSWGAPYEQYFGPGTRLTVLEGQPKANPTVTLFPPSSEELQANKATLVCLISDFYPGAVTVAWKADGSPVKAGVETTKPSKQSNNKYAASSYLSLTPEQWKSHRSYSCQVTHEGSTVEKTVAPTECSGSQSFGLLDPKLCYLLDGILFIYGVILTALFLRVKFSRSADAPAYQQGQNQLYNELNLGRREEYDVLDKRRGRDPEMGGKPQRRKNPQEGLYNELQKDKMAEAYSEIGMKGERRRGKGHDGLYQGLSTATKDTYDALHMQALPPRRAKRSGSGATNFSLLKQAGDVEENPGPTSMDWIWRILFLVGAATGAHSFEQQGEEDPQALSIQEGENATMNCSYKTSINNLQWYRQNSGRGLVHLILIRSNEREKHSGRLRVTLDTSKKSSSLLITASRAADTASYFCATDGDTPLVFGKGTRLSVIANTRASTKGPSVFPLAPCSRSTSESTAALGCLVKDYFPEPVTVSWNSGALTSGVHTFPAVLQSSGLYSLSSVVTVPSSSLGTKTYTCNVDHKPSNTKVDKRVESKYGGTQSFGLLDPKLCYLLDGILFIYGVILTALFLRVKFSRSADAPAYQQGQNQLYNELNLGRREEYDVLDKRRGRDPEMGGKPQRRKNPQEGLYNELQKDKMAEAYSEIGMKGERRRGKGHDGLYQGLSTATKDTYDALHMQALPPRRAKRSGSGVKQTLNFDLLKLAGDVESNPGPSRGHMALPVTALLLPLALLLHAARPSQFRVSPLDRTWNLGETVELKCQVLLSNPTSGCSWLFQPRGAAASPTFLLYLSQNKPKAAEGLDTQRFSGKRLGDTFVLTLSDFRRENEGYYFCSALSNSIMYFSHFVPVFLPAKPTTTPAPRPPTPAPTIASQPLSLRPEACRPAAGGAVHTRGLDFACDIYIWAPLAGTCGVLLLSLVITLYCNHRNRRRVCKCPRPVVKSGDKPSLSARYV

SEQ ID NO: 10763 - protein, 1063 aa, synthetic construct
MALPVTALLLPLALLLHAARPDGGITQSPKYLFRKEGQNVTLSCEQNLNHDAMYWYRQDPGQGLRLIYYSWAQGDFQKGDIAEGYSVSREKKESFPLTVTSAQKNPTAFYLCASSWGAPYEQYFGPGTRLTVLEGQPKANPTVTLFPPSSEELQANKATLVCLISDFYPGAVTVAWKADGSPVKAGVETTKPSKQSNNKYAASSYLSLTPEQWKSHRSYSCQVTHEGSTVEKTVAPTECSGSQSFGLLDPKLCYLLDGILFIYGVILTALFLRVKFSRSADAPAYQQGQNQLYNELNLGRREEYDVLDKRRGRDPEMGGKPQRRKNPQEGLYNELQKDKMAEAYSEIGMKGERRRGKGHDGLYQGLSTATKDTYDALHMQALPPRRAKRSGSGATNFSLLKQAGDVEENPGPTSMDWIWRILFLVGAATGAHSFEQQGEEDPQALSIQEGENATMNCSYKTSINNLQWYRQNSGRGLVHLILIRSNEREKHSGRLRVTLDTSKKSSSLLITASRAADTASYFCATDGDTPLVFGKGTRLSVIANTRASTKGPSVFPLAPCSRSTSESTAALGCLVKDYFPEPVTVSWNSGALTSGVHTFPAVLQSSGLYSLSSVVTVPSSNFGTQTYTCNVDHKPSNTKVDKTVERKCCGTQSFGLLDPKLCYLLDGILFIYGVILTALFLRVKFSRSADAPAYQQGQNQLYNELNLGRREEYDVLDKRRGRDPEMGGKPQRRKNPQEGLYNELQKDKMAEAYSEIGMKGERRRGKGHDGLYQGLSTATKDTYDALHMQALPPRRAKRSGSGVKQTLNFDLLKLAGDVESNPGPSRGHMALPVTALLLPLALLLHAARPSQFRVSPLDRTWNLGETVELKCQVLLSNPTSGCSWLFQPRGAAASPTFLLYLSQNKPKAAEGLDTQRFSGKRLGDTFVLTLSDFRRENEGYYFCSALSNSIMYFSHFVPVFLPAKPTTTPAPRPPTPAPTIASQPLSLRPEACRPAAGGAVHTRGLDFACDIYIWAPLAGTCGVLLLSLVITLYCNHRNRRRVCKCPRPVVKSGDKPSLSARYV

SEQ ID NO: 10764 - protein, 1078 aa, synthetic construct
MALPVTALLLPLALLLHAARPDGGITQSPKYLFRKEGQNVTLSCEQNLNHDAMYWYRQDPGQGLRLIYYSWAQGDFQKGDIAEGYSVSREKKESFPLTVTSAQKNPTAFYLCASSWGAPYEQYFGPGTRLTVLEDLKNVFPPEVAVFEPSEAEISHTQKATLVCLATGFYPDHVELSWWVNGKEVHSGVSTDPQPLKEQPALNDSRYCLSSRLRVSATFWQNPRNHFRCQVQFYGLSENDEWTQDRAKPVTQIVSAEAWGRADCGSQSFGLLDPKLCYLLDGILFIYGVILTALFLRVKFSRSADAPAYQQGQNQLYNELNLGRREEYDVLDKRRGRDPEMGGKPQRRKNPQEGLYNELQKDKMAEAYSEIGMKGERRRGKGHDGLYQGLSTATKDTYDALHMQALPPRRAKRSGSGATNFSLLKQAGDVEENPGPTSMDWIWRILFLVGAATGAHSFEQQGEEDPQALSIQEGENATMNCSYKTSINNLQWYRQNSGRGLVHLILIRSNEREKHSGRLRVTLDTSKKSSSLLITASRAADTASYFCATDGDTPLVFGKGTRLSVIANTRIQNPDPAVYQLRDSKSSDKSVCLFTDFDSQTNVSQSKDSDVYITDKTVLDMRSMDFKSNSAVAWSNKSDFACANAFNNSIIPEDTFFPSPESSCGTQSFGLLDPKLCYLLDGILFIYGVILTALFLRVKFSRSADAPAYQQGQNQLYNELNLGRREEYDVLDKRRGRDPEMGGKPQRRKNPQEGLYNELQKDKMAEAYSEIGMKGERRRGKGHDGLYQGLSTATKDTYDALHMQALPPRRAKRSGSGVKQTLNFDLLKLAGDVESNPGPSRGHMALPVTALLLPLALLLHAARPSQFRVSPLDRTWNLGETVELKCQVLLSNPTSGCSWLFQPRGAAASPTFLLYLSQNKPKAAEGLDTQRFSGKRLGDTFVLTLSDFRRENEGYYFCSALSNSIMYFSHFVPVFLPAKPTTTPAPRPPTPAPTIASQPLSLRPEACRPAAGGAVHTRGLDFACDIYIWAPLAGTCGVLLLSLVITLYCNHRNRRRVCKCPRPVVKSGDKPSLSARYV

SEQ ID NO: 10765 - protein, 1078 aa, synthetic construct
MALPVTALLLPLALLLHAARPDGGITQSPKYLFRKEGQNVTLSCEQNLNHDAMYWYRQDPGQGLRLIYYSWAQGDFQKGDIAEGYSVSREKKESFPLTVTSAQKNPTAFYLCASSWGAPYEQYFGPGTRLTVLEDLKNVFPPEVAVFEPSKAEIAHTQKATLVCLATGFYPDHVELSWWVNGKEVHSGVCTDPQPLKEQPALNDSRYCLSSRLRVSATFWQNPRNHFRCQVQFYGLSENDEWTQDRAKPVTQIVSAEAWGRADCGSQSFGLLDPKLCYLLDGILFIYGVILTALFLRVKFSRSADAPAYQQGQNQLYNELNLGRREEYDVLDKRRGRDPEMGGKPQRRKNPQEGLYNELQKDKMAEAYSEIGMKGERRRGKGHDGLYQGLSTATKDTYDALHMQALPPRRAKRSGSGATNFSLLKQAGDVEENPGPTSMDWIWRILFLVGAATGAHSFEQQGEEDPQALSIQEGENATMNCSYKTSINNLQWYRQNSGRGLVHLILIRSNEREKHSGRLRVTLDTSKKSSSLLITASRAADTASYFCATDGDTPLVFGKGTRLSVIANTRIQNPDPAVYQLRDSKSSDKSVCLFTDFDSQTNVSQSKDSDVYITDKCVLDMRSMDFKSNSAVAWSNKSDFACANAFNNSIIPEDTFFPSSDVPCGTQSFGLLDPKLCYLLDGILFIYGVILTALFLRVKFSRSADAPAYQQGQNQLYNELNLGRREEYDVLDKRRGRDPEMGGKPQRRKNPQEGLYNELQKDKMAEAYSEIGMKGERRRGKGHDGLYQGLSTATKDTYDALHMQALPPRRAKRSGSGVKQTLNFDLLKLAGDVESNPGPSRGHMALPVTALLLPLALLLHAARPSQFRVSPLDRTWNLGETVELKCQVLLSNPTSGCSWLFQPRGAAASPTFLLYLSQNKPKAAEGLDTQRFSGKRLGDTFVLTLSDFRRENEGYYFCSALSNSIMYFSHFVPVFLPAKPTTTPAPRPPTPAPTIASQPLSLRPEACRPAAGGAVHTRGLDFACDIYIWAPLAGTCGVLLLSLVITLYCNHRNRRRVCKCPRPVVKSGDKPSLSARYV

SEQ ID NO: 10766 - protein, 809 aa, synthetic construct
MALPVTALLLPLALLLHAARPDGGITQSPKYLFRKEGQNVTLSCEQNLNHDAMYWYRQDPGQGLRLIYYSWAQGDFQKGDIAEGYSVSREKKESFPLTVTSAQKNPTAFYLCASSWGAPYEQYFGPGTRLTVLEDLKNVFPPEVAVFEPSEAEISHTQKATLVCLATGFYPDHVELSWWVNGKEVHSGVCTDPQPLKEQPALNDSRYCLSSRLRVSATFWQNPRNHFRCQVQFYGLSENDEWTQDRAKPVTQIVSAEAWGRADCGSQSFGLLDPKLCYLLDGILFIYGVILTALFLRVKFSRSADAPAYQQGQNQLYNELNLGRREEYDVLDKRRGRDPEMGGKPQRRKNPQEGLYNELQKDKMAEAYSEIGMKGERRRGKGHDGLYQGLSTATKDTYDALHMQALPPRRAKRSGSGATNFSLLKQAGDVEENPGPTSMDWIWRILFLVGAATGAHSFEQQGEEDPQALSIQEGENATMNCSYKTSINNLQWYRQNSGRGLVHLILIRSNEREKHSGRLRVTLDTSKKSSSLLITASRAADTASYFCATDGDTPLVFGKGTRLSVIANTRIQNPDPAVYQLRDSKSSDKSVCLFTDFDSQTNVSQSKDSDVYITDKCVLDMRSMDFKSNSAVAWSNKSDFACANAFNNSIIPEDTFFPSPESSCGTQSFGLLDPKLCYLLDGILFIYGVILTALFLRVKFSRSADAPAYQQGQNQLYNELNLGRREEYDVLDKRRGRDPEMGGKPQRRKNPQEGLYNELQKDKMAEAYSEIGMKGERRRGKGHDGLYQGLSTATKDTYDALHMQALPPR

SEQ ID NO: 10767 - protein, 850 aa, synthetic construct
MALPVTALLLPLALLLHAARPDGGITQSPKYLFRKEGQNVTLSCEQNLNHDAMYWYRQDPGQGLRLIYYSWAQGDFQKGDIAEGYSVSREKKESFPLTVTSAQKNPTAFYLCASSWGAPYEQYFGPGTRLTVLEQSFGLLDPKLCYLLDGILFIYGVILTALFLRVKFSRSADAPAYQQGQNQLYNELNLGRREEYDVLDKRRGRDPEMGGKPQRRKNPQEGLYNELQKDKMAEAYSEIGMKGERRRGKGHDGLYQGLSTATKDTYDALHMQALPPRRAKRSGSGATNFSLLKQAGDVEENPGPTSMDWIWRILFLVGAATGAHSFEQQGEEDPQALSIQEGENATMNCSYKTSINNLQWYRQNSGRGLVHLILIRSNEREKHSGRLRVTLDTSKKSSSLLITASRAADTASYFCATDGDTPLVFGKGTRLSVIANTRQSFGLLDPKLCYLLDGILFIYGVILTALFLRVKFSRSADAPAYQQGQNQLYNELNLGRREEYDVLDKRRGRDPEMGGKPQRRKNPQEGLYNELQKDKMAEAYSEIGMKGERRRGKGHDGLYQGLSTATKDTYDALHMQALPPRRAKRSGSGVKQTLNFDLLKLAGDVESNPGPSRGHMALPVTALLLPLALLLHAARPSQFRVSPLDRTWNLGETVELKCQVLLSNPTSGCSWLFQPRGAAASPTFLLYLSQNKPKAAEGLDTQRFSGKRLGDTFVLTLSDFRRENEGYYFCSALSNSIMYFSHFVPVFLPAKPTTTPAPRPPTPAPTIASQPLSLRPEACRPAAGGAVHTRGLDFACDIYIWAPLAGTCGVLLLSLVITLYCNHRNRRRVCKCPRPVVKSGDKPSLSARYV

SEQ ID NO: 10768 - protein, 850 aa, synthetic construct
MALPVTALLLPLALLLHAARPDGGITQSPKYLFRKEGQNVTLSCEQNLNHDAMYWYRQDPGQGLRLIYYSWAQGDFQKGDIAEGYSVSREKKESFPLTVTSAQKNPTAFYLCASSWGAPYEQYFGPGTRLTVLEDLKNVFPPEVAVFEPSEAEISHTQKATLVCLATGFYPDHVELSWWVNGKEVHSGVCTDPQPLKEQPALNDSRYCLSSRLRVSATFWQNPRNHFRCQVQFYGLSENDEWTQDRAKPVTQIVSAEAWGRADCGSQSFGLLDPKLCYLLDGILFIYGVILTALFLRSKRSRLLHSDYMNMTPRRPGPTRKHYQPYAPPRDFAAYRSRVKFSRSADAPAYQQGQNQLYNELNLGRREEYDVLDKRRGRDPEMGGKPQRRKNPQEGLYNELQKDKMAEAYSEIGMKGERRRGKGHDGLYQGLSTATKDTYDALHMQALPPRRAKRSGSGATNFSLLKQAGDVEENPGPTSMDWIWRILFLVGAATGAHSFEQQGEEDPQALSIQEGENATMNCSYKTSINNLQWYRQNSGRGLVHLILIRSNEREKHSGRLRVTLDTSKKSSSLLITASRAADTASYFCATDGDTPLVFGKGTRLSVIANTRIQNPDPAVYQLRDSKSSDKSVCLFTDFDSQTNVSQSKDSDVYITDKCVLDMRSMDFKSNSAVAWSNKSDFACANAFNNSIIPEDTFFPSPESSCGTQSFGLLDPKLCYLLDGILFIYGVILTALFLRVKFSRSADAPAYQQGQNQLYNELNLGRREEYDVLDKRRGRDPEMGGKPQRRKNPQEGLYNELQKDKMAEAYSEIGMKGERRRGKGHDGLYQGLSTATKDTYDALHMQALPPR

SEQ ID NO: 10769 - protein, 891 aa, synthetic construct
MALPVTALLLPLALLLHAARPDGGITQSPKYLFRKEGQNVTLSCEQNLNHDAMYWYRQDPGQGLRLIYYSWAQGDFQKGDIAEGYSVSREKKESFPLTVTSAQKNPTAFYLCASSWGAPYEQYFGPGTRLTVLEDLKNVFPPEVAVFEPSEAEISHTQKATLVCLATGFYPDHVELSWWVNGKEVHSGVCTDPQPLKEQPALNDSRYCLSSRLRVSATFWQNPRNHFRCQVQFYGLSENDEWTQDRAKPVTQIVSAEAWGRADCGSQSFGLLDPKLCYLLDGILFIYGVILTALFLRSKRSRLLHSDYMNMTPRRPGPTRKHYQPYAPPRDFAAYRSRVKFSRSADAPAYQQGQNQLYNELNLGRREEYDVLDKRRGRDPEMGGKPQRRKNPQEGLYNELQKDKMAEAYSEIGMKGERRRGKGHDGLYQGLSTATKDTYDALHMQALPPRRAKRSGSGATNFSLLKQAGDVEENPGPTSMDWIWRILFLVGAATGAHSFEQQGEEDPQALSIQEGENATMNCSYKTSINNLQWYRQNSGRGLVHLILIRSNEREKHSGRLRVTLDTSKKSSSLLITASRAADTASYFCATDGDTPLVFGKGTRLSVIANTRIQNPDPAVYQLRDSKSSDKSVCLFTDFDSQTNVSQSKDSDVYITDKCVLDMRSMDFKSNSAVAWSNKSDFACANAFNNSIIPEDTFFPSPESSCGTQSFGLLDPKLCYLLDGILFIYGVILTALFLRSKRSRLLHSDYMNMTPRRPGPTRKHYQPYAPPRDFAAYRSRVKFSRSADAPAYQQGQNQLYNELNLGRREEYDVLDKRRGRDPEMGGKPQRRKNPQEGLYNELQKDKMAEAYSEIGMKGERRRGKGHDGLYQGLSTATKDTYDALHMQALPPR

SEQ ID NO: 10770 - protein, 809 aa, synthetic construct
MALPVTALLLPLALLLHAARPDGGITQSPKYLFRKEGQNVTLSCEQNLNHDAMYWYRQDPGQGLRLIYYSWAQGDFQKGDIAEGYSVSREKKESFPLTVTSAQKNPTAFYLCASSWGAPYEQYFGPGTRLTVLEDLKNVFPPEVAVFEPSEAEISHTQKATLVCLATGFYPDHVELSWWVNGKEVHSGVSTDPQPLKEQPALNDSRYCLSSRLRVSATFWQNPRNHFRCQVQFYGLSENDEWTQDRAKPVTQIVSAEAWGRADCGSQSFGLLDPKLCYLLDGILFIYGVILTALFLRVKFSRSADAPAYQQGQNQLYNELNLGRREEYDVLDKRRGRDPEMGGKPQRRKNPQEGLYNELQKDKMAEAYSEIGMKGERRRGKGHDGLYQGLSTATKDTYDALHMQALPPRRAKRSGSGATNFSLLKQAGDVEENPGPTSMDWIWRILFLVGAATGAHSFEQQGEEDPQALSIQEGENATMNCSYKTSINNLQWYRQNSGRGLVHLILIRSNEREKHSGRLRVTLDTSKKSSSLLITASRAADTASYFCATDGDTPLVFGKGTRLSVIANTRIQNPDPAVYQLRDSKSSDKSVCLFTDFDSQTNVSQSKDSDVYITDKTVLDMRSMDFKSNSAVAWSNKSDFACANAFNNSIIPEDTFFPSPESSCGTQSFGLLDPKLCYLLDGILFIYGVILTALFLRVKFSRSADAPAYQQGQNQLYNELNLGRREEYDVLDKRRGRDPEMGGKPQRRKNPQEGLYNELQKDKMAEAYSEIGMKGERRRGKGHDGLYQGLSTATKDTYDALHMQALPPR

SEQ ID NO: 10771 - protein, 1053 aa, synthetic construct
MALPVTALLLPLALLLHAARPDGGITQSPKYLFRKEGQNVTLSCEQNLNHDAMYWYRQDPGQGLRLIYYSWAQGDFQKGDIAEGYSVSREKKESFPLTVTSAQKNPTAFYLCASSWGAPYEQYFGPGTRLTVLEDKQLDADVSPKPTIFLPSIAETKLQKAGTYLCLLEKFFPDVIKIHWQEKKSNTILGSQEGNTMKTNDTYMKFSWLTVPEKSLDKEHRCIVRHENNKNGVDQEIIFPPIKTDVITGSQSFGLLDPKLCYLLDGILFIYGVILTALFLRVKFSRSADAPAYQQGQNQLYNELNLGRREEYDVLDKRRGRDPEMGGKPQRRKNPQEGLYNELQKDKMAEAYSEIGMKGERRRGKGHDGLYQGLSTATKDTYDALHMQALPPRRAKRSGSGATNFSLLKQAGDVEENPGPTSMDWIWRILFLVGAATGAHSFEQQGEEDPQALSIQEGENATMNCSYKTSINNLQWYRQNSGRGLVHLILIRSNEREKHSGRLRVTLDTSKKSSSLLITASRAADTASYFCATDGDTPLVFGKGTRLSVIANTRSQPHTKPSVFVMKNGTNVACLVKEFYPKDIRINLVSSKKITEFDPAIVISPSGKYNAVKLGKYEDSNSVTCSVQHDNKTVHSTDFGTQSFGLLDPKLCYLLDGILFIYGVILTALFLRVKFSRSADAPAYQQGQNQLYNELNLGRREEYDVLDKRRGRDPEMGGKPQRRKNPQEGLYNELQKDKMAEAYSEIGMKGERRRGKGHDGLYQGLSTATKDTYDALHMQALPPRRAKRSGSGVKQTLNFDLLKLAGDVESNPGPSRGHMALPVTALLLPLALLLHAARPSQFRVSPLDRTWNLGETVELKCQVLLSNPTSGCSWLFQPRGAAASPTFLLYLSQNKPKAAEGLDTQRFSGKRLGDTFVLTLSDFRRENEGYYFCSALSNSIMYFSHFVPVFLPAKPTTTPAPRPPTPAPTIASQPLSLRPEACRPAAGGAVHTRGLDFACDIYIWAPLAGTCGVLLLSLVITLYCNHRNRRRVCKCPRPVVKSGDKPSLSARYV

SEQ ID NO: 10772 - protein, 921 aa, synthetic construct
MALPVTALLLPLALLLHAARPDGGITQSPKYLFRKEGQNVTLSCEQNLNHDAMYWYRQDPGQGLRLIYYSWAQGDFQKGDIAEGYSVSREKKESFPLTVTSAQKNPTAFYLCASSWGAPYEQYFGPGTRLTVLEGQPKANPTVTLFPPSSEELQANKATLVCLISDFYPGAVTVAWKADGSPVKAGVETTKPSKQSNNKYAASSYLSLTPEQWKSHRSYSCQVTHEGSTVEKTVAPTECSTTPGERSSLPAFYPGTSGSCSGCGSLSLPLLAGLVAADAVASLLIVGAVFLCARPRRSPAQEDGKVYINMPGRGRAKRSGSGATNFSLLKQAGDVEENPGPTSMDWIWRILFLVGAATGAHSFEQQGEEDPQALSIQEGENATMNCSYKTSINNLQWYRQNSGRGLVHLILIRSNEREKHSGRLRVTLDTSKKSSSLLITASRAADTASYFCATDGDTPLVFGKGTRLSVIANTRASTKGPSVFPLAPSSKSTSGGTAALGCLVKDYFPEPVTVSWNSGALTSGVHTFPAVLQSSGLYSLSSVVTVPSSSLGTQTYICNVNHKPSNTKVDKRVEPKSCTTPGERSSLPAFYPGTSGSCSGCGSLSLPLLAGLVAADAVASLLIVGAVFLCARPRRSPAQEDGKVYINMPGRGRAKRSGSGVKQTLNFDLLKLAGDVESNPGPSRGHMALPVTALLLPLALLLHAARPSQFRVSPLDRTWNLGETVELKCQVLLSNPTSGCSWLFQPRGAAASPTFLLYLSQNKPKAAEGLDTQRFSGKRLGDTFVLTLSDFRRENEGYYFCSALSNSIMYFSHFVPVFLPAKPTTTPAPRPPTPAPTIASQPLSLRPEACRPAAGGAVHTRGLDFACDIYIWAPLAGTCGVLLLSLVITLYCNHRNRRRVCKCPRPVVKSGDKPSLSARYV

SEQ ID NO: 10773 - protein, 750 aa, synthetic construct
MALPVTALLLPLALLLHAARPDGGITQSPKYLFRKEGQNVTLSCEQNLNHDAMYWYRQDPGQGLRLIYYSWAQGDFQKGDIAEGYSVSREKKESFPLTVTSAQKNPTAFYLCASSWGAPYEQYFGPGTRLTVLEGDIENTSLAPEDPTFPADTWGTYLLTTETGLQKDHALWDHTAQNLLRMGLAFLVLVALVWFLVEDWLSRKRTRERASRASTWEGRRRLNTQTLRAKRSGSGATNFSLLKQAGDVEENPGPTSMDWIWRILFLVGAATGAHSFEQQGEEDPQALSIQEGENATMNCSYKTSINNLQWYRQNSGRGLVHLILIRSNEREKHSGRLRVTLDTSKKSSSLLITASRAADTASYFCATDGDTPLVFGKGTRLSVIANTRGDIENTSLAPEDPTFPADTWGTYLLTTETGLQKDHALWDHTAQNLLRMGLAFLVLVALVWFLVEDWLSRKRTRERASRASTWEGRRRLNTQTLRAKRSGSGVKQTLNFDLLKLAGDVESNPGPSRGHMALPVTALLLPLALLLHAARPSQFRVSPLDRTWNLGETVELKCQVLLSNPTSGCSWLFQPRGAAASPTFLLYLSQNKPKAAEGLDTQRFSGKRLGDTFVLTLSDFRRENEGYYFCSALSNSIMYFSHFVPVFLPAKPTTTPAPRPPTPAPTIASQPLSLRPEACRPAAGGAVHTRGLDFACDIYIWAPLAGTCGVLLLSLVITLYCNHRNRRRVCKCPRPVVKSGDKPSLSARYV

SEQ ID NO: 10774 - protein, 694 aa, synthetic construct
MALPVTALLLPLALLLHAARPDGGITQSPKYLFRKEGQNVTLSCEQNLNHDAMYWYRQDPGQGLRLIYYSWAQGDFQKGDIAEGYSVSREKKESFPLTVTSAQKNPTAFYLCASSWGAPYEQYFGPGTRLTVLEITQGLAVSTISSFFPPGYQVSFCLVMVLLFAVDTGLYFSVKTNIRSSTRDWKDHKFKWRKDPQDKRAKRSGSGATNFSLLKQAGDVEENPGPTSMDWIWRILFLVGAATGAHSFEQQGEEDPQALSIQEGENATMNCSYKTSINNLQWYRQNSGRGLVHLILIRSNEREKHSGRLRVTLDTSKKSSSLLITASRAADTASYFCATDGDTPLVFGKGTRLSVIANTRITQGLAVSTISSFFPPGYQVSFCLVMVLLFAVDTGLYFSVKTNIRSSTRDWKDHKFKWRKDPQDKRAKRSGSGVKQTLNFDLLKLAGDVESNPGPSRGHMALPVTALLLPLALLLHAARPSQFRVSPLDRTWNLGETVELKCQVLLSNPTSGCSWLFQPRGAAASPTFLLYLSQNKPKAAEGLDTQRFSGKRLGDTFVLTLSDFRRENEGYYFCSALSNSIMYFSHFVPVFLPAKPTTTPAPRPPTPAPTIASQPLSLRPEACRPAAGGAVHTRGLDFACDIYIWAPLAGTCGVLLLSLVITLYCNHRNRRRVCKCPRPVVKSGDKPSLSARYV

SEQ ID NO: 10775 - protein, 802 aa, synthetic construct
MALPVTALLLPLALLLHAARPNAGVTQTPKFRVLKTGQSMTLLCAQDMNHEYMYWYRQDPGMGLRLIHYSGWGKDTAKGEVPDGYNVSRLKKQNFLLGLESAAPSQTSVYFCASKVGPGQHNSPLHFGNGTRLTVTGQPKANPTVTLFPPSSEELQANKATLVCLISDFYPGAVTVAWKADGSPVKAGVETTKPSKQSNNKYAASSYLSLTPEQWKSHRSYSCQVTHEGSTVEKTVAPTECSGSQSFGLLDPKLCYLLDGILFIYGVILTALFLRVKFSRSADAPAYQQGQNQLYNELNLGRREEYDVLDKRRGRDPEMGGKPQRRKNPQEGLYNELQKDKMAEAYSEIGMKGERRRGKGHDGLYQGLSTATKDTYDALHMQALPPRRAKRSGSGATNFSLLKQAGDVEENPGPTSMDWIWRILFLVGAATGAHSFEAQKVTQAQTEISVVEKEDVTLDCVYETRDTAYYLFWYKQPPSGELVFLIRQPWWGSSRGISGRYSWNFQKSTSSFNFTITASQVVDSAVYFCAMSVPDSRGHYQFTFGKGTKLSVIPASTKGPSVFPLAPSSKSTSGGTAALGCLVKDYFPEPVTVSWNSGALTSGVHTFPAVLQSSGLYSLSSVVTVPSSSLGTQTYICNVNHKPSNTKVDKRVEPKSCGTQSFGLLDPKLCYLLDGILFIYGVILTALFLRVKFSRSADAPAYQQGQNQLYNELNLGRREEYDVLDKRRGRDPEMGGKPQRRKNPQEGLYNELQKDKMAEAYSEIGMKGERRRGKGHDGLYQGLSTATKDTYDALHMQALPPR

SEQ ID NO: 10776 - protein, 568 aa, synthetic construct
MALPVTALLLPLALLLHAARPNAGVTQTPKFRVLKTGQSMTLLCAQDMNHEYMYWYRQDPGMGLRLIHYSGWGKDTAKGEVPDGYNVSRLKKQNFLLGLESAAPSQTSVYFCASKVGPGQHNSPLHFGNGTRLTVTLEQSFGLLDPKLCYLLDGILFIYGVILTALFLRVKFSRSADAPAYQQGQNQLYNELNLGRREEYDVLDKRRGRDPEMGGKPQRRKNPQEGLYNELQKDKMAEAYSEIGMKGERRRGKGHDGLYQGLSTATKDTYDALHMQALPPRRAKRSGSGATNFSLLKQAGDVEENPGPTSMDWIWRILFLVGAATGAHSFEAQKVTQAQTEISVVEKEDVTLDCVYETRDTAYYLFWYKQPPSGELVFLIRQPWWGSSRGISGRYSWNFQKSTSSFNFTITASQVVDSAVYFCAMSVPDSRGHYQFTFGKGTKLSVIPTRQSFGLLDPKLCYLLDGILFIYGVILTALFLRVKFSRSADAPAYQQGQNQLYNELNLGRREEYDVLDKRRGRDPEMGGKPQRRKNPQEGLYNELQKDKMAEAYSEIGMKGERRRGKGHD

SEQ ID NO: 10777 - protein, 952 aa, synthetic construct
MALPVTALLLPLALLLHAARPNAGVTQTPKFRVLKTGQSMTLLCAQDMNHEYMYWYRQDPGMGLRLIHYSGWGKDTAKGEVPDGYNVSRLKKQNFLLGLESAAPSQTSVYFCASKVGPGQHNSPLHFGNGTRLTVTLETTPGERSSLPAFYPGTSGSCSGCGSLSLPLLAGLVAADAVASLLIVGAVFLCARPRRSPAQEDGKVYINMPGRGSTSRVKFSRSADAPAYQQGQNQLYNELNLGRREEYDVLDKRRGRDPEMGGKPQRRKNPQEGLYNELQKDKMAEAYSEIGMKGERRRGKGHDGLYQGLSTATKDTYDALHMQALPPRRAKRSGSGATNFSLLKQAGDVEENPGPMDWIWRILFLVGAATGAHSFEAQKVTQAQTEISVVEKEDVTLDCVYETRDTAYYLFWYKQPPSGELVFLIRQPWWGSSRGISGRYSWNFQKSTSSFNFTITASQVVDSAVYFCAMSVPDSRGHYQFTFGKGTKLSVIPTRTTPGERSSLPAFYPGTSGSCSGCGSLSLPLLAGLVAADAVASLLIVGAVFLCARPRRSPAQEDGKVYINMPGRGSSRRVKFSRSADAPAYQQGQNQLYNELNLGRREEYDVLDKRRGRDPEMGGKPQRRKNPQEGLYNELQKDKMAEAYSEIGMKGERRRGKGHDGLYQGLSTATKDTYDALHMQALPPRRAKRSGSGVKQTLNFDLLKLAGDVESNPGPGHMALPVTALLLPLALLLHAARPSQFRVSPLDRTWNLGETVELKCQVLLSNPTSGCSWLFQPRGAAASPTFLLYLSQNKPKAAEGLDTQRFSGKRLGDTFVLTLSDFRRENEGYYFCSALSNSIMYFSHFVPVFLPAKPTTTPAPRPPTPAPTIASQPLSLRPEACRPAAGGAVHTRGLDFACDIYIWAPLAGTCGVLLLSLVITLYCNHRNRRRVCKCPRPVVKSGDKPSLSARYV

SEQ ID NO: 10778 - protein, 952 aa, synthetic construct; identical to SEQ ID NO: 10777

SEQ ID NO: 10779 - protein, 1118 aa, synthetic construct
MALPVTALLLPLALLLHAARPNAGVTQTPKFRVLKTGQSMTLLCAQDMNHEYMYWYRQDPGMGLRLIHYSGWGKDTAKGEVPDGYNVSRLKKQNFLLGLESAAPSQTSVYFCASKVGPGQHNSPLHFGNGTRLTVTLEGQPKANPTVTLFPPSSEELQANKATLVCLISDFYPGAVTVAWKADGSPVKAGVETTKPSKQSNNKYAASSYLSLTPEQWKSHRSYSCQVTHEGSTVEKTVAPTECSGSTTPGERSSLPAFYPGTSGSCSGCGSLSLPLLAGLVAADAVASLLIVGAVFLCARPRRSPAQEDGKVYINMPGRGSTSRVKFSRSADAPAYQQGQNQLYNELNLGRREEYDVLDKRRGRDPEMGGKPQRRKNPQEGLYNELQKDKMAEAYSEIGMKGERRRGKGHDGLYQGLSTATKDTYDALHMQALPPRRAKRSGSGATNFSLLKQAGDVEENPGPMDWIWRILFLVGAATGAHSFEAQKVTQAQTEISVVEKEDVTLDCVYETRDTAYYLFWYKQPPSGELVFLIRQPWWGSSRGISGRYSWNFQKSTSSFNFTITASQVVDSAVYFCAMSVPDSRGHYQFTFGKGTKLSVIPTRASTKGPSVFPLAPSSKSTSGGTAALGCLVKDYFPEPVTVSWNSGALTSGVHTFPAVLQSSGLYSLSSVVTVPSSSLGTQTYICNVNHKPSNTKVDKRVEPKSCGTTTPGERSSLPAFYPGTSGSCSGCGSLSLPLLAGLVAADAVASLLIVGAVFLCARPRRSPAQEDGKVYINMPGRGSSRRVKFSRSADAPAYQQGQNQLYNELNLGRREEYDVLDKRRGRDPEMGGKPQRRKNPQEGLYNELQKDKMAEAYSEIGMKGERRRGKGHDGLYQGLSTATKDTYDALHMQALPPRRAKRSGSGVKQTLNFDLLKLAGDVESNPGPGHMATYEVLCEVARKLGTDDREVVLFLLNVFIPQPTLAQLIGALRALKEEGRLTFPLLAECLFRAGRRDLLRDLLHLDPRFLERHLAGTMSYFSPYQLTVLHVDGELCARDIRSLIFLSKDTIGSRSTPQTFLHWVYCMENLDLLGPTDVDALMSMLRSLSRVDLQRQVQTLMGLHLSGPSHSQHYRHTP

SEQ ID NO: 10780 - protein, 1171 aa, synthetic construct
MALPVTALLLPLALLLHAARPNAGVTQTPKFRVLKTGQSMTLLCAQDMNHEYMYWYRQDPGMGLRLIHYSGWGKDTAKGEVPDGYNVSRLKKQNFLLGLESAAPSQTSVYFCASKVGPGQHNSPLHFGNGTRLTVTLEGQPKANPTVTLFPPSSEELQANKATLVCLISDFYPGAVTVAWKADGSPVKAGVETTKPSKQSNNKYAASSYLSLTPEQWKSHRSYSCQVTHEGSTVEKTVAPTECSGSTTPGERSSLPAFYPGTSGSCSGCGSLSLPLLAGLVAADAVASLLIVGAVFLCARPRRSPAQEDGKVYINMPGRGSTSRVKFSRSADAPAYQQGQNQLYNELNLGRREEYDVLDKRRGRDPEMGGKPQRRKNPQEGLYNELQKDKMAEAYSEIGMKGERRRGKGHDGLYQGLSTATKDTYDALHMQALPPRRAKRSGSGATNFSLLKQAGDVEENPGPMDWIWRILFLVGAATGAHSFEAQKVTQAQTEISVVEKEDVTLDCVYETRDTAYYLFWYKQPPSGELVFLIRQPWWGSSRGISGRYSWNFQKSTSSFNFTITASQVVDSAVYFCAMSVPDSRGHYQFTFGKGTKLSVIPTRASTKGPSVFPLAPSSKSTSGGTAALGCLVKDYFPEPVTVSWNSGALTSGVHTFPAVLQSSGLYSLSSVVTVPSSSLGTQTYICNVNHKPSNTKVDKRVEPKSCGTTTPGERSSLPAFYPGTSGSCSGCGSLSLPLLAGLVAADAVASLLIVGAVFLCARPRRSPAQEDGKVYINMPGRGSSRRVKFSRSADAPAYQQGQNQLYNELNLGRREEYDVLDKRRGRDPEMGGKPQRRKNPQEGLYNELQKDKMAEAYSEIGMKGERRRGKGHDGLYQGLSTATKDTYDALHMQALPPRRAKRSGSGVKQTLNFDLLKLAGDVESNPGPGHMSDSKEVPSLPFLRHLLEELDSHEDSLLLFLCHDAAPGCTTVTQALCSLSQQRKLTLAALVEMLYVLQRMDLLKSRFGLSKEGAEQLLGTSFLTRYRKLMVCVGEELDSSELRALRLFACNLNPSLSTALSESSRFVELVLALENVGLVSPSSVSVLADMLRTLRRLDLCQQLVEYEQQEQARYRYCYAASPSLPVRTLRRGHGASEHEQLCMPVQESSDSPELLRTPVQESSSDSPEQTT

SEQ ID NO: 10781 - protein, 1165 aa, synthetic construct
MALPVTALLLPLALLLHAARPNAGVTQTPKFRVLKTGQSMTLLCAQDMNHEYMYWYRQDPGMGLRLIHYSGWGKDTAKGEVPDGYNVSRLKKQNFLLGLESAAPSQTSVYFCASKVGPGQHNSPLHFGNGTRLTVTLEGQPKANPTVTLFPPSSEELQANKATLVCLISDFYPGAVTVAWKADGSPVKAGVETTKPSKQSNNKYAASSYLSLTPEQWKSHRSYSCQVTHEGSTVEKTVAPTECSGSTTPGERSSLPAFYPGTSGSCSGCGSLSLPLLAGLVAADAVASLLIVGAVFLCARPRRSPAQEDGKVYINMPGRGSTSRVKFSRSADAPAYQQGQNQLYNELNLGRREEYDVLDKRRGRDPEMGGKPQRRKNPQEGLYNELQKDKMAEAYSEIGMKGERRRGKGHDGLYQGLSTATKDTYDALHMQALPPRRAKRSGSGATNFSLLKQAGDVEENPGPMDWIWRILFLVGAATGAHSFEAQKVTQAQTEISVVEKEDVTLDCVYETRDTAYYLFWYKQPPSGELVFLIRQPWWGSSRGISGRYSWNFQKSTSSFNFTITASQVVDSAVYFCAMSVPDSRGHYQFTFGKGTKLSVIPTRASTKGPSVFPLAPSSKSTSGGTAALGCLVKDYFPEPVTVSWNSGALTSGVHTFPAVLQSSGLYSLSSVVTVPSSSLGTQTYICNVNHKPSNTKVDKRVEPKSCGTTTPGERSSLPAFYPGTSGSCSGCGSLSLPLLAGLVAADAVASLLIVGAVFLCARPRRSPAQEDGKVYINMPGRGSSRRVKFSRSADAPAYQQGQNQLYNELNLGRREEYDVLDKRRGRDPEMGGKPQRRKNPQEGLYNELQKDKMAEAYSEIGMKGERRRGKGHDGLYQGLSTATKDTYDALHMQALPPRRAKRSGSGVKQTLNFDLLKLAGDVESNPGPGHMALPVTALLLPLALLLHAARPSQFRVSPLDRTWNLGETVELKCQVLLSNPTSGCSWLFQPRGAAASPTFLLYLSQNKPKAAEGLDTQRFSGKRLGDTFVLTLSDFRRENEGYYFCSALSNSIMYFSHFVPVFLPAKPTTTPAPRPPTPAPTIASQPLSLRPEACRPAAGGAVHTRGLDFACDIYIWAPLAGTCGVLLLSLVITLYCNHRNRRRVCKCPRPVVKSGDKPSLSARYV

SEQ ID NO: 10782 - protein, 1302 aa, synthetic construct
MALPVTALLLPLALLLHAARPEVQLVESGGGLVQAGGSLRLSCAASGRTFSMGWFRQAPGKEREFVAAITYSGGSPYYADSVKGRFTISRDNAKNTVYLQMNSLKPEDTAVYYCAANPTYGSDWNAENWGQGTQVTVSSGTGGGGSGGGGSGGGGSEFNAGVTQTPKFRVLKTGQSMTLLCAQDMNHEYMYWYRQDPGMGLRLIHYSGWGKDTAKGEVPDGYNVSRLKKQNFLLGLESAAPSQTSVYFCASKVGPGQHNSPLHFGNGTRLTVTLEGQPKANPTVTLFPPSSEELQANKATLVCLISDFYPGAVTVAWKADGSPVKAGVETTKPSKQSNNKYAASSYLSLTPEQWKSHRSYSCQVTHEGSTVEKTVAPTECSGSTTPGERSSLPAFYPGTSGSCSGCGSLSLPLLAGLVAADAVASLLIVGAVFLCARPRRSPAQEDGKVYINMPGRGSTSRVKFSRSADAPAYQQGQNQLYNELNLGRREEYDVLDKRRGRDPEMGGKPQRRKNPQEGLYNELQKDKMAEAYSEIGMKGERRRGKGHDGLYQGLSTATKDTYDALHMQALPPRRAKRSGSGATNFSLLKQAGDVEENPGPMDWIWRILFLVGAATGAHSFEAQKVTQAQTEISVVEKEDVTLDCVYETRDTAYYLFWYKQPPSGELVFLIRQPWWGSSRGISGRYSWNFQKSTSSFNFTITASQVVDSAVYFCAMSVPDSRGHYQFTFGKGTKLSVIPTRASTKGPSVFPLAPSSKSTSGGTAALGCLVKDYFPEPVTVSWNSGALTSGVHTFPAVLQSSGLYSLSSVVTVPSSSLGTQTYICNVNHKPSNTKVDKRVEPKSCGTTTPGERSSLPAFYPGTSGSCSGCGSLSLPLLAGLVAADAVASLLIVGAVFLCARPRRSPAQEDGKVYINMPGRGSSRRVKFSRSADAPAYQQGQNQLYNELNLGRREEYDVLDKRRGRDPEMGGKPQRRKNPQEGLYNELQKDKMAEAYSEIGMKGERRRGKGHDGLYQGLSTATKDTYDALHMQALPPRRAKRSGSGVKQTLNFDLLKLAGDVESNPGPGHMALPVTALLLPLALLLHAARPSQFRVSPLDRTWNLGETVELKCQVLLSNPTSGCSWLFQPRGAAASPTFLLYLSQNKPKAAEGLDTQRFSGKRLGDTFVLTLSDFRRENEGYYFCSALSNSIMYFSHFVPVFLPAKPTTTPAPRPPTPAPTIASQPLSLRPEACRPAAGGAVHTRGLDFACDIYIWAPLAGTCGVLLLSLVITLYCNHRNRRRVCKCPRPVVKSGDKPSLSARYV

SEQ ID NO: 10783 - protein, 1439 aa, synthetic construct
MALPVTALLLPLALLLHAARPEVQLVESGGGLVQAGGSLRLSCAASGRTFSMGWFRQAPGKEREFVAAITYSGGSPYYADSVKGRFTISRDNAKNTVYLQMNSLKPEDTAVYYCAANPTYGSDWNAENWGQGTQVTVSSGTGGGGSGGGGSGGGGSEFNAGVTQTPKFRVLKTGQSMTLLCAQDMNHEYMYWYRQDPGMGLRLIHYSGWGKDTAKGEVPDGYNVSRLKKQNFLLGLESAAPSQTSVYFCASKVGPGQHNSPLHFGNGTRLTVTLEGQPKANPTVTLFPPSSEELQANKATLVCLISDFYPGAVTVAWKADGSPVKAGVETTKPSKQSNNKYAASSYLSLTPEQWKSHRSYSCQVTHEGSTVEKTVAPTECSGSTTPGERSSLPAFYPGTSGSCSGCGSLSLPLLAGLVAADAVASLLIVGAVFLCARPRRSPAQEDGKVYINMPGRGSTSRVKFSRSADAPAYQQGQNQLYNELNLGRREEYDVLDKRRGRDPEMGGKPQRRKNPQEGLYNELQKDKMAEAYSEIGMKGERRRGKGHDGLYQGLSTATKDTYDALHMQALPPRRAKRSGSGATNFSLLKQAGDVEENPGPMDWIWRILFLVGAATGAHSGPEVQLVESGGGLVQAGGSLRLSCAASGRTFTMGWFRQAPGKEREFVAAISLSPTLAYYADSVKGRFTISRDNAKNTVVLQMNSLKPEDTALYYCAADRKSVMSIRPDYWGQGTQVTVSSGSGGGGSGGGGSGGGGSFEAQKVTQAQTEISVVEKEDVTLDCVYETRDTAYYLFWYKQPPSGELVFLIRQPWWGSSRGISGRYSWNFQKSTSSFNFTITASQVVDSAVYFCAMSVPDSRGHYQFTFGKGTKLSVIPTRASTKGPSVFPLAPSSKSTSGGTAALGCLVKDYFPEPVTVSWNSGALTSGVHTFPAVLQSSGLYSLSSVVTVPSSSLGTQTYICNVNHKPSNTKVDKRVEPKSCGTTTPGERSSLPAFYPGTSGSCSGCGSLSLPLLAGLVAADAVASLLIVGAVFLCARPRRSPAQEDGKVYINMPGRGSSRRVKFSRSADAPAYQQGQNQLYNELNLGRREEYDVLDKRRGRDPEMGGKPQRRKNPQEGLYNELQKDKMAEAYSEIGMKGERRRGKGHDGLYQGLSTATKDTYDALHMQALPPRRAKRSGSGVKQTLNFDLLKLAGDVESNPGPGHMALPVTALLLPLALLLHAARPSQFRVSPLDRTWNLGETVELKCQVLLSNPTSGCSWLFQPRGAAASPTFLLYLSQNKPKAAEGLDTQRFSGKRLGDTFVLTLSDFRRENEGYYFCSALSNSIMYFSHFVPVFLPAKPTTTPAPRPPTPAPTIASQPLSLRPEACRPAAGGAVHTRGLDFACDIYIWAPLAGTCGVLLLSLVITLYCNHRNRRRVCKCPRPVVKSGDKPSLSARYV

SEQ ID NO: 10784 - protein, 823 aa, synthetic construct
MALPVTALLLPLALLLHAARPEFNAGVTQTPKFRVLKTGQSMTLLCAQDMNHEYMYWYRQDPGMGLRLIHYSGWGKDTAKGEVPDGYNVSRLKKQNFLLGLESAAPSQTSVYFCASKVGPGQHNSPLHFGNGTRLTVTLEDLKNVFPPEVAVFEPSEAEISHTQKATLVCLATGFYPDHVELSWWVNGKEVHSGVSTDPQPLKEQPALNDSRYCLSSRLRVSATFWQNPRNHFRCQVQFYGLSENDEWTQDRAKPVTQIVSAEAWGRADCGSQSFGLLDPKLCYLLDGILFIYGVILTALFLRVKFSRSADAPAYQQGQNQLYNELNLGRREEYDVLDKRRGRDPEMGGKPQRRKNPQEGLYNELQKDKMAEAYSEIGMKGERRRGKGHDGLYQGLSTATKDTYDALHMQALPPRRAKRSGSGATNFSLLKQAGDVEENPGPTSMDWIWRILFLVGAATGAHSFEAQKVTQAQTEISVVEKEDVTLDCVYETRDTAYYLFWYKQPPSGELVFLIRQPWWGSSRGISGRYSWNFQKSTSSFNFTITASQVVDSAVYFCAMSVPDSRGHYQFTFGKGTKLSVIPTRIQNPDPAVYQLRDSKSSDKSVCLFTDFDSQTNVSQSKDSDVYITDKTVLDMRSMDFKSNSAVAWSNKSDFACANAFNNSIIPEDTFFPSPESSCGTQSFGLLDPKLCYLLDGILFIYGVILTALFLRVKFSRSADAPAYQQGQNQLYNELNLGRREEYDVLDKRRGRDPEMGGKPQRRKNPQEGLYNELQKDKMAEAYSEIGMKGERRRGKGHDGLYQGLSTATKDTYDALHMQALPPR

SEQ ID NO: 10785 - protein, 865 aa, synthetic construct
MALPVTALLLPLALLLHAARPEFNAGVTQTPKFRVLKTGQSMTLLCAQDMNHEYMYWYRQDPGMGLRLIHYSGWGKDTAKGEVPDGYNVSRLKKQNFLLGLESAAPSQTSVYFCASKVGPGQHNSPLHFGNGTRLTVTLEDLKNVFPPEVAVFEPSEAEISHTQKATLVCLATGFYPDHVELSWWVNGKEVHSGVSTDPQPLKEQPALNDSRYCLSSRLRVSATFWQNPRNHFRCQVQFYGLSENDEWTQDRAKPVTQIVSAEAWGRADCGSQSFGLLDPKLCYLLDGILFIYGVILTALFLRVKFSRSADAPAYQQGQNQLYNELNLGRREEYDVLDKRRGRDPEMGGKPQRRKNPQEGLYNELQKDKMAEAYSEIGMKGERRRGKGHDGLYQGLSTATKDTYDALHMQALPPRRAKRSGSGATNFSLLKQAGDVEENPGPTSMDWIWRILFLVGAATGAHSFEAQKVTQAQTEISVVEKEDVTLDCVYETRDTAYYLFWYKQPPSGELVFLIRQPWWGSSRGISGRYSWNFQKSTSSFNFTITASQVVDSAVYFCAMSVPDSRGHYQFTFGKGTKLSVIPTRIQNPDPAVYQLRDSKSSDKSVCLFTDFDSQTNVSQSKDSDVYITDKTVLDMRSMDFKSNSAVAWSNKSDFACANAFNNSIIPEDTFFPSPESSCGTQSFGLLDPKLCYLLDGILFIYGVILTALFLKRGRKKLLYIFKQPFMRPVQTTQEEDGCSCRFPEEEEGGCELRVKFSRSADAPAYQQGQNQLYNELNLGRREEYDVLDKRRGRDPEMGGKPQRRKNPQEGLYNELQKDKMAEAYSEIGMKGERRRGKGHDGLYQGLSTATKDTYDALHMQALPPR

SEQ ID NO: 10786 - protein, 864 aa, synthetic construct
MALPVTALLLPLALLLHAARPEFNAGVTQTPKFRVLKTGQSMTLLCAQDMNHEYMYWYRQDPGMGLRLIHYSGWGKDTAKGEVPDGYNVSRLKKQNFLLGLESAAPSQTSVYFCASKVGPGQHNSPLHFGNGTRLTVTLEDLKNVFPPEVAVFEPSEAEISHTQKATLVCLATGFYPDHVELSWWVNGKEVHSGVSTDPQPLKEQPALNDSRYCLSSRLRVSATFWQNPRNHFRCQVQFYGLSENDEWTQDRAKPVTQIVSAEAWGRADCGSQSFGLLDPKLCYLLDGILFIYGVILTALFLRVKFSRSADAPAYQQGQNQLYNELNLGRREEYDVLDKRRGRDPEMGGKPQRRKNPQEGLYNELQKDKMAEAYSEIGMKGERRRGKGHDGLYQGLSTATKDTYDALHMQALPPRRAKRSGSGATNFSLLKQAGDVEENPGPTSMDWIWRILFLVGAATGAHSFEAQKVTQAQTEISVVEKEDVTLDCVYETRDTAYYLFWYKQPPSGELVFLIRQPWWGSSRGISGRYSWNFQKSTSSFNFTITASQVVDSAVYFCAMSVPDSRGHYQFTFGKGTKLSVIPTRIQNPDPAVYQLRDSKSSDKSVCLFTDFDSQTNVSQSKDSDVYITDKTVLDMRSMDFKSNSAVAWSNKSDFACANAFNNSIIPEDTFFPSPESSCGTQSFGLLDPKLCYLLDGILFIYGVILTALFLRSKRSRLLHSDYMNMTPRRPGPTRKHYQPYAPPRDFAAYRSRVKFSRSADAPAYQQGQNQLYNELNLGRREEYDVLDKRRGRDPEMGGKPQRRKNPQEGLYNELQKDKMAEAYSEIGMKGERRRGKGHDGLYQGLSTATKDTYDALHMQALPPR

SEQ ID NO: 10787 - protein, 859 aa, synthetic construct
MALPVTALLLPLALLLHAARPEFNAGVTQTPKFRVLKTGQSMTLLCAQDMNHEYMYWYRQDPGMGLRLIHYSGWGKDTAKGEVPDGYNVSRLKKQNFLLGLESAAPSQTSVYFCASKVGPGQHNSPLHFGNGTRLTVTLEDLKNVFPPEVAVFEPSEAEISHTQKATLVCLATGFYPDHVELSWWVNGKEVHSGVSTDPQPLKEQPALNDSRYCLSSRLRVSATFWQNPRNHFRCQVQFYGLSENDEWTQDRAKPVTQIVSAEAWGRADCGSQSFGLLDPKLCYLLDGILFIYGVILTALFLRVKFSRSADAPAYQQGQNQLYNELNLGRREEYDVLDKRRGRDPEMGGKPQRRKNPQEGLYNELQKDKMAEAYSEIGMKGERRRGKGHDGLYQGLSTATKDTYDALHMQALPPRRAKRSGSGATNFSLLKQAGDVEENPGPTSMDWIWRILFLVGAATGAHSFEAQKVTQAQTEISVVEKEDVTLDCVYETRDTAYYLFWYKQPPSGELVFLIRQPWWGSSRGISGRYSWNFQKSTSSFNFTITASQVVDSAVYFCAMSVPDSRGHYQFTFGKGTKLSVIPTRIQNPDPAVYQLRDSKSSDKSVCLFTDFDSQTNVSQSKDSDVYITDKTVLDMRSMDFKSNSAVAWSNKSDFACANAFNNSIIPEDTFFPSPESSCGTQSFGLLDPKLCYLLDGILFIYGVILTALFLRDQRLPPDAHKPPGGGSFRTPIQEEQADAHSTLAKIRVKFSRSADAPAYQQGQNQLYNELNLGRREEYDVLDKRRGRDPEMGGKPQRRKNPQEGLYNELQKDKMAEAYSEIGMKGERRRGKGHDGLYQGLSTATKDTYDALHMQALPPR

SEQ ID NO: 10788 - protein, 943 aa, synthetic construct
MALPVTALLLPLALLLHAARPEFNAGVTQTPKFRVLKTGQSMTLLCAQDMNHEYMYWYRQDPGMGLRLIHYSGWGKDTAKGEVPDGYNVSRLKKQNFLLGLESAAPSQTSVYFCASKVGPGQHNSPLHFGNGTRLTVTLEDLKNVFPPEVAVFEPSEAEISHTQKATLVCLATGFYPDHVELSWWVNGKEVHSGVSTDPQPLKEQPALNDSRYCLSSRLRVSATFWQNPRNHFRCQVQFYGLSENDEWTQDRAKPVTQIVSAEAWGRADCGSQSFGLLDPKLCYLLDGILFIYGVILTALFLRVKFSRSADAPAYQQGQNQLYNELNLGRREEYDVLDKRRGRDPEMGGKPQRRKNPQEGLYNELQKDKMAEAYSEIGMKGERRRGKGHDGLYQGLSTATKDTYDALHMQALPPRRAKRSGSGATNFSLLKQAGDVEENPGPTSMDWIWRILFLVGAATGAHSFEAQKVTQAQTEISVVEKEDVTLDCVYETRDTAYYLFWYKQPPSGELVFLIRQPWWGSSRGISGRYSWNFQKSTSSFNFTITASQVVDSAVYFCAMSVPDSRGHYQFTFGKGTKLSVIPTRIQNPDPAVYQLRDSKSSDKSVCLFTDFDSQTNVSQSKDSDVYITDKTVLDMRSMDFKSNSAVAWSNKSDFACANAFNNSIIPEDTFFPSPESSCGTQSFGLLDPKLCYLLDGILFIYGVILTALFLWRRKRKEKQSETSPKEFLTIYEDVKDLKTRRNHEQEQTFPGGGSTIYSMIQSQSSAPTSQEPAYTLYSLIQPSRKSGSRKRNHSPSFNSTIYEVIGKSQPKAQNPARLSRKELENFDVYSRVKFSRSADAPAYQQGQNQLYNELNLGRREEYDVLDKRRGRDPEMGGKPQRRKNPQEGLYNELQKDKMAEAYSEIGMKGERRRGKGHDGLYQGLSTATKDTYDALHMQALPPR

SEQ ID NO: 10789 - protein, 906 aa, synthetic construct
MALPVTALLLPLALLLHAARPEFNAGVTQTPKFRVLKTGQSMTLLCAQDMNHEYMYWYRQDPGMGLRLIHYSGWGKDTAKGEVPDGYNVSRLKKQNFLLGLESAAPSQTSVYFCASKVGPGQHNSPLHFGNGTRLTVTLEDLKNVFPPEVAVFEPSEAEISHTQKATLVCLATGFYPDHVELSWWVNGKEVHSGVSTDPQPLKEQPALNDSRYCLSSRLRVSATFWQNPRNHFRCQVQFYGLSENDEWTQDRAKPVTQIVSAEAWGRADCGSQSFGLLDPKLCYLLDGILFIYGVILTALFLRSKRSRLLHSDYMNMTPRRPGPTRKHYQPYAPPRDFAAYRSRVKFSRSADAPAYQQGQNQLYNELNLGRREEYDVLDKRRGRDPEMGGKPQRRKNPQEGLYNELQKDKMAEAYSEIGMKGERRRGKGHDGLYQGLSTATKDTYDALHMQALPPRRAKRSGSGATNFSLLKQAGDVEENPGPTSMDWIWRILFLVGAATGAHSFEAQKVTQAQTEISVVEKEDVTLDCVYETRDTAYYLFWYKQPPSGELVFLIRQPWWGSSRGISGRYSWNFQKSTSSFNFTITASQVVDSAVYFCAMSVPDSRGHYQFTFGKGTKLSVIPTRIQNPDPAVYQLRDSKSSDKSVCLFTDFDSQTNVSQSKDSDVYITDKTVLDMRSMDFKSNSAVAWSNKSDFACANAFNNSIIPEDTFFPSPESSCGTQSFGLLDPKLCYLLDGILFIYGVILTALFLKRGRKKLLYIFKQPFMRPVQTTQEEDGCSCRFPEEEEGGCELRVKFSRSADAPAYQQGQNQLYNELNLGRREEYDVLDKRRGRDPEMGGKPQRRKNPQEGLYNELQKDKMAEAYSEIGMKGERRRGKGHDGLYQGLSTATKDTYDALHMQALPPR

SEQ ID NO: 10790 - protein, 905 aa, synthetic construct
MALPVTALLLPLALLLHAARPEFNAGVTQTPKFRVLKTGQSMTLLCAQDMNHEYMYWYRQDPGMGLRLIHYSGWGKDTAKGEVPDGYNVSRLKKQNFLLGLESAAPSQTSVYFCASKVGPGQHNSPLHFGNGTRLTVTLEDLKNVFPPEVAVFEPSEAEISHTQKATLVCLATGFYPDHVELSWWVNGKEVHSGVSTDPQPLKEQPALNDSRYCLSSRLRVSATFWQNPRNHFRCQVQFYGLSENDEWTQDRAKPVTQIVSAEAWGRADCGSQSFGLLDPKLCYLLDGILFIYGVILTALFLRSKRSRLLHSDYMNMTPRRPGPTRKHYQPYAPPRDFAAYRSRVKFSRSADAPAYQQGQNQLYNELNLGRREEYDVLDKRRGRDPEMGGKPQRRKNPQEGLYNELQKDKMAEAYSEIGMKGERRRGKGHDGLYQGLSTATKDTYDALHMQALPPRRAKRSGSGATNFSLLKQAGDVEENPGPTSMDWIWRILFLVGAATGAHSFEAQKVTQAQTEISVVEKEDVTLDCVYETRDTAYYLFWYKQPPSGELVFLIRQPWWGSSRGISGRYSWNFQKSTSSFNFTITASQVVDSAVYFCAMSVPDSRGHYQFTFGKGTKLSVIPTRIQNPDPAVYQLRDSKSSDKSVCLFTDFDSQTNVSQSKDSDVYITDKTVLDMRSMDFKSNSAVAWSNKSDFACANAFNNSIIPEDTFFPSPESSCGTQSFGLLDPKLCYLLDGILFIYGVILTALFLRSKRSRLLHSDYMNMTPRRPGPTRKHYQPYAPPRDFAAYRSRVKFSRSADAPAYQQGQNQLYNELNLGRREEYDVLDKRRGRDPEMGGKPQRRKNPQEGLYNELQKDKMAEAYSEIGMKGERRRGKGHDGLYQGLSTATKDTYDALHMQALPPR

SEQ ID NO: 10791 - protein, 906 aa, synthetic construct; identical to SEQ ID NO: 10789

SEQ ID NO: 10792 - protein, 823 aa, synthetic construct
MALPVTALLLPLALLLHAARPEFNAGVTQTPKFRVLKTGQSMTLLCAQDMNHEYMYWYRQDPGMGLRLIHYSGWGKDTAKGEVPDGYNVSRLKKQNFLLGLESAAPSQTSVYFCASKVGPGQHNSPLHFGNGTRLTVTLEDLKNVFPPEVAVFEPSEAEISHTQKATLVCLATGFYPDHVELSWWVNGKEVHSGVSTDPQPLKEQPALNDSRYCLSSRLRVSATFWQNPRNHFRCQVQFYGLSENDEWTQDRAKPVTQIVSAEAWGRADCGSQSFGLLDPKLCYLLDGILFIYGVILTALFLRVKFSRSADAPAYQQGQNQLYNELNLGRREEYDVLDKRRGRDPEMGGKPQRRKNPQEGLFNELQKDKMAEAFSEIGMKGERRRGKGHDGLFQGLSTATKDTFDALHMQALPPRRAKRSGSGATNFSLLKQAGDVEENPGPTSMDWIWRILFLVGAATGAHSFEAQKVTQAQTEISVVEKEDVTLDCVYETRDTAYYLFWYKQPPSGELVFLIRQPWWGSSRGISGRYSWNFQKSTSSFNFTITASQVVDSAVYFCAMSVPDSRGHYQFTFGKGTKLSVIPTRIQNPDPAVYQLRDSKSSDKSVCLFTDFDSQTNVSQSKDSDVYITDKTVLDMRSMDFKSNSAVAWSNKSDFACANAFNNSIIPEDTFFPSPESSCGTQSFGLLDPKLCYLLDGILFIYGVILTALFLRVKFSRSADAPAYQQGQNQLYNELNLGRREEYDVLDKRRGRDPEMGGKPQRRKNPQEGLYNELQKDKMAEAYSEIGMKGERRRGKGHDGLYQGLSTATKDTYDALHMQALPPR

SEQ ID NO: 10793 - protein, 823 aa, synthetic construct; identical to SEQ ID NO: 10792

SEQ ID NO: 10794 - protein, 865 aa, synthetic construct
MALPVTALLLPLALLLHAARPEFNAGVTQTPKFRVLKTGQSMTLLCAQDMNHEYMYWYRQDPGMGLRLIHYSGWGKDTAKGEVPDGYNVSRLKKQNFLLGLESAAPSQTSVYFCASKVGPGQHNSPLHFGNGTRLTVTLEDLKNVFPPEVAVFEPSEAEISHTQKATLVCLATGFYPDHVELSWWVNGKEVHSGVSTDPQPLKEQPALNDSRYCLSSRLRVSATFWQNPRNHFRCQVQFYGLSENDEWTQDRAKPVTQIVSAEAWGRADCGSQSFGLLDPKLCYLLDGILFIYGVILTALFLRVKFSRSADAPAYQQGQNQLYNELNLGRREEYDVLDKRRGRDPEMGGKPQRRKNPQEGLFNELQKDKMAEAFSEIGMKGERRRGKGHDGLFQGLSTATKDTFDALHMQALPPRRAKRSGSGATNFSLLKQAGDVEENPGPTSMDWIWRILFLVGAATGAHSFEAQKVTQAQTEISVVEKEDVTLDCVYETRDTAYYLFWYKQPPSGELVFLIRQPWWGSSRGISGRYSWNFQKSTSSFNFTITASQVVDSAVYFCAMSVPDSRGHYQFTFGKGTKLSVIPTRIQNPDPAVYQLRDSKSSDKSVCLFTDFDSQTNVSQSKDSDVYITDKTVLDMRSMDFKSNSAVAWSNKSDFACANAFNNSIIPEDTFFPSPESSCGTQSFGLLDPKLCYLLDGILFIYGVILTALFLKRGRKKLLYIFKQPFMRPVQTTQEEDGCSCRFPEEEEGGCELRVKFSRSADAPAYQQGQNQLYNELNLGRREEYDVLDKRRGRDPEMGGKPQRRKNPQEGLYNELQKDKMAEAYSEIGMKGERRRGKGHDGLYQGLSTATKDTYDALHMQALPPR

SEQ ID NO: 10795 - protein, 864 aa, synthetic construct
MALPVTALLLPLALLLHAARPEFNAGVTQTPKFRVLKTGQSMTLLCAQDMNHEYMYWYRQDPGMGLRLIHYSGWGKDTAKGEVPDGYNVSRLKKQNFLLGLESAAPSQTSVYFCASKVGPGQHNSPLHFGNGTRLTVTLEDLKNVFPPEVAVFEPSEAEISHTQKATLVCLATGFYPDHVELSWWVNGKEVHSGVSTDPQPLKEQPALNDSRYCLSSRLRVSATFWQNPRNHFRCQVQFYGLSENDEWTQDRAKPVTQIVSAEAWGRADCGSQSFGLLDPKLCYLLDGILFIYGVILTALFLRVKFSRSADAPAYQQGQNQLYNELNLGRREEYDVLDKRRGRDPEMGGKPQRRKNPQEGLFNELQKDKMAEAFSEIGMKGERRRGKGHDGLFQGLSTATKDTFDALHMQALPPRRAKRSGSGATNFSLLKQAGDVEENPGPTSMDWIWRILFLVGAATGAHSFEAQKVTQAQTEISVVEKEDVTLDCVYETRDTAYYLFWYKQPPSGELVFLIRQPWWGSSRGISGRYSWNFQKSTSSFNFTITASQVVDSAVYFCAMSVPDSRGHYQFTFGKGTKLSVIPTRIQNPDPAVYQLRDSKSSDKSVCLFTDFDSQTNVSQSKDSDVYITDKTVLDMRSMDFKSNSAVAWSNKSDFACANAFNNSIIPEDTFFPSPESSCGTQSFGLLDPKLCYLLDGILFIYGVILTALFLRSKRSRLLHSDYMNMTPRRPGPTRKHYQPYAPPRDFAAYRSRVKFSRSADAPAYQQGQNQLYNELNLGRREEYDVLDKRRGRDPEMGGKPQRRKNPQEGLYNELQKDKMAEAYSEIGMKGERRRGKGHDGLYQGLSTATKDTYDALHMQALPPR

SEQ ID NO: 10796 - protein, 859 aa, synthetic construct
MALPVTALLLPLALLLHAARPEFNAGVTQTPKFRVLKTGQSMTLLCAQDMNHEYMYWYRQDPGMGLRLIHYSGWGKDTAKGEVPDGYNVSRLKKQNFLLGLESAAPSQTSVYFCASKVGPGQHNSPLHFGNGTRLTVTLEDLKNVFPPEVAVFEPSEAEISHTQKATLVCLATGFYPDHVELSWWVNGKEVHSGVSTDPQPLKEQPALNDSRYCLSSRLRVSATFWQNPRNHFRCQVQFYGLSENDEWTQDRAKPVTQIVSAEAWGRADCGSQSFGLLDPKLCYLLDGILFIYGVILTALFLRVKFSRSADAPAYQQGQNQLYNELNLGRREEYDVLDKRRGRDPEMGGKPQRRKNPQEGLFNELQKDKMAEAFSEIGMKGERRRGKGHDGLFQGLSTATKDTFDALHMQALPPRRAKRSGSGATNFSLLKQAGDVEENPGPTSMDWIWRILFLVGAATGAHSFEAQKVTQAQTEISVVEKEDVTLDCVYETRDTAYYLFWYKQPPSGELVFLIRQPWWGSSRGISGRYSWNFQKSTSSFNFTITASQVVDSAVYFCAMSVPDSRGHYQFTFGKGTKLSVIPTRIQNPDPAVYQLRDSKSSDKSVCLFTDFDSQTNVSQSKDSDVYITDKTVLDMRSMDFKSNSAVAWSNKSDFACANAFNNSIIPEDTFFPSPESSCGTQSFGLLDPKLCYLLDGILFIYGVILTALFLRDQRLPPDAHKPPGGGSFRTPIQEEQADAHSTLAKIRVKFSRSADAPAYQQGQNQLYNELNLGRREEYDVLDKRRGRDPEMGGKPQRRKNPQEGLYNELQKDKMAEAYSEIGMKGERRRGKGHDGLYQGLSTATKDTYDALHMQALPPR

SEQ ID NO: 10797 - protein, 943 aa, synthetic construct
MALPVTALLLPLALLLHAARPEFNAGVTQTPKFRVLKTGQSMTLLCAQDMNHEYMYWYRQDPGMGLRLIHYSGWGKDTAKGEVPDGYNVSRLKKQNFLLGLESAAPSQTSVYFCASKVGPGQHNSPLHFGNGTRLTVTLEDLKNVFPPEVAVFEPSEAEISHTQKATLVCLATGFYPDHVELSWWVNGKEVHSGVSTDPQPLKEQPALNDSRYCLSSRLRVSATFWQNPRNHFRCQVQFYGLSENDEWTQDRAKPVTQIVSAEAWGRADCGSQSFGLLDPKLCYLLDGILFIYGVILTALFLRVKFSRSADAPAYQQGQNQLYNELNLGRREEYDVLDKRRGRDPEMGGKPQRRKNPQEGLFNELQKDKMAEAFSEIGMKGERRRGKGHDGLFQGLSTATKDTFDALHMQALPPRRAKRSGSGATNFSLLKQAGDVEENPGPTSMDWIWRILFLVGAATGAHSFEAQKVTQAQTEISVVEKEDVTLDCVYETRDTAYYLFWYKQPPSGELVFLIRQPWWGSSRGISGRYSWNFQKSTSSFNFTITASQVVDSAVYFCAMSVPDSRGHYQFTFGKGTKLSVIPTRIQNPDPAVYQLRDSKSSDKSVCLFTDFDSQTNVSQSKDSDVYITDKTVLDMRSMDFKSNSAVAWSNKSDFACANAFNNSIIPEDTFFPSPESSCGTQSFGLLDPKLCYLLDGILFIYGVILTALFLWRRKRKEKQSETSPKEFLTIYEDVKDLKTRRNHEQEQTFPGGGSTIYSMIQSQSSAPTSQEPAYTLYSLIQPSRKSGSRKRNHSPSFNSTIYEVIGKSQPKAQNPARLSRKELENFDVYSRVKFSRSADAPAYQQGQNQLYNELNLGRREEYDVLDKRRGRDPEMGGKPQRRKNPQEGLYNELQKDKMAEAYSEIGMKGERRRGKGHDGLYQGLSTATKDTYDALHMQALPPR

SEQ ID NO: 10798 - protein, 864 aa, synthetic construct; identical to SEQ ID NO: 10795

SEQ ID NO: 10799 - protein, 865 aa, synthetic construct; identical to SEQ ID NO: 10794

SEQ ID NO: 10800 - protein, 823 aa, synthetic construct
MALPVTALLLPLALLLHAARPEFNAGVTQTPKFRVLKTGQSMTLLCAQDMNHEYMYWYRQDPGMGLRLIHYSGWGKDTAKGEVPDGYNVSRLKKQNFLLGLESAAPSQTSVYFCASKVGPGQHNSPLHFGNGTRLTVTLEDLKNVFPPEVAVFEPSEAEISHTQKATLVCLATGFYPDHVELSWWVNGKEVHSGVSTDPQPLKEQPALNDSRYCLSSRLRVSATFWQNPRNHFRCQVQFYGLSENDEWTQDRAKPVTQIVSAEAWGRADCGSQSFGLLDPKLCYLLDGILFIYGVILTALFLRVKFSRSADAPAYQQGQNQLYNELNLGRREEYDVLDKRRGRDPEMGGKPQRRKNPQEGLFNELQKDKMAEAFSEIGMKGERRRGKGHDGLFQGLSTATKDTFDALHMQALPPRRAKRSGSGATNFSLLKQAGDVEENPGPTSMDWIWRILFLVGAATGAHSFEAQKVTQAQTEISVVEKEDVTLDCVYETRDTAYYLFWYKQPPSGELVFLIRQPWWGSSRGISGRYSWNFQKSTSSFNFTITASQVVDSAVYFCAMSVPDSRGHYQFTFGKGTKLSVIPTRIQNPDPAVYQLRDSKSSDKSVCLFTDFDSQTNVSQSKDSDVYITDKTVLDMRSMDFKSNSAVAWSNKSDFACANAFNNSIIPEDTFFPSPESSCGTQSFGLLDPKLSYLLDGILFIYGVILTALFLRVKFSRSADAPAYQQGQNQLYNELNLGRREEYDVLDKRRGRDPEMGGKPQRRKNPQEGLYNELQKDKMAEAYSEIGMKGERRRGKGHDGLYQGLSTATKDTYDALHMQALPPR

SEQ ID NO: 10801 - protein, 823 aa, synthetic construct; identical to SEQ ID NO: 10800

SEQ ID NO: 10802 - protein, 823 aa, synthetic construct
MALPVTALLLPLALLLHAARPEFNAGVTQTPKFRVLKTGQSMTLLCAQDMNHEYMYWYRQDPGMGLRLIHYSGWGKDTAKGEVPDGYNVSRLKKQNFLLGLESAAPSQTSVYFCASKVGPGQHNSPLHFGNGTRLTVTLEDLKNVFPPEVAVFEPSEAEISHTQKATLVCLATGFYPDHVELSWWVNGKEVHSGVSTDPQPLKEQPALNDSRYCLSSRLRVSATFWQNPRNHFRCQVQFYGLSENDEWTQDRAKPVTQIVSAEAWGRADCGSQSFGLLDPKLSYLLDGILFIYGVILTALFLRVKFSRSADAPAYQQGQNQLYNELNLGRREEYDVLDKRRGRDPEMGGKPQRRKNPQEGLYNELQKDKMAEAYSEIGMKGERRRGKGHDGLYQGLSTATKDTYDALHMQALPPRRAKRSGSGATNFSLLKQAGDVEENPGPTSMDWIWRILFLVGAATGAHSFEAQKVTQAQTEISVVEKEDVTLDCVYETRDTAYYLFWYKQPPSGELVFLIRQPWWGSSRGISGRYSWNFQKSTSSFNFTITASQVVDSAVYFCAMSVPDSRGHYQFTFGKGTKLSVIPTRIQNPDPAVYQLRDSKSSDKSVCLFTDFDSQTNVSQSKDSDVYITDKTVLDMRSMDFKSNSAVAWSNKSDFACANAFNNSIIPEDTFFPSPESSCGTQSFGLLDPKLSYLLDGILFIYGVILTALFLRVKFSRSADAPAYQQGQNQLYNELNLGRREEYDVLDKRRGRDPEMGGKPQRRKNPQEGLYNELQKDKMAEAYSEIGMKGERRRGKGHDGLYQGLSTATKDTYDALHMQALPPR

SEQ ID NO: 10803 - protein, 727 aa, synthetic construct
MALPVTALLLPLALLLHAARPEFNAGVTQTPKFRVLKTGQSMTLLCAQDMNHEYMYWYRQDPGMGLRLIHYSGWGKDTAKGEVPDGYNVSRLKKQNFLLGLESAAPSQTSVYFCASKVGPGQHNSPLHFGNGTRLTVTLEDLKNVFPPEVAVFEPSEAEISHTQKATLVCLATGFYPDHVELSWWVNGKEVHSGVSTDPQPLKEQPALNDSRYCLSSRLRVSATFWQNPRNHFRCQVQFYGLSENDEWTQDRAKPVTQIVSAEAWGRADCGSTTPGERSSLPAFYPGTSGSCSGCGSLSLPLLAGLVAADAVASLLIVGAVFLCARPRRSPAQEDGKVYINMPGRGRAKRSGSGATNFSLLKQAGDVEENPGPTSMDWIWRILFLVGAATGAHSFEAQKVTQAQTEISVVEKEDVTLDCVYETRDTAYYLFWYKQPPSGELVFLIRQPWWGSSRGISGRYSWNFQKSTSSFNFTITASQVVDSAVYFCAMSVPDSRGHYQFTFGKGTKLSVIPTRIQNPDPAVYQLRDSKSSDKSVCLFTDFDSQTNVSQSKDSDVYITDKTVLDMRSMDFKSNSAVAWSNKSDFACANAFNNSIIPEDTFFPSPESSCGTTTPGERSSLPAFYPGTSGSCSGCGSLSLPLLAGLVAADAVASLLIVGAVFKRGRKKLLYIFKQPFMRPVQTTQEEDGCSCRFPEEEEGGCELLCARPRRSPAQEDGKVYINMPGRG

SEQ ID NO: 10804 - protein, 726 aa, synthetic construct
MALPVTALLLPLALLLHAARPEFNAGVTQTPKFRVLKTGQSMTLLCAQDMNHEYMYWYRQDPGMGLRLIHYSGWGKDTAKGEVPDGYNVSRLKKQNFLLGLESAAPSQTSVYFCASKVGPGQHNSPLHFGNGTRLTVTLEDLKNVFPPEVAVFEPSEAEISHTQKATLVCLATGFYPDHVELSWWVNGKEVHSGVSTDPQPLKEQPALNDSRYCLSSRLRVSATFWQNPRNHFRCQVQFYGLSENDEWTQDRAKPVTQIVSAEAWGRADCGSTTPGERSSLPAFYPGTSGSCSGCGSLSLPLLAGLVAADAVASLLIVGAVFLCARPRRSPAQEDGKVYINMPGRGRAKRSGSGATNFSLLKQAGDVEENPGPTSMDWIWRILFLVGAATGAHSFEAQKVTQAQTEISVVEKEDVTLDCVYETRDTAYYLFWYKQPPSGELVFLIRQPWWGSSRGISGRYSWNFQKSTSSFNFTITASQVVDSAVYFCAMSVPDSRGHYQFTFGKGTKLSVIPTRIQNPDPAVYQLRDSKSSDKSVCLFTDFDSQTNVSQSKDSDVYITDKTVLDMRSMDFKSNSAVAWSNKSDFACANAFNNSIIPEDTFFPSPESSCGTTTPGERSSLPAFYPGTSGSCSGCGSLSLPLLAGLVAADAVASLLIVGAVFRSKRSRLLHSDYMNMTPRRPGPTRKHYQPYAPPRDFAAYRSLCARPRRSPAQEDGKVYINMPGRG

SEQ ID NO: 10805 - protein, 721 aa, synthetic construct
MALPVTALLLPLALLLHAARPEFNAGVTQTPKFRVLKTGQSMTLLCAQDMNHEYMYWYRQDPGMGLRLIHYSGWGKDTAKGEVPDGYNVSRLKKQNFLLGLESAAPSQTSVYFCASKVGPGQHNSPLHFGNGTRLTVTLEDLKNVFPPEVAVFEPSEAEISHTQKATLVCLATGFYPDHVELSWWVNGKEVHSGVSTDPQPLKEQPALNDSRYCLSSRLRVSATFWQNPRNHFRCQVQFYGLSENDEWTQDRAKPVTQIVSAEAWGRADCGSTTPGERSSLPAFYPGTSGSCSGCGSLSLPLLAGLVAADAVASLLIVGAVFLCARPRRSPAQEDGKVYINMPGRGRAKRSGSGATNFSLLKQAGDVEENPGPTSMDWIWRILFLVGAATGAHSFEAQKVTQAQTEISVVEKEDVTLDCVYETRDTAYYLFWYKQPPSGELVFLIRQPWWGSSRGISGRYSWNFQKSTSSFNFTITASQVVDSAVYFCAMSVPDSRGHYQFTFGKGTKLSVIPTRIQNPDPAVYQLRDSKSSDKSVCLFTDFDSQTNVSQSKDSDVYITDKTVLDMRSMDFKSNSAVAWSNKSDFACANAFNNSIIPEDTFFPSPESSCGTTTPGERSSLPAFYPGTSGSCSGCGSLSLPLLAGLVAADAVASLLIVGAVFRDQRLPPDAHKPPGGGSFRTPIQEEQADAHSTLAKILCARPRRSPAQEDGKVYINMPGRG

SEQ ID NO: 10806 - protein, 805 aa, synthetic construct
MALPVTALLLPLALLLHAARPEFNAGVTQTPKFRVLKTGQSMTLLCAQDMNHEYMYWYRQDPGMGLRLIHYSGWGKDTAKGEVPDGYNVSRLKKQNFLLGLESAAPSQTSVYFCASKVGPGQHNSPLHFGNGTRLTVTLEDLKNVFPPEVAVFEPSEAEISHTQKATLVCLATGFYPDHVELSWWVNGKEVHSGVSTDPQPLKEQPALNDSRYCLSSRLRVSATFWQNPRNHFRCQVQFYGLSENDEWTQDRAKPVTQIVSAEAWGRADCGSTTPGERSSLPAFYPGTSGSCSGCGSLSLPLLAGLVAADAVASLLIVGAVFLCARPRRSPAQEDGKVYINMPGRGRAKRSGSGATNFSLLKQAGDVEENPGPTSMDWIWRILFLVGAATGAHSFEAQKVTQAQTEISVVEKEDVTLDCVYETRDTAYYLFWYKQPPSGELVFLIRQPWWGSSRGISGRYSWNFQKSTSSFNFTITASQVVDSAVYFCAMSVPDSRGHYQFTFGKGTKLSVIPTRIQNPDPAVYQLRDSKSSDKSVCLFTDFDSQTNVSQSKDSDVYITDKTVLDMRSMDFKSNSAVAWSNKSDFACANAFNNSIIPEDTFFPSPESSCGTTTPGERSSLPAFYPGTSGSCSGCGSLSLPLLAGLVAADAVASLLIVGAVFWRRKRKEKQSETSPKEFLTIYEDVKDLKTRRNHEQEQTFPGGGSTIYSMIQSQSSAPTSQEPAYTLYSLIQPSRKSGSRKRNHSPSFNSTIYEVIGKSQPKAQNPARLSRKELENFDVYSLCARPRRSPAQEDGKVYINMPGRG

SEQ ID NO: 10807 - protein, 756 aa, synthetic construct
MALPVTALLLPLALLLHAARPEFNAGVTQTPKFRVLKTGQSMTLLCAQDMNHEYMYWYRQDPGMGLRLIHYSGWGKDTAKGEVPDGYNVSRLKKQNFLLGLESAAPSQTSVYFCASKVGPGQHNSPLHFGNGTRLTVTLEDLKNVFPPEVAVFEPSEAEISHTQKATLVCLATGFYPDHVELSWWVNGKEVHSGVSTDPQPLKEQPALNDSRYCLSSRLRVSATFWQNPRNHFRCQVQFYGLSENDEWTQDRAKPVTQIVSAEAWGRADCGSLGEPQLCYILDAILFLYGIVLTLLYCKRGRKKLLYIFKQPFMRPVQTTQEEDGCSCRFPEEEEGGCELRLKIQVRKAAITSYEKSDGVYTGLSTRNQETYETLKHEKPPQRAKRSGSGATNFSLLKQAGDVEENPGPTSMDWIWRILFLVGAATGAHSFEAQKVTQAQTEISVVEKEDVTLDCVYETRDTAYYLFWYKQPPSGELVFLIRQPWWGSSRGISGRYSWNFQKSTSSFNFTITASQVVDSAVYFCAMSVPDSRGHYQFTFGKGTKLSVIPTRIQNPDPAVYQLRDSKSSDKSVCLFTDFDSQTNVSQSKDSDVYITDKTVLDMRSMDFKSNSAVAWSNKSDFACANAFNNSIIPEDTFFPSPESSCGTLGEPQLCYILDAILFLYGIVLTLLYCRSKRSRLLHSDYMNMTPRRPGPTRKHYQPYAPPRDFAAYRSRLKIQVRKAAITSYEKSDGVYTGLSTRNQETYETLKHEKPPQ

SEQ ID NO: 10808 - protein, 751 aa, synthetic construct
MALPVTALLLPLALLLHAARPEFNAGVTQTPKFRVLKTGQSMTLLCAQDMNHEYMYWYRQDPGMGLRLIHYSGWGKDTAKGEVPDGYNVSRLKKQNFLLGLESAAPSQTSVYFCASKVGPGQHNSPLHFGNGTRLTVTLEDLKNVFPPEVAVFEPSEAEISHTQKATLVCLATGFYPDHVELSWWVNGKEVHSGVSTDPQPLKEQPALNDSRYCLSSRLRVSATFWQNPRNHFRCQVQFYGLSENDEWTQDRAKPVTQIVSAEAWGRADCGSLGEPQLCYILDAILFLYGIVLTLLYCKRGRKKLLYIFKQPFMRPVQTTQEEDGCSCRFPEEEEGGCELRLKIQVRKAAITSYEKSDGVYTGLSTRNQETYETLKHEKPPQRAKRSGSGATNFSLLKQAGDVEENPGPTSMDWIWRILFLVGAATGAHSFEAQKVTQAQTEISVVEKEDVTLDCVYETRDTAYYLFWYKQPPSGELVFLIRQPWWGSSRGISGRYSWNFQKSTSSFNFTITASQVVDSAVYFCAMSVPDSRGHYQFTFGKGTKLSVIPTRIQNPDPAVYQLRDSKSSDKSVCLFTDFDSQTNVSQSKDSDVYITDKTVLDMRSMDFKSNSAVAWSNKSDFACANAFNNSIIPEDTFFPSPESSCGTLGEPQLCYILDAILFLYGIVLTLLYCRDQRLPPDAHKPPGGGSFRTPIQEEQADAHSTLAKIRLKIQVRKAAITSYEKSDGVYTGLSTRNQETYETLKHEKPPQ

SEQ ID NO: 10809 - protein, 835 aa, synthetic construct
MALPVTALLLPLALLLHAARPEFNAGVTQTPKFRVLKTGQSMTLLCAQDMNHEYMYWYRQDPGMGLRLIHYSGWGKDTAKGEVPDGYNVSRLKKQNFLLGLESAAPSQTSVYFCASKVGPGQHNSPLHFGNGTRLTVTLEDLKNVFPPEVAVFEPSEAEISHTQKATLVCLATGFYPDHVELSWWVNGKEVHSGVSTDPQPLKEQPALNDSRYCLSSRLRVSATFWQNPRNHFRCQVQFYGLSENDEWTQDRAKPVTQIVSAEAWGRADCGSLGEPQLCYILDAILFLYGIVLTLLYCKRGRKKLLYIFKQPFMRPVQTTQEEDGCSCRFPEEEEGGCELRLKIQVRKAAITSYEKSDGVYTGLSTRNQETYETLKHEKPPQRAKRSGSGATNFSLLKQAGDVEENPGPTSMDWIWRILFLVGAATGAHSFEAQKVTQAQTEISVVEKEDVTLDCVYETRDTAYYLFWYKQPPSGELVFLIRQPWWGSSRGISGRYSWNFQKSTSSFNFTITASQVVDSAVYFCAMSVPDSRGHYQFTFGKGTKLSVIPTRIQNPDPAVYQLRDSKSSDKSVCLFTDFDSQTNVSQSKDSDVYITDKTVLDMRSMDFKSNSAVAWSNKSDFACANAFNNSIIPEDTFFPSPESSCGTLGEPQLCYILDAILFLYGIVLTLLYCWRRKRKEKQSETSPKEFLTIYEDVKDLKTRRNHEQEQTFPGGGSTIYSMIQSQSSAPTSQEPAYTLYSLIQPSRKSGSRKRNHSPSFNSTIYEVIGKSQPKAQNPARLSRKELENFDVYSRLKIQVRKAAITSYEKSDGVYTGLSTRNQETYETLKHEKPPQ

SEQ ID NO: 10810 - protein, 757 aa, synthetic construct
MALPVTALLLPLALLLHAARPEFNAGVTQTPKFRVLKTGQSMTLLCAQDMNHEYMYWYRQDPGMGLRLIHYSGWGKDTAKGEVPDGYNVSRLKKQNFLLGLESAAPSQTSVYFCASKVGPGQHNSPLHFGNGTRLTVTLEDLKNVFPPEVAVFEPSEAEISHTQKATLVCLATGFYPDHVELSWWVNGKEVHSGVSTDPQPLKEQPALNDSRYCLSSRLRVSATFWQNPRNHFRCQVQFYGLSENDEWTQDRAKPVTQIVSAEAWGRADCGSLGEPQLCYILDAILFLYGIVLTLLYCKRGRKKLLYIFKQPFMRPVQTTQEEDGCSCRFPEEEEGGCELRLKIQVRKAAITSYEKSDGVYTGLSTRNQETYETLKHEKPPQRAKRSGSGATNFSLLKQAGDVEENPGPTSMDWIWRILFLVGAATGAHSFEAQKVTQAQTEISVVEKEDVTLDCVYETRDTAYYLFWYKQPPSGELVFLIRQPWWGSSRGISGRYSWNFQKSTSSFNFTITASQVVDSAVYFCAMSVPDSRGHYQFTFGKGTKLSVIPTRIQNPDPAVYQLRDSKSSDKSVCLFTDFDSQTNVSQSKDSDVYITDKTVLDMRSMDFKSNSAVAWSNKSDFACANAFNNSIIPEDTFFPSPESSCGTLGEPQLCYILDAILFLYGIVLTLLYCKRGRKKLLYIFKQPFMRPVQTTQEEDGCSCRFPEEEEGGCELRLKIQVRKAAITSYEKSDGVYTGLSTRNQETYETLKHEKPPQ

SEQ ID NO: 10811 - protein, 756 aa, synthetic construct; identical to SEQ ID NO: 10807

SEQ ID NO: 10812 - protein, 755 aa, synthetic construct
MALPVTALLLPLALLLHAARPEFNAGVTQTPKFRVLKTGQSMTLLCAQDMNHEYMYWYRQDPGMGLRLIHYSGWGKDTAKGEVPDGYNVSRLKKQNFLLGLESAAPSQTSVYFCASKVGPGQHNSPLHFGNGTRLTVTLEDLKNVFPPEVAVFEPSEAEISHTQKATLVCLATGFYPDHVELSWWVNGKEVHSGVSTDPQPLKEQPALNDSRYCLSSRLRVSATFWQNPRNHFRCQVQFYGLSENDEWTQDRAKPVTQIVSAEAWGRADCGSLGEPQLCYILDAILFLYGIVLTLLYCRSKRSRLLHSDYMNMTPRRPGPTRKHYQPYAPPRDFAAYRSRLKIQVRKAAITSYEKSDGVYTGLSTRNQETYETLKHEKPPQRAKRSGSGATNFSLLKQAGDVEENPGPTSMDWIWRILFLVGAATGAHSFEAQKVTQAQTEISVVEKEDVTLDCVYETRDTAYYLFWYKQPPSGELVFLIRQPWWGSSRGISGRYSWNFQKSTSSFNFTITASQVVDSAVYFCAMSVPDSRGHYQFTFGKGTKLSVIPTRIQNPDPAVYQLRDSKSSDKSVCLFTDFDSQTNVSQSKDSDVYITDKTVLDMRSMDFKSNSAVAWSNKSDFACANAFNNSIIPEDTFFPSPESSCGTLGEPQLCYILDAILFLYGIVLTLLYCRSKRSRLLHSDYMNMTPRRPGPTRKHYQPYAPPRDFAAYRSRLKIQVRKAAITSYEKSDGVYTGLSTRNQETYETLKHEKPPQ

SEQ ID NO: 10813 - protein, 673 aa, synthetic construct
MALPVTALLLPLALLLHAARPEFNAGVTQTPKFRVLKTGQSMTLLCAQDMNHEYMYWYRQDPGMGLRLIHYSGWGKDTAKGEVPDGYNVSRLKKQNFLLGLESAAPSQTSVYFCASKVGPGQHNSPLHFGNGTRLTVTLEDLKNVFPPEVAVFEPSEAEISHTQKATLVCLATGFYPDHVELSWWVNGKEVHSGVSTDPQPLKEQPALNDSRYCLSSRLRVSATFWQNPRNHFRCQVQFYGLSENDEWTQDRAKPVTQIVSAEAWGRADCGSLGEPQLSYILDAILFLYGIVLTLLYCRLKIQVRKAAITSYEKSDGVYTGLSTRNQETYETLKHEKPPQRAKRSGSGATNFSLLKQAGDVEENPGPTSMDWIWRILFLVGAATGAHSFEAQKVTQAQTEISVVEKEDVTLDCVYETRDTAYYLFWYKQPPSGELVFLIRQPWWGSSRGISGRYSWNFQKSTSSFNFTITASQVVDSAVYFCAMSVPDSRGHYQFTFGKGTKLSVIPTRIQNPDPAVYQLRDSKSSDKSVCLFTDFDSQTNVSQSKDSDVYITDKTVLDMRSMDFKSNSAVAWSNKSDFACANAFNNSIIPEDTFFPSPESSCGTLGEPQLSYILDAILFLYGIVLTLLYCRLKIQVRKAAITSYEKSDGVYTGLSTRNQETYETLKHEKPPQ

SEQ ID NO: 10814 - protein, 709 aa, synthetic construct
MALPVTALLLPLALLLHAARPEFNAGVTQTPKFRVLKTGQSMTLLCAQDMNHEYMYWYRQDPGMGLRLIHYSGWGKDTAKGEVPDGYNVSRLKKQNFLLGLESAAPSQTSVYFCASKVGPGQHNSPLHFGNGTRLTVTLEDLKNVFPPEVAVFEPSEAEISHTQKATLVCLATGFYPDHVELSWWVNGKEVHSGVSTDPQPLKEQPALNDSRYCLSSRLRVSATFWQNPRNHFRCQVQFYGLSENDEWTQDRAKPVTQIVSAEAWGRADCGSQAQSDCSCSTVSPGVLAGIVMGDLVLTVLIALAVYFLGRLVPRGRGAAEAATRKQRITETESPYQELQGQRSDVYSDLNTQRPYYKRAKRSGSGATNFSLLKQAGDVEENPGPTSMDWIWRILFLVGAATGAHSFEAQKVTQAQTEISVVEKEDVTLDCVYETRDTAYYLFWYKQPPSGELVFLIRQPWWGSSRGISGRYSWNFQKSTSSFNFTITASQVVDSAVYFCAMSVPDSRGHYQFTFGKGTKLSVIPTRIQNPDPAVYQLRDSKSSDKSVCLFTDFDSQTNVSQSKDSDVYITDKTVLDMRSMDFKSNSAVAWSNKSDFACANAFNNSIIPEDTFFPSPESSCGTQAQSDCSSSTVSPGVLAGIVMGDLVLTVLIALAVYFLGRLVPRGRGAAEAATRKQRITETESPYQELQGQRSDVYSDLNTQRPYYK

SEQ ID NO: 10815 - protein, 751 aa, synthetic construct
MALPVTALLLPLALLLHAARPEFNAGVTQTPKFRVLKTGQSMTLLCAQDMNHEYMYWYRQDPGMGLRLIHYSGWGKDTAKGEVPDGYNVSRLKKQNFLLGLESAAPSQTSVYFCASKVGPGQHNSPLHFGNGTRLTVTLEDLKNVFPPEVAVFEPSEAEISHTQKATLVCLATGFYPDHVELSWWVNGKEVHSGVSTDPQPLKEQPALNDSRYCLSSRLRVSATFWQNPRNHFRCQVQFYGLSENDEWTQDRAKPVTQIVSAEAWGRADCGSQAQSDCSCSTVSPGVLAGIVMGDLVLTVLIALAVYFLGRLVPRGRGAAEAATRKQRITETESPYQELQGQRSDVYSDLNTQRPYYKRAKRSGSGATNFSLLKQAGDVEENPGPTSMDWIWRILFLVGAATGAHSFEAQKVTQAQTEISVVEKEDVTLDCVYETRDTAYYLFWYKQPPSGELVFLIRQPWWGSSRGISGRYSWNFQKSTSSFNFTITASQVVDSAVYFCAMSVPDSRGHYQFTFGKGTKLSVIPTRIQNPDPAVYQLRDSKSSDKSVCLFTDFDSQTNVSQSKDSDVYITDKTVLDMRSMDFKSNSAVAWSNKSDFACANAFNNSIIPEDTFFPSPESSCGTQAQSDCSCSTVSPGVLAGIVMGDLVLTVLIALAVYFLGRLVPRGRGAAEAATRKQRITETESPYQELQGQRSDVYSDLNTQKRGRKKLLYIFKQPFMRPVQTTQEEDGCSCRFPEEEEGGCELRPYYK

SEQ ID NO: 10816 - protein, 750 aa, synthetic construct
MALPVTALLLPLALLLHAARPEFNAGVTQTPKFRVLKTGQSMTLLCAQDMNHEYMYWYRQDPGMGLRLIHYSGWGKDTAKGEVPDGYNVSRLKKQNFLLGLESAAPSQTSVYFCASKVGPGQHNSPLHFGNGTRLTVTLEDLKNVFPPEVAVFEPSEAEISHTQKATLVCLATGFYPDHVELSWWVNGKEVHSGVSTDPQPLKEQPALNDSRYCLSSRLRVSATFWQNPRNHFRCQVQFYGLSENDEWTQDRAKPVTQIVSAEAWGRADCGSQAQSDCSCSTVSPGVLAGIVMGDLVLTVLIALAVYFLGRLVPRGRGAAEAATRKQRITETESPYQELQGQRSDVYSDLNTQRPYYKRAKRSGSGATNFSLLKQAGDVEENPGPTSMDWIWRILFLVGAATGAHSFEAQKVTQAQTEISVVEKEDVTLDCVYETRDTAYYLFWYKQPPSGELVFLIRQPWWGSSRGISGRYSWNFQKSTSSFNFTITASQVVDSAVYFCAMSVPDSRGHYQFTFGKGTKLSVIPTRIQNPDPAVYQLRDSKSSDKSVCLFTDFDSQTNVSQSKDSDVYITDKTVLDMRSMDFKSNSAVAWSNKSDFACANAFNNSIIPEDTFFPSPESSCGTQAQSDCSCSTVSPGVLAGIVMGDLVLTVLIALAVYFLGRLVPRGRGAAEAATRKQRITETESPYQELQGQRSDVYSDLNTQRSKRSRLLHSDYMNMTPRRPGPTRKHYQPYAPPRDFAAYRSRPYYK

SEQ ID NO: 10817 - protein, 745 aa, synthetic construct
MALPVTALLLPLALLLHAARPEFNAGVTQTPKFRVLKTGQSMTLLCAQDMNHEYMYWYRQDPGMGLRLIHYSGWGKDTAKGEVPDGYNVSRLKKQNFLLGLESAAPSQTSVYFCASKVGPGQHNSPLHFGNGTRLTVTLEDLKNVFPPEVAVFEPSEAEISHTQKATLVCLATGFYPDHVELSWWVNGKEVHSGVSTDPQPLKEQPALNDSRYCLSSRLRVSATFWQNPRNHFRCQVQFYGLSENDEWTQDRAKPVTQIVSAEAWGRADCGSQAQSDCSCSTVSPGVLAGIVMGDLVLTVLIALAVYFLGRLVPRGRGAAEAATRKQRITETESPYQELQGQRSDVYSDLNTQRPYYKRAKRSGSGATNFSLLKQAGDVEENPGPTSMDWIWRILFLVGAATGAHSFEAQKVTQAQTEISVVEKEDVTLDCVYETRDTAYYLFWYKQPPSGELVFLIRQPWWGSSRGISGRYSWNFQKSTSSFNFTITASQVVDSAVYFCAMSVPDSRGHYQFTFGKGTKLSVIPTRIQNPDPAVYQLRDSKSSDKSVCLFTDFDSQTNVSQSKDSDVYITDKTVLDMRSMDFKSNSAVAWSNKSDFACANAFNNSIIPEDTFFPSPESSCGTQAQSDCSCSTVSPGVLAGIVMGDLVLTVLIALAVYFLGRLVPRGRGAAEAATRKQRITETESPYQELQGQRSDVYSDLNTQRDQRLPPDAHKPPGGGSFRTPIQEEQADAHSTLAKIRPYYK

SEQ ID NO: 10818 - protein, 829 aa, synthetic construct
MALPVTALLLPLALLLHAARPEFNAGVTQTPKFRVLKTGQSMTLLCAQDMNHEYMYWYRQDPGMGLRLIHYSGWGKDTAKGEVPDGYNVSRLKKQNFLLGLESAAPSQTSVYFCASKVGPGQHNSPLHFGNGTRLTVTLEDLKNVFPPEVAVFEPSEAEISHTQKATLVCLATGFYPDHVELSWWVNGKEVHSGVSTDPQPLKEQPALNDSRYCLSSRLRVSATFWQNPRNHFRCQVQFYGLSENDEWTQDRAKPVTQIVSAEAWGRADCGSQAQSDCSCSTVSPGVLAGIVMGDLVLTVLIALAVYFLGRLVPRGRGAAEAATRKQRITETESPYQELQGQRSDVYSDLNTQRPYYKRAKRSGSGATNFSLLKQAGDVEENPGPTSMDWIWRILFLVGAATGAHSFEAQKVTQAQTEISVVEKEDVTLDCVYETRDTAYYLFWYKQPPSGELVFLIRQPWWGSSRGISGRYSWNFQKSTSSFNFTITASQVVDSAVYFCAMSVPDSRGHYQFTFGKGTKLSVIPTRIQNPDPAVYQLRDSKSSDKSVCLFTDFDSQTNVSQSKDSDVYITDKTVLDMRSMDFKSNSAVAWSNKSDFACANAFNNSIIPEDTFFPSPESSCGTQAQSDCSCSTVSPGVLAGIVMGDLVLTVLIALAVYFLGRLVPRGRGAAEAATRKQRITETESPYQELQGQRSDVYSDLNTQWRRKRKEKQSETSPKEFLTIYEDVKDLKTRRNHEQEQTFPGGGSTIYSMIQSQSSAPTSQEPAYTLYSLIQPSRKSGSRKRNHSPSFNSTIYEVIGKSQPKAQNPARLSRKELENFDVYSRPYYK

SEQ ID NO: 10819 - protein, 921 aa, synthetic construct
MALPVTALLLPLALLLHAARPEFNAGVTQTPKFRVLKTGQSMTLLCAQDMNHEYMYWYRQDPGMGLRLIHYSGWGKDTAKGEVPDGYNVSRLKKQNFLLGLESAAPSQTSVYFCASKVGPGQHNSPLHFGNGTRLTVTLEDLKNVFPPEVAVFEPSEAEISHTQKATLVCLATGFYPDHVELSWWVNGKEVHSGVSTDPQPLKEQPALNDSRYCLSSRLRVSATFWQNPRNHFRCQVQFYGLSENDEWTQDRAKPVTQIVSAEAWGRADCGSQAQSDCSCSTVSPGVLAGIVMGDLVLTVLIALAVYFLGRLVPRGRGAAEAATRKQRITETESPYQELQGQRSDVYSDLNTQRVKFSRSADAPAYQQGQNQLYNELNLGRREEYDVLDKRRGRDPEMGGKPQRRKNPQEGLYNELQKDKMAEAYSEIGMKGERRRGKGHDGLYQGLSTATKDTYDALHMQALPPRRAKRSGSGATNFSLLKQAGDVEENPGPTSMDWIWRILFLVGAATGAHSFEAQKVTQAQTEISVVEKEDVTLDCVYETRDTAYYLFWYKQPPSGELVFLIRQPWWGSSRGISGRYSWNFQKSTSSFNFTITASQVVDSAVYFCAMSVPDSRGHYQFTFGKGTKLSVIPTRIQNPDPAVYQLRDSKSSDKSVCLFTDFDSQTNVSQSKDSDVYITDKTVLDMRSMDFKSNSAVAWSNKSDFACANAFNNSIIPEDTFFPSPESSCGTTTPGERSSLPAFYPGTSGSCSGCGSLSLPLLAGLVAADAVASLLIVGAVFLCARPRRSPAQEDGKVYINMPGRGSSRRVKFSRSADAPAYQQGQNQLYNELNLGRREEYDVLDKRRGRDPEMGGKPQRRKNPQEGLYNELQKDKMAEAYSEIGMKGERRRGKGHDGLYQGLSTATKDTYDALHMQALPPR

SEQ ID NO: 10820 - protein, 847 aa, synthetic construct
MALPVTALLLPLALLLHAARPEFNAGVTQTPKFRVLKTGQSMTLLCAQDMNHEYMYWYRQDPGMGLRLIHYSGWGKDTAKGEVPDGYNVSRLKKQNFLLGLESAAPSQTSVYFCASKVGPGQHNSPLHFGNGTRLTVTLEDLKNVFPPEVAVFEPSEAEISHTQKATLVCLATGFYPDHVELSWWVNGKEVHSGVSTDPQPLKEQPALNDSRYCLSSRLRVSATFWQNPRNHFRCQVQFYGLSENDEWTQDRAKPVTQIVSAEAWGRADCGSQAQSDCSCSTVSPGVLAGIVMGDLVLTVLIALAVYFLGRLVPRGRGAAEAATRKQRITETESPYQELQGQRSDVYSDLNTQRVKFSRSADAPAYQQGQNQLYNELNLGRREEYDVLDKRRGRDPEMGGKPQRRKNPQEGLYNELQKDKMAEAYSEIGMKGERRRGKGHDGLYQGLSTATKDTYDALHMQALPPRRAKRSGSGATNFSLLKQAGDVEENPGPTSMDWIWRILFLVGAATGAHSFEAQKVTQAQTEISVVEKEDVTLDCVYETRDTAYYLFWYKQPPSGELVFLIRQPWWGSSRGISGRYSWNFQKSTSSFNFTITASQVVDSAVYFCAMSVPDSRGHYQFTFGKGTKLSVIPTRIQNPDPAVYQLRDSKSSDKSVCLFTDFDSQTNVSQSKDSDVYITDKTVLDMRSMDFKSNSAVAWSNKSDFACANAFNNSIIPEDTFFPSPESSCGTTTPGERSSLPAFYPGTSGSCSGCGSLSLPLLAGLVAADAVASLLIVGAVFKRGRKKLLYIFKQPFMRPVQTTQEEDGCSCRFPEEEEGGCELLCARPRRSPAQEDGKVYINMPGRG

SEQ ID NO: 10821 - protein, 846 aa, synthetic construct
MALPVTALLLPLALLLHAARPEFNAGVTQTPKFRVLKTGQSMTLLCAQDMNHEYMYWYRQDPGMGLRLIHYSGWGKDTAKGEVPDGYNVSRLKKQNFLLGLESAAPSQTSVYFCASKVGPGQHNSPLHFGNGTRLTVTLEDLKNVFPPEVAVFEPSEAEISHTQKATLVCLATGFYPDHVELSWWVNGKEVHSGVSTDPQPLKEQPALNDSRYCLSSRLRVSATFWQNPRNHFRCQVQFYGLSENDEWTQDRAKPVTQIVSAEAWGRADCGSQAQSDCSCSTVSPGVLAGIVMGDLVLTVLIALAVYFLGRLVPRGRGAAEAATRKQRITETESPYQELQGQRSDVYSDLNTQRVKFSRSADAPAYQQGQNQLYNELNLGRREEYDVLDKRRGRDPEMGGKPQRRKNPQEGLYNELQKDKMAEAYSEIGMKGERRRGKGHDGLYQGLSTATKDTYDALHMQALPPRRAKRSGSGATNFSLLKQAGDVEENPGPTSMDWIWRILFLVGAATGAHSFEAQKVTQAQTEISVVEKEDVTLDCVYETRDTAYYLFWYKQPPSGELVFLIRQPWWGSSRGISGRYSWNFQKSTSSFNFTITASQVVDSAVYFCAMSVPDSRGHYQFTFGKGTKLSVIPTRIQNPDPAVYQLRDSKSSDKSVCLFTDFDSQTNVSQSKDSDVYITDKTVLDMRSMDFKSNSAVAWSNKSDFACANAFNNSIIPEDTFFPSPESSCGTTTPGERSSLPAFYPGTSGSCSGCGSLSLPLLAGLVAADAVASLLIVGAVFRSKRSRLLHSDYMNMTPRRPGPTRKHYQPYAPPRDFAAYRSLCARPRRSPAQEDGKVYINMPGRG

SEQ ID NO: 10822 - protein, 1092 aa, synthetic construct
MALPVTALLLPLALLLHAARPEFNAGVTQTPKFRVLKTGQSMTLLCAQDMNHEYMYWYRQDPGMGLRLIHYSGWGKDTAKGEVPDGYNVSRLKKQNFLLGLESAAPSQTSVYFCASKVGPGQHNSPLHFGNGTRLTVTLEDLKNVFPPEVAVFEPSEAEISHTQKATLVCLATGFYPDHVELSWWVNGKEVHSGVSTDPQPLKEQPALNDSRYCLSSRLRVSATFWQNPRNHFRCQVQFYGLSENDEWTQDRAKPVTQIVSAEAWGRADCGSQSFGLLDPKLCYLLDGILFIYGVILTALFLRVKFSRSADAPAYQQGQNQLYNELNLGRREEYDVLDKRRGRDPEMGGKPQRRKNPQEGLYNELQKDKMAEAYSEIGMKGERRRGKGHDGLYQGLSTATKDTYDALHMQALPPRRAKRSGSGATNFSLLKQAGDVEENPGPTSMDWIWRILFLVGAATGAHSFEAQKVTQAQTEISVVEKEDVTLDCVYETRDTAYYLFWYKQPPSGELVFLIRQPWWGSSRGISGRYSWNFQKSTSSFNFTITASQVVDSAVYFCAMSVPDSRGHYQFTFGKGTKLSVIPTRIQNPDPAVYQLRDSKSSDKSVCLFTDFDSQTNVSQSKDSDVYITDKTVLDMRSMDFKSNSAVAWSNKSDFACANAFNNSIIPEDTFFPSPESSCGTQSFGLLDPKLCYLLDGILFIYGVILTALFLRVKFSRSADAPAYQQGQNQLYNELNLGRREEYDVLDKRRGRDPEMGGKPQRRKNPQEGLYNELQKDKMAEAYSEIGMKGERRRGKGHDGLYQGLSTATKDTYDALHMQALPPRRAKRSGSGVKQTLNFDLLKLAGDVESNPGPSRGHMALPVTALLLPLALLLHAARPSQFRVSPLDRTWNLGETVELKCQVLLSNPTSGCSWLFQPRGAAASPTFLLYLSQNKPKAAEGLDTQRFSGKRLGDTFVLTLSDFRRENEGYYFCSALSNSIMYFSHFVPVFLPAKPTTTPAPRPPTPAPTIASQPLSLRPEACRPAAGGAVHTRGLDFACDIYIWAPLAGTCGVLLLSLVITLYCNHRNRRRVCKCPRPVVKSGDKPSLSARYV

SEQ ID NO: 10823 - protein, 832 aa, synthetic construct
MALPVTALLLPLALLLHAARPEFNAGVTQTPKFRVLKTGQSMTLLCAQDMNHEYMYWYRQDPGMGLRLIHYSGWGKDTAKGEVPDGYNVSRLKKQNFLLGLESAAPSQTSVYFCASKVGPGQHNSPLHFGNGTRLTVTLEDLKNVFPPEVAVFEPSEAEISHTQKATLVCLATGFYPDHVELSWWVNGKEVHSGVSTDPQPLKEQPALNDSRYCLSSRLRVSATFWQNPRNHFRCQVQFYGLSENDEWTQDRAKPVTQIVSAEAWGRADCGSQSFGLLDPKLCYLLDGILFIYGVILTALFLRVKFSRSADAPAYQQGQNQLYNELNLGRREEYDVLDKRRGRDPEMGGKPQRRKNPQEGLYNELQKDKMAEAYSEIGMKGERRRGKGHDGLYQGLSTATKDTYDALHMQALPPRRAKRSGSGATNFSLLKQAGDVEENPGPTSMDWIWRILFLVGAATGAHSFEAQKVTQAQTEISVVEKEDVTLDCVYETRDTAYYLFWYKQPPSGELVFLIRQPWWGSSRGISGRYSWNFQKSTSSFNFTITASQVVDSAVYFCAMSVPDSRGHYQFTFGKGTKLSVIPTRASTKGPSVFPLAPSSKSTSGGTAALGCLVKDYFPEPVTVSWNSGALTSGVHTFPAVLQSSGLYSLSSVVTVPSSSLGTQTYICNVNHKPSNTKVDKRVEPKSCGTQSFGLLDPKLSYLLDGILFIYGVILTALFLRVKFSRSADAPAYQQGQNQLYNELNLGRREEYDVLDKRRGRDPEMGGKPQRRKNPQEGLYNELQKDKMAEAYSEIGMKGERRRGKGHDGLYQGLSTATKDTYDALHMQALPPR

SEQ ID NO: 10824 - protein, 823 aa, synthetic construct
MALPVTALLLPLALLLHAARPEFNAGVTQTPKFRVLKTGQSMTLLCAQDMNHEYMYWYRQDPGMGLRLIHYSGWGKDTAKGEVPDGYNVSRLKKQNFLLGLESAAPSQTSVYFCASKVGPGQHNSPLHFGNGTRLTVTLEDLKNVFPPEVAVFEPSEAEISHTQKATLVCLATGFYPDHVELSWWVNGKEVHSGVSTDPQPLKEQPALNDSRYCLSSRLRVSATFWQNPRNHFRCQVQFYGLSENDEWTQDRAKPVTQIVSAEAWGRADCGSQSFGLLDPKLCYLLDGILFIYGVILTALFLRVKFSRSADAPAYQQGQNQLYNELNLGRREEYDVLDKRRGRDPEMGGKPQRRKNPQEGLYNELQKDKMAEAYSEIGMKGERRRGKGHDGLYQGLSTATKDTYDALHMQALPPRRAKRSGSGATNFSLLKQAGDVEENPGPTSMDWIWRILFLVGAATGAHSFEAQKVTQAQTEISVVEKEDVTLDCVYETRDTAYYLFWYKQPPSGELVFLIRQPWWGSSRGISGRYSWNFQKSTSSFNFTITASQVVDSAVYFCAMSVPDSRGHYQFTFGKGTKLSVIPTRIQNPDPAVYQLRDSKSSDKSVCLFTDFDSQTNVSQSKDSDVYITDKTVLDMRSMDFKSNSAVAWSNKSDFACANAFNNSIIPEDTFFPSPESSCGTQSFGLLDPKLSYLLDGILFIYGVILTALFLRVKFSRSADAPAYQQGQNQLYNELNLGRREEYDVLDKRRGRDPEMGGKPQRRKNPQEGLYNELQKDKMAEAYSEIGMKGERRRGKGHDGLYQGLSTATKDTYDALHMQALPPR

SEQ ID NO: 10825 - protein, 993 aa, synthetic construct
MALPVTALLLPLALLLHAARPEFNAGVTQTPKFRVLKTGQSMTLLCAQDMNHEYMYWYRQDPGMGLRLIHYSGWGKDTAKGEVPDGYNVSRLKKQNFLLGLESAAPSQTSVYFCASKVGPGQHNSPLHFGNGTRLTVTLEGQPKANPTVTLFPPSSEELQANKATLVCLISDFYPGAVTVAWKADGSPVKAGVETTKPSKQSNNKYAASSYLSLTPEQWKSHRSYSCQVTHEGSTVEKTVAPTECSGSLGEPQLCYILDAILFLYGIVLTLLYCRLKIQVRKAAITSYEKSDGVYTGLSTRNQETYETLKHEKPPQRAKRSGSGATNFSLLKQAGDVEENPGPTSMDWIWRILFLVGAATGAHSFEAQKVTQAQTEISVVEKEDVTLDCVYETRDTAYYLFWYKQPPSGELVFLIRQPWWGSSRGISGRYSWNFQKSTSSFNFTITASQVVDSAVYFCAMSVPDSRGHYQFTFGKGTKLSVIPTRIQNPDPAVYQLRDSKSSDKSVCLFTDFDSQTNVSQSKDSDVYITDKTVLDMRSMDFKSNSAVAWSNKSDFACANAFNNSIIPEDTFFPSPESSCGTQSFGLLDPKLCYLLDGILFIYGVILTALFLRVKFSRSADAPAYQQGQNQLYNELNLGRREEYDVLDKRRGRDPEMGGKPQRRKNPQEGLYNELQKDKMAEAYSEIGMKGERRRGKGHDGLYQGLSTATKDTYDALHMQALPPRRAKRSGSGVKQTLNFDLLKLAGDVESNPGPSRGHMALPVTALLLPLALLLHAARPSQFRVSPLDRTWNLGETVELKCQVLLSNPTSGCSWLFQPRGAAASPTFLLYLSQNKPKAAEGLDTQRFSGKRLGDTFVLTLSDFRRENEGYYFCSALSNSIMYFSHFVPVFLPAKPTTTPAPRPPTPAPTIASQPLSLRPEACRPAAGGAVHTRGLDFACDIYIWAPLAGTCGVLLLSLVITLYCNHRNRRRVCKCPRPVVKSGDKPSLSARYV

SEQ ID NO: 10826 - protein, 757 aa, synthetic construct
MALPVTALLLPLALLLHAARPEFNAGVTQTPKFRVLKTGQSMTLLCAQDMNHEYMYWYRQDPGMGLRLIHYSGWGKDTAKGEVPDGYNVSRLKKQNFLLGLESAAPSQTSVYFCASKVGPGQHNSPLHFGNGTRLTVTLEDLKNVFPPEVAVFEPSEAEISHTQKATLVCLATGFYPDHVELSWWVNGKEVHSGVSTDPQPLKEQPALNDSRYCLSSRLRVSATFWQNPRNHFRCQVQFYGLSENDEWTQDRAKPVTQIVSAEAWGRADCGSQSFGLLDPKLCYLLDGILFIYGVILTALFLRVKFSRSADAPAYQQGQNQLYNELNLGRREEYDVLDKRRGRDPEMGGKPQRRKNPQEGLYNELQKDKMAEAYSEIGMKGERRRGKGHDGLYQGLSTATKDTYDALHMQALPPRRAKRSGSGATNFSLLKQAGDVEENPGPTSMDWIWRILFLVGAATGAHSFEAQKVTQAQTEISVVEKEDVTLDCVYETRDTAYYLFWYKQPPSGELVFLIRQPWWGSSRGISGRYSWNFQKSTSSFNFTITASQVVDSAVYFCAMSVPDSRGHYQFTFGKGTKLSVIPTRASTKGPSVFPLAPSSKSTSGGTAALGCLVKDYFPEPVTVSWNSGALTSGVHTFPAVLQSSGLYSLSSVVTVPSSSLGTQTYICNVNHKPSNTKVDKRVEPKSCGTLGEPQLCYILDAILFLYGIVLTLLYCRLKIQVRKAAITSYEKSDGVYTGLSTRNQETYETLKHEKPPQ

SEQ ID NO: 10827 - protein, 757 aa, synthetic construct; identical to SEQ ID NO: 10826

SEQ ID NO: 10828 - protein, 748 aa, synthetic construct
MALPVTALLLPLALLLHAARPEFNAGVTQTPKFRVLKTGQSMTLLCAQDMNHEYMYWYRQDPGMGLRLIHYSGWGKDTAKGEVPDGYNVSRLKKQNFLLGLESAAPSQTSVYFCASKVGPGQHNSPLHFGNGTRLTVTLEDLKNVFPPEVAVFEPSEAEISHTQKATLVCLATGFYPDHVELSWWVNGKEVHSGVSTDPQPLKEQPALNDSRYCLSSRLRVSATFWQNPRNHFRCQVQFYGLSENDEWTQDRAKPVTQIVSAEAWGRADCGSQSFGLLDPKLCYLLDGILFIYGVILTALFLRVKFSRSADAPAYQQGQNQLYNELNLGRREEYDVLDKRRGRDPEMGGKPQRRKNPQEGLYNELQKDKMAEAYSEIGMKGERRRGKGHDGLYQGLSTATKDTYDALHMQALPPRRAKRSGSGATNFSLLKQAGDVEENPGPTSMDWIWRILFLVGAATGAHSFEAQKVTQAQTEISVVEKEDVTLDCVYETRDTAYYLFWYKQPPSGELVFLIRQPWWGSSRGISGRYSWNFQKSTSSFNFTITASQVVDSAVYFCAMSVPDSRGHYQFTFGKGTKLSVIPTRIQNPDPAVYQLRDSKSSDKSVCLFTDFDSQTNVSQSKDSDVYITDKTVLDMRSMDFKSNSAVAWSNKSDFACANAFNNSIIPEDTFFPSPESSCGTLGEPQLCYILDAILFLYGIVLTLLYCRLKIQVRKAAITSYEKSDGVYTGLSTRNQETYETLKHEKPPQ

SEQ ID NO: 10829 - protein, 997 aa, synthetic construct
MALPVTALLLPLALLLHAARPEFNAGVTQTPKFRVLKTGQSMTLLCAQDMNHEYMYWYRQDPGMGLRLIHYSGWGKDTAKGEVPDGYNVSRLKKQNFLLGLESAAPSQTSVYFCASKVGPGQHNSPLHFGNGTRLTVTLEGQPKANPTVTLFPPSSEELQANKATLVCLISDFYPGAVTVAWKADGSPVKAGVETTKPSKQSNNKYAASSYLSLTPEQWKSHRSYSCQVTHEGSTVEKTVAPTECSTTPGERSSLPAFYPGTSGSCSGCGSLSLPLLAGLVAADAVASLLIVGAVFLCARPRRSPAQEDGKVYINMPGRGRAKRSGSGATNFSLLKQAGDVEENPGPTSMDWIWRILFLVGAATGAHSFEAQKVTQAQTEISVVEKEDVTLDCVYETRDTAYYLFWYKQPPSGELVFLIRQPWWGSSRGISGRYSWNFQKSTSSFNFTITASQVVDSAVYFCAMSVPDSRGHYQFTFGKGTKLSVIPTRIQNPDPAVYQLRDSKSSDKSVCLFTDFDSQTNVSQSKDSDVYITDKTVLDMRSMDFKSNSAVAWSNKSDFACANAFNNSIIPEDTFFPSPESSCGTQSFGLLDPKLCYLLDGILFIYGVILTALFLRVKFSRSADAPAYQQGQNQLYNELNLGRREEYDVLDKRRGRDPEMGGKPQRRKNPQEGLYNELQKDKMAEAYSEIGMKGERRRGKGHDGLYQGLSTATKDTYDALHMQALPPRRAKRSGSGVKQTLNFDLLKLAGDVESNPGPSRGHMALPVTALLLPLALLLHAARPSQFRVSPLDRTWNLGETVELKCQVLLSNPTSGCSWLFQPRGAAASPTFLLYLSQNKPKAAEGLDTQRFSGKRLGDTFVLTLSDFRRENEGYYFCSALSNSIMYFSHFVPVFLPAKPTTTPAPRPPTPAPTIASQPLSLRPEACRPAAGGAVHTRGLDFACDIYIWAPLAGTCGVLLLSLVITLYCNHRNRRRVCKCPRPVVKSGDKPSLSARYV

SEQ ID NO: 10830 - protein, 1030 aa, synthetic construct
MALPVTALLLPLALLLHAARPEFNAGVTQTPKFRVLKTGQSMTLLCAQDMNHEYMYWYRQDPGMGLRLIHYSGWGKDTAKGEVPDGYNVSRLKKQNFLLGLESAAPSQTSVYFCASKVGPGQHNSPLHFGNGTRLTVTLEDLKNVFPPEVAVFEPSEAEISHTQKATLVCLATGFYPDHVELSWWVNGKEVHSGVSTDPQPLKEQPALNDSRYCLSSRLRVSATFWQNPRNHFRCQVQFYGLSENDEWTQDRAKPVTQIVSAEAWGRADCGSQSFGLLDPKLCYLLDGILFIYGVILTALFLRVKFSRSADAPAYQQGQNQLYNELNLGRREEYDVLDKRRGRDPEMGGKPQRRKNPQEGLYNELQKDKMAEAYSEIGMKGERRRGKGHDGLYQGLSTATKDTYDALHMQALPPRRAKRSGSGATNFSLLKQAGDVEENPGPTSMDWIWRILFLVGAATGAHSFEAQKVTQAQTEISVVEKEDVTLDCVYETRDTAYYLFWYKQPPSGELVFLIRQPWWGSSRGISGRYSWNFQKSTSSFNFTITASQVVDSAVYFCAMSVPDSRGHYQFTFGKGTKLSVIPTRASTKGPSVFPLAPSSKSTSGGTAALGCLVKDYFPEPVTVSWNSGALTSGVHTFPAVLQSSGLYSLSSVVTVPSSSLGTQTYICNVNHKPSNTKVDKRVEPKSCTTPGERSSLPAFYPGTSGSCSGCGSLSLPLLAGLVAADAVASLLIVGAVFLCARPRRSPAQEDGKVYINMPGRGRAKRSGSGVKQTLNFDLLKLAGDVESNPGPSRGHMALPVTALLLPLALLLHAARPSQFRVSPLDRTWNLGETVELKCQVLLSNPTSGCSWLFQPRGAAASPTFLLYLSQNKPKAAEGLDTQRFSGKRLGDTFVLTLSDFRRENEGYYFCSALSNSIMYFSHFVPVFLPAKPTTTPAPRPPTPAPTIASQPLSLRPEACRPAAGGAVHTRGLDFACDIYIWAPLAGTCGVLLLSLVITLYCNHRNRRRVCKCPRPVVKSGDKPSLSARYV

SEQ ID NO: 10831 - protein, 942 aa, synthetic construct
MALPVTALLLPLALLLHAARPNAGVTQTPKFRVLKTGQSMTLLCAQDMNHEYMYWYRQDPGMGLRLIHYSGWGKDTAKGEVPDGYNVSRLKKQNFLLGLESAAPSQTSVYFCASKVGPGQHNSPLHFGNGTRLTVTLELWVSQPPEIRTLEGSSAFLPCSFNASQGRLAIGSVTWFRDEVVPGKEVRNGTPEFRGRLAPLASSRFLHDHQAELHIRDVRGHDASIYVCRVEVLGLGVGTGNGTRLVVEKEHPQLGAGTVLLLRAGFYAVSFLSVAVGSTVYYQGKCLTWKGPRRQLPAVVPAPLPPPCGSSAHLLPPVPGGRAKRSGSGATNFSLLKQAGDVEENPGPTSMDWIWRILFLVGAATGAHSFEAQKVTQAQTEISVVEKEDVTLDCVYETRDTAYYLFWYKQPPSGELVFLIRQPWWGSSRGISGRYSWNFQKSTSSFNFTITASQVVDSAVYFCAMSVPDSRGHYQFTFGKGTKLSVIPTRLWVSQPPEIRTLEGSSAFLPCSFNASQGRLAIGSVTWFRDEVVPGKEVRNGTPEFRGRLAPLASSRFLHDHQAELHIRDVRGHDASIYVCRVEVLGLGVGTGNGTRLVVEKEHPQLGAGTVLLLRAGFYAVSFLSVAVGSTVYYQGKCLTWKGPRRQLPAVVPAPLPPPCGSSAHLLPPVPGGRAKRSGSGVKQTLNFDLLKLAGDVESNPGPSRGHMALPVTALLLPLALLLHAARPSQFRVSPLDRTWNLGETVELKCQVLLSNPTSGCSWLFQPRGAAASPTFLLYLSQNKPKAAEGLDTQRFSGKRLGDTFVLTLSDFRRENEGYYFCSALSNSIMYFSHFVPVFLPAKPTTTPAPRPPTPAPTIASQPLSLRPEACRPAAGGAVHTRGLDFACDIYIWAPLAGTCGVLLLSLVITLYCNHRNRRRVCKCPRPVVKSGDKPSLSARYV

SEQ ID NO: 10832 - protein, 1060 aa, synthetic construct
MALPVTALLLPLALLLHAARPNAGVTQTPKFRVLKTGQSMTLLCAQDMNHEYMYWYRQDPGMGLRLIHYSGWGKDTAKGEVPDGYNVSRLKKQNFLLGLESAAPSQTSVYFCASKVGPGQHNSPLHFGNGTRLTVTLEGQPKANPTVTLFPPSSEELQANKATLVCLISDFYPGAVTVAWKADGSPVKAGVETTKPSKQSNNKYAASSYLSLTPEQWKSHRSYSCQVTHEGSTVEKTVAPTECSGSQSFGLLDPKLCYLLDGILFIYGVILTALFLRVKFSRSADAPAYQQGQNQLYNELNLGRREEYDVLDKRRGRDPEMGGKPQRRKNPQEGLYNELQKDKMAEAYSEIGMKGERRRGKGHDGLYQGLSTATKDTYDALHMQALPPRRAKRSGSGATNFSLLKQAGDVEENPGPTSMDWIWRILFLVGAATGAHSFEAQKVTQAQTEISVVEKEDVTLDCVYETRDTAYYLFWYKQPPSGELVFLIRQPWWGSSRGISGRYSWNFQKSTSSFNFTITASQVVDSAVYFCAMSVPDSRGHYQFTFGKGTKLSVIPTRASTKGPSVFPLAPSSKSTSGGTAALGCLVKDYFPEPVTVSWNSGALTSGVHTFPAVLQSSGLYSLSSVVTVPSSSLGTQTYICNVNHKPSNTKVDKRVEPKSCGTQSFGLLDPKLCYLLDGILFIYGVILTALFLRVKFSRSADAPAYQQGQNQLYNELNLGRREEYDVLDKRRGRDPEMGGKPQRRKNPQEGLYNELQKDKMAEAYSEIGMKGERRRGKGHDGLYQGLSTATKDTYDALHMQALPPRRAKRSGSGVKQTLNFDLLKLAGDVESNPGPSRGHMALPVTALLLPLALLLHAARPSQFRVSPLDRTWNLGETVELKCQVLLSNPTSGCSWLFQPRGAAASPTFLLYLSQNKPKAAEGLDTQRFSGKRLGDTFVLTLSDFRRENEGYYFCSALSNSIMYFSHFVPVFLPAKPTTTPAPRPPTPAPTIASQPLSLRPEACRPAAGGAVHTRGLDFACDIYIWAPLAGTCGVLLLSLVITLYCNHRNRRRVCKCPRP

SEQ ID NO: 10833 - protein, 1093 aa, synthetic construct
MALPVTALLLPLALLLHAARPNAGVTQTPKFRVLKTGQSMTLLCAQDMNHEYMYWYRQDPGMGLRLIHYSGWGKDTAKGEVPDGYNVSRLKKQNFLLGLESAAPSQTSVYFCASKVGPGQHNSPLHFGNGTRLTVTLEGQPKANPTVTLFPPSSEELQANKATLVCLISDFYPGAVTVAWKADGSPVKAGVETTKPSKQSNNKYAASSYLSLTPEQWKSHRSYSCQVTHEGSTVEKTVAPTECSGSQSFGLLDPKLCYLLDGILFIYGVILTALFLRVKFSRSADAPAYQQGQNQLYNELNLGRREEYDVLDKRRGRDPEMGGKPQRRKNPQEGLYNELQKDKMAEAYSEIGMKGERRRGKGHDGLYQGLSTATKDTYDALHMQALPPRRAKRSGSGATNFSLLKQAGDVEENPGPTSMDWIWRILFLVGAATGAHSFEAQKVTQAQTEISVVEKEDVTLDCVYETRDTAYYLFWYKQPPSGELVFLIRQPWWGSSRGISGRYSWNFQKSTSSFNFTITASQVVDSAVYFCAMSVPDSRGHYQFTFGKGTKLSVIPTRASPTSPKVFPLSLCSTQPDGNVVIACLVQGFFPQEPLSVTWSESGQGVTARNFPPSQDASGDLYTTSSQLTLPATQCLAGKSVTCHVKHYTNPSQDVTVPCPVPSTPPTPSPSTPPTPSPSGTQSFGLLDPKLCYLLDGILFIYGVILTALFLRVKFSRSADAPAYQQGQNQLYNELNLGRREEYDVLDKRRGRDPEMGGKPQRRKNPQEGLYNELQKDKMAEAYSEIGMKGERRRGKGHDGLYQGLSTATKDTYDALHMQALPPRRAKRSGSGVKQTLNFDLLKLAGDVESNPGPSRGHMALPVTALLLPLALLLHAARPSQFRVSPLDRTWNLGETVELKCQVLLSNPTSGCSWLFQPRGAAASPTFLLYLSQNKPKAAEGLDTQRFSGKRLGDTFVLTLSDFRRENEGYYFCSALSNSIMYFSHFVPVFLPAKPTTTPAPRPPTPAPTIASQPLSLRPEACRPAAGGAVHTRGLDFACDIYIWAPLAGTCGVLLLSLVITLYCNHRNRRRVCKCPRPVVKSGDKPSLSARYV

SEQ ID NO: 10834 - protein, 1074 aa, synthetic construct
MALPVTALLLPLALLLHAARPNAGVTQTPKFRVLKTGQSMTLLCAQDMNHEYMYWYRQDPGMGLRLIHYSGWGKDTAKGEVPDGYNVSRLKKQNFLLGLESAAPSQTSVYFCASKVGPGQHNSPLHFGNGTRLTVTLEGQPKANPTVTLFPPSSEELQANKATLVCLISDFYPGAVTVAWKADGSPVKAGVETTKPSKQSNNKYAASSYLSLTPEQWKSHRSYSCQVTHEGSTVEKTVAPTECSGSQSFGLLDPKLCYLLDGILFIYGVILTALFLRVKFSRSADAPAYQQGQNQLYNELNLGRREEYDVLDKRRGRDPEMGGKPQRRKNPQEGLYNELQKDKMAEAYSEIGMKGERRRGKGHDGLYQGLSTATKDTYDALHMQALPPRRAKRSGSGATNFSLLKQAGDVEENPGPTSMDWIWRILFLVGAATGAHSFEAQKVTQAQTEISVVEKEDVTLDCVYETRDTAYYLFWYKQPPSGELVFLIRQPWWGSSRGISGRYSWNFQKSTSSFNFTITASQVVDSAVYFCAMSVPDSRGHYQFTFGKGTKLSVIPTRASTKGPSVFPLAPCSRSTSESTAALGCLVKDYFPEPVTVSWNSGALTSGVHTFPAVLQSSGLYSLSSVVTVPSSNFGTQTYTCNVDHKPSNTKVDKTVERKCGTQSFGLLDPKLCYLLDGILFIYGVILTALFLRVKFSRSADAPAYQQGQNQLYNELNLGRREEYDVLDKRRGRDPEMGGKPQRRKNPQEGLYNELQKDKMAEAYSEIGMKGERRRGKGHDGLYQGLSTATKDTYDALHMQALPPRRAKRSGSGVKQTLNFDLLKLAGDVESNPGPSRGHMALPVTALLLPLALLLHAARPSQFRVSPLDRTWNLGETVELKCQVLLSNPTSGCSWLFQPRGAAASPTFLLYLSQNKPKAAEGLDTQRFSGKRLGDTFVLTLSDFRRENEGYYFCSALSNSIMYFSHFVPVFLPAKPTTTPAPRPPTPAPTIASQPLSLRPEACRPAAGGAVHTRGLDFACDIYIWAPLAGTCGVLLLSLVITLYCNHRNRRRVCKCPRPVVKSGDKPSLSARYV

SEQ ID NO: 10835 - protein, 1131 aa, synthetic construct
MALPVTALLLPLALLLHAARPNAGVTQTPKFRVLKTGQSMTLLCAQDMNHEYMYWYRQDPGMGLRLIHYSGWGKDTAKGEVPDGYNVSRLKKQNFLLGLESAAPSQTSVYFCASKVGPGQHNSPLHFGNGTRLTVTLEGQPKANPTVTLFPPSSEELQANKATLVCLISDFYPGAVTVAWKADGSPVKAGVETTKPSKQSNNKYAASSYLSLTPEQWKSHRSYSCQVTHEGSTVEKTVAPTECSGSQSFGLLDPKLCYLLDGILFIYGVILTALFLRVKFSRSADAPAYQQGQNQLYNELNLGRREEYDVLDKRRGRDPEMGGKPQRRKNPQEGLYNELQKDKMAEAYSEIGMKGERRRGKGHDGLYQGLSTATKDTYDALHMQALPPRRAKRSGSGATNFSLLKQAGDVEENPGPTSMDWIWRILFLVGAATGAHSFEAQKVTQAQTEISVVEKEDVTLDCVYETRDTAYYLFWYKQPPSGELVFLIRQPWWGSSRGISGRYSWNFQKSTSSFNFTITASQVVDSAVYFCAMSVPDSRGHYQFTFGKGTKLSVIPTRAPTKAPDVFPIISGCRHPKDNSPVVLACLITGYHPTSVTVTWYMGTQSQPQRTFPEIQRRDSYYMTSSQLSTPLQQWRQGEYKCVVQHTASKSKKEIFRWPESPKAQASSVPTAQPQAEGSLAKATTAPATTRNTGRGGEEKKKEKEKEEQEERETKTPGTQSFGLLDPKLCYLLDGILFIYGVILTALFLRVKFSRSADAPAYQQGQNQLYNELNLGRREEYDVLDKRRGRDPEMGGKPQRRKNPQEGLYNELQKDKMAEAYSEIGMKGERRRGKGHDGLYQGLSTATKDTYDALHMQALPPRRAKRSGSGVKQTLNFDLLKLAGDVESNPGPSRGHMALPVTALLLPLALLLHAARPSQFRVSPLDRTWNLGETVELKCQVLLSNPTSGCSWLFQPRGAAASPTFLLYLSQNKPKAAEGLDTQRFSGKRLGDTFVLTLSDFRRENEGYYFCSALSNSIMYFSHFVPVFLPAKPTTTPAPRPPTPAPTIASQPLSLRPEACRPAAGGAVHTRGLDFACDIYIWAPLAGTCGVLLLSLVITLYCNHRNRRRVCKCPRPVVKSGDKPSLSARYV

SEQ ID NO: 10836 - protein, 1073 aa, synthetic construct
MALPVTALLLPLALLLHAARPNAGVTQTPKFRVLKTGQSMTLLCAQDMNHEYMYWYRQDPGMGLRLIHYSGWGKDTAKGEVPDGYNVSRLKKQNFLLGLESAAPSQTSVYFCASKVGPGQHNSPLHFGNGTRLTVTLEGQPKANPTVTLFPPSSEELQANKATLVCLISDFYPGAVTVAWKADGSPVKAGVETTKPSKQSNNKYAASSYLSLTPEQWKSHRSYSCQVTHEGSTVEKTVAPTECSGSQSFGLLDPKLCYLLDGILFIYGVILTALFLRVKFSRSADAPAYQQGQNQLYNELNLGRREEYDVLDKRRGRDPEMGGKPQRRKNPQEGLYNELQKDKMAEAYSEIGMKGERRRGKGHDGLYQGLSTATKDTYDALHMQALPPRRAKRSGSGATNFSLLKQAGDVEENPGPTSMDWIWRILFLVGAATGAHSFEAQKVTQAQTEISVVEKEDVTLDCVYETRDTAYYLFWYKQPPSGELVFLIRQPWWGSSRGISGRYSWNFQKSTSSFNFTITASQVVDSAVYFCAMSVPDSRGHYQFTFGKGTKLSVIPTRASTKGPSVFPLAPCSRSTSESTAALGCLVKDYFPEPVTVSWNSGALTSGVHTFPAVLQSSGLYSLSSVVTVPSSNFGTQTYTCNVDHKPSNTKVDKTVERKGTQSFGLLDPKLCYLLDGILFIYGVILTALFLRVKFSRSADAPAYQQGQNQLYNELNLGRREEYDVLDKRRGRDPEMGGKPQRRKNPQEGLYNELQKDKMAEAYSEIGMKGERRRGKGHDGLYQGLSTATKDTYDALHMQALPPRRAKRSGSGVKQTLNFDLLKLAGDVESNPGPSRGHMALPVTALLLPLALLLHAARPSQFRVSPLDRTWNLGETVELKCQVLLSNPTSGCSWLFQPRGAAASPTFLLYLSQNKPKAAEGLDTQRFSGKRLGDTFVLTLSDFRRENEGYYFCSALSNSIMYFSHFVPVFLPAKPTTTPAPRPPTPAPTIASQPLSLRPEACRPAAGGAVHTRGLDFACDIYIWAPLAGTCGVLLLSLVITLYCNHRNRRRVCKCPRPVVKSGDKPSLSARYV

SEQ ID NO: 10837 - protein, 1080 aa, synthetic construct
MALPVTALLLPLALLLHAARPNAGVTQTPKFRVLKTGQSMTLLCAQDMNHEYMYWYRQDPGMGLRLIHYSGWGKDTAKGEVPDGYNVSRLKKQNFLLGLESAAPSQTSVYFCASKVGPGQHNSPLHFGNGTRLTVTLEGQPKANPTVTLFPPSSEELQANKATLVCLISDFYPGAVTVAWKADGSPVKAGVETTKPSKQSNNKYAASSYLSLTPEQWKSHRSYSCQVTHEGSTVEKTVAPTECSGSQSFGLLDPKLCYLLDGILFIYGVILTALFLRVKFSRSADAPAYQQGQNQLYNELNLGRREEYDVLDKRRGRDPEMGGKPQRRKNPQEGLYNELQKDKMAEAYSEIGMKGERRRGKGHDGLYQGLSTATKDTYDALHMQALPPRRAKRSGSGATNFSLLKQAGDVEENPGPTSMDWIWRILFLVGAATGAHSFEAQKVTQAQTEISVVEKEDVTLDCVYETRDTAYYLFWYKQPPSGELVFLIRQPWWGSSRGISGRYSWNFQKSTSSFNFTITASQVVDSAVYFCAMSVPDSRGHYQFTFGKGTKLSVIPTRASPTSPKVFPLSLDSTPQDGNVVVACLVQGFFPQEPLSVTWSESGQNVTARNFPPSQDASGDLYTTSSQLTLPATQCPDGKSVTCHVKHYTNPSQDVTVPCPVPPPPPGTQSFGLLDPKLCYLLDGILFIYGVILTALFLRVKFSRSADAPAYQQGQNQLYNELNLGRREEYDVLDKRRGRDPEMGGKPQRRKNPQEGLYNELQKDKMAEAYSEIGMKGERRRGKGHDGLYQGLSTATKDTYDALHMQALPPRRAKRSGSGVKQTLNFDLLKLAGDVESNPGPSRGHMALPVTALLLPLALLLHAARPSQFRVSPLDRTWNLGETVELKCQVLLSNPTSGCSWLFQPRGAAASPTFLLYLSQNKPKAAEGLDTQRFSGKRLGDTFVLTLSDFRRENEGYYFCSALSNSIMYFSHFVPVFLPAKPTTTPAPRPPTPAPTIASQPLSLRPEACRPAAGGAVHTRGLDFACDIYIWAPLAGTCGVLLLSLVITLYCNHRNRRRVCKCPRPVVKSGDKPSLSARYV

SEQ ID NO: 10838 - protein, 1075 aa, synthetic construct
MALPVTALLLPLALLLHAARPNAGVTQTPKFRVLKTGQSMTLLCAQDMNHEYMYWYRQDPGMGLRLIHYSGWGKDTAKGEVPDGYNVSRLKKQNFLLGLESAAPSQTSVYFCASKVGPGQHNSPLHFGNGTRLTVTLEGQPKANPTVTLFPPSSEELQANKATLVCLISDFYPGAVTVAWKADGSPVKAGVETTKPSKQSNNKYAASSYLSLTPEQWKSHRSYSCQVTHEGSTVEKTVAPTECSGSQSFGLLDPKLCYLLDGILFIYGVILTALFLRVKFSRSADAPAYQQGQNQLYNELNLGRREEYDVLDKRRGRDPEMGGKPQRRKNPQEGLYNELQKDKMAEAYSEIGMKGERRRGKGHDGLYQGLSTATKDTYDALHMQALPPRRAKRSGSGATNFSLLKQAGDVEENPGPTSMDWIWRILFLVGAATGAHSFEAQKVTQAQTEISVVEKEDVTLDCVYETRDTAYYLFWYKQPPSGELVFLIRQPWWGSSRGISGRYSWNFQKSTSSFNFTITASQVVDSAVYFCAMSVPDSRGHYQFTFGKGTKLSVIPTRASTQSPSVFPLTRCCKNIPSNATSVTLGCLATGYFPEPVMVTWDTGSLNGTTMTLPATTLTLSGHYATISLLTVSGAWAKQMFTCRVAHTPSSTDWVDNKTFSGTQSFGLLDPKLCYLLDGILFIYGVILTALFLRVKFSRSADAPAYQQGQNQLYNELNLGRREEYDVLDKRRGRDPEMGGKPQRRKNPQEGLYNELQKDKMAEAYSEIGMKGERRRGKGHDGLYQGLSTATKDTYDALHMQALPPRRAKRSGSGVKQTLNFDLLKLAGDVESNPGPSRGHMALPVTALLLPLALLLHAARPSQFRVSPLDRTWNLGETVELKCQVLLSNPTSGCSWLFQPRGAAASPTFLLYLSQNKPKAAEGLDTQRFSGKRLGDTFVLTLSDFRRENEGYYFCSALSNSIMYFSHFVPVFLPAKPTTTPAPRPPTPAPTIASQPLSLRPEACRPAAGGAVHTRGLDFACDIYIWAPLAGTCGVLLLSLVITLYCNHRNRRRVCKCPRPVVKSGDKPSLSARYV

SEQ ID NO: 10839 - protein, 1075 aa, synthetic construct
MALPVTALLLPLALLLHAARPNAGVTQTPKFRVLKTGQSMTLLCAQDMNHEYMYWYRQDPGMGLRLIHYSGWGKDTAKGEVPDGYNVSRLKKQNFLLGLESAAPSQTSVYFCASKVGPGQHNSPLHFGNGTRLTVTLEGQPKANPTVTLFPPSSEELQANKATLVCLISDFYPGAVTVAWKADGSPVKAGVETTKPSKQSNNKYAASSYLSLTPEQWKSHRSYSCQVTHEGSTVEKTVAPTECSGSQSFGLLDPKLCYLLDGILFIYGVILTALFLRVKFSRSADAPAYQQGQNQLYNELNLGRREEYDVLDKRRGRDPEMGGKPQRRKNPQEGLYNELQKDKMAEAYSEIGMKGERRRGKGHDGLYQGLSTATKDTYDALHMQALPPRRAKRSGSGATNFSLLKQAGDVEENPGPTSMDWIWRILFLVGAATGAHSFEAQKVTQAQTEISVVEKEDVTLDCVYETRDTAYYLFWYKQPPSGELVFLIRQPWWGSSRGISGRYSWNFQKSTSSFNFTITASQVVDSAVYFCAMSVPDSRGHYQFTFGKGTKLSVIPTRASTKGPSVFPLAPCSRSTSESTAALGCLVKDYFPEPVTVSWNSGALTSGVHTFPAVLQSSGLYSLSSVVTVPSSSLGTKTYTCNVDHKPSNTKVDKRVESKYGGTQSFGLLDPKLCYLLDGILFIYGVILTALFLRVKFSRSADAPAYQQGQNQLYNELNLGRREEYDVLDKRRGRDPEMGGKPQRRKNPQEGLYNELQKDKMAEAYSEIGMKGERRRGKGHDGLYQGLSTATKDTYDALHMQALPPRRAKRSGSGVKQTLNFDLLKLAGDVESNPGPSRGHMALPVTALLLPLALLLHAARPSQFRVSPLDRTWNLGETVELKCQVLLSNPTSGCSWLFQPRGAAASPTFLLYLSQNKPKAAEGLDTQRFSGKRLGDTFVLTLSDFRRENEGYYFCSALSNSIMYFSHFVPVFLPAKPTTTPAPRPPTPAPTIASQPLSLRPEACRPAAGGAVHTRGLDFACDIYIWAPLAGTCGVLLLSLVITLYCNHRNRRRVCKCPRPVVKSGDKPSLSARYV

SEQ ID NO: 10840 - protein, 1075 aa, synthetic construct
MALPVTALLLPLALLLHAARPNAGVTQTPKFRVLKTGQSMTLLCAQDMNHEYMYWYRQDPGMGLRLIHYSGWGKDTAKGEVPDGYNVSRLKKQNFLLGLESAAPSQTSVYFCASKVGPGQHNSPLHFGNGTRLTVTLEGQPKANPTVTLFPPSSEELQANKATLVCLISDFYPGAVTVAWKADGSPVKAGVETTKPSKQSNNKYAASSYLSLTPEQWKSHRSYSCQVTHEGSTVEKTVAPTECSGSQSFGLLDPKLCYLLDGILFIYGVILTALFLRVKFSRSADAPAYQQGQNQLYNELNLGRREEYDVLDKRRGRDPEMGGKPQRRKNPQEGLYNELQKDKMAEAYSEIGMKGERRRGKGHDGLYQGLSTATKDTYDALHMQALPPRRAKRSGSGATNFSLLKQAGDVEENPGPTSMDWIWRILFLVGAATGAHSFEAQKVTQAQTEISVVEKEDVTLDCVYETRDTAYYLFWYKQPPSGELVFLIRQPWWGSSRGISGRYSWNFQKSTSSFNFTITASQVVDSAVYFCAMSVPDSRGHYQFTFGKGTKLSVIPTRASTKGPSVFPLAPCSRSTSESTAALGCLVKDYFPEPVTVSWNSGALTSGVHTFPAVLQSSGLYSLSSVVTVPSSNFGTQTYTCNVDHKPSNTKVDKTVERKCCGTQSFGLLDPKLCYLLDGILFIYGVILTALFLRVKFSRSADAPAYQQGQNQLYNELNLGRREEYDVLDKRRGRDPEMGGKPQRRKNPQEGLYNELQKDKMAEAYSEIGMKGERRRGKGHDGLYQGLSTATKDTYDALHMQALPPRRAKRSGSGVKQTLNFDLLKLAGDVESNPGPSRGHMALPVTALLLPLALLLHAARPSQFRVSPLDRTWNLGETVELKCQVLLSNPTSGCSWLFQPRGAAASPTFLLYLSQNKPKAAEGLDTQRFSGKRLGDTFVLTLSDFRRENEGYYFCSALSNSIMYFSHFVPVFLPAKPTTTPAPRPPTPAPTIASQPLSLRPEACRPAAGGAVHTRGLDFACDIYIWAPLAGTCGVLLLSLVITLYCNHRNRRRVCKCPRPVVKSGDKPSLSARYV

SEQ ID NO: 10841 - protein, 1090 aa, synthetic construct
MALPVTALLLPLALLLHAARPNAGVTQTPKFRVLKTGQSMTLLCAQDMNHEYMYWYRQDPGMGLRLIHYSGWGKDTAKGEVPDGYNVSRLKKQNFLLGLESAAPSQTSVYFCASKVGPGQHNSPLHFGNGTRLTVTLEDLKNVFPPEVAVFEPSEAEISHTQKATLVCLATGFYPDHVELSWWVNGKEVHSGVSTDPQPLKEQPALNDSRYCLSSRLRVSATFWQNPRNHFRCQVQFYGLSENDEWTQDRAKPVTQIVSAEAWGRADCGSQSFGLLDPKLCYLLDGILFIYGVILTALFLRVKFSRSADAPAYQQGQNQLYNELNLGRREEYDVLDKRRGRDPEMGGKPQRRKNPQEGLYNELQKDKMAEAYSEIGMKGERRRGKGHDGLYQGLSTATKDTYDALHMQALPPRRAKRSGSGATNFSLLKQAGDVEENPGPTSMDWIWRILFLVGAATGAHSFEAQKVTQAQTEISVVEKEDVTLDCVYETRDTAYYLFWYKQPPSGELVFLIRQPWWGSSRGISGRYSWNFQKSTSSFNFTITASQVVDSAVYFCAMSVPDSRGHYQFTFGKGTKLSVIPTRIQNPDPAVYQLRDSKSSDKSVCLFTDFDSQTNVSQSKDSDVYITDKTVLDMRSMDFKSNSAVAWSNKSDFACANAFNNSIIPEDTFFPSPESSCGTQSFGLLDPKLCYLLDGILFIYGVILTALFLRVKFSRSADAPAYQQGQNQLYNELNLGRREEYDVLDKRRGRDPEMGGKPQRRKNPQEGLYNELQKDKMAEAYSEIGMKGERRRGKGHDGLYQGLSTATKDTYDALHMQALPPRRAKRSGSGVKQTLNFDLLKLAGDVESNPGPSRGHMALPVTALLLPLALLLHAARPSQFRVSPLDRTWNLGETVELKCQVLLSNPTSGCSWLFQPRGAAASPTFLLYLSQNKPKAAEGLDTQRFSGKRLGDTFVLTLSDFRRENEGYYFCSALSNSIMYFSHFVPVFLPAKPTTTPAPRPPTPAPTIASQPLSLRPEACRPAAGGAVHTRGLDFACDIYIWAPLAGTCGVLLLSLVITLYCNHRNRRRVCKCPRPVVKSGDKPSLSARYV

SEQ ID NO: 10842 - protein, 1090 aa, synthetic construct
MALPVTALLLPLALLLHAARPNAGVTQTPKFRVLKTGQSMTLLCAQDMNHEYMYWYRQDPGMGLRLIHYSGWGKDTAKGEVPDGYNVSRLKKQNFLLGLESAAPSQTSVYFCASKVGPGQHNSPLHFGNGTRLTVTLEDLKNVFPPEVAVFEPSKAEIAHTQKATLVCLATGFYPDHVELSWWVNGKEVHSGVCTDPQPLKEQPALNDSRYCLSSRLRVSATFWQNPRNHFRCQVQFYGLSENDEWTQDRAKPVTQIVSAEAWGRADCGSQSFGLLDPKLCYLLDGILFIYGVILTALFLRVKFSRSADAPAYQQGQNQLYNELNLGRREEYDVLDKRRGRDPEMGGKPQRRKNPQEGLYNELQKDKMAEAYSEIGMKGERRRGKGHDGLYQGLSTATKDTYDALHMQALPPRRAKRSGSGATNFSLLKQAGDVEENPGPTSMDWIWRILFLVGAATGAHSFEAQKVTQAQTEISVVEKEDVTLDCVYETRDTAYYLFWYKQPPSGELVFLIRQPWWGSSRGISGRYSWNFQKSTSSFNFTITASQVVDSAVYFCAMSVPDSRGHYQFTFGKGTKLSVIPTRIQNPDPAVYQLRDSKSSDKSVCLFTDFDSQTNVSQSKDSDVYITDKCVLDMRSMDFKSNSAVAWSNKSDFACANAFNNSIIPEDTFFPSSDVPCGTQSFGLLDPKLCYLLDGILFIYGVILTALFLRVKFSRSADAPAYQQGQNQLYNELNLGRREEYDVLDKRRGRDPEMGGKPQRRKNPQEGLYNELQKDKMAEAYSEIGMKGERRRGKGHDGLYQGLSTATKDTYDALHMQALPPRRAKRSGSGVKQTLNFDLLKLAGDVESNPGPSRGHMALPVTALLLPLALLLHAARPSQFRVSPLDRTWNLGETVELKCQVLLSNPTSGCSWLFQPRGAAASPTFLLYLSQNKPKAAEGLDTQRFSGKRLGDTFVLTLSDFRRENEGYYFCSALSNSIMYFSHFVPVFLPAKPTTTPAPRPPTPAPTIASQPLSLRPEACRPAAGGAVHTRGLDFACDIYIWAPLAGTCGVLLLSLVITLYCNHRNRRRVCKCPRPVVKSGDKPSLSARYV

SEQ ID NO: 10843 - protein, 821 aa, synthetic construct
MALPVTALLLPLALLLHAARPNAGVTQTPKFRVLKTGQSMTLLCAQDMNHEYMYWYRQDPGMGLRLIHYSGWGKDTAKGEVPDGYNVSRLKKQNFLLGLESAAPSQTSVYFCASKVGPGQHNSPLHFGNGTRLTVTLEDLKNVFPPEVAVFEPSEAEISHTQKATLVCLATGFYPDHVELSWWVNGKEVHSGVCTDPQPLKEQPALNDSRYCLSSRLRVSATFWQNPRNHFRCQVQFYGLSENDEWTQDRAKPVTQIVSAEAWGRADCGSQSFGLLDPKLCYLLDGILFIYGVILTALFLRVKFSRSADAPAYQQGQNQLYNELNLGRREEYDVLDKRRGRDPEMGGKPQRRKNPQEGLYNELQKDKMAEAYSEIGMKGERRRGKGHDGLYQGLSTATKDTYDALHMQALPPRRAKRSGSGATNFSLLKQAGDVEENPGPTSMDWIWRILFLVGAATGAHSFEAQKVTQAQTEISVVEKEDVTLDCVYETRDTAYYLFWYKQPPSGELVFLIRQPWWGSSRGISGRYSWNFQKSTSSFNFTITASQVVDSAVYFCAMSVPDSRGHYQFTFGKGTKLSVIPTRIQNPDPAVYQLRDSKSSDKSVCLFTDFDSQTNVSQSKDSDVYITDKCVLDMRSMDFKSNSAVAWSNKSDFACANAFNNSIIPEDTFFPSPESSCGTQSFGLLDPKLCYLLDGILFIYGVILTALFLRVKFSRSADAPAYQQGQNQLYNELNLGRREEYDVLDKRRGRDPEMGGKPQRRKNPQEGLYNELQKDKMAEAYSEIGMKGERRRGKGHDGLYQGLSTATKDTYDALHMQALPPR

SEQ ID NO: 10844 - protein, 862 aa, synthetic construct
MALPVTALLLPLALLLHAARPNAGVTQTPKFRVLKTGQSMTLLCAQDMNHEYMYWYRQDPGMGLRLIHYSGWGKDTAKGEVPDGYNVSRLKKQNFLLGLESAAPSQTSVYFCASKVGPGQHNSPLHFGNGTRLTVTLEQSFGLLDPKLCYLLDGILFIYGVILTALFLRVKFSRSADAPAYQQGQNQLYNELNLGRREEYDVLDKRRGRDPEMGGKPQRRKNPQEGLYNELQKDKMAEAYSEIGMKGERRRGKGHDGLYQGLSTATKDTYDALHMQALPPRRAKRSGSGATNFSLLKQAGDVEENPGPTSMDWIWRILFLVGAATGAHSFEAQKVTQAQTEISVVEKEDVTLDCVYETRDTAYYLFWYKQPPSGELVFLIRQPWWGSSRGISGRYSWNFQKSTSSFNFTITASQVVDSAVYFCAMSVPDSRGHYQFTFGKGTKLSVIPTRQSFGLLDPKLCYLLDGILFIYGVILTALFLRVKFSRSADAPAYQQGQNQLYNELNLGRREEYDVLDKRRGRDPEMGGKPQRRKNPQEGLYNELQKDKMAEAYSEIGMKGERRRGKGHDGLYQGLSTATKDTYDALHMQALPPRRAKRSGSGVKQTLNFDLLKLAGDVESNPGPSRGHMALPVTALLLPLALLLHAARPSQFRVSPLDRTWNLGETVELKCQVLLSNPTSGCSWLFQPRGAAASPTFLLYLSQNKPKAAEGLDTQRFSGKRLGDTFVLTLSDFRRENEGYYFCSALSNSIMYFSHFVPVFLPAKPTTTPAPRPPTPAPTIASQPLSLRPEACRPAAGGAVHTRGLDFACDIYIWAPLAGTCGVLLLSLVITLYCNHRNRRRVCKCPRPVVKSGDKPSLSARYV

SEQ ID NO: 10845 - protein, 862 aa, synthetic construct
MALPVTALLLPLALLLHAARPNAGVTQTPKFRVLKTGQSMTLLCAQDMNHEYMYWYRQDPGMGLRLIHYSGWGKDTAKGEVPDGYNVSRLKKQNFLLGLESAAPSQTSVYFCASKVGPGQHNSPLHFGNGTRLTVTLEDLKNVFPPEVAVFEPSEAEISHTQKATLVCLATGFYPDHVELSWWVNGKEVHSGVCTDPQPLKEQPALNDSRYCLSSRLRVSATFWQNPRNHFRCQVQFYGLSENDEWTQDRAKPVTQIVSAEAWGRADCGSQSFGLLDPKLCYLLDGILFIYGVILTALFLRSKRSRLLHSDYMNMTPRRPGPTRKHYQPYAPPRDFAAYRSRVKFSRSADAPAYQQGQNQLYNELNLGRREEYDVLDKRRGRDPEMGGKPQRRKNPQEGLYNELQKDKMAEAYSEIGMKGERRRGKGHDGLYQGLSTATKDTYDALHMQALPPRRAKRSGSGATNFSLLKQAGDVEENPGPTSMDWIWRILFLVGAATGAHSFEAQKVTQAQTEISVVEKEDVTLDCVYETRDTAYYLFWYKQPPSGELVFLIRQPWWGSSRGISGRYSWNFQKSTSSFNFTITASQVVDSAVYFCAMSVPDSRGHYQFTFGKGTKLSVIPTRIQNPDPAVYQLRDSKSSDKSVCLFTDFDSQTNVSQSKDSDVYITDKCVLDMRSMDFKSNSAVAWSNKSDFACANAFNNSIIPEDTFFPSPESSCGTQSFGLLDPKLCYLLDGILFIYGVILTALFLRVKFSRSADAPAYQQGQNQLYNELNLGRREEYDVLDKRRGRDPEMGGKPQRRKNPQEGLYNELQKDKMAEAYSEIGMKGERRRGKGHDGLYQGLSTATKDTYDALHMQALPPR

SEQ ID NO: 10846 - protein, 903 aa, synthetic construct
MALPVTALLLPLALLLHAARPNAGVTQTPKFRVLKTGQSMTLLCAQDMNHEYMYWYRQDPGMGLRLIHYSGWGKDTAKGEVPDGYNVSRLKKQNFLLGLESAAPSQTSVYFCASKVGPGQHNSPLHFGNGTRLTVTLEDLKNVFPPEVAVFEPSEAEISHTQKATLVCLATGFYPDHVELSWWVNGKEVHSGVCTDPQPLKEQPALNDSRYCLSSRLRVSATFWQNPRNHFRCQVQFYGLSENDEWTQDRAKPVTQIVSAEAWGRADCGSQSFGLLDPKLCYLLDGILFIYGVILTALFLRSKRSRLLHSDYMNMTPRRPGPTRKHYQPYAPPRDFAAYRSRVKFSRSADAPAYQQGQNQLYNELNLGRREEYDVLDKRRGRDPEMGGKPQRRKNPQEGLYNELQKDKMAEAYSEIGMKGERRRGKGHDGLYQGLSTATKDTYDALHMQALPPRRAKRSGSGATNFSLLKQAGDVEENPGPTSMDWIWRILFLVGAATGAHSFEAQKVTQAQTEISVVEKEDVTLDCVYETRDTAYYLFWYKQPPSGELVFLIRQPWWGSSRGISGRYSWNFQKSTSSFNFTITASQVVDSAVYFCAMSVPDSRGHYQFTFGKGTKLSVIPTRIQNPDPAVYQLRDSKSSDKSVCLFTDFDSQTNVSQSKDSDVYITDKCVLDMRSMDFKSNSAVAWSNKSDFACANAFNNSIIPEDTFFPSPESSCGTQSFGLLDPKLCYLLDGILFIYGVILTALFLRSKRSRLLHSDYMNMTPRRPGPTRKHYQPYAPPRDFAAYRSRVKFSRSADAPAYQQGQNQLYNELNLGRREEYDVLDKRRGRDPEMGGKPQRRKNPQEGLYNELQKDKMAEAYSEIGMKGERRRGKGHDGLYQGLSTATKDTYDALHMQALPPR

SEQ ID NO: 10847 - protein, 821 aa, synthetic construct
MALPVTALLLPLALLLHAARPNAGVTQTPKFRVLKTGQSMTLLCAQDMNHEYMYWYRQDPGMGLRLIHYSGWGKDTAKGEVPDGYNVSRLKKQNFLLGLESAAPSQTSVYFCASKVGPGQHNSPLHFGNGTRLTVTLEDLKNVFPPEVAVFEPSEAEISHTQKATLVCLATGFYPDHVELSWWVNGKEVHSGVSTDPQPLKEQPALNDSRYCLSSRLRVSATFWQNPRNHFRCQVQFYGLSENDEWTQDRAKPVTQIVSAEAWGRADCGSQSFGLLDPKLCYLLDGILFIYGVILTALFLRVKFSRSADAPAYQQGQNQLYNELNLGRREEYDVLDKRRGRDPEMGGKPQRRKNPQEGLYNELQKDKMAEAYSEIGMKGERRRGKGHDGLYQGLSTATKDTYDALHMQALPPRRAKRSGSGATNFSLLKQAGDVEENPGPTSMDWIWRILFLVGAATGAHSFEAQKVTQAQTEISVVEKEDVTLDCVYETRDTAYYLFWYKQPPSGELVFLIRQPWWGSSRGISGRYSWNFQKSTSSFNFTITASQVVDSAVYFCAMSVPDSRGHYQFTFGKGTKLSVIPTRIQNPDPAVYQLRDSKSSDKSVCLFTDFDSQTNVSQSKDSDVYITDKTVLDMRSMDFKSNSAVAWSNKSDFACANAFNNSIIPEDTFFPSPESSCGTQSFGLLDPKLCYLLDGILFIYGVILTALFLRVKFSRSADAPAYQQGQNQLYNELNLGRREEYDVLDKRRGRDPEMGGKPQRRKNPQEGLYNELQKDKMAEAYSEIGMKGERRRGKGHDGLYQGLSTATKDTYDALHMQALPPR

SEQ ID NO: 10848 - protein, 1065 aa, synthetic construct
MALPVTALLLPLALLLHAARPNAGVTQTPKFRVLKTGQSMTLLCAQDMNHEYMYWYRQDPGMGLRLIHYSGWGKDTAKGEVPDGYNVSRLKKQNFLLGLESAAPSQTSVYFCASKVGPGQHNSPLHFGNGTRLTVTLEDKQLDADVSPKPTIFLPSIAETKLQKAGTYLCLLEKFFPDVIKIHWQEKKSNTILGSQEGNTMKTNDTYMKFSWLTVPEKSLDKEHRCIVRHENNKNGVDQEIIFPPIKTDVITGSQSFGLLDPKLCYLLDGILFIYGVILTALFLRVKFSRSADAPAYQQGQNQLYNELNLGRREEYDVLDKRRGRDPEMGGKPQRRKNPQEGLYNELQKDKMAEAYSEIGMKGERRRGKGHDGLYQGLSTATKDTYDALHMQALPPRRAKRSGSGATNFSLLKQAGDVEENPGPTSMDWIWRILFLVGAATGAHSFEAQKVTQAQTEISVVEKEDVTLDCVYETRDTAYYLFWYKQPPSGELVFLIRQPWWGSSRGISGRYSWNFQKSTSSFNFTITASQVVDSAVYFCAMSVPDSRGHYQFTFGKGTKLSVIPTRSQPHTKPSVFVMKNGTNVACLVKEFYPKDIRINLVSSKKITEFDPAIVISPSGKYNAVKLGKYEDSNSVTCSVQHDNKTVHSTDFGTQSFGLLDPKLCYLLDGILFIYGVILTALFLRVKFSRSADAPAYQQGQNQLYNELNLGRREEYDVLDKRRGRDPEMGGKPQRRKNPQEGLYNELQKDKMAEAYSEIGMKGERRRGKGHDGLYQGLSTATKDTYDALHMQALPPRRAKRSGSGVKQTLNFDLLKLAGDVESNPGPSRGHMALPVTALLLPLALLLHAARPSQFRVSPLDRTWNLGETVELKCQVLLSNPTSGCSWLFQPRGAAASPTFLLYLSQNKPKAAEGLDTQRFSGKRLGDTFVLTLSDFRRENEGYYFCSALSNSIMYFSHFVPVFLPAKPTTTPAPRPPTPAPTIASQPLSLRPEACRPAAGGAVHTRGLDFACDIYIWAPLAGTCGVLLLSLVITLYCNHRNRRRVCKCPRPVVKSGDKPSLSARYV

SEQ ID NO: 10849 - protein, 933 aa, synthetic construct
MALPVTALLLPLALLLHAARPNAGVTQTPKFRVLKTGQSMTLLCAQDMNHEYMYWYRQDPGMGLRLIHYSGWGKDTAKGEVPDGYNVSRLKKQNFLLGLESAAPSQTSVYFCASKVGPGQHNSPLHFGNGTRLTVTLEGQPKANPTVTLFPPSSEELQANKATLVCLISDFYPGAVTVAWKADGSPVKAGVETTKPSKQSNNKYAASSYLSLTPEQWKSHRSYSCQVTHEGSTVEKTVAPTECSTTPGERSSLPAFYPGTSGSCSGCGSLSLPLLAGLVAADAVASLLIVGAVFLCARPRRSPAQEDGKVYINMPGRGRAKRSGSGATNFSLLKQAGDVEENPGPTSMDWIWRILFLVGAATGAHSFEAQKVTQAQTEISVVEKEDVTLDCVYETRDTAYYLFWYKQPPSGELVFLIRQPWWGSSRGISGRYSWNFQKSTSSFNFTITASQVVDSAVYFCAMSVPDSRGHYQFTFGKGTKLSVIPTRASTKGPSVFPLAPSSKSTSGGTAALGCLVKDYFPEPVTVSWNSGALTSGVHTFPAVLQSSGLYSLSSVVTVPSSSLGTQTYICNVNHKPSNTKVDKRVEPKSCTTPGERSSLPAFYPGTSGSCSGCGSLSLPLLAGLVAADAVASLLIVGAVFLCARPRRSPAQEDGKVYINMPGRGRAKRSGSGVKQTLNFDLLKLAGDVESNPGPSRGHMALPVTALLLPLALLLHAARPSQFRVSPLDRTWNLGETVELKCQVLLSNPTSGCSWLFQPRGAAASPTFLLYLSQNKPKAAEGLDTQRFSGKRLGDTFVLTLSDFRRENEGYYFCSALSNSIMYFSHFVPVFLPAKPTTTPAPRPPTPAPTIASQPLSLRPEACRPAAGGAVHTRGLDFACDIYIWAPLAGTCGVLLLSLVITLYCNHRNRRRVCKCPRPVVKSGDKPSLSARYV

SEQ ID NO: 10850 - protein, 762 aa, synthetic construct
MALPVTALLLPLALLLHAARPNAGVTQTPKFRVLKTGQSMTLLCAQDMNHEYMYWYRQDPGMGLRLIHYSGWGKDTAKGEVPDGYNVSRLKKQNFLLGLESAAPSQTSVYFCASKVGPGQHNSPLHFGNGTRLTVTLEGDIENTSLAPEDPTFPADTWGTYLLTTETGLQKDHALWDHTAQNLLRMGLAFLVLVALVWFLVEDWLSRKRTRERASRASTWEGRRRLNTQTLRAKRSGSGATNFSLLKQAGDVEENPGPTSMDWIWRILFLVGAATGAHSFEAQKVTQAQTEISVVEKEDVTLDCVYETRDTAYYLFWYKQPPSGELVFLIRQPWWGSSRGISGRYSWNFQKSTSSFNFTITASQVVDSAVYFCAMSVPDSRGHYQFTFGKGTKLSVIPTRGDIENTSLAPEDPTFPADTWGTYLLTTETGLQKDHALWDHTAQNLLRMGLAFLVLVALVWFLVEDWLSRKRTRERASRASTWEGRRRLNTQTLRAKRSGSGVKQTLNFDLLKLAGDVESNPGPSRGHMALPVTALLLPLALLLHAARPSQFRVSPLDRTWNLGETVELKCQVLLSNPTSGCSWLFQPRGAAASPTFLLYLSQNKPKAAEGLDTQRFSGKRLGDTFVLTLSDFRRENEGYYFCSALSNSIMYFSHFVPVFLPAKPTTTPAPRPPTPAPTIASQPLSLRPEACRPAAGGAVHTRGLDFACDIYIWAPLAGTCGVLLLSLVITLYCNHRNRRRVCKCPRPVVKSGDKPSLSARYV

SEQ ID NO: 10851 - protein, 706 aa, synthetic construct
MALPVTALLLPLALLLHAARPNAGVTQTPKFRVLKTGQSMTLLCAQDMNHEYMYWYRQDPGMGLRLIHYSGWGKDTAKGEVPDGYNVSRLKKQNFLLGLESAAPSQTSVYFCASKVGPGQHNSPLHFGNGTRLTVTLEITQGLAVSTISSFFPPGYQVSFCLVMVLLFAVDTGLYFSVKTNIRSSTRDWKDHKFKWRKDPQDKRAKRSGSGATNFSLLKQAGDVEENPGPTSMDWIWRILFLVGAATGAHSFEAQKVTQAQTEISVVEKEDVTLDCVYETRDTAYYLFWYKQPPSGELVFLIRQPWWGSSRGISGRYSWNFQKSTSSFNFTITASQVVDSAVYFCAMSVPDSRGHYQFTFGKGTKLSVIPTRITQGLAVSTISSFFPPGYQVSFCLVMVLLFAVDTGLYFSVKTNIRSSTRDWKDHKFKWRKDPQDKRAKRSGSGVKQTLNFDLLKLAGDVESNPGPSRGHMALPVTALLLPLALLLHAARPSQFRVSPLDRTWNLGETVELKCQVLLSNPTSGCSWLFQPRGAAASPTFLLYLSQNKPKAAEGLDTQRFSGKRLGDTFVLTLSDFRRENEGYYFCSALSNSIMYFSHFVPVFLPAKPTTTPAPRPPTPAPTIASQPLSLRPEACRPAAGGAVHTRGLDFACDIYIWAPLAGTCGVLLLSLVITLYCNHRNRRRVCKCPRPVVKSGDKPSLSARYV

SEQ ID NO: 10852 - protein, 790 aa, synthetic construct
MALPVTALLLPLALLLHAARPGITQSPKYLFRKEGQNVTLSCEQNLNHDAMYWYRQDPGQGLRLIYYSQIVNDFQKGDIAEGYSVSREKKESFPLTVTSAQKNPTAFYLCASSPGALYEQYFGPGTRLTVTGQPKANPTVTLFPPSSEELQANKATLVCLISDFYPGAVTVAWKADGSPVKAGVETTKPSKQSNNKYAASSYLSLTPEQWKSHRSYSCQVTHEGSTVEKTVAPTECSGSQSFGLLDPKLCYLLDGILFIYGVILTALFLRVKFSRSADAPAYQQGQNQLYNELNLGRREEYDVLDKRRGRDPEMGGKPQRRKNPQEGLYNELQKDKMAEAYSEIGMKGERRRGKGHDGLYQGLSTATKDTYDALHMQALPPRRAKRSGSGATNFSLLKQAGDVEENPGPTSMDWIWRILFLVGAATGAHSFEENVEQHPSTLSVQEGDSAVIKCTYSDSASNYFPWYKQELGKRPQLIIDIRSNVGEKKDQRIAVTLNKTAKHFSLHITETQPEDSAVYFCAATEDYQLIWGAGTKLIIKPDASTKGPSVFPLAPSSKSTSGGTAALGCLVKDYFPEPVTVSWNSGALTSGVHTFPAVLQSSGLYSLSSVVTVPSSSLGTQTYICNVNHKPSNTKVDKRVEPKSCGTQSFGLLDPKLCYLLDGILFIYGVILTALFLRVKFSRSADAPAYQQGQNQLYNELNLGRREEYDVLDKRRGRDPEMGGKPQRRKNPQEGLYNELQKDKMAEAYSEIGMKGERRRGKGHDGLYQGLSTATKDTYDALHMQALPPR

SEQ ID NO: 10853 - protein, 556 aa, synthetic construct
MALPVTALLLPLALLLHAARPGITQSPKYLFRKEGQNVTLSCEQNLNHDAMYWYRQDPGQGLRLIYYSQIVNDFQKGDIAEGYSVSREKKESFPLTVTSAQKNPTAFYLCASSPGALYEQYFGPGTRLTVTLEQSFGLLDPKLCYLLDGILFIYGVILTALFLRVKFSRSADAPAYQQGQNQLYNELNLGRREEYDVLDKRRGRDPEMGGKPQRRKNPQEGLYNELQKDKMAEAYSEIGMKGERRRGKGHDGLYQGLSTATKDTYDALHMQALPPRRAKRSGSGATNFSLLKQAGDVEENPGPTSMDWIWRILFLVGAATGAHSFEENVEQHPSTLSVQEGDSAVIKCTYSDSASNYFPWYKQELGKRPQLIIDIRSNVGEKKDQRIAVTLNKTAKHFSLHITETQPEDSAVYFCAATEDYQLIWGAGTKLIIKPDTRQSFGLLDPKLCYLLDGILFIYGVILTALFLRVKFSRSADAPAYQQGQNQLYNELNLGRREEYDVLDKRRGRDPEMGGKPQRRKNPQEGLYNELQKDKMAEAYSEIGMKGERRRGKGHD

SEQ ID NO: 10854 - protein, 940 aa, synthetic construct
MALPVTALLLPLALLLHAARPGITQSPKYLFRKEGQNVTLSCEQNLNHDAMYWYRQDPGQGLRLIYYSQIVNDFQKGDIAEGYSVSREKKESFPLTVTSAQKNPTAFYLCASSPGALYEQYFGPGTRLTVTLETTPGERSSLPAFYPGTSGSCSGCGSLSLPLLAGLVAADAVASLLIVGAVFLCARPRRSPAQEDGKVYINMPGRGSTSRVKFSRSADAPAYQQGQNQLYNELNLGRREEYDVLDKRRGRDPEMGGKPQRRKNPQEGLYNELQKDKMAEAYSEIGMKGERRRGKGHDGLYQGLSTATKDTYDALHMQALPPRRAKRSGSGATNFSLLKQAGDVEENPGPMDWIWRILFLVGAATGAHSFEENVEQHPSTLSVQEGDSAVIKCTYSDSASNYFPWYKQELGKRPQLIIDIRSNVGEKKDQRIAVTLNKTAKHFSLHITETQPEDSAVYFCAATEDYQLIWGAGTKLIIKPDTRTTPGERSSLPAFYPGTSGSCSGCGSLSLPLLAGLVAADAVASLLIVGAVFLCARPRRSPAQEDGKVYINMPGRGSSRRVKFSRSADAPAYQQGQNQLYNELNLGRREEYDVLDKRRGRDPEMGGKPQRRKNPQEGLYNELQKDKMAEAYSEIGMKGERRRGKGHDGLYQGLSTATKDTYDALHMQALPPRRAKRSGSGVKQTLNFDLLKLAGDVESNPGPGHMALPVTALLLPLALLLHAARPSQFRVSPLDRTWNLGETVELKCQVLLSNPTSGCSWLFQPRGAAASPTFLLYLSQNKPKAAEGLDTQRFSGKRLGDTFVLTLSDFRRENEGYYFCSALSNSIMYFSHFVPVFLPAKPTTTPAPRPPTPAPTIASQPLSLRPEACRPAAGGAVHTRGLDFACDIYIWAPLAGTCGVLLLSLVITLYCNHRNRRRVCKCPRPVVKSGDKPSLSARYV

SEQ ID NO: 10855 - protein, 940 aa, synthetic construct; identical to SEQ ID NO: 10854

SEQ ID NO: 10856 - protein, 1106 aa, synthetic construct
MALPVTALLLPLALLLHAARPGITQSPKYLFRKEGQNVTLSCEQNLNHDAMYWYRQDPGQGLRLIYYSQIVNDFQKGDIAEGYSVSREKKESFPLTVTSAQKNPTAFYLCASSPGALYEQYFGPGTRLTVTLEGQPKANPTVTLFPPSSEELQANKATLVCLISDFYPGAVTVAWKADGSPVKAGVETTKPSKQSNNKYAASSYLSLTPEQWKSHRSYSCQVTHEGSTVEKTVAPTECSGSTTPGERSSLPAFYPGTSGSCSGCGSLSLPLLAGLVAADAVASLLIVGAVFLCARPRRSPAQEDGKVYINMPGRGSTSRVKFSRSADAPAYQQGQNQLYNELNLGRREEYDVLDKRRGRDPEMGGKPQRRKNPQEGLYNELQKDKMAEAYSEIGMKGERRRGKGHDGLYQGLSTATKDTYDALHMQALPPRRAKRSGSGATNFSLLKQAGDVEENPGPMDWIWRILFLVGAATGAHSFEENVEQHPSTLSVQEGDSAVIKCTYSDSASNYFPWYKQELGKRPQLIIDIRSNVGEKKDQRIAVTLNKTAKHFSLHITETQPEDSAVYFCAATEDYQLIWGAGTKLIIKPDTRASTKGPSVFPLAPSSKSTSGGTAALGCLVKDYFPEPVTVSWNSGALTSGVHTFPAVLQSSGLYSLSSVVTVPSSSLGTQTYICNVNHKPSNTKVDKRVEPKSCGTTTPGERSSLPAFYPGTSGSCSGCGSLSLPLLAGLVAADAVASLLIVGAVFLCARPRRSPAQEDGKVYINMPGRGSSRRVKFSRSADAPAYQQGQNQLYNELNLGRREEYDVLDKRRGRDPEMGGKPQRRKNPQEGLYNELQKDKMAEAYSEIGMKGERRRGKGHDGLYQGLSTATKDTYDALHMQALPPRRAKRSGSGVKQTLNFDLLKLAGDVESNPGPGHMATYEVLCEVARKLGTDDREVVLFLLNVFIPQPTLAQLIGALRALKEEGRLTFPLLAECLFRAGRRDLLRDLLHLDPRFLERHLAGTMSYFSPYQLTVLHVDGELCARDIRSLIFLSKDTIGSRSTPQTFLHWVYCMENLDLLGPTDVDALMSMLRSLSRVDLQRQVQTLMGLHLSGPSHSQHYRHTP

SEQ ID NO: 10857 - protein, 1159 aa, synthetic construct
MALPVTALLLPLALLLHAARPGITQSPKYLFRKEGQNVTLSCEQNLNHDAMYWYRQDPGQGLRLIYYSQIVNDFQKGDIAEGYSVSREKKESFPLTVTSAQKNPTAFYLCASSPGALYEQYFGPGTRLTVTLEGQPKANPTVTLFPPSSEELQANKATLVCLISDFYPGAVTVAWKADGSPVKAGVETTKPSKQSNNKYAASSYLSLTPEQWKSHRSYSCQVTHEGSTVEKTVAPTECSGSTTPGERSSLPAFYPGTSGSCSGCGSLSLPLLAGLVAADAVASLLIVGAVFLCARPRRSPAQEDGKVYINMPGRGSTSRVKFSRSADAPAYQQGQNQLYNELNLGRREEYDVLDKRRGRDPEMGGKPQRRKNPQEGLYNELQKDKMAEAYSEIGMKGERRRGKGHDGLYQGLSTATKDTYDALHMQALPPRRAKRSGSGATNFSLLKQAGDVEENPGPMDWIWRILFLVGAATGAHSFEENVEQHPSTLSVQEGDSAVIKCTYSDSASNYFPWYKQELGKRPQLIIDIRSNVGEKKDQRIAVTLNKTAKHFSLHITETQPEDSAVYFCAATEDYQLIWGAGTKLIIKPDTRASTKGPSVFPLAPSSKSTSGGTAALGCLVKDYFPEPVTVSWNSGALTSGVHTFPAVLQSSGLYSLSSVVTVPSSSLGTQTYICNVNHKPSNTKVDKRVEPKSCGTTTPGERSSLPAFYPGTSGSCSGCGSLSLPLLAGLVAADAVASLLIVGAVFLCARPRRSPAQEDGKVYINMPGRGSSRRVKFSRSADAPAYQQGQNQLYNELNLGRREEYDVLDKRRGRDPEMGGKPQRRKNPQEGLYNELQKDKMAEAYSEIGMKGERRRGKGHDGLYQGLSTATKDTYDALHMQALPPRRAKRSGSGVKQTLNFDLLKLAGDVESNPGPGHMSDSKEVPSLPFLRHLLEELDSHEDSLLLFLCHDAAPGCTTVTQALCSLSQQRKLTLAALVEMLYVLQRMDLLKSRFGLSKEGAEQLLGTSFLTRYRKLMVCVGEELDSSELRALRLFACNLNPSLSTALSESSRFVELVLALENVGLVSPSSVSVLADMLRTLRRLDLCQQLVEYEQQEQARYRYCYAASPSLPVRTLRRGHGASEHEQLCMPVQESSDSPELLRTPVQESSSDSPEQTT

SEQ ID NO: 10858 - protein, 1153 aa, synthetic construct
MALPVTALLLPLALLLHAARPGITQSPKYLFRKEGQNVTLSCEQNLNHDAMYWYRQDPGQGLRLIYYSQIVNDFQKGDIAEGYSVSREKKESFPLTVTSAQKNPTAFYLCASSPGALYEQYFGPGTRLTVTLEGQPKANPTVTLFPPSSEELQANKATLVCLISDFYPGAVTVAWKADGSPVKAGVETTKPSKQSNNKYAASSYLSLTPEQWKSHRSYSCQVTHEGSTVEKTVAPTECSGSTTPGERSSLPAFYPGTSGSCSGCGSLSLPLLAGLVAADAVASLLIVGAVFLCARPRRSPAQEDGKVYINMPGRGSTSRVKFSRSADAPAYQQGQNQLYNELNLGRREEYDVLDKRRGRDPEMGGKPQRRKNPQEGLYNELQKDKMAEAYSEIGMKGERRRGKGHDGLYQGLSTATKDTYDALHMQALPPRRAKRSGSGATNFSLLKQAGDVEENPGPMDWIWRILFLVGAATGAHSFEENVEQHPSTLSVQEGDSAVIKCTYSDSASNYFPWYKQELGKRPQLIIDIRSNVGEKKDQRIAVTLNKTAKHFSLHITETQPEDSAVYFCAATEDYQLIWGAGTKLIIKPDTRASTKGPSVFPLAPSSKSTSGGTAALGCLVKDYFPEPVTVSWNSGALTSGVHTFPAVLQSSGLYSLSSVVTVPSSSLGTQTYICNVNHKPSNTKVDKRVEPKSCGTTTPGERSSLPAFYPGTSGSCSGCGSLSLPLLAGLVAADAVASLLIVGAVFLCARPRRSPAQEDGKVYINMPGRGSSRRVKFSRSADAPAYQQGQNQLYNELNLGRREEYDVLDKRRGRDPEMGGKPQRRKNPQEGLYNELQKDKMAEAYSEIGMKGERRRGKGHDGLYQGLSTATKDTYDALHMQALPPRRAKRSGSGVKQTLNFDLLKLAGDVESNPGPGHMALPVTALLLPLALLLHAARPSQFRVSPLDRTWNLGETVELKCQVLLSNPTSGCSWLFQPRGAAASPTFLLYLSQNKPKAAEGLDTQRFSGKRLGDTFVLTLSDFRRENEGYYFCSALSNSIMYFSHFVPVFLPAKPTTTPAPRPPTPAPTIASQPLSLRPEACRPAAGGAVHTRGLDFACDIYIWAPLAGTCGVLLLSLVITLYCNHRNRRRVCKCPRPVVKSGDKPSLSARYV

SEQ ID NO: 10859 - protein, 1290 aa, synthetic construct
MALPVTALLLPLALLLHAARPEVQLVESGGGLVQAGGSLRLSCAASGRTFSMGWFRQAPGKEREFVAAITYSGGSPYYADSVKGRFTISRDNAKNTVYLQMNSLKPEDTAVYYCAANPTYGSDWNAENWGQGTQVTVSSGTGGGGSGGGGSGGGGSEFGITQSPKYLFRKEGQNVTLSCEQNLNHDAMYWYRQDPGQGLRLIYYSQIVNDFQKGDIAEGYSVSREKKESFPLTVTSAQKNPTAFYLCASSPGALYEQYFGPGTRLTVTLEGQPKANPTVTLFPPSSEELQANKATLVCLISDFYPGAVTVAWKADGSPVKAGVETTKPSKQSNNKYAASSYLSLTPEQWKSHRSYSCQVTHEGSTVEKTVAPTECSGSTTPGERSSLPAFYPGTSGSCSGCGSLSLPLLAGLVAADAVASLLIVGAVFLCARPRRSPAQEDGKVYINMPGRGSTSRVKFSRSADAPAYQQGQNQLYNELNLGRREEYDVLDKRRGRDPEMGGKPQRRKNPQEGLYNELQKDKMAEAYSEIGMKGERRRGKGHDGLYQGLSTATKDTYDALHMQALPPRRAKRSGSGATNFSLLKQAGDVEENPGPMDWIWRILFLVGAATGAHSFEENVEQHPSTLSVQEGDSAVIKCTYSDSASNYFPWYKQELGKRPQLIIDIRSNVGEKKDQRIAVTLNKTAKHFSLHITETQPEDSAVYFCAATEDYQLIWGAGTKLIIKPDTRASTKGPSVFPLAPSSKSTSGGTAALGCLVKDYFPEPVTVSWNSGALTSGVHTFPAVLQSSGLYSLSSVVTVPSSSLGTQTYICNVNHKPSNTKVDKRVEPKSCGTTTPGERSSLPAFYPGTSGSCSGCGSLSLPLLAGLVAADAVASLLIVGAVFLCARPRRSPAQEDGKVYINMPGRGSSRRVKFSRSADAPAYQQGQNQLYNELNLGRREEYDVLDKRRGRDPEMGGKPQRRKNPQEGLYNELQKDKMAEAYSEIGMKGERRRGKGHDGLYQGLSTATKDTYDALHMQALPPRRAKRSGSGVKQTLNFDLLKLAGDVESNPGPGHMALPVTALLLPLALLLHAARPSQFRVSPLDRTWNLGETVELKCQVLLSNPTSGCSWLFQPRGAAASPTFLLYLSQNKPKAAEGLDTQRFSGKRLGDTFVLTLSDFRRENEGYYFCSALSNSIMYFSHFVPVFLPAKPTTTPAPRPPTPAPTIASQPLSLRPEACRPAAGGAVHTRGLDFACDIYIWAPLAGTCGVLLLSLVITLYCNHRNRRRVCKCPRPVVKSGDKPSLSARYV

SEQ ID NO: 10860 - protein, 1427 aa, synthetic construct
MALPVTALLLPLALLLHAARPEVQLVESGGGLVQAGGSLRLSCAASGRTFSMGWFRQAPGKEREFVAAITYSGGSPYYADSVKGRFTISRDNAKNTVYLQMNSLKPEDTAVYYCAANPTYGSDWNAENWGQGTQVTVSSGTGGGGSGGGGSGGGGSEFGITQSPKYLFRKEGQNVTLSCEQNLNHDAMYWYRQDPGQGLRLIYYSQIVNDFQKGDIAEGYSVSREKKESFPLTVTSAQKNPTAFYLCASSPGALYEQYFGPGTRLTVTLEGQPKANPTVTLFPPSSEELQANKATLVCLISDFYPGAVTVAWKADGSPVKAGVETTKPSKQSNNKYAASSYLSLTPEQWKSHRSYSCQVTHEGSTVEKTVAPTECSGSTTPGERSSLPAFYPGTSGSCSGCGSLSLPLLAGLVAADAVASLLIVGAVFLCARPRRSPAQEDGKVYINMPGRGSTSRVKFSRSADAPAYQQGQNQLYNELNLGRREEYDVLDKRRGRDPEMGGKPQRRKNPQEGLYNELQKDKMAEAYSEIGMKGERRRGKGHDGLYQGLSTATKDTYDALHMQALPPRRAKRSGSGATNFSLLKQAGDVEENPGPMDWIWRILFLVGAATGAHSGPEVQLVESGGGLVQAGGSLRLSCAASGRTFTMGWFRQAPGKEREFVAAISLSPTLAYYADSVKGRFTISRDNAKNTVVLQMNSLKPEDTALYYCAADRKSVMSIRPDYWGQGTQVTVSSGSGGGGSGGGGSGGGGSFEENVEQHPSTLSVQEGDSAVIKCTYSDSASNYFPWYKQELGKRPQLIIDIRSNVGEKKDQRIAVTLNKTAKHFSLHITETQPEDSAVYFCAATEDYQLIWGAGTKLIIKPDTRASTKGPSVFPLAPSSKSTSGGTAALGCLVKDYFPEPVTVSWNSGALTSGVHTFPAVLQSSGLYSLSSVVTVPSSSLGTQTYICNVNHKPSNTKVDKRVEPKSCGTTTPGERSSLPAFYPGTSGSCSGCGSLSLPLLAGLVAADAVASLLIVGAVFLCARPRRSPAQEDGKVYINMPGRGSSRRVKFSRSADAPAYQQGQNQLYNELNLGRREEYDVLDKRRGRDPEMGGKPQRRKNPQEGLYNELQKDKMAEAYSEIGMKGERRRGKGHDGLYQGLSTATKDTYDALHMQALPPRRAKRSGSGVKQTLNFDLLKLAGDVESNPGPGHMALPVTALLLPLALLLHAARPSQFRVSPLDRTWNLGETVELKCQVLLSNPTSGCSWLFQPRGAAASPTFLLYLSQNKPKAAEGLDTQRFSGKRLGDTFVLTLSDFRRENEGYYFCSALSNSIMYFSHFVPVFLPAKPTTTPAPRPPTPAPTIASQPLSLRPEACRPAAGGAVHTRGLDFACDIYIWAPLAGTCGVLLLSLVITLYCNHRNRRRVCKCPRPVVKSGDKPSLSARYV

SEQ ID NO: 10861 - protein, 811 aa, synthetic construct
MALPVTALLLPLALLLHAARPEFGITQSPKYLFRKEGQNVTLSCEQNLNHDAMYWYRQDPGQGLRLIYYSQIVNDFQKGDIAEGYSVSREKKESFPLTVTSAQKNPTAFYLCASSPGALYEQYFGPGTRLTVTLEDLKNVFPPEVAVFEPSEAEISHTQKATLVCLATGFYPDHVELSWWVNGKEVHSGVSTDPQPLKEQPALNDSRYCLSSRLRVSATFWQNPRNHFRCQVQFYGLSENDEWTQDRAKPVTQIVSAEAWGRADCGSQSFGLLDPKLCYLLDGILFIYGVILTALFLRVKFSRSADAPAYQQGQNQLYNELNLGRREEYDVLDKRRGRDPEMGGKPQRRKNPQEGLYNELQKDKMAEAYSEIGMKGERRRGKGHDGLYQGLSTATKDTYDALHMQALPPRRAKRSGSGATNFSLLKQAGDVEENPGPTSMDWIWRILFLVGAATGAHSFEENVEQHPSTLSVQEGDSAVIKCTYSDSASNYFPWYKQELGKRPQLIIDIRSNVGEKKDQRIAVTLNKTAKHFSLHITETQPEDSAVYFCAATEDYQLIWGAGTKLIIKPDTRIQNPDPAVYQLRDSKSSDKSVCLFTDFDSQTNVSQSKDSDVYITDKTVLDMRSMDFKSNSAVAWSNKSDFACANAFNNSIIPEDTFFPSPESSCGTQSFGLLDPKLCYLLDGILFIYGVILTALFLRVKFSRSADAPAYQQGQNQLYNELNLGRREEYDVLDKRRGRDPEMGGKPQRRKNPQEGLYNELQKDKMAEAYSEIGMKGERRRGKGHDGLYQGLSTATKDTYDALHMQALPPR

SEQ ID NO: 10862 - protein, 853 aa, synthetic construct
MALPVTALLLPLALLLHAARPEFGITQSPKYLFRKEGQNVTLSCEQNLNHDAMYWYRQDPGQGLRLIYYSQIVNDFQKGDIAEGYSVSREKKESFPLTVTSAQKNPTAFYLCASSPGALYEQYFGPGTRLTVTLEDLKNVFPPEVAVFEPSEAEISHTQKATLVCLATGFYPDHVELSWWVNGKEVHSGVSTDPQPLKEQPALNDSRYCLSSRLRVSATFWQNPRNHFRCQVQFYGLSENDEWTQDRAKPVTQIVSAEAWGRADCGSQSFGLLDPKLCYLLDGILFIYGVILTALFLRVKFSRSADAPAYQQGQNQLYNELNLGRREEYDVLDKRRGRDPEMGGKPQRRKNPQEGLYNELQKDKMAEAYSEIGMKGERRRGKGHDGLYQGLSTATKDTYDALHMQALPPRRAKRSGSGATNFSLLKQAGDVEENPGPTSMDWIWRILFLVGAATGAHSFEENVEQHPSTLSVQEGDSAVIKCTYSDSASNYFPWYKQELGKRPQLIIDIRSNVGEKKDQRIAVTLNKTAKHFSLHITETQPEDSAVYFCAATEDYQLIWGAGTKLIIKPDTRIQNPDPAVYQLRDSKSSDKSVCLFTDFDSQTNVSQSKDSDVYITDKTVLDMRSMDFKSNSAVAWSNKSDFACANAFNNSIIPEDTFFPSPESSCGTQSFGLLDPKLCYLLDGILFIYGVILTALFLKRGRKKLLYIFKQPFMRPVQTTQEEDGCSCRFPEEEEGGCELRVKFSRSADAPAYQQGQNQLYNELNLGRREEYDVLDKRRGRDPEMGGKPQRRKNPQEGLYNELQKDKMAEAYSEIGMKGERRRGKGHDGLYQGLSTATKDTYDALHMQALPPR

SEQ ID NO: 10863 - protein, 852 aa, synthetic construct
MALPVTALLLPLALLLHAARPEFGITQSPKYLFRKEGQNVTLSCEQNLNHDAMYWYRQDPGQGLRLIYYSQIVNDFQKGDIAEGYSVSREKKESFPLTVTSAQKNPTAFYLCASSPGALYEQYFGPGTRLTVTLEDLKNVFPPEVAVFEPSEAEISHTQKATLVCLATGFYPDHVELSWWVNGKEVHSGVSTDPQPLKEQPALNDSRYCLSSRLRVSATFWQNPRNHFRCQVQFYGLSENDEWTQDRAKPVTQIVSAEAWGRADCGSQSFGLLDPKLCYLLDGILFIYGVILTALFLRVKFSRSADAPAYQQGQNQLYNELNLGRREEYDVLDKRRGRDPEMGGKPQRRKNPQEGLYNELQKDKMAEAYSEIGMKGERRRGKGHDGLYQGLSTATKDTYDALHMQALPPRRAKRSGSGATNFSLLKQAGDVEENPGPTSMDWIWRILFLVGAATGAHSFEENVEQHPSTLSVQEGDSAVIKCTYSDSASNYFPWYKQELGKRPQLIIDIRSNVGEKKDQRIAVTLNKTAKHFSLHITETQPEDSAVYFCAATEDYQLIWGAGTKLIIKPDTRIQNPDPAVYQLRDSKSSDKSVCLFTDFDSQTNVSQSKDSDVYITDKTVLDMRSMDFKSNSAVAWSNKSDFACANAFNNSIIPEDTFFPSPESSCGTQSFGLLDPKLCYLLDGILFIYGVILTALFLRSKRSRLLHSDYMNMTPRRPGPTRKHYQPYAPPRDFAAYRSRVKFSRSADAPAYQQGQNQLYNELNLGRREEYDVLDKRRGRDPEMGGKPQRRKNPQEGLYNELQKDKMAEAYSEIGMKGERRRGKGHDGLYQGLSTATKDTYDALHMQALPPR

SEQ ID NO: 10864 - protein, 847 aa, synthetic construct
MALPVTALLLPLALLLHAARPEFGITQSPKYLFRKEGQNVTLSCEQNLNHDAMYWYRQDPGQGLRLIYYSQIVNDFQKGDIAEGYSVSREKKESFPLTVTSAQKNPTAFYLCASSPGALYEQYFGPGTRLTVTLEDLKNVFPPEVAVFEPSEAEISHTQKATLVCLATGFYPDHVELSWWVNGKEVHSGVSTDPQPLKEQPALNDSRYCLSSRLRVSATFWQNPRNHFRCQVQFYGLSENDEWTQDRAKPVTQIVSAEAWGRADCGSQSFGLLDPKLCYLLDGILFIYGVILTALFLRVKFSRSADAPAYQQGQNQLYNELNLGRREEYDVLDKRRGRDPEMGGKPQRRKNPQEGLYNELQKDKMAEAYSEIGMKGERRRGKGHDGLYQGLSTATKDTYDALHMQALPPRRAKRSGSGATNFSLLKQAGDVEENPGPTSMDWIWRILFLVGAATGAHSFEENVEQHPSTLSVQEGDSAVIKCTYSDSASNYFPWYKQELGKRPQLIIDIRSNVGEKKDQRIAVTLNKTAKHFSLHITETQPEDSAVYFCAATEDYQLIWGAGTKLIIKPDTRIQNPDPAVYQLRDSKSSDKSVCLFTDFDSQTNVSQSKDSDVYITDKTVLDMRSMDFKSNSAVAWSNKSDFACANAFNNSIIPEDTFFPSPESSCGTQSFGLLDPKLCYLLDGILFIYGVILTALFLRDQRLPPDAHKPPGGGSFRTPIQEEQADAHSTLAKIRVKFSRSADAPAYQQGQNQLYNELNLGRREEYDVLDKRRGRDPEMGGKPQRRKNPQEGLYNELQKDKMAEAYSEIGMKGERRRGKGHDGLYQGLSTATKDTYDALHMQALPPR

SEQ ID NO: 10865 - protein, 931 aa, synthetic construct
MALPVTALLLPLALLLHAARPEFGITQSPKYLFRKEGQNVTLSCEQNLNHDAMYWYRQDPGQGLRLIYYSQIVNDFQKGDIAEGYSVSREKKESFPLTVTSAQKNPTAFYLCASSPGALYEQYFGPGTRLTVTLEDLKNVFPPEVAVFEPSEAEISHTQKATLVCLATGFYPDHVELSWWVNGKEVHSGVSTDPQPLKEQPALNDSRYCLSSRLRVSATFWQNPRNHFRCQVQFYGLSENDEWTQDRAKPVTQIVSAEAWGRADCGSQSFGLLDPKLCYLLDGILFIYGVILTALFLRVKFSRSADAPAYQQGQNQLYNELNLGRREEYDVLDKRRGRDPEMGGKPQRRKNPQEGLYNELQKDKMAEAYSEIGMKGERRRGKGHDGLYQGLSTATKDTYDALHMQALPPRRAKRSGSGATNFSLLKQAGDVEENPGPTSMDWIWRILFLVGAATGAHSFEENVEQHPSTLSVQEGDSAVIKCTYSDSASNYFPWYKQELGKRPQLIIDIRSNVGEKKDQRIAVTLNKTAKHFSLHITETQPEDSAVYFCAATEDYQLIWGAGTKLIIKPDTRIQNPDPAVYQLRDSKSSDKSVCLFTDFDSQTNVSQSKDSDVYITDKTVLDMRSMDFKSNSAVAWSNKSDFACANAFNNSIIPEDTFFPSPESSCGTQSFGLLDPKLCYLLDGILFIYGVILTALFLWRRKRKEKQSETSPKEFLTIYEDVKDLKTRRNHEQEQTFPGGGSTIYSMIQSQSSAPTSQEPAYTLYSLIQPSRKSGSRKRNHSPSFNSTIYEVIGKSQPKAQNPARLSRKELENFDVYSRVKFSRSADAPAYQQGQNQLYNELNLGRREEYDVLDKRRGRDPEMGGKPQRRKNPQEGLYNELQKDKMAEAYSEIGMKGERRRGKGHDGLYQGLSTATKDTYDALHMQALPPR

SEQ ID NO: 10866 - protein, 894 aa, synthetic construct
MALPVTALLLPLALLLHAARPEFGITQSPKYLFRKEGQNVTLSCEQNLNHDAMYWYRQDPGQGLRLIYYSQIVNDFQKGDIAEGYSVSREKKESFPLTVTSAQKNPTAFYLCASSPGALYEQYFGPGTRLTVTLEDLKNVFPPEVAVFEPSEAEISHTQKATLVCLATGFYPDHVELSWWVNGKEVHSGVSTDPQPLKEQPALNDSRYCLSSRLRVSATFWQNPRNHFRCQVQFYGLSENDEWTQDRAKPVTQIVSAEAWGRADCGSQSFGLLDPKLCYLLDGILFIYGVILTALFLRSKRSRLLHSDYMNMTPRRPGPTRKHYQPYAPPRDFAAYRSRVKFSRSADAPAYQQGQNQLYNELNLGRREEYDVLDKRRGRDPEMGGKPQRRKNPQEGLYNELQKDKMAEAYSEIGMKGERRRGKGHDGLYQGLSTATKDTYDALHMQALPPRRAKRSGSGATNFSLLKQAGDVEENPGPTSMDWIWRILFLVGAATGAHSFEENVEQHPSTLSVQEGDSAVIKCTYSDSASNYFPWYKQELGKRPQLIIDIRSNVGEKKDQRIAVTLNKTAKHFSLHITETQPEDSAVYFCAATEDYQLIWGAGTKLIIKPDTRIQNPDPAVYQLRDSKSSDKSVCLFTDFDSQTNVSQSKDSDVYITDKTVLDMRSMDFKSNSAVAWSNKSDFACANAFNNSIIPEDTFFPSPESSCGTQSFGLLDPKLCYLLDGILFIYGVILTALFLKRGRKKLLYIFKQPFMRPVQTTQEEDGCSCRFPEEEEGGCELRVKFSRSADAPAYQQGQNQLYNELNLGRREEYDVLDKRRGRDPEMGGKPQRRKNPQEGLYNELQKDKMAEAYSEIGMKGERRRGKGHDGLYQGLSTATKDTYDALHMQALPPR

SEQ ID NO: 10867 - protein, 893 aa, synthetic construct
MALPVTALLLPLALLLHAARPEFGITQSPKYLFRKEGQNVTLSCEQNLNHDAMYWYRQDPGQGLRLIYYSQIVNDFQKGDIAEGYSVSREKKESFPLTVTSAQKNPTAFYLCASSPGALYEQYFGPGTRLTVTLEDLKNVFPPEVAVFEPSEAEISHTQKATLVCLATGFYPDHVELSWWVNGKEVHSGVSTDPQPLKEQPALNDSRYCLSSRLRVSATFWQNPRNHFRCQVQFYGLSENDEWTQDRAKPVTQIVSAEAWGRADCGSQSFGLLDPKLCYLLDGILFIYGVILTALFLRSKRSRLLHSDYMNMTPRRPGPTRKHYQPYAPPRDFAAYRSRVKFSRSADAPAYQQGQNQLYNELNLGRREEYDVLDKRRGRDPEMGGKPQRRKNPQEGLYNELQKDKMAEAYSEIGMKGERRRGKGHDGLYQGLSTATKDTYDALHMQALPPRRAKRSGSGATNFSLLKQAGDVEENPGPTSMDWIWRILFLVGAATGAHSFEENVEQHPSTLSVQEGDSAVIKCTYSDSASNYFPWYKQELGKRPQLIIDIRSNVGEKKDQRIAVTLNKTAKHFSLHITETQPEDSAVYFCAATEDYQLIWGAGTKLIIKPDTRIQNPDPAVYQLRDSKSSDKSVCLFTDFDSQTNVSQSKDSDVYITDKTVLDMRSMDFKSNSAVAWSNKSDFACANAFNNSIIPEDTFFPSPESSCGTQSFGLLDPKLCYLLDGILFIYGVILTALFLRSKRSRLLHSDYMNMTPRRPGPTRKHYQPYAPPRDFAAYRSRVKFSRSADAPAYQQGQNQLYNELNLGRREEYDVLDKRRGRDPEMGGKPQRRKNPQEGLYNELQKDKMAEAYSEIGMKGERRRGKGHDGLYQGLSTATKDTYDALHMQALPPR

SEQ ID NO: 10868 - protein, 894 aa, synthetic construct; identical to SEQ ID NO: 10866

SEQ ID NO: 10869 - protein, 811 aa, synthetic construct
MALPVTALLLPLALLLHAARPEFGITQSPKYLFRKEGQNVTLSCEQNLNHDAMYWYRQDPGQGLRLIYYSQIVNDFQKGDIAEGYSVSREKKESFPLTVTSAQKNPTAFYLCASSPGALYEQYFGPGTRLTVTLEDLKNVFPPEVAVFEPSEAEISHTQKATLVCLATGFYPDHVELSWWVNGKEVHSGVSTDPQPLKEQPALNDSRYCLSSRLRVSATFWQNPRNHFRCQVQFYGLSENDEWTQDRAKPVTQIVSAEAWGRADCGSQSFGLLDPKLCYLLDGILFIYGVILTALFLRVKFSRSADAPAYQQGQNQLYNELNLGRREEYDVLDKRRGRDPEMGGKPQRRKNPQEGLFNELQKDKMAEAFSEIGMKGERRRGKGHDGLFQGLSTATKDTFDALHMQALPPRRAKRSGSGATNFSLLKQAGDVEENPGPTSMDWIWRILFLVGAATGAHSFEENVEQHPSTLSVQEGDSAVIKCTYSDSASNYFPWYKQELGKRPQLIIDIRSNVGEKKDQRIAVTLNKTAKHFSLHITETQPEDSAVYFCAATEDYQLIWGAGTKLIIKPDTRIQNPDPAVYQLRDSKSSDKSVCLFTDFDSQTNVSQSKDSDVYITDKTVLDMRSMDFKSNSAVAWSNKSDFACANAFNNSIIPEDTFFPSPESSCGTQSFGLLDPKLCYLLDGILFIYGVILTALFLRVKFSRSADAPAYQQGQNQLYNELNLGRREEYDVLDKRRGRDPEMGGKPQRRKNPQEGLYNELQKDKMAEAYSEIGMKGERRRGKGHDGLYQGLSTATKDTYDALHMQALPPR

SEQ ID NO: 10870 - protein, 811 aa, synthetic construct; identical to SEQ ID NO: 10869

SEQ ID NO: 10871 - protein, 853 aa, synthetic construct
MALPVTALLLPLALLLHAARPEFGITQSPKYLFRKEGQNVTLSCEQNLNHDAMYWYRQDPGQGLRLIYYSQIVNDFQKGDIAEGYSVSREKKESFPLTVTSAQKNPTAFYLCASSPGALYEQYFGPGTRLTVTLEDLKNVFPPEVAVFEPSEAEISHTQKATLVCLATGFYPDHVELSWWVNGKEVHSGVSTDPQPLKEQPALNDSRYCLSSRLRVSATFWQNPRNHFRCQVQFYGLSENDEWTQDRAKPVTQIVSAEAWGRADCGSQSFGLLDPKLCYLLDGILFIYGVILTALFLRVKFSRSADAPAYQQGQNQLYNELNLGRREEYDVLDKRRGRDPEMGGKPQRRKNPQEGLFNELQKDKMAEAFSEIGMKGERRRGKGHDGLFQGLSTATKDTFDALHMQALPPRRAKRSGSGATNFSLLKQAGDVEENPGPTSMDWIWRILFLVGAATGAHSFEENVEQHPSTLSVQEGDSAVIKCTYSDSASNYFPWYKQELGKRPQLIIDIRSNVGEKKDQRIAVTLNKTAKHFSLHITETQPEDSAVYFCAATEDYQLIWGAGTKLIIKPDTRIQNPDPAVYQLRDSKSSDKSVCLFTDFDSQTNVSQSKDSDVYITDKTVLDMRSMDFKSNSAVAWSNKSDFACANAFNNSIIPEDTFFPSPESSCGTQSFGLLDPKLCYLLDGILFIYGVILTALFLKRGRKKLLYIFKQPFMRPVQTTQEEDGCSCRFPEEEEGGCELRVKFSRSADAPAYQQGQNQLYNELNLGRREEYDVLDKRRGRDPEMGGKPQRRKNPQEGLYNELQKDKMAEAYSEIGMKGERRRGKGHDGLYQGLSTATKDTYDALHMQALPPR

SEQ ID NO: 10872 - protein, 852 aa, synthetic construct
MALPVTALLLPLALLLHAARPEFGITQSPKYLFRKEGQNVTLSCEQNLNHDAMYWYRQDPGQGLRLIYYSQIVNDFQKGDIAEGYSVSREKKESFPLTVTSAQKNPTAFYLCASSPGALYEQYFGPGTRLTVTLEDLKNVFPPEVAVFEPSEAEISHTQKATLVCLATGFYPDHVELSWWVNGKEVHSGVSTDPQPLKEQPALNDSRYCLSSRLRVSATFWQNPRNHFRCQVQFYGLSENDEWTQDRAKPVTQIVSAEAWGRADCGSQSFGLLDPKLCYLLDGILFIYGVILTALFLRVKFSRSADAPAYQQGQNQLYNELNLGRREEYDVLDKRRGRDPEMGGKPQRRKNPQEGLFNELQKDKMAEAFSEIGMKGERRRGKGHDGLFQGLSTATKDTFDALHMQALPPRRAKRSGSGATNFSLLKQAGDVEENPGPTSMDWIWRILFLVGAATGAHSFEENVEQHPSTLSVQEGDSAVIKCTYSDSASNYFPWYKQELGKRPQLIIDIRSNVGEKKDQRIAVTLNKTAKHFSLHITETQPEDSAVYFCAATEDYQLIWGAGTKLIIKPDTRIQNPDPAVYQLRDSKSSDKSVCLFTDFDSQTNVSQSKDSDVYITDKTVLDMRSMDFKSNSAVAWSNKSDFACANAFNNSIIPEDTFFPSPESSCGTQSFGLLDPKLCYLLDGILFIYGVILTALFLRSKRSRLLHSDYMNMTPRRPGPTRKHYQPYAPPRDFAAYRSRVKFSRSADAPAYQQGQNQLYNELNLGRREEYDVLDKRRGRDPEMGGKPQRRKNPQEGLYNELQKDKMAEAYSEIGMKGERRRGKGHDGLYQGLSTATKDTYDALHMQALPPR

SEQ ID NO: 10873 - protein, 847 aa, synthetic construct
MALPVTALLLPLALLLHAARPEFGITQSPKYLFRKEGQNVTLSCEQNLNHDAMYWYRQDPGQGLRLIYYSQIVNDFQKGDIAEGYSVSREKKESFPLTVTSAQKNPTAFYLCASSPGALYEQYFGPGTRLTVTLEDLKNVFPPEVAVFEPSEAEISHTQKATLVCLATGFYPDHVELSWWVNGKEVHSGVSTDPQPLKEQPALNDSRYCLSSRLRVSATFWQNPRNHFRCQVQFYGLSENDEWTQDRAKPVTQIVSAEAWGRADCGSQSFGLLDPKLCYLLDGILFIYGVILTALFLRVKFSRSADAPAYQQGQNQLYNELNLGRREEYDVLDKRRGRDPEMGGKPQRRKNPQEGLFNELQKDKMAEAFSEIGMKGERRRGKGHDGLFQGLSTATKDTFDALHMQALPPRRAKRSGSGATNFSLLKQAGDVEENPGPTSMDWIWRILFLVGAATGAHSFEENVEQHPSTLSVQEGDSAVIKCTYSDSASNYFPWYKQELGKRPQLIIDIRSNVGEKKDQRIAVTLNKTAKHFSLHITETQPEDSAVYFCAATEDYQLIWGAGTKLIIKPDTRIQNPDPAVYQLRDSKSSDKSVCLFTDFDSQTNVSQSKDSDVYITDKTVLDMRSMDFKSNSAVAWSNKSDFACANAFNNSIIPEDTFFPSPESSCGTQSFGLLDPKLCYLLDGILFIYGVILTALFLRDQRLPPDAHKPPGGGSFRTPIQEEQADAHSTLAKIRVKFSRSADAPAYQQGQNQLYNELNLGRREEYDVLDKRRGRDPEMGGKPQRRKNPQEGLYNELQKDKMAEAYSEIGMKGERRRGKGHDGLYQGLSTATKDTYDALHMQALPPR

SEQ ID NO: 10874 - protein, 931 aa, synthetic construct
MALPVTALLLPLALLLHAARPEFGITQSPKYLFRKEGQNVTLSCEQNLNHDAMYWYRQDPGQGLRLIYYSQIVNDFQKGDIAEGYSVSREKKESFPLTVTSAQKNPTAFYLCASSPGALYEQYFGPGTRLTVTLEDLKNVFPPEVAVFEPSEAEISHTQKATLVCLATGFYPDHVELSWWVNGKEVHSGVSTDPQPLKEQPALNDSRYCLSSRLRVSATFWQNPRNHFRCQVQFYGLSENDEWTQDRAKPVTQIVSAEAWGRADCGSQSFGLLDPKLCYLLDGILFIYGVILTALFLRVKFSRSADAPAYQQGQNQLYNELNLGRREEYDVLDKRRGRDPEMGGKPQRRKNPQEGLFNELQKDKMAEAFSEIGMKGERRRGKGHDGLFQGLSTATKDTFDALHMQALPPRRAKRSGSGATNFSLLKQAGDVEENPGPTSMDWIWRILFLVGAATGAHSFEENVEQHPSTLSVQEGDSAVIKCTYSDSASNYFPWYKQELGKRPQLIIDIRSNVGEKKDQRIAVTLNKTAKHFSLHITETQPEDSAVYFCAATEDYQLIWGAGTKLIIKPDTRIQNPDPAVYQLRDSKSSDKSVCLFTDFDSQTNVSQSKDSDVYITDKTVLDMRSMDFKSNSAVAWSNKSDFACANAFNNSIIPEDTFFPSPESSCGTQSFGLLDPKLCYLLDGILFIYGVILTALFLWRRKRKEKQSETSPKEFLTIYEDVKDLKTRRNHEQEQTFPGGGSTIYSMIQSQSSAPTSQEPAYTLYSLIQPSRKSGSRKRNHSPSFNSTIYEVIGKSQPKAQNPARLSRKELENFDVYSRVKFSRSADAPAYQQGQNQLYNELNLGRREEYDVLDKRRGRDPEMGGKPQRRKNPQEGLYNELQKDKMAEAYSEIGMKGERRRGKGHDGLYQGLSTATKDTYDALHMQALPPR

SEQ ID NO: 10875 - protein, 852 aa, synthetic construct; identical to SEQ ID NO: 10872

SEQ ID NO: 10876 - protein, 853 aa, synthetic construct; identical to SEQ ID NO: 10871

SEQ ID NO: 10877 - protein, 811 aa, synthetic construct
MALPVTALLLPLALLLHAARPEFGITQSPKYLFRKEGQNVTLSCEQNLNHDAMYWYRQDPGQGLRLIYYSQIVNDFQKGDIAEGYSVSREKKESFPLTVTSAQKNPTAFYLCASSPGALYEQYFGPGTRLTVTLEDLKNVFPPEVAVFEPSEAEISHTQKATLVCLATGFYPDHVELSWWVNGKEVHSGVSTDPQPLKEQPALNDSRYCLSSRLRVSATFWQNPRNHFRCQVQFYGLSENDEWTQDRAKPVTQIVSAEAWGRADCGSQSFGLLDPKLCYLLDGILFIYGVILTALFLRVKFSRSADAPAYQQGQNQLYNELNLGRREEYDVLDKRRGRDPEMGGKPQRRKNPQEGLFNELQKDKMAEAFSEIGMKGERRRGKGHDGLFQGLSTATKDTFDALHMQALPPRRAKRSGSGATNFSLLKQAGDVEENPGPTSMDWIWRILFLVGAATGAHSFEENVEQHPSTLSVQEGDSAVIKCTYSDSASNYFPWYKQELGKRPQLIIDIRSNVGEKKDQRIAVTLNKTAKHFSLHITETQPEDSAVYFCAATEDYQLIWGAGTKLIIKPDTRIQNPDPAVYQLRDSKSSDKSVCLFTDFDSQTNVSQSKDSDVYITDKTVLDMRSMDFKSNSAVAWSNKSDFACANAFNNSIIPEDTFFPSPESSCGTQSFGLLDPKLSYLLDGILFIYGVILTALFLRVKFSRSADAPAYQQGQNQLYNELNLGRREEYDVLDKRRGRDPEMGGKPQRRKNPQEGLYNELQKDKMAEAYSEIGMKGERRRGKGHDGLYQGLSTATKDTYDALHMQALPPR

SEQ ID NO: 10878 - protein, 811 aa, synthetic construct; identical to SEQ ID NO: 10877

SEQ ID NO: 10879 - protein, 811 aa, synthetic construct
MALPVTALLLPLALLLHAARPEFGITQSPKYLFRKEGQNVTLSCEQNLNHDAMYWYRQDPGQGLRLIYYSQIVNDFQKGDIAEGYSVSREKKESFPLTVTSAQKNPTAFYLCASSPGALYEQYFGPGTRLTVTLEDLKNVFPPEVAVFEPSEAEISHTQKATLVCLATGFYPDHVELSWWVNGKEVHSGVSTDPQPLKEQPALNDSRYCLSSRLRVSATFWQNPRNHFRCQVQFYGLSENDEWTQDRAKPVTQIVSAEAWGRADCGSQSFGLLDPKLSYLLDGILFIYGVILTALFLRVKFSRSADAPAYQQGQNQLYNELNLGRREEYDVLDKRRGRDPEMGGKPQRRKNPQEGLYNELQKDKMAEAYSEIGMKGERRRGKGHDGLYQGLSTATKDTYDALHMQALPPRRAKRSGSGATNFSLLKQAGDVEENPGPTSMDWIWRILFLVGAATGAHSFEENVEQHPSTLSVQEGDSAVIKCTYSDSASNYFPWYKQELGKRPQLIIDIRSNVGEKKDQRIAVTLNKTAKHFSLHITETQPEDSAVYFCAATEDYQLIWGAGTKLIIKPDTRIQNPDPAVYQLRDSKSSDKSVCLFTDFDSQTNVSQSKDSDVYITDKTVLDMRSMDFKSNSAVAWSNKSDFACANAFNNSIIPEDTFFPSPESSCGTQSFGLLDPKLSYLLDGILFIYGVILTALFLRVKFSRSADAPAYQQGQNQLYNELNLGRREEYDVLDKRRGRDPEMGGKPQRRKNPQEGLYNELQKDKMAEAYSEIGMKGERRRGKGHDGLYQGLSTATKDTYDALHMQALPPR

SEQ ID NO: 10880 - protein, 715 aa, synthetic construct
MALPVTALLLPLALLLHAARPEFGITQSPKYLFRKEGQNVTLSCEQNLNHDAMYWYRQDPGQGLRLIYYSQIVNDFQKGDIAEGYSVSREKKESFPLTVTSAQKNPTAFYLCASSPGALYEQYFGPGTRLTVTLEDLKNVFPPEVAVFEPSEAEISHTQKATLVCLATGFYPDHVELSWWVNGKEVHSGVSTDPQPLKEQPALNDSRYCLSSRLRVSATFWQNPRNHFRCQVQFYGLSENDEWTQDRAKPVTQIVSAEAWGRADCGSTTPGERSSLPAFYPGTSGSCSGCGSLSLPLLAGLVAADAVASLLIVGAVFLCARPRRSPAQEDGKVYINMPGRGRAKRSGSGATNFSLLKQAGDVEENPGPTSMDWIWRILFLVGAATGAHSFEENVEQHPSTLSVQEGDSAVIKCTYSDSASNYFPWYKQELGKRPQLIIDIRSNVGEKKDQRIAVTLNKTAKHFSLHITETQPEDSAVYFCAATEDYQLIWGAGTKLIIKPDTRIQNPDPAVYQLRDSKSSDKSVCLFTDFDSQTNVSQSKDSDVYITDKTVLDMRSMDFKSNSAVAWSNKSDFACANAFNNSIIPEDTFFPSPESSCGTTTPGERSSLPAFYPGTSGSCSGCGSLSLPLLAGLVAADAVASLLIVGAVFKRGRKKLLYIFKQPFMRPVQTTQEEDGCSCRFPEEEEGGCELLCARPRRSPAQEDGKVYINMPGRG

SEQ ID NO: 10881 - protein, 714 aa, synthetic construct
MALPVTALLLPLALLLHAARPEFGITQSPKYLFRKEGQNVTLSCEQNLNHDAMYWYRQDPGQGLRLIYYSQIVNDFQKGDIAEGYSVSREKKESFPLTVTSAQKNPTAFYLCASSPGALYEQYFGPGTRLTVTLEDLKNVFPPEVAVFEPSEAEISHTQKATLVCLATGFYPDHVELSWWVNGKEVHSGVSTDPQPLKEQPALNDSRYCLSSRLRVSATFWQNPRNHFRCQVQFYGLSENDEWTQDRAKPVTQIVSAEAWGRADCGSTTPGERSSLPAFYPGTSGSCSGCGSLSLPLLAGLVAADAVASLLIVGAVFLCARPRRSPAQEDGKVYINMPGRGRAKRSGSGATNFSLLKQAGDVEENPGPTSMDWIWRILFLVGAATGAHSFEENVEQHPSTLSVQEGDSAVIKCTYSDSASNYFPWYKQELGKRPQLIIDIRSNVGEKKDQRIAVTLNKTAKHFSLHITETQPEDSAVYFCAATEDYQLIWGAGTKLIIKPDTRIQNPDPAVYQLRDSKSSDKSVCLFTDFDSQTNVSQSKDSDVYITDKTVLDMRSMDFKSNSAVAWSNKSDFACANAFNNSIIPEDTFFPSPESSCGTTTPGERSSLPAFYPGTSGSCSGCGSLSLPLLAGLVAADAVASLLIVGAVFRSKRSRLLHSDYMNMTPRRPGPTRKHYQPYAPPRDFAAYRSLCARPRRSPAQEDGKVYINMPGRG

SEQ ID NO: 10882 - protein, 709 aa, synthetic construct
MALPVTALLLPLALLLHAARPEFGITQSPKYLFRKEGQNVTLSCEQNLNHDAMYWYRQDPGQGLRLIYYSQIVNDFQKGDIAEGYSVSREKKESFPLTVTSAQKNPTAFYLCASSPGALYEQYFGPGTRLTVTLEDLKNVFPPEVAVFEPSEAEISHTQKATLVCLATGFYPDHVELSWWVNGKEVHSGVSTDPQPLKEQPALNDSRYCLSSRLRVSATFWQNPRNHFRCQVQFYGLSENDEWTQDRAKPVTQIVSAEAWGRADCGSTTPGERSSLPAFYPGTSGSCSGCGSLSLPLLAGLVAADAVASLLIVGAVFLCARPRRSPAQEDGKVYINMPGRGRAKRSGSGATNFSLLKQAGDVEENPGPTSMDWIWRILFLVGAATGAHSFEENVEQHPSTLSVQEGDSAVIKCTYSDSASNYFPWYKQELGKRPQLIIDIRSNVGEKKDQRIAVTLNKTAKHFSLHITETQPEDSAVYFCAATEDYQLIWGAGTKLIIKPDTRIQNPDPAVYQLRDSKSSDKSVCLFTDFDSQTNVSQSKDSDVYITDKTVLDMRSMDFKSNSAVAWSNKSDFACANAFNNSIIPEDTFFPSPESSCGTTTPGERSSLPAFYPGTSGSCSGCGSLSLPLLAGLVAADAVASLLIVGAVFRDQRLPPDAHKPPGGGSFRTPIQEEQADAHSTLAKILCARPRRSPAQEDGKVYINMPGRG

SEQ ID NO: 10883 - protein, 793 aa, synthetic construct
MALPVTALLLPLALLLHAARPEFGITQSPKYLFRKEGQNVTLSCEQNLNHDAMYWYRQDPGQGLRLIYYSQIVNDFQKGDIAEGYSVSREKKESFPLTVTSAQKNPTAFYLCASSPGALYEQYFGPGTRLTVTLEDLKNVFPPEVAVFEPSEAEISHTQKATLVCLATGFYPDHVELSWWVNGKEVHSGVSTDPQPLKEQPALNDSRYCLSSRLRVSATFWQNPRNHFRCQVQFYGLSENDEWTQDRAKPVTQIVSAEAWGRADCGSTTPGERSSLPAFYPGTSGSCSGCGSLSLPLLAGLVAADAVASLLIVGAVFLCARPRRSPAQEDGKVYINMPGRGRAKRSGSGATNFSLLKQAGDVEENPGPTSMDWIWRILFLVGAATGAHSFEENVEQHPSTLSVQEGDSAVIKCTYSDSASNYFPWYKQELGKRPQLIIDIRSNVGEKKDQRIAVTLNKTAKHFSLHITETQPEDSAVYFCAATEDYQLIWGAGTKLIIKPDTRIQNPDPAVYQLRDSKSSDKSVCLFTDFDSQTNVSQSKDSDVYITDKTVLDMRSMDFKSNSAVAWSNKSDFACANAFNNSIIPEDTFFPSPESSCGTTTPGERSSLPAFYPGTSGSCSGCGSLSLPLLAGLVAADAVASLLIVGAVFWRRKRKEKQSETSPKEFLTIYEDVKDLKTRRNHEQEQTFPGGGSTIYSMIQSQSSAPTSQEPAYTLYSLIQPSRKSGSRKRNHSPSFNSTIYEVIGKSQPKAQNPARLSRKELENFDVYSLCARPRRSPAQEDGKVYINMPGRG

SEQ ID NO: 10884 - protein, 744 aa, synthetic construct
MALPVTALLLPLALLLHAARPEFGITQSPKYLFRKEGQNVTLSCEQNLNHDAMYWYRQDPGQGLRLIYYSQIVNDFQKGDIAEGYSVSREKKESFPLTVTSAQKNPTAFYLCASSPGALYEQYFGPGTRLTVTLEDLKNVFPPEVAVFEPSEAEISHTQKATLVCLATGFYPDHVELSWWVNGKEVHSGVSTDPQPLKEQPALNDSRYCLSSRLRVSATFWQNPRNHFRCQVQFYGLSENDEWTQDRAKPVTQIVSAEAWGRADCGSLGEPQLCYILDAILFLYGIVLTLLYCKRGRKKLLYIFKQPFMRPVQTTQEEDGCSCRFPEEEEGGCELRLKIQVRKAAITSYEKSDGVYTGLSTRNQETYETLKHEKPPQRAKRSGSGATNFSLLKQAGDVEENPGPTSMDWIWRILFLVGAATGAHSFEENVEQHPSTLSVQEGDSAVIKCTYSDSASNYFPWYKQELGKRPQLIIDIRSNVGEKKDQRIAVTLNKTAKHFSLHITETQPEDSAVYFCAATEDYQLIWGAGTKLIIKPDTRIQNPDPAVYQLRDSKSSDKSVCLFTDFDSQTNVSQSKDSDVYITDKTVLDMRSMDFKSNSAVAWSNKSDFACANAFNNSIIPEDTFFPSPESSCGTLGEPQLCYILDAILFLYGIVLTLLYCRSKRSRLLHSDYMNMTPRRPGPTRKHYQPYAPPRDFAAYRSRLKIQVRKAAITSYEKSDGVYTGLSTRNQETYETLKHEKPPQ

SEQ ID NO: 10885 - protein, 739 aa, synthetic construct
MALPVTALLLPLALLLHAARPEFGITQSPKYLFRKEGQNVTLSCEQNLNHDAMYWYRQDPGQGLRLIYYSQIVNDFQKGDIAEGYSVSREKKESFPLTVTSAQKNPTAFYLCASSPGALYEQYFGPGTRLTVTLEDLKNVFPPEVAVFEPSEAEISHTQKATLVCLATGFYPDHVELSWWVNGKEVHSGVSTDPQPLKEQPALNDSRYCLSSRLRVSATFWQNPRNHFRCQVQFYGLSENDEWTQDRAKPVTQIVSAEAWGRADCGSLGEPQLCYILDAILFLYGIVLTLLYCKRGRKKLLYIFKQPFMRPVQTTQEEDGCSCRFPEEEEGGCELRLKIQVRKAAITSYEKSDGVYTGLSTRNQETYETLKHEKPPQRAKRSGSGATNFSLLKQAGDVEENPGPTSMDWIWRILFLVGAATGAHSFEENVEQHPSTLSVQEGDSAVIKCTYSDSASNYFPWYKQELGKRPQLIIDIRSNVGEKKDQRIAVTLNKTAKHFSLHITETQPEDSAVYFCAATEDYQLIWGAGTKLIIKPDTRIQNPDPAVYQLRDSKSSDKSVCLFTDFDSQTNVSQSKDSDVYITDKTVLDMRSMDFKSNSAVAWSNKSDFACANAFNNSIIPEDTFFPSPESSCGTLGEPQLCYILDAILFLYGIVLTLLYCRDQRLPPDAHKPPGGGSFRTPIQEEQADAHSTLAKIRLKIQVRKAAITSYEKSDGVYTGLSTRNQETYETLKHEKPPQ

SEQ ID NO: 10886 - protein, 823 aa, synthetic construct
MALPVTALLLPLALLLHAARPEFGITQSPKYLFRKEGQNVTLSCEQNLNHDAMYWYRQDPGQGLRLIYYSQIVNDFQKGDIAEGYSVSREKKESFPLTVTSAQKNPTAFYLCASSPGALYEQYFGPGTRLTVTLEDLKNVFPPEVAVFEPSEAEISHTQKATLVCLATGFYPDHVELSWWVNGKEVHSGVSTDPQPLKEQPALNDSRYCLSSRLRVSATFWQNPRNHFRCQVQFYGLSENDEWTQDRAKPVTQIVSAEAWGRADCGSLGEPQLCYILDAILFLYGIVLTLLYCKRGRKKLLYIFKQPFMRPVQTTQEEDGCSCRFPEEEEGGCELRLKIQVRKAAITSYEKSDGVYTGLSTRNQETYETLKHEKPPQRAKRSGSGATNFSLLKQAGDVEENPGPTSMDWIWRILFLVGAATGAHSFEENVEQHPSTLSVQEGDSAVIKCTYSDSASNYFPWYKQELGKRPQLIIDIRSNVGEKKDQRIAVTLNKTAKHFSLHITETQPEDSAVYFCAATEDYQLIWGAGTKLIIKPDTRIQNPDPAVYQLRDSKSSDKSVCLFTDFDSQTNVSQSKDSDVYITDKTVLDMRSMDFKSNSAVAWSNKSDFACANAFNNSIIPEDTFFPSPESSCGTLGEPQLCYILDAILFLYGIVLTLLYCWRRKRKEKQSETSPKEFLTIYEDVKDLKTRRNHEQEQTFPGGGSTIYSMIQSQSSAPTSQEPAYTLYSLIQPSRKSGSRKRNHSPSFNSTIYEVIGKSQPKAQNPARLSRKELENFDVYSRLKIQVRKAAITSYEKSDGVYTGLSTRNQETYETLKHEKPPQ

SEQ ID NO: 10887 - protein, 745 aa, synthetic construct
MALPVTALLLPLALLLHAARPEFGITQSPKYLFRKEGQNVTLSCEQNLNHDAMYWYRQDPGQGLRLIYYSQIVNDFQKGDIAEGYSVSREKKESFPLTVTSAQKNPTAFYLCASSPGALYEQYFGPGTRLTVTLEDLKNVFPPEVAVFEPSEAEISHTQKATLVCLATGFYPDHVELSWWVNGKEVHSGVSTDPQPLKEQPALNDSRYCLSSRLRVSATFWQNPRNHFRCQVQFYGLSENDEWTQDRAKPVTQIVSAEAWGRADCGSLGEPQLCYILDAILFLYGIVLTLLYCKRGRKKLLYIFKQPFMRPVQTTQEEDGCSCRFPEEEEGGCELRLKIQVRKAAITSYEKSDGVYTGLSTRNQETYETLKHEKPPQRAKRSGSGATNFSLLKQAGDVEENPGPTSMDWIWRILFLVGAATGAHSFEENVEQHPSTLSVQEGDSAVIKCTYSDSASNYFPWYKQELGKRPQLIIDIRSNVGEKKDQRIAVTLNKTAKHFSLHITETQPEDSAVYFCAATEDYQLIWGAGTKLIIKPDTRIQNPDPAVYQLRDSKSSDKSVCLFTDFDSQTNVSQSKDSDVYITDKTVLDMRSMDFKSNSAVAWSNKSDFACANAFNNSIIPEDTFFPSPESSCGTLGEPQLCYILDAILFLYGIVLTLLYCKRGRKKLLYIFKQPFMRPVQTTQEEDGCSCRFPEEEEGGCELRLKIQVRKAAITSYEKSDGVYTGLSTRNQETYETLKHEKPPQ

SEQ ID NO: 10888 - protein, 744 aa, synthetic construct; identical to SEQ ID NO: 10884

SEQ ID NO: 10889 - protein, 743 aa, synthetic construct
MALPVTALLLPLALLLHAARPEFGITQSPKYLFRKEGQNVTLSCEQNLNHDAMYWYRQDPGQGLRLIYYSQIVNDFQKGDIAEGYSVSREKKESFPLTVTSAQKNPTAFYLCASSPGALYEQYFGPGTRLTVTLEDLKNVFPPEVAVFEPSEAEISHTQKATLVCLATGFYPDHVELSWWVNGKEVHSGVSTDPQPLKEQPALNDSRYCLSSRLRVSATFWQNPRNHFRCQVQFYGLSENDEWTQDRAKPVTQIVSAEAWGRADCGSLGEPQLCYILDAILFLYGIVLTLLYCRSKRSRLLHSDYMNMTPRRPGPTRKHYQPYAPPRDFAAYRSRLKIQVRKAAITSYEKSDGVYTGLSTRNQETYETLKHEKPPQRAKRSGSGATNFSLLKQAGDVEENPGPTSMDWIWRILFLVGAATGAHSFEENVEQHPSTLSVQEGDSAVIKCTYSDSASNYFPWYKQELGKRPQLIIDIRSNVGEKKDQRIAVTLNKTAKHFSLHITETQPEDSAVYFCAATEDYQLIWGAGTKLIIKPDTRIQNPDPAVYQLRDSKSSDKSVCLFTDFDSQTNVSQSKDSDVYITDKTVLDMRSMDFKSNSAVAWSNKSDFACANAFNNSIIPEDTFFPSPESSCGTLGEPQLCYILDAILFLYGIVLTLLYCRSKRSRLLHSDYMNMTPRRPGPTRKHYQPYAPPRDFAAYRSRLKIQVRKAAITSYEKSDGVYTGLSTRNQETYETLKHEKPPQ

SEQ ID NO: 10890 - protein, 661 aa, synthetic construct
MALPVTALLLPLALLLHAARPEFGITQSPKYLFRKEGQNVTLSCEQNLNHDAMYWYRQDPGQGLRLIYYSQIVNDFQKGDIAEGYSVSREKKESFPLTVTSAQKNPTAFYLCASSPGALYEQYFGPGTRLTVTLEDLKNVFPPEVAVFEPSEAEISHTQKATLVCLATGFYPDHVELSWWVNGKEVHSGVSTDPQPLKEQPALNDSRYCLSSRLRVSATFWQNPRNHFRCQVQFYGLSENDEWTQDRAKPVTQIVSAEAWGRADCGSLGEPQLSYILDAILFLYGIVLTLLYCRLKIQVRKAAITSYEKSDGVYTGLSTRNQETYETLKHEKPPQRAKRSGSGATNFSLLKQAGDVEENPGPTSMDWIWRILFLVGAATGAHSFEENVEQHPSTLSVQEGDSAVIKCTYSDSASNYFPWYKQELGKRPQLIIDIRSNVGEKKDQRIAVTLNKTAKHFSLHITETQPEDSAVYFCAATEDYQLIWGAGTKLIIKPDTRIQNPDPAVYQLRDSKSSDKSVCLFTDFDSQTNVSQSKDSDVYITDKTVLDMRSMDFKSNSAVAWSNKSDFACANAFNNSIIPEDTFFPSPESSCGTLGEPQLSYILDAILFLYGIVLTLLYCRLKIQVRKAAITSYEKSDGVYTGLSTRNQETYETLKHEKPPQ

SEQ ID NO: 10891 - protein, 697 aa, synthetic construct
MALPVTALLLPLALLLHAARPEFGITQSPKYLFRKEGQNVTLSCEQNLNHDAMYWYRQDPGQGLRLIYYSQIVNDFQKGDIAEGYSVSREKKESFPLTVTSAQKNPTAFYLCASSPGALYEQYFGPGTRLTVTLEDLKNVFPPEVAVFEPSEAEISHTQKATLVCLATGFYPDHVELSWWVNGKEVHSGVSTDPQPLKEQPALNDSRYCLSSRLRVSATFWQNPRNHFRCQVQFYGLSENDEWTQDRAKPVTQIVSAEAWGRADCGSQAQSDCSCSTVSPGVLAGIVMGDLVLTVLIALAVYFLGRLVPRGRGAAEAATRKQRITETESPYQELQGQRSDVYSDLNTQRPYYKRAKRSGSGATNFSLLKQAGDVEENPGPTSMDWIWRILFLVGAATGAHSFEENVEQHPSTLSVQEGDSAVIKCTYSDSASNYFPWYKQELGKRPQLIIDIRSNVGEKKDQRIAVTLNKTAKHFSLHITETQPEDSAVYFCAATEDYQLIWGAGTKLIIKPDTRIQNPDPAVYQLRDSKSSDKSVCLFTDFDSQTNVSQSKDSDVYITDKTVLDMRSMDFKSNSAVAWSNKSDFACANAFNNSIIPEDTFFPSPESSCGTQAQSDCSSSTVSPGVLAGIVMGDLVLTVLIALAVYFLGRLVPRGRGAAEAATRKQRITETESPYQELQGQRSDVYSDLNTQRPYYK

SEQ ID NO: 10892 - protein, 739 aa, synthetic construct
MALPVTALLLPLALLLHAARPEFGITQSPKYLFRKEGQNVTLSCEQNLNHDAMYWYRQDPGQGLRLIYYSQIVNDFQKGDIAEGYSVSREKKESFPLTVTSAQKNPTAFYLCASSPGALYEQYFGPGTRLTVTLEDLKNVFPPEVAVFEPSEAEISHTQKATLVCLATGFYPDHVELSWWVNGKEVHSGVSTDPQPLKEQPALNDSRYCLSSRLRVSATFWQNPRNHFRCQVQFYGLSENDEWTQDRAKPVTQIVSAEAWGRADCGSQAQSDCSCSTVSPGVLAGIVMGDLVLTVLIALAVYFLGRLVPRGRGAAEAATRKQRITETESPYQELQGQRSDVYSDLNTQRPYYKRAKRSGSGATNFSLLKQAGDVEENPGPTSMDWIWRILFLVGAATGAHSFEENVEQHPSTLSVQEGDSAVIKCTYSDSASNYFPWYKQELGKRPQLIIDIRSNVGEKKDQRIAVTLNKTAKHFSLHITETQPEDSAVYFCAATEDYQLIWGAGTKLIIKPDTRIQNPDPAVYQLRDSKSSDKSVCLFTDFDSQTNVSQSKDSDVYITDKTVLDMRSMDFKSNSAVAWSNKSDFACANAFNNSIIPEDTFFPSPESSCGTQAQSDCSCSTVSPGVLAGIVMGDLVLTVLIALAVYFLGRLVPRGRGAAEAATRKQRITETESPYQELQGQRSDVYSDLNTQKRGRKKLLYIFKQPFMRPVQTTQEEDGCSCRFPEEEEGGCELRPYYK

SEQ ID NO: 10893 - protein, 738 aa, synthetic construct
MALPVTALLLPLALLLHAARPEFGITQSPKYLFRKEGQNVTLSCEQNLNHDAMYWYRQDPGQGLRLIYYSQIVNDFQKGDIAEGYSVSREKKESFPLTVTSAQKNPTAFYLCASSPGALYEQYFGPGTRLTVTLEDLKNVFPPEVAVFEPSEAEISHTQKATLVCLATGFYPDHVELSWWVNGKEVHSGVSTDPQPLKEQPALNDSRYCLSSRLRVSATFWQNPRNHFRCQVQFYGLSENDEWTQDRAKPVTQIVSAEAWGRADCGSQAQSDCSCSTVSPGVLAGIVMGDLVLTVLIALAVYFLGRLVPRGRGAAEAATRKQRITETESPYQELQGQRSDVYSDLNTQRPYYKRAKRSGSGATNFSLLKQAGDVEENPGPTSMDWIWRILFLVGAATGAHSFEENVEQHPSTLSVQEGDSAVIKCTYSDSASNYFPWYKQELGKRPQLIIDIRSNVGEKKDQRIAVTLNKTAKHFSLHITETQPEDSAVYFCAATEDYQLIWGAGTKLIIKPDTRIQNPDPAVYQLRDSKSSDKSVCLFTDFDSQTNVSQSKDSDVYITDKTVLDMRSMDFKSNSAVAWSNKSDFACANAFNNSIIPEDTFFPSPESSCGTQAQSDCSCSTVSPGVLAGIVMGDLVLTVLIALAVYFLGRLVPRGRGAAEAATRKQRITETESPYQELQGQRSDVYSDLNTQRSKRSRLLHSDYMNMTPRRPGPTRKHYQPYAPPRDFAAYRSRPYYK

SEQ ID NO: 10894 - protein, 733 aa, synthetic construct
MALPVTALLLPLALLLHAARPEFGITQSPKYLFRKEGQNVTLSCEQNLNHDAMYWYRQDPGQGLRLIYYSQIVNDFQKGDIAEGYSVSREKKESFPLTVTSAQKNPTAFYLCASSPGALYEQYFGPGTRLTVTLEDLKNVFPPEVAVFEPSEAEISHTQKATLVCLATGFYPDHVELSWWVNGKEVHSGVSTDPQPLKEQPALNDSRYCLSSRLRVSATFWQNPRNHFRCQVQFYGLSENDEWTQDRAKPVTQIVSAEAWGRADCGSQAQSDCSCSTVSPGVLAGIVMGDLVLTVLIALAVYFLGRLVPRGRGAAEAATRKQRITETESPYQELQGQRSDVYSDLNTQRPYYKRAKRSGSGATNFSLLKQAGDVEENPGPTSMDWIWRILFLVGAATGAHSFEENVEQHPSTLSVQEGDSAVIKCTYSDSASNYFPWYKQELGKRPQLIIDIRSNVGEKKDQRIAVTLNKTAKHFSLHITETQPEDSAVYFCAATEDYQLIWGAGTKLIIKPDTRIQNPDPAVYQLRDSKSSDKSVCLFTDFDSQTNVSQSKDSDVYITDKTVLDMRSMDFKSNSAVAWSNKSDFACANAFNNSIIPEDTFFPSPESSCGTQAQSDCSCSTVSPGVLAGIVMGDLVLTVLIALAVYFLGRLVPRGRGAAEAATRKQRITETESPYQELQGQRSDVYSDLNTQRDQRLPPDAHKPPGGGSFRTPIQEEQADAHSTLAKIRPYYK

SEQ ID NO: 10895 - protein, 817 aa, synthetic construct
MALPVTALLLPLALLLHAARPEFGITQSPKYLFRKEGQNVTLSCEQNLNHDAMYWYRQDPGQGLRLIYYSQIVNDFQKGDIAEGYSVSREKKESFPLTVTSAQKNPTAFYLCASSPGALYEQYFGPGTRLTVTLEDLKNVFPPEVAVFEPSEAEISHTQKATLVCLATGFYPDHVELSWWVNGKEVHSGVSTDPQPLKEQPALNDSRYCLSSRLRVSATFWQNPRNHFRCQVQFYGLSENDEWTQDRAKPVTQIVSAEAWGRADCGSQAQSDCSCSTVSPGVLAGIVMGDLVLTVLIALAVYFLGRLVPRGRGAAEAATRKQRITETESPYQELQGQRSDVYSDLNTQRPYYKRAKRSGSGATNFSLLKQAGDVEENPGPTSMDWIWRILFLVGAATGAHSFEENVEQHPSTLSVQEGDSAVIKCTYSDSASNYFPWYKQELGKRPQLIIDIRSNVGEKKDQRIAVTLNKTAKHFSLHITETQPEDSAVYFCAATEDYQLIWGAGTKLIIKPDTRIQNPDPAVYQLRDSKSSDKSVCLFTDFDSQTNVSQSKDSDVYITDKTVLDMRSMDFKSNSAVAWSNKSDFACANAFNNSIIPEDTFFPSPESSCGTQAQSDCSCSTVSPGVLAGIVMGDLVLTVLIALAVYFLGRLVPRGRGAAEAATRKQRITETESPYQELQGQRSDVYSDLNTQWRRKRKEKQSETSPKEFLTIYEDVKDLKTRRNHEQEQTFPGGGSTIYSMIQSQSSAPTSQEPAYTLYSLIQPSRKSGSRKRNHSPSFNSTIYEVIGKSQPKAQNPARLSRKELENFDVYSRPYYK

SEQ ID NO: 10896 - protein, 909 aa, synthetic construct
MALPVTALLLPLALLLHAARPEFGITQSPKYLFRKEGQNVTLSCEQNLNHDAMYWYRQDPGQGLRLIYYSQIVNDFQKGDIAEGYSVSREKKESFPLTVTSAQKNPTAFYLCASSPGALYEQYFGPGTRLTVTLEDLKNVFPPEVAVFEPSEAEISHTQKATLVCLATGFYPDHVELSWWVNGKEVHSGVSTDPQPLKEQPALNDSRYCLSSRLRVSATFWQNPRNHFRCQVQFYGLSENDEWTQDRAKPVTQIVSAEAWGRADCGSQAQSDCSCSTVSPGVLAGIVMGDLVLTVLIALAVYFLGRLVPRGRGAAEAATRKQRITETESPYQELQGQRSDVYSDLNTQRVKFSRSADAPAYQQGQNQLYNELNLGRREEYDVLDKRRGRDPEMGGKPQRRKNPQEGLYNELQKDKMAEAYSEIGMKGERRRGKGHDGLYQGLSTATKDTYDALHMQALPPRRAKRSGSGATNFSLLKQAGDVEENPGPTSMDWIWRILFLVGAATGAHSFEENVEQHPSTLSVQEGDSAVIKCTYSDSASNYFPWYKQELGKRPQLIIDIRSNVGEKKDQRIAVTLNKTAKHFSLHITETQPEDSAVYFCAATEDYQLIWGAGTKLIIKPDTRIQNPDPAVYQLRDSKSSDKSVCLFTDFDSQTNVSQSKDSDVYITDKTVLDMRSMDFKSNSAVAWSNKSDFACANAFNNSIIPEDTFFPSPESSCGTTTPGERSSLPAFYPGTSGSCSGCGSLSLPLLAGLVAADAVASLLIVGAVFLCARPRRSPAQEDGKVYINMPGRGSSRRVKFSRSADAPAYQQGQNQLYNELNLGRREEYDVLDKRRGRDPEMGGKPQRRKNPQEGLYNELQKDKMAEAYSEIGMKGERRRGKGHDGLYQGLSTATKDTYDALHMQALPPR

SEQ ID NO: 10897 - protein, 835 aa, synthetic construct
MALPVTALLLPLALLLHAARPEFGITQSPKYLFRKEGQNVTLSCEQNLNHDAMYWYRQDPGQGLRLIYYSQIVNDFQKGDIAEGYSVSREKKESFPLTVTSAQKNPTAFYLCASSPGALYEQYFGPGTRLTVTLEDLKNVFPPEVAVFEPSEAEISHTQKATLVCLATGFYPDHVELSWWVNGKEVHSGVSTDPQPLKEQPALNDSRYCLSSRLRVSATFWQNPRNHFRCQVQFYGLSENDEWTQDRAKPVTQIVSAEAWGRADCGSQAQSDCSCSTVSPGVLAGIVMGDLVLTVLIALAVYFLGRLVPRGRGAAEAATRKQRITETESPYQELQGQRSDVYSDLNTQRVKFSRSADAPAYQQGQNQLYNELNLGRREEYDVLDKRRGRDPEMGGKPQRRKNPQEGLYNELQKDKMAEAYSEIGMKGERRRGKGHDGLYQGLSTATKDTYDALHMQALPPRRAKRSGSGATNFSLLKQAGDVEENPGPTSMDWIWRILFLVGAATGAHSFEENVEQHPSTLSVQEGDSAVIKCTYSDSASNYFPWYKQELGKRPQLIIDIRSNVGEKKDQRIAVTLNKTAKHFSLHITETQPEDSAVYFCAATEDYQLIWGAGTKLIIKPDTRIQNPDPAVYQLRDSKSSDKSVCLFTDFDSQTNVSQSKDSDVYITDKTVLDMRSMDFKSNSAVAWSNKSDFACANAFNNSIIPEDTFFPSPESSCGTTTPGERSSLPAFYPGTSGSCSGCGSLSLPLLAGLVAADAVASLLIVGAVFKRGRKKLLYIFKQPFMRPVQTTQEEDGCSCRFPEEEEGGCELLCARPRRSPAQEDGKVYINMPGRG

SEQ ID NO: 10898 - protein, 834 aa, synthetic construct
MALPVTALLLPLALLLHAARPEFGITQSPKYLFRKEGQNVTLSCEQNLNHDAMYWYRQDPGQGLRLIYYSQIVNDFQKGDIAEGYSVSREKKESFPLTVTSAQKNPTAFYLCASSPGALYEQYFGPGTRLTVTLEDLKNVFPPEVAVFEPSEAEISHTQKATLVCLATGFYPDHVELSWWVNGKEVHSGVSTDPQPLKEQPALNDSRYCLSSRLRVSATFWQNPRNHFRCQVQFYGLSENDEWTQDRAKPVTQIVSAEAWGRADCGSQAQSDCSCSTVSPGVLAGIVMGDLVLTVLIALAVYFLGRLVPRGRGAAEAATRKQRITETESPYQELQGQRSDVYSDLNTQRVKFSRSADAPAYQQGQNQLYNELNLGRREEYDVLDKRRGRDPEMGGKPQRRKNPQEGLYNELQKDKMAEAYSEIGMKGERRRGKGHDGLYQGLSTATKDTYDALHMQALPPRRAKRSGSGATNFSLLKQAGDVEENPGPTSMDWIWRILFLVGAATGAHSFEENVEQHPSTLSVQEGDSAVIKCTYSDSASNYFPWYKQELGKRPQLIIDIRSNVGEKKDQRIAVTLNKTAKHFSLHITETQPEDSAVYFCAATEDYQLIWGAGTKLIIKPDTRIQNPDPAVYQLRDSKSSDKSVCLFTDFDSQTNVSQSKDSDVYITDKTVLDMRSMDFKSNSAVAWSNKSDFACANAFNNSIIPEDTFFPSPESSCGTTTPGERSSLPAFYPGTSGSCSGCGSLSLPLLAGLVAADAVASLLIVGAVFRSKRSRLLHSDYMNMTPRRPGPTRKHYQPYAPPRDFAAYRSLCARPRRSPAQEDGKVYINMPGRG

SEQ ID NO: 10899 - protein, 1080 aa, synthetic construct
MALPVTALLLPLALLLHAARPEFGITQSPKYLFRKEGQNVTLSCEQNLNHDAMYWYRQDPGQGLRLIYYSQIVNDFQKGDIAEGYSVSREKKESFPLTVTSAQKNPTAFYLCASSPGALYEQYFGPGTRLTVTLEDLKNVFPPEVAVFEPSEAEISHTQKATLVCLATGFYPDHVELSWWVNGKEVHSGVSTDPQPLKEQPALNDSRYCLSSRLRVSATFWQNPRNHFRCQVQFYGLSENDEWTQDRAKPVTQIVSAEAWGRADCGSQSFGLLDPKLCYLLDGILFIYGVILTALFLRVKFSRSADAPAYQQGQNQLYNELNLGRREEYDVLDKRRGRDPEMGGKPQRRKNPQEGLYNELQKDKMAEAYSEIGMKGERRRGKGHDGLYQGLSTATKDTYDALHMQALPPRRAKRSGSGATNFSLLKQAGDVEENPGPTSMDWIWRILFLVGAATGAHSFEENVEQHPSTLSVQEGDSAVIKCTYSDSASNYFPWYKQELGKRPQLIIDIRSNVGEKKDQRIAVTLNKTAKHFSLHITETQPEDSAVYFCAATEDYQLIWGAGTKLIIKPDTRIQNPDPAVYQLRDSKSSDKSVCLFTDFDSQTNVSQSKDSDVYITDKTVLDMRSMDFKSNSAVAWSNKSDFACANAFNNSIIPEDTFFPSPESSCGTQSFGLLDPKLCYLLDGILFIYGVILTALFLRVKFSRSADAPAYQQGQNQLYNELNLGRREEYDVLDKRRGRDPEMGGKPQRRKNPQEGLYNELQKDKMAEAYSEIGMKGERRRGKGHDGLYQGLSTATKDTYDALHMQALPPRRAKRSGSGVKQTLNFDLLKLAGDVESNPGPSRGHMALPVTALLLPLALLLHAARPSQFRVSPLDRTWNLGETVELKCQVLLSNPTSGCSWLFQPRGAAASPTFLLYLSQNKPKAAEGLDTQRFSGKRLGDTFVLTLSDFRRENEGYYFCSALSNSIMYFSHFVPVFLPAKPTTTPAPRPPTPAPTIASQPLSLRPEACRPAAGGAVHTRGLDFACDIYIWAPLAGTCGVLLLSLVITLYCNHRNRRRVCKCPRPVVKSGDKPSLSARYV

SEQ ID NO: 10900 - protein, 820 aa, synthetic construct
MALPVTALLLPLALLLHAARPEFGITQSPKYLFRKEGQNVTLSCEQNLNHDAMYWYRQDPGQGLRLIYYSQIVNDFQKGDIAEGYSVSREKKESFPLTVTSAQKNPTAFYLCASSPGALYEQYFGPGTRLTVTLEDLKNVFPPEVAVFEPSEAEISHTQKATLVCLATGFYPDHVELSWWVNGKEVHSGVSTDPQPLKEQPALNDSRYCLSSRLRVSATFWQNPRNHFRCQVQFYGLSENDEWTQDRAKPVTQIVSAEAWGRADCGSQSFGLLDPKLCYLLDGILFIYGVILTALFLRVKFSRSADAPAYQQGQNQLYNELNLGRREEYDVLDKRRGRDPEMGGKPQRRKNPQEGLYNELQKDKMAEAYSEIGMKGERRRGKGHDGLYQGLSTATKDTYDALHMQALPPRRAKRSGSGATNFSLLKQAGDVEENPGPTSMDWIWRILFLVGAATGAHSFEENVEQHPSTLSVQEGDSAVIKCTYSDSASNYFPWYKQELGKRPQLIIDIRSNVGEKKDQRIAVTLNKTAKHFSLHITETQPEDSAVYFCAATEDYQLIWGAGTKLIIKPDTRASTKGPSVFPLAPSSKSTSGGTAALGCLVKDYFPEPVTVSWNSGALTSGVHTFPAVLQSSGLYSLSSVVTVPSSSLGTQTYICNVNHKPSNTKVDKRVEPKSCGTQSFGLLDPKLSYLLDGILFIYGVILTALFLRVKFSRSADAPAYQQGQNQLYNELNLGRREEYDVLDKRRGRDPEMGGKPQRRKNPQEGLYNELQKDKMAEAYSEIGMKGERRRGKGHDGLYQGLSTATKDTYDALHMQALPPR

SEQ ID NO: 10901 - protein, 811 aa, synthetic construct
MALPVTALLLPLALLLHAARPEFGITQSPKYLFRKEGQNVTLSCEQNLNHDAMYWYRQDPGQGLRLIYYSQIVNDFQKGDIAEGYSVSREKKESFPLTVTSAQKNPTAFYLCASSPGALYEQYFGPGTRLTVTLEDLKNVFPPEVAVFEPSEAEISHTQKATLVCLATGFYPDHVELSWWVNGKEVHSGVSTDPQPLKEQPALNDSRYCLSSRLRVSATFWQNPRNHFRCQVQFYGLSENDEWTQDRAKPVTQIVSAEAWGRADCGSQSFGLLDPKLCYLLDGILFIYGVILTALFLRVKFSRSADAPAYQQGQNQLYNELNLGRREEYDVLDKRRGRDPEMGGKPQRRKNPQEGLYNELQKDKMAEAYSEIGMKGERRRGKGHDGLYQGLSTATKDTYDALHMQALPPRRAKRSGSGATNFSLLKQAGDVEENPGPTSMDWIWRILFLVGAATGAHSFEENVEQHPSTLSVQEGDSAVIKCTYSDSASNYFPWYKQELGKRPQLIIDIRSNVGEKKDQRIAVTLNKTAKHFSLHITETQPEDSAVYFCAATEDYQLIWGAGTKLIIKPDTRIQNPDPAVYQLRDSKSSDKSVCLFTDFDSQTNVSQSKDSDVYITDKTVLDMRSMDFKSNSAVAWSNKSDFACANAFNNSIIPEDTFFPSPESSCGTQSFGLLDPKLSYLLDGILFIYGVILTALFLRVKFSRSADAPAYQQGQNQLYNELNLGRREEYDVLDKRRGRDPEMGGKPQRRKNPQEGLYNELQKDKMAEAYSEIGMKGERRRGKGHDGLYQGLSTATKDTYDALHMQALPPR

SEQ ID NO: 10902 - protein, 981 aa, synthetic construct
MALPVTALLLPLALLLHAARPEFGITQSPKYLFRKEGQNVTLSCEQNLNHDAMYWYRQDPGQGLRLIYYSQIVNDFQKGDIAEGYSVSREKKESFPLTVTSAQKNPTAFYLCASSPGALYEQYFGPGTRLTVTLEGQPKANPTVTLFPPSSEELQANKATLVCLISDFYPGAVTVAWKADGSPVKAGVETTKPSKQSNNKYAASSYLSLTPEQWKSHRSYSCQVTHEGSTVEKTVAPTECSGSLGEPQLCYILDAILFLYGIVLTLLYCRLKIQVRKAAITSYEKSDGVYTGLSTRNQETYETLKHEKPPQRAKRSGSGATNFSLLKQAGDVEENPGPTSMDWIWRILFLVGAATGAHSFEENVEQHPSTLSVQEGDSAVIKCTYSDSASNYFPWYKQELGKRPQLIIDIRSNVGEKKDQRIAVTLNKTAKHFSLHITETQPEDSAVYFCAATEDYQLIWGAGTKLIIKPDTRIQNPDPAVYQLRDSKSSDKSVCLFTDFDSQTNVSQSKDSDVYITDKTVLDMRSMDFKSNSAVAWSNKSDFACANAFNNSIIPEDTFFPSPESSCGTQSFGLLDPKLCYLLDGILFIYGVILTALFLRVKFSRSADAPAYQQGQNQLYNELNLGRREEYDVLDKRRGRDPEMGGKPQRRKNPQEGLYNELQKDKMAEAYSEIGMKGERRRGKGHDGLYQGLSTATKDTYDALHMQALPPRRAKRSGSGVKQTLNFDLLKLAGDVESNPGPSRGHMALPVTALLLPLALLLHAARPSQFRVSPLDRTWNLGETVELKCQVLLSNPTSGCSWLFQPRGAAASPTFLLYLSQNKPKAAEGLDTQRFSGKRLGDTFVLTLSDFRRENEGYYFCSALSNSIMYFSHFVPVFLPAKPTTTPAPRPPTPAPTIASQPLSLRPEACRPAAGGAVHTRGLDFACDIYIWAPLAGTCGVLLLSLVITLYCNHRNRRRVCKCPRPVVKSGDKPSLSARYV

SEQ ID NO: 10903 - protein, 745 aa, synthetic construct
MALPVTALLLPLALLLHAARPEFGITQSPKYLFRKEGQNVTLSCEQNLNHDAMYWYRQDPGQGLRLIYYSQIVNDFQKGDIAEGYSVSREKKESFPLTVTSAQKNPTAFYLCASSPGALYEQYFGPGTRLTVTLEDLKNVFPPEVAVFEPSEAEISHTQKATLVCLATGFYPDHVELSWWVNGKEVHSGVSTDPQPLKEQPALNDSRYCLSSRLRVSATFWQNPRNHFRCQVQFYGLSENDEWTQDRAKPVTQIVSAEAWGRADCGSQSFGLLDPKLCYLLDGILFIYGVILTALFLRVKFSRSADAPAYQQGQNQLYNELNLGRREEYDVLDKRRGRDPEMGGKPQRRKNPQEGLYNELQKDKMAEAYSEIGMKGERRRGKGHDGLYQGLSTATKDTYDALHMQALPPRRAKRSGSGATNFSLLKQAGDVEENPGPTSMDWIWRILFLVGAATGAHSFEENVEQHPSTLSVQEGDSAVIKCTYSDSASNYFPWYKQELGKRPQLIIDIRSNVGEKKDQRIAVTLNKTAKHFSLHITETQPEDSAVYFCAATEDYQLIWGAGTKLIIKPDTRASTKGPSVFPLAPSSKSTSGGTAALGCLVKDYFPEPVTVSWNSGALTSGVHTFPAVLQSSGLYSLSSVVTVPSSSLGTQTYICNVNHKPSNTKVDKRVEPKSCGTLGEPQLCYILDAILFLYGIVLTLLYCRLKIQVRKAAITSYEKSDGVYTGLSTRNQETYETLKHEKPPQ

SEQ ID NO: 10904 - protein, 745 aa, synthetic construct; identical to SEQ ID NO: 10903

SEQ ID NO: 10905 - protein, 736 aa, synthetic construct
MALPVTALLLPLALLLHAARPEFGITQSPKYLFRKEGQNVTLSCEQNLNHDAMYWYRQDPGQGLRLIYYSQIVNDFQKGDIAEGYSVSREKKESFPLTVTSAQKNPTAFYLCASSPGALYEQYFGPGTRLTVTLEDLKNVFPPEVAVFEPSEAEISHTQKATLVCLATGFYPDHVELSWWVNGKEVHSGVSTDPQPLKEQPALNDSRYCLSSRLRVSATFWQNPRNHFRCQVQFYGLSENDEWTQDRAKPVTQIVSAEAWGRADCGSQSFGLLDPKLCYLLDGILFIYGVILTALFLRVKFSRSADAPAYQQGQNQLYNELNLGRREEYDVLDKRRGRDPEMGGKPQRRKNPQEGLYNELQKDKMAEAYSEIGMKGERRRGKGHDGLYQGLSTATKDTYDALHMQALPPRRAKRSGSGATNFSLLKQAGDVEENPGPTSMDWIWRILFLVGAATGAHSFEENVEQHPSTLSVQEGDSAVIKCTYSDSASNYFPWYKQELGKRPQLIIDIRSNVGEKKDQRIAVTLNKTAKHFSLHITETQPEDSAVYFCAATEDYQLIWGAGTKLIIKPDTRIQNPDPAVYQLRDSKSSDKSVCLFTDFDSQTNVSQSKDSDVYITDKTVLDMRSMDFKSNSAVAWSNKSDFACANAFNNSIIPEDTFFPSPESSCGTLGEPQLCYILDAILFLYGIVLTLLYCRLKIQVRKAAITSYEKSDGVYTGLSTRNQETYETLKHEKPPQ

SEQ ID NO: 10906 - protein, 985 aa, synthetic construct
MALPVTALLLPLALLLHAARPEFGITQSPKYLFRKEGQNVTLSCEQNLNHDAMYWYRQDPGQGLRLIYYSQIVNDFQKGDIAEGYSVSREKKESFPLTVTSAQKNPTAFYLCASSPGALYEQYFGPGTRLTVTLEGQPKANPTVTLFPPSSEELQANKATLVCLISDFYPGAVTVAWKADGSPVKAGVETTKPSKQSNNKYAASSYLSLTPEQWKSHRSYSCQVTHEGSTVEKTVAPTECSTTPGERSSLPAFYPGTSGSCSGCGSLSLPLLAGLVAADAVASLLIVGAVFLCARPRRSPAQEDGKVYINMPGRGRAKRSGSGATNFSLLKQAGDVEENPGPTSMDWIWRILFLVGAATGAHSFEENVEQHPSTLSVQEGDSAVIKCTYSDSASNYFPWYKQELGKRPQLIIDIRSNVGEKKDQRIAVTLNKTAKHFSLHITETQPEDSAVYFCAATEDYQLIWGAGTKLIIKPDTRIQNPDPAVYQLRDSKSSDKSVCLFTDFDSQTNVSQSKDSDVYITDKTVLDMRSMDFKSNSAVAWSNKSDFACANAFNNSIIPEDTFFPSPESSCGTQSFGLLDPKLCYLLDGILFIYGVILTALFLRVKFSRSADAPAYQQGQNQLYNELNLGRREEYDVLDKRRGRDPEMGGKPQRRKNPQEGLYNELQKDKMAEAYSEIGMKGERRRGKGHDGLYQGLSTATKDTYDALHMQALPPRRAKRSGSGVKQTLNFDLLKLAGDVESNPGPSRGHMALPVTALLLPLALLLHAARPSQFRVSPLDRTWNLGETVELKCQVLLSNPTSGCSWLFQPRGAAASPTFLLYLSQNKPKAAEGLDTQRFSGKRLGDTFVLTLSDFRRENEGYYFCSALSNSIMYFSHFVPVFLPAKPTTTPAPRPPTPAPTIASQPLSLRPEACRPAAGGAVHTRGLDFACDIYIWAPLAGTCGVLLLSLVITLYCNHRNRRRVCKCPRPVVKSGDKPSLSARYV

SEQ ID NO: 10907 - protein, 1018 aa, synthetic construct
MALPVTALLLPLALLLHAARPEFGITQSPKYLFRKEGQNVTLSCEQNLNHDAMYWYRQDPGQGLRLIYYSQIVNDFQKGDIAEGYSVSREKKESFPLTVTSAQKNPTAFYLCASSPGALYEQYFGPGTRLTVTLEDLKNVFPPEVAVFEPSEAEISHTQKATLVCLATGFYPDHVELSWWVNGKEVHSGVSTDPQPLKEQPALNDSRYCLSSRLRVSATFWQNPRNHFRCQVQFYGLSENDEWTQDRAKPVTQIVSAEAWGRADCGSQSFGLLDPKLCYLLDGILFIYGVILTALFLRVKFSRSADAPAYQQGQNQLYNELNLGRREEYDVLDKRRGRDPEMGGKPQRRKNPQEGLYNELQKDKMAEAYSEIGMKGERRRGKGHDGLYQGLSTATKDTYDALHMQALPPRRAKRSGSGATNFSLLKQAGDVEENPGPTSMDWIWRILFLVGAATGAHSFEENVEQHPSTLSVQEGDSAVIKCTYSDSASNYFPWYKQELGKRPQLIIDIRSNVGEKKDQRIAVTLNKTAKHFSLHITETQPEDSAVYFCAATEDYQLIWGAGTKLIIKPDTRASTKGPSVFPLAPSSKSTSGGTAALGCLVKDYFPEPVTVSWNSGALTSGVHTFPAVLQSSGLYSLSSVVTVPSSSLGTQTYICNVNHKPSNTKVDKRVEPKSCTTPGERSSLPAFYPGTSGSCSGCGSLSLPLLAGLVAADAVASLLIVGAVFLCARPRRSPAQEDGKVYINMPGRGRAKRSGSGVKQTLNFDLLKLAGDVESNPGPSRGHMALPVTALLLPLALLLHAARPSQFRVSPLDRTWNLGETVELKCQVLLSNPTSGCSWLFQPRGAAASPTFLLYLSQNKPKAAEGLDTQRFSGKRLGDTFVLTLSDFRRENEGYYFCSALSNSIMYFSHFVPVFLPAKPTTTPAPRPPTPAPTIASQPLSLRPEACRPAAGGAVHTRGLDFACDIYIWAPLAGTCGVLLLSLVITLYCNHRNRRRVCKCPRPVVKSGDKPSLSARYV

SEQ ID NO: 10908 - protein, 930 aa, synthetic construct
MALPVTALLLPLALLLHAARPGITQSPKYLFRKEGQNVTLSCEQNLNHDAMYWYRQDPGQGLRLIYYSQIVNDFQKGDIAEGYSVSREKKESFPLTVTSAQKNPTAFYLCASSPGALYEQYFGPGTRLTVTLELWVSQPPEIRTLEGSSAFLPCSFNASQGRLAIGSVTWFRDEVVPGKEVRNGTPEFRGRLAPLASSRFLHDHQAELHIRDVRGHDASIYVCRVEVLGLGVGTGNGTRLVVEKEHPQLGAGTVLLLRAGFYAVSFLSVAVGSTVYYQGKCLTWKGPRRQLPAVVPAPLPPPCGSSAHLLPPVPGGRAKRSGSGATNFSLLKQAGDVEENPGPTSMDWIWRILFLVGAATGAHSFEENVEQHPSTLSVQEGDSAVIKCTYSDSASNYFPWYKQELGKRPQLIIDIRSNVGEKKDQRIAVTLNKTAKHFSLHITETQPEDSAVYFCAATEDYQLIWGAGTKLIIKPDTRLWVSQPPEIRTLEGSSAFLPCSFNASQGRLAIGSVTWFRDEVVPGKEVRNGTPEFRGRLAPLASSRFLHDHQAELHIRDVRGHDASIYVCRVEVLGLGVGTGNGTRLVVEKEHPQLGAGTVLLLRAGFYAVSFLSVAVGSTVYYQGKCLTWKGPRRQLPAVVPAPLPPPCGSSAHLLPPVPGGRAKRSGSGVKQTLNFDLLKLAGDVESNPGPSRGHMALPVTALLLPLALLLHAARPSQFRVSPLDRTWNLGETVELKCQVLLSNPTSGCSWLFQPRGAAASPTFLLYLSQNKPKAAEGLDTQRFSGKRLGDTFVLTLSDFRRENEGYYFCSALSNSIMYFSHFVPVFLPAKPTTTPAPRPPTPAPTIASQPLSLRPEACRPAAGGAVHTRGLDFACDIYIWAPLAGTCGVLLLSLVITLYCNHRNRRRVCKCPRPVVKSGDKPSLSARYV

SEQ ID NO: 10909 - protein, 1065 aa, synthetic construct
MALPVTALLLPLALLLHAARPEFGITQSPKYLFRKEGQNVTLSCEQNLNHDAMYWYRQDPGQGLRLIYYSQIVNDFQKGDIAEGYSVSREKKESFPLTVTSAQKNPTAFYLCASSPGALYEQYFGPGTRLTVTLEGQPKANPTVTLFPPSSEELQANKATLVCLISDFYPGAVTVAWKADGSPVKAGVETTKPSKQSNNKYAASSYLSLTPEQWKSHRSYSCQVTHEGSTVEKTVAPTECSGSQSFGLLDPKLCYLLDGILFIYGVILTALFLRVKFSRSADAPAYQQGQNQLYNELNLGRREEYDVLDKRRGRDPEMGGKPQRRKNPQEGLYNELQKDKMAEAYSEIGMKGERRRGKGHDGLYQGLSTATKDTYDALHMQALPPRRAKRSGSGATNFSLLKQAGDVEENPGPTSMDWIWRILFLVGAATGAHSFEENVEQHPSTLSVQEGDSAVIKCTYSDSASNYFPWYKQELGKRPQLIIDIRSNVGEKKDQRIAVTLNKTAKHFSLHITETQPEDSAVYFCAATEDYQLIWGAGTKLIIKPDTRASTKGPSVFPLAPSSKSTSGGTAALGCLVKDYFPEPVTVSWNSGALTSGVHTFPAVLQSSGLYSLSSVVTVPSSSLGTQTYICNVNHKPSNTKVDKRVEPKSCGTQSFGLLDPKLCYLLDGILFIYGVILTALFLRVKFSRSADAPAYQQGQNQLYNELNLGRREEYDVLDKRRGRDPEMGGKPQRRKNPQEGLYNELQKDKMAEAYSEIGMKGERRRGKGHDGLYQGLSTATKDTYDALHMQALPPRRAKRSGSGVKQTLNFDLLKLAGDVESNPGPSRGHMALPVTALLLPLALLLHAARPSQFRVSPLDRTWNLGETVELKCQVLLSNPTSGCSWLFQPRGAAASPTFLLYLSQNKPKAAEGLDTQRFSGKRLGDTFVLTLSDFRRENEGYYFCSALSNSIMYFSHFVPVFLPAKPTTTPAPRPPTPAPTIASQPLSLRPEACRPAAGGAVHTRGLDFACDIYIWAPLAGTCGVLLLSLVITLYCNHRNRRRVCKCPRPVVKSGDKPSLSARYV

SEQ ID NO: 10910 - protein, 1083 aa, synthetic construct
MALPVTALLLPLALLLHAARPEFGITQSPKYLFRKEGQNVTLSCEQNLNHDAMYWYRQDPGQGLRLIYYSQIVNDFQKGDIAEGYSVSREKKESFPLTVTSAQKNPTAFYLCASSPGALYEQYFGPGTRLTVTLEGQPKANPTVTLFPPSSEELQANKATLVCLISDFYPGAVTVAWKADGSPVKAGVETTKPSKQSNNKYAASSYLSLTPEQWKSHRSYSCQVTHEGSTVEKTVAPTECSGSQSFGLLDPKLCYLLDGILFIYGVILTALFLRVKFSRSADAPAYQQGQNQLYNELNLGRREEYDVLDKRRGRDPEMGGKPQRRKNPQEGLYNELQKDKMAEAYSEIGMKGERRRGKGHDGLYQGLSTATKDTYDALHMQALPPRRAKRSGSGATNFSLLKQAGDVEENPGPTSMDWIWRILFLVGAATGAHSFEENVEQHPSTLSVQEGDSAVIKCTYSDSASNYFPWYKQELGKRPQLIIDIRSNVGEKKDQRIAVTLNKTAKHFSLHITETQPEDSAVYFCAATEDYQLIWGAGTKLIIKPDTRASPTSPKVFPLSLCSTQPDGNVVIACLVQGFFPQEPLSVTWSESGQGVTARNFPPSQDASGDLYTTSSQLTLPATQCLAGKSVTCHVKHYTNPSQDVTVPCPVPSTPPTPSPSTPPTPSPSGTQSFGLLDPKLCYLLDGILFIYGVILTALFLRVKFSRSADAPAYQQGQNQLYNELNLGRREEYDVLDKRRGRDPEMGGKPQRRKNPQEGLYNELQKDKMAEAYSEIGMKGERRRGKGHDGLYQGLSTATKDTYDALHMQALPPRRAKRSGSGVKQTLNFDLLKLAGDVESNPGPSRGHMALPVTALLLPLALLLHAARPSQFRVSPLDRTWNLGETVELKCQVLLSNPTSGCSWLFQPRGAAASPTFLLYLSQNKPKAAEGLDTQRFSGKRLGDTFVLTLSDFRRENEGYYFCSALSNSIMYFSHFVPVFLPAKPTTTPAPRPPTPAPTIASQPLSLRPEACRPAAGGAVHTRGLDFACDIYIWAPLAGTCGVLLLSLVITLYCNHRNRRRVCKCPRPVVKSGDKPSLSARYV

SEQ ID NO: 10911 - protein, 1064 aa, synthetic construct
MALPVTALLLPLALLLHAARPEFGITQSPKYLFRKEGQNVTLSCEQNLNHDAMYWYRQDPGQGLRLIYYSQIVNDFQKGDIAEGYSVSREKKESFPLTVTSAQKNPTAFYLCASSPGALYEQYFGPGTRLTVTLEGQPKANPTVTLFPPSSEELQANKATLVCLISDFYPGAVTVAWKADGSPVKAGVETTKPSKQSNNKYAASSYLSLTPEQWKSHRSYSCQVTHEGSTVEKTVAPTECSGSQSFGLLDPKLCYLLDGILFIYGVILTALFLRVKFSRSADAPAYQQGQNQLYNELNLGRREEYDVLDKRRGRDPEMGGKPQRRKNPQEGLYNELQKDKMAEAYSEIGMKGERRRGKGHDGLYQGLSTATKDTYDALHMQALPPRRAKRSGSGATNFSLLKQAGDVEENPGPTSMDWIWRILFLVGAATGAHSFEENVEQHPSTLSVQEGDSAVIKCTYSDSASNYFPWYKQELGKRPQLIIDIRSNVGEKKDQRIAVTLNKTAKHFSLHITETQPEDSAVYFCAATEDYQLIWGAGTKLIIKPDTRASTKGPSVFPLAPCSRSTSESTAALGCLVKDYFPEPVTVSWNSGALTSGVHTFPAVLQSSGLYSLSSVVTVPSSNFGTQTYTCNVDHKPSNTKVDKTVERKCGTQSFGLLDPKLCYLLDGILFIYGVILTALFLRVKFSRSADAPAYQQGQNQLYNELNLGRREEYDVLDKRRGRDPEMGGKPQRRKNPQEGLYNELQKDKMAEAYSEIGMKGERRRGKGHDGLYQGLSTATKDTYDALHMQALPPRRAKRSGSGVKQTLNFDLLKLAGDVESNPGPSRGHMALPVTALLLPLALLLHAARPSQFRVSPLDRTWNLGETVELKCQVLLSNPTSGCSWLFQPRGAAASPTFLLYLSQNKPKAAEGLDTQRFSGKRLGDTFVLTLSDFRRENEGYYFCSALSNSIMYFSHFVPVFLPAKPTTTPAPRPPTPAPTIASQPLSLRPEACRPAAGGAVHTRGLDFACDIYIWAPLAGTCGVLLLSLVITLYCNHRNRRRVCKCPRPVVKSGDKPSLSARYV

SEQ ID NO: 10912 - protein, 1119 aa, synthetic construct
MALPVTALLLPLALLLHAARPGITQSPKYLFRKEGQNVTLSCEQNLNHDAMYWYRQDPGQGLRLIYYSQIVNDFQKGDIAEGYSVSREKKESFPLTVTSAQKNPTAFYLCASSPGALYEQYFGPGTRLTVTLEGQPKANPTVTLFPPSSEELQANKATLVCLISDFYPGAVTVAWKADGSPVKAGVETTKPSKQSNNKYAASSYLSLTPEQWKSHRSYSCQVTHEGSTVEKTVAPTECSGSQSFGLLDPKLCYLLDGILFIYGVILTALFLRVKFSRSADAPAYQQGQNQLYNELNLGRREEYDVLDKRRGRDPEMGGKPQRRKNPQEGLYNELQKDKMAEAYSEIGMKGERRRGKGHDGLYQGLSTATKDTYDALHMQALPPRRAKRSGSGATNFSLLKQAGDVEENPGPTSMDWIWRILFLVGAATGAHSFEENVEQHPSTLSVQEGDSAVIKCTYSDSASNYFPWYKQELGKRPQLIIDIRSNVGEKKDQRIAVTLNKTAKHFSLHITETQPEDSAVYFCAATEDYQLIWGAGTKLIIKPDTRAPTKAPDVFPIISGCRHPKDNSPVVLACLITGYHPTSVTVTWYMGTQSQPQRTFPEIQRRDSYYMTSSQLSTPLQQWRQGEYKCVVQHTASKSKKEIFRWPESPKAQASSVPTAQPQAEGSLAKATTAPATTRNTGRGGEEKKKEKEKEEQEERETKTPGTQSFGLLDPKLCYLLDGILFIYGVILTALFLRVKFSRSADAPAYQQGQNQLYNELNLGRREEYDVLDKRRGRDPEMGGKPQRRKNPQEGLYNELQKDKMAEAYSEIGMKGERRRGKGHDGLYQGLSTATKDTYDALHMQALPPRRAKRSGSGVKQTLNFDLLKLAGDVESNPGPSRGHMALPVTALLLPLALLLHAARPSQFRVSPLDRTWNLGETVELKCQVLLSNPTSGCSWLFQPRGAAASPTFLLYLSQNKPKAAEGLDTQRFSGKRLGDTFVLTLSDFRRENEGYYFCSALSNSIMYFSHFVPVFLPAKPTTTPAPRPPTPAPTIASQPLSLRPEACRPAAGGAVHTRGLDFACDIYIWAPLAGTCGVLLLSLVITLYCNHRNRRRVCKCPRPVVKSGDKPSLSARYV

SEQ ID NO: 10913 - protein, 1061 aa, synthetic construct
MALPVTALLLPLALLLHAARPGITQSPKYLFRKEGQNVTLSCEQNLNHDAMYWYRQDPGQGLRLIYYSQIVNDFQKGDIAEGYSVSREKKESFPLTVTSAQKNPTAFYLCASSPGALYEQYFGPGTRLTVTLEGQPKANPTVTLFPPSSEELQANKATLVCLISDFYPGAVTVAWKADGSPVKAGVETTKPSKQSNNKYAASSYLSLTPEQWKSHRSYSCQVTHEGSTVEKTVAPTECSGSQSFGLLDPKLCYLLDGILFIYGVILTALFLRVKFSRSADAPAYQQGQNQLYNELNLGRREEYDVLDKRRGRDPEMGGKPQRRKNPQEGLYNELQKDKMAEAYSEIGMKGERRRGKGHDGLYQGLSTATKDTYDALHMQALPPRRAKRSGSGATNFSLLKQAGDVEENPGPTSMDWIWRILFLVGAATGAHSFEENVEQHPSTLSVQEGDSAVIKCTYSDSASNYFPWYKQELGKRPQLIIDIRSNVGEKKDQRIAVTLNKTAKHFSLHITETQPEDSAVYFCAATEDYQLIWGAGTKLIIKPDTRASTKGPSVFPLAPCSRSTSESTAALGCLVKDYFPEPVTVSWNSGALTSGVHTFPAVLQSSGLYSLSSVVTVPSSNFGTQTYTCNVDHKPSNTKVDKTVERKGTQSFGLLDPKLCYLLDGILFIYGVILTALFLRVKFSRSADAPAYQQGQNQLYNELNLGRREEYDVLDKRRGRDPEMGGKPQRRKNPQEGLYNELQKDKMAEAYSEIGMKGERRRGKGHDGLYQGLSTATKDTYDALHMQALPPRRAKRSGSGVKQTLNFDLLKLAGDVESNPGPSRGHMALPVTALLLPLALLLHAARPSQFRVSPLDRTWNLGETVELKCQVLLSNPTSGCSWLFQPRGAAASPTFLLYLSQNKPKAAEGLDTQRFSGKRLGDTFVLTLSDFRRENEGYYFCSALSNSIMYFSHFVPVFLPAKPTTTPAPRPPTPAPTIASQPLSLRPEACRPAAGGAVHTRGLDFACDIYIWAPLAGTCGVLLLSLVITLYCNHRNRRRVCKCPRPVVKSGDKPSLSARYV

SEQ ID NO: 10914 - protein, 1068 aa, synthetic construct
MALPVTALLLPLALLLHAARPGITQSPKYLFRKEGQNVTLSCEQNLNHDAMYWYRQDPGQGLRLIYYSQIVNDFQKGDIAEGYSVSREKKESFPLTVTSAQKNPTAFYLCASSPGALYEQYFGPGTRLTVTLEGQPKANPTVTLFPPSSEELQANKATLVCLISDFYPGAVTVAWKADGSPVKAGVETTKPSKQSNNKYAASSYLSLTPEQWKSHRSYSCQVTHEGSTVEKTVAPTECSGSQSFGLLDPKLCYLLDGILFIYGVILTALFLRVKFSRSADAPAYQQGQNQLYNELNLGRREEYDVLDKRRGRDPEMGGKPQRRKNPQEGLYNELQKDKMAEAYSEIGMKGERRRGKGHDGLYQGLSTATKDTYDALHMQALPPRRAKRSGSGATNFSLLKQAGDVEENPGPTSMDWIWRILFLVGAATGAHSFEENVEQHPSTLSVQEGDSAVIKCTYSDSASNYFPWYKQELGKRPQLIIDIRSNVGEKKDQRIAVTLNKTAKHFSLHITETQPEDSAVYFCAATEDYQLIWGAGTKLIIKPDTRASPTSPKVFPLSLDSTPQDGNVVVACLVQGFFPQEPLSVTWSESGQNVTARNFPPSQDASGDLYTTSSQLTLPATQCPDGKSVTCHVKHYTNPSQDVTVPCPVPPPPPGTQSFGLLDPKLCYLLDGILFIYGVILTALFLRVKFSRSADAPAYQQGQNQLYNELNLGRREEYDVLDKRRGRDPEMGGKPQRRKNPQEGLYNELQKDKMAEAYSEIGMKGERRRGKGHDGLYQGLSTATKDTYDALHMQALPPRRAKRSGSGVKQTLNFDLLKLAGDVESNPGPSRGHMALPVTALLLPLALLLHAARPSQFRVSPLDRTWNLGETVELKCQVLLSNPTSGCSWLFQPRGAAASPTFLLYLSQNKPKAAEGLDTQRFSGKRLGDTFVLTLSDFRRENEGYYFCSALSNSIMYFSHFVPVFLPAKPTTTPAPRPPTPAPTIASQPLSLRPEACRPAAGGAVHTRGLDFACDIYIWAPLAGTCGVLLLSLVITLYCNHRNRRRVCKCPRPVVKSGDKPSLSARYV

SEQ ID NO: 10915 - protein, 1063 aa, synthetic construct
MALPVTALLLPLALLLHAARPGITQSPKYLFRKEGQNVTLSCEQNLNHDAMYWYRQDPGQGLRLIYYSQIVNDFQKGDIAEGYSVSREKKESFPLTVTSAQKNPTAFYLCASSPGALYEQYFGPGTRLTVTLEGQPKANPTVTLFPPSSEELQANKATLVCLISDFYPGAVTVAWKADGSPVKAGVETTKPSKQSNNKYAASSYLSLTPEQWKSHRSYSCQVTHEGSTVEKTVAPTECSGSQSFGLLDPKLCYLLDGILFIYGVILTALFLRVKFSRSADAPAYQQGQNQLYNELNLGRREEYDVLDKRRGRDPEMGGKPQRRKNPQEGLYNELQKDKMAEAYSEIGMKGERRRGKGHDGLYQGLSTATKDTYDALHMQALPPRRAKRSGSGATNFSLLKQAGDVEENPGPTSMDWIWRILFLVGAATGAHSFEENVEQHPSTLSVQEGDSAVIKCTYSDSASNYFPWYKQELGKRPQLIIDIRSNVGEKKDQRIAVTLNKTAKHFSLHITETQPEDSAVYFCAATEDYQLIWGAGTKLIIKPDTRASTQSPSVFPLTRCCKNIPSNATSVTLGCLATGYFPEPVMVTWDTGSLNGTTMTLPATTLTLSGHYATISLLTVSGAWAKQMFTCRVAHTPSSTDWVDNKTFSGTQSFGLLDPKLCYLLDGILFIYGVILTALFLRVKFSRSADAPAYQQGQNQLYNELNLGRREEYDVLDKRRGRDPEMGGKPQRRKNPQEGLYNELQKDKMAEAYSEIGMKGERRRGKGHDGLYQGLSTATKDTYDALHMQALPPRRAKRSGSGVKQTLNFDLLKLAGDVESNPGPSRGHMALPVTALLLPLALLLHAARPSQFRVSPLDRTWNLGETVELKCQVLLSNPTSGCSWLFQPRGAAASPTFLLYLSQNKPKAAEGLDTQRFSGKRLGDTFVLTLSDFRRENEGYYFCSALSNSIMYFSHFVPVFLPAKPTTTPAPRPPTPAPTIASQPLSLRPEACRPAAGGAVHTRGLDFACDIYIWAPLAGTCGVLLLSLVITLYCNHRNRRRVCKCPRPVVKSGDKPSLSARYV

SEQ ID NO: 10916 - protein, 1063 aa, synthetic construct
MALPVTALLLPLALLLHAARPGITQSPKYLFRKEGQNVTLSCEQNLNHDAMYWYRQDPGQGLRLIYYSQIVNDFQKGDIAEGYSVSREKKESFPLTVTSAQKNPTAFYLCASSPGALYEQYFGPGTRLTVTLEGQPKANPTVTLFPPSSEELQANKATLVCLISDFYPGAVTVAWKADGSPVKAGVETTKPSKQSNNKYAASSYLSLTPEQWKSHRSYSCQVTHEGSTVEKTVAPTECSGSQSFGLLDPKLCYLLDGILFIYGVILTALFLRVKFSRSADAPAYQQGQNQLYNELNLGRREEYDVLDKRRGRDPEMGGKPQRRKNPQEGLYNELQKDKMAEAYSEIGMKGERRRGKGHDGLYQGLSTATKDTYDALHMQALPPRRAKRSGSGATNFSLLKQAGDVEENPGPTSMDWIWRILFLVGAATGAHSFEENVEQHPSTLSVQEGDSAVIKCTYSDSASNYFPWYKQELGKRPQLIIDIRSNVGEKKDQRIAVTLNKTAKHFSLHITETQPEDSAVYFCAATEDYQLIWGAGTKLIIKPDTRASTKGPSVFPLAPCSRSTSESTAALGCLVKDYFPEPVTVSWNSGALTSGVHTFPAVLQSSGLYSLSSVVTVPSSSLGTKTYTCNVDHKPSNTKVDKRVESKYGGTQSFGLLDPKLCYLLDGILFIYGVILTALFLRVKFSRSADAPAYQQGQNQLYNELNLGRREEYDVLDKRRGRDPEMGGKPQRRKNPQEGLYNELQKDKMAEAYSEIGMKGERRRGKGHDGLYQGLSTATKDTYDALHMQALPPRRAKRSGSGVKQTLNFDLLKLAGDVESNPGPSRGHMALPVTALLLPLALLLHAARPSQFRVSPLDRTWNLGETVELKCQVLLSNPTSGCSWLFQPRGAAASPTFLLYLSQNKPKAAEGLDTQRFSGKRLGDTFVLTLSDFRRENEGYYFCSALSNSIMYFSHFVPVFLPAKPTTTPAPRPPTPAPTIASQPLSLRPEACRPAAGGAVHTRGLDFACDIYIWAPLAGTCGVLLLSLVITLYCNHRNRRRVCKCPRPVVKSGDKPSLSARYV

SEQ ID NO: 10917 - protein, 1063 aa, synthetic construct
MALPVTALLLPLALLLHAARPGITQSPKYLFRKEGQNVTLSCEQNLNHDAMYWYRQDPGQGLRLIYYSQIVNDFQKGDIAEGYSVSREKKESFPLTVTSAQKNPTAFYLCASSPGALYEQYFGPGTRLTVTLEGQPKANPTVTLFPPSSEELQANKATLVCLISDFYPGAVTVAWKADGSPVKAGVETTKPSKQSNNKYAASSYLSLTPEQWKSHRSYSCQVTHEGSTVEKTVAPTECSGSQSFGLLDPKLCYLLDGILFIYGVILTALFLRVKFSRSADAPAYQQGQNQLYNELNLGRREEYDVLDKRRGRDPEMGGKPQRRKNPQEGLYNELQKDKMAEAYSEIGMKGERRRGKGHDGLYQGLSTATKDTYDALHMQALPPRRAKRSGSGATNFSLLKQAGDVEENPGPTSMDWIWRILFLVGAATGAHSFEENVEQHPSTLSVQEGDSAVIKCTYSDSASNYFPWYKQELGKRPQLIIDIRSNVGEKKDQRIAVTLNKTAKHFSLHITETQPEDSAVYFCAATEDYQLIWGAGTKLIIKPDTRASTKGPSVFPLAPCSRSTSESTAALGCLVKDYFPEPVTVSWNSGALTSGVHTFPAVLQSSGLYSLSSVVTVPSSNFGTQTYTCNVDHKPSNTKVDKTVERKCCGTQSFGLLDPKLCYLLDGILFIYGVILTALFLRVKFSRSADAPAYQQGQNQLYNELNLGRREEYDVLDKRRGRDPEMGGKPQRRKNPQEGLYNELQKDKMAEAYSEIGMKGERRRGKGHDGLYQGLSTATKDTYDALHMQALPPRRAKRSGSGVKQTLNFDLLKLAGDVESNPGPSRGHMALPVTALLLPLALLLHAARPSQFRVSPLDRTWNLGETVELKCQVLLSNPTSGCSWLFQPRGAAASPTFLLYLSQNKPKAAEGLDTQRFSGKRLGDTFVLTLSDFRRENEGYYFCSALSNSIMYFSHFVPVFLPAKPTTTPAPRPPTPAPTIASQPLSLRPEACRPAAGGAVHTRGLDFACDIYIWAPLAGTCGVLLLSLVITLYCNHRNRRRVCKCPRPVVKSGDKPSLSARYV

SEQ ID NO: 10918 - protein, 1078 aa, synthetic construct
MALPVTALLLPLALLLHAARPGITQSPKYLFRKEGQNVTLSCEQNLNHDAMYWYRQDPGQGLRLIYYSQIVNDFQKGDIAEGYSVSREKKESFPLTVTSAQKNPTAFYLCASSPGALYEQYFGPGTRLTVTLEDLKNVFPPEVAVFEPSEAEISHTQKATLVCLATGFYPDHVELSWWVNGKEVHSGVSTDPQPLKEQPALNDSRYCLSSRLRVSATFWQNPRNHFRCQVQFYGLSENDEWTQDRAKPVTQIVSAEAWGRADCGSQSFGLLDPKLCYLLDGILFIYGVILTALFLRVKFSRSADAPAYQQGQNQLYNELNLGRREEYDVLDKRRGRDPEMGGKPQRRKNPQEGLYNELQKDKMAEAYSEIGMKGERRRGKGHDGLYQGLSTATKDTYDALHMQALPPRRAKRSGSGATNFSLLKQAGDVEENPGPTSMDWIWRILFLVGAATGAHSFEENVEQHPSTLSVQEGDSAVIKCTYSDSASNYFPWYKQELGKRPQLIIDIRSNVGEKKDQRIAVTLNKTAKHFSLHITETQPEDSAVYFCAATEDYQLIWGAGTKLIIKPDTRIQNPDPAVYQLRDSKSSDKSVCLFTDFDSQTNVSQSKDSDVYITDKTVLDMRSMDFKSNSAVAWSNKSDFACANAFNNSIIPEDTFFPSPESSCGTQSFGLLDPKLCYLLDGILFIYGVILTALFLRVKFSRSADAPAYQQGQNQLYNELNLGRREEYDVLDKRRGRDPEMGGKPQRRKNPQEGLYNELQKDKMAEAYSEIGMKGERRRGKGHDGLYQGLSTATKDTYDALHMQALPPRRAKRSGSGVKQTLNFDLLKLAGDVESNPGPSRGHMALPVTALLLPLALLLHAARPSQFRVSPLDRTWNLGETVELKCQVLLSNPTSGCSWLFQPRGAAASPTFLLYLSQNKPKAAEGLDTQRFSGKRLGDTFVLTLSDFRRENEGYYFCSALSNSIMYFSHFVPVFLPAKPTTTPAPRPPTPAPTIASQPLSLRPEACRPAAGGAVHTRGLDFACDIYIWAPLAGTCGVLLLSLVITLYCNHRNRRRVCKCPRPVVKSGDKPSLSARYV

SEQ ID NO: 10919 - protein, 1078 aa, synthetic construct
MALPVTALLLPLALLLHAARPGITQSPKYLFRKEGQNVTLSCEQNLNHDAMYWYRQDPGQGLRLIYYSQIVNDFQKGDIAEGYSVSREKKESFPLTVTSAQKNPTAFYLCASSPGALYEQYFGPGTRLTVTLEDLKNVFPPEVAVFEPSKAEIAHTQKATLVCLATGFYPDHVELSWWVNGKEVHSGVCTDPQPLKEQPALNDSRYCLSSRLRVSATFWQNPRNHFRCQVQFYGLSENDEWTQDRAKPVTQIVSAEAWGRADCGSQSFGLLDPKLCYLLDGILFIYGVILTALFLRVKFSRSADAPAYQQGQNQLYNELNLGRREEYDVLDKRRGRDPEMGGKPQRRKNPQEGLYNELQKDKMAEAYSEIGMKGERRRGKGHDGLYQGLSTATKDTYDALHMQALPPRRAKRSGSGATNFSLLKQAGDVEENPGPTSMDWIWRILFLVGAATGAHSFEENVEQHPSTLSVQEGDSAVIKCTYSDSASNYFPWYKQELGKRPQLIIDIRSNVGEKKDQRIAVTLNKTAKHFSLHITETQPEDSAVYFCAATEDYQLIWGAGTKLIIKPDTRIQNPDPAVYQLRDSKSSDKSVCLFTDFDSQTNVSQSKDSDVYITDKCVLDMRSMDFKSNSAVAWSNKSDFACANAFNNSIIPEDTFFPSSDVPCGTQSFGLLDPKLCYLLDGILFIYGVILTALFLRVKFSRSADAPAYQQGQNQLYNELNLGRREEYDVLDKRRGRDPEMGGKPQRRKNPQEGLYNELQKDKMAEAYSEIGMKGERRRGKGHDGLYQGLSTATKDTYDALHMQALPPRRAKRSGSGVKQTLNFDLLKLAGDVESNPGPSRGHMALPVTALLLPLALLLHAARPSQFRVSPLDRTWNLGETVELKCQVLLSNPTSGCSWLFQPRGAAASPTFLLYLSQNKPKAAEGLDTQRFSGKRLGDTFVLTLSDFRRENEGYYFCSALSNSIMYFSHFVPVFLPAKPTTTPAPRPPTPAPTIASQPLSLRPEACRPAAGGAVHTRGLDFACDIYIWAPLAGTCGVLLLSLVITLYCNHRNRRRVCKCPRPVVKSGDKPSLSARYV

SEQ ID NO: 10920 - protein, 809 aa, synthetic construct
MALPVTALLLPLALLLHAARPGITQSPKYLFRKEGQNVTLSCEQNLNHDAMYWYRQDPGQGLRLIYYSQIVNDFQKGDIAEGYSVSREKKESFPLTVTSAQKNPTAFYLCASSPGALYEQYFGPGTRLTVTLEDLKNVFPPEVAVFEPSEAEISHTQKATLVCLATGFYPDHVELSWWVNGKEVHSGVCTDPQPLKEQPALNDSRYCLSSRLRVSATFWQNPRNHFRCQVQFYGLSENDEWTQDRAKPVTQIVSAEAWGRADCGSQSFGLLDPKLCYLLDGILFIYGVILTALFLRVKFSRSADAPAYQQGQNQLYNELNLGRREEYDVLDKRRGRDPEMGGKPQRRKNPQEGLYNELQKDKMAEAYSEIGMKGERRRGKGHDGLYQGLSTATKDTYDALHMQALPPRRAKRSGSGATNFSLLKQAGDVEENPGPTSMDWIWRILFLVGAATGAHSFEENVEQHPSTLSVQEGDSAVIKCTYSDSASNYFPWYKQELGKRPQLIIDIRSNVGEKKDQRIAVTLNKTAKHFSLHITETQPEDSAVYFCAATEDYQLIWGAGTKLIIKPDTRIQNPDPAVYQLRDSKSSDKSVCLFTDFDSQTNVSQSKDSDVYITDKCVLDMRSMDFKSNSAVAWSNKSDFACANAFNNSIIPEDTFFPSPESSCGTQSFGLLDPKLCYLLDGILFIYGVILTALFLRVKFSRSADAPAYQQGQNQLYNELNLGRREEYDVLDKRRGRDPEMGGKPQRRKNPQEGLYNELQKDKMAEAYSEIGMKGERRRGKGHDGLYQGLSTATKDTYDALHMQALPPR

SEQ ID NO: 10921 - protein, 850 aa, synthetic construct
MALPVTALLLPLALLLHAARPGITQSPKYLFRKEGQNVTLSCEQNLNHDAMYWYRQDPGQGLRLIYYSQIVNDFQKGDIAEGYSVSREKKESFPLTVTSAQKNPTAFYLCASSPGALYEQYFGPGTRLTVTLEQSFGLLDPKLCYLLDGILFIYGVILTALFLRVKFSRSADAPAYQQGQNQLYNELNLGRREEYDVLDKRRGRDPEMGGKPQRRKNPQEGLYNELQKDKMAEAYSEIGMKGERRRGKGHDGLYQGLSTATKDTYDALHMQALPPRRAKRSGSGATNFSLLKQAGDVEENPGPTSMDWIWRILFLVGAATGAHSFEENVEQHPSTLSVQEGDSAVIKCTYSDSASNYFPWYKQELGKRPQLIIDIRSNVGEKKDQRIAVTLNKTAKHFSLHITETQPEDSAVYFCAATEDYQLIWGAGTKLIIKPDTRQSFGLLDPKLCYLLDGILFIYGVILTALFLRVKFSRSADAPAYQQGQNQLYNELNLGRREEYDVLDKRRGRDPEMGGKPQRRKNPQEGLYNELQKDKMAEAYSEIGMKGERRRGKGHDGLYQGLSTATKDTYDALHMQALPPRRAKRSGSGVKQTLNFDLLKLAGDVESNPGPSRGHMALPVTALLLPLALLLHAARPSQFRVSPLDRTWNLGETVELKCQVLLSNPTSGCSWLFQPRGAAASPTFLLYLSQNKPKAAEGLDTQRFSGKRLGDTFVLTLSDFRRENEGYYFCSALSNSIMYFSHFVPVFLPAKPTTTPAPRPPTPAPTIASQPLSLRPEACRPAAGGAVHTRGLDFACDIYIWAPLAGTCGVLLLSLVITLYCNHRNRRRVCKCPRPVVKSGDKPSLSARYV

SEQ ID NO: 10922 - protein, 850 aa, synthetic construct
MALPVTALLLPLALLLHAARPGITQSPKYLFRKEGQNVTLSCEQNLNHDAMYWYRQDPGQGLRLIYYSQIVNDFQKGDIAEGYSVSREKKESFPLTVTSAQKNPTAFYLCASSPGALYEQYFGPGTRLTVTLEDLKNVFPPEVAVFEPSEAEISHTQKATLVCLATGFYPDHVELSWWVNGKEVHSGVCTDPQPLKEQPALNDSRYCLSSRLRVSATFWQNPRNHFRCQVQFYGLSENDEWTQDRAKPVTQIVSAEAWGRADCGSQSFGLLDPKLCYLLDGILFIYGVILTALFLRSKRSRLLHSDYMNMTPRRPGPTRKHYQPYAPPRDFAAYRSRVKFSRSADAPAYQQGQNQLYNELNLGRREEYDVLDKRRGRDPEMGGKPQRRKNPQEGLYNELQKDKMAEAYSEIGMKGERRRGKGHDGLYQGLSTATKDTYDALHMQALPPRRAKRSGSGATNFSLLKQAGDVEENPGPTSMDWIWRILFLVGAATGAHSFEENVEQHPSTLSVQEGDSAVIKCTYSDSASNYFPWYKQELGKRPQLIIDIRSNVGEKKDQRIAVTLNKTAKHFSLHITETQPEDSAVYFCAATEDYQLIWGAGTKLIIKPDTRIQNPDPAVYQLRDSKSSDKSVCLFTDFDSQTNVSQSKDSDVYITDKCVLDMRSMDFKSNSAVAWSNKSDFACANAFNNSIIPEDTFFPSPESSCGTQSFGLLDPKLCYLLDGILFIYGVILTALFLRVKFSRSADAPAYQQGQNQLYNELNLGRREEYDVLDKRRGRDPEMGGKPQRRKNPQEGLYNELQKDKMAEAYSEIGMKGERRRGKGHDGLYQGLSTATKDTYDALHMQALPPR

SEQ ID NO: 10923 - protein, 891 aa, synthetic construct
MALPVTALLLPLALLLHAARPGITQSPKYLFRKEGQNVTLSCEQNLNHDAMYWYRQDPGQGLRLIYYSQIVNDFQKGDIAEGYSVSREKKESFPLTVTSAQKNPTAFYLCASSPGALYEQYFGPGTRLTVTLEDLKNVFPPEVAVFEPSEAEISHTQKATLVCLATGFYPDHVELSWWVNGKEVHSGVCTDPQPLKEQPALNDSRYCLSSRLRVSATFWQNPRNHFRCQVQFYGLSENDEWTQDRAKPVTQIVSAEAWGRADCGSQSFGLLDPKLCYLLDGILFIYGVILTALFLRSKRSRLLHSDYMNMTPRRPGPTRKHYQPYAPPRDFAAYRSRVKFSRSADAPAYQQGQNQLYNELNLGRREEYDVLDKRRGRDPEMGGKPQRRKNPQEGLYNELQKDKMAEAYSEIGMKGERRRGKGHDGLYQGLSTATKDTYDALHMQALPPRRAKRSGSGATNFSLLKQAGDVEENPGPTSMDWIWRILFLVGAATGAHSFEENVEQHPSTLSVQEGDSAVIKCTYSDSASNYFPWYKQELGKRPQLIIDIRSNVGEKKDQRIAVTLNKTAKHFSLHITETQPEDSAVYFCAATEDYQLIWGAGTKLIIKPDTRIQNPDPAVYQLRDSKSSDKSVCLFTDFDSQTNVSQSKDSDVYITDKCVLDMRSMDFKSNSAVAWSNKSDFACANAFNNSIIPEDTFFPSPESSCGTQSFGLLDPKLCYLLDGILFIYGVILTALFLRSKRSRLLHSDYMNMTPRRPGPTRKHYQPYAPPRDFAAYRSRVKFSRSADAPAYQQGQNQLYNELNLGRREEYDVLDKRRGRDPEMGGKPQRRKNPQEGLYNELQKDKMAEAYSEIGMKGERRRGKGHDGLYQGLSTATKDTYDALHMQALPPR

SEQ ID NO: 10924 - protein, 809 aa, synthetic construct
MALPVTALLLPLALLLHAARPGITQSPKYLFRKEGQNVTLSCEQNLNHDAMYWYRQDPGQGLRLIYYSQIVNDFQKGDIAEGYSVSREKKESFPLTVTSAQKNPTAFYLCASSPGALYEQYFGPGTRLTVTLEDLKNVFPPEVAVFEPSEAEISHTQKATLVCLATGFYPDHVELSWWVNGKEVHSGVSTDPQPLKEQPALNDSRYCLSSRLRVSATFWQNPRNHFRCQVQFYGLSENDEWTQDRAKPVTQIVSAEAWGRADCGSQSFGLLDPKLCYLLDGILFIYGVILTALFLRVKFSRSADAPAYQQGQNQLYNELNLGRREEYDVLDKRRGRDPEMGGKPQRRKNPQEGLYNELQKDKMAEAYSEIGMKGERRRGKGHDGLYQGLSTATKDTYDALHMQALPPRRAKRSGSGATNFSLLKQAGDVEENPGPTSMDWIWRILFLVGAATGAHSFEENVEQHPSTLSVQEGDSAVIKCTYSDSASNYFPWYKQELGKRPQLIIDIRSNVGEKKDQRIAVTLNKTAKHFSLHITETQPEDSAVYFCAATEDYQLIWGAGTKLIIKPDTRIQNPDPAVYQLRDSKSSDKSVCLFTDFDSQTNVSQSKDSDVYITDKTVLDMRSMDFKSNSAVAWSNKSDFACANAFNNSIIPEDTFFPSPESSCGTQSFGLLDPKLCYLLDGILFIYGVILTALFLRVKFSRSADAPAYQQGQNQLYNELNLGRREEYDVLDKRRGRDPEMGGKPQRRKNPQEGLYNELQKDKMAEAYSEIGMKGERRRGKGHDGLYQGLSTATKDTYDALHMQALPPR

SEQ ID NO: 10925 - protein, 1053 aa, synthetic construct
MALPVTALLLPLALLLHAARPGITQSPKYLFRKEGQNVTLSCEQNLNHDAMYWYRQDPGQGLRLIYYSQIVNDFQKGDIAEGYSVSREKKESFPLTVTSAQKNPTAFYLCASSPGALYEQYFGPGTRLTVTLEDKQLDADVSPKPTIFLPSIAETKLQKAGTYLCLLEKFFPDVIKIHWQEKKSNTILGSQEGNTMKTNDTYMKFSWLTVPEKSLDKEHRCIVRHENNKNGVDQEIIFPPIKTDVITGSQSFGLLDPKLCYLLDGILFIYGVILTALFLRVKFSRSADAPAYQQGQNQLYNELNLGRREEYDVLDKRRGRDPEMGGKPQRRKNPQEGLYNELQKDKMAEAYSEIGMKGERRRGKGHDGLYQGLSTATKDTYDALHMQALPPRRAKRSGSGATNFSLLKQAGDVEENPGPTSMDWIWRILFLVGAATGAHSFEENVEQHPSTLSVQEGDSAVIKCTYSDSASNYFPWYKQELGKRPQLIIDIRSNVGEKKDQRIAVTLNKTAKHFSLHITETQPEDSAVYFCAATEDYQLIWGAGTKLIIKPDTRSQPHTKPSVFVMKNGTNVACLVKEFYPKDIRINLVSSKKITEFDPAIVISPSGKYNAVKLGKYEDSNSVTCSVQHDNKTVHSTDFGTQSFGLLDPKLCYLLDGILFIYGVILTALFLRVKFSRSADAPAYQQGQNQLYNELNLGRREEYDVLDKRRGRDPEMGGKPQRRKNPQEGLYNELQKDKMAEAYSEIGMKGERRRGKGHDGLYQGLSTATKDTYDALHMQALPPRRAKRSGSGVKQTLNFDLLKLAGDVESNPGPSRGHMALPVTALLLPLALLLHAARPSQFRVSPLDRTWNLGETVELKCQVLLSNPTSGCSWLFQPRGAAASPTFLLYLSQNKPKAAEGLDTQRFSGKRLGDTFVLTLSDFRRENEGYYFCSALSNSIMYFSHFVPVFLPAKPTTTPAPRPPTPAPTIASQPLSLRPEACRPAAGGAVHTRGLDFACDIYIWAPLAGTCGVLLLSLVITLYCNHRNRRRVCKCPRPVVKSGDKPSLSARYV

SEQ ID NO: 10926 - protein, 921 aa, synthetic construct
MALPVTALLLPLALLLHAARPGITQSPKYLFRKEGQNVTLSCEQNLNHDAMYWYRQDPGQGLRLIYYSQIVNDFQKGDIAEGYSVSREKKESFPLTVTSAQKNPTAFYLCASSPGALYEQYFGPGTRLTVTLEGQPKANPTVTLFPPSSEELQANKATLVCLISDFYPGAVTVAWKADGSPVKAGVETTKPSKQSNNKYAASSYLSLTPEQWKSHRSYSCQVTHEGSTVEKTVAPTECSTTPGERSSLPAFYPGTSGSCSGCGSLSLPLLAGLVAADAVASLLIVGAVFLCARPRRSPAQEDGKVYINMPGRGRAKRSGSGATNFSLLKQAGDVEENPGPTSMDWIWRILFLVGAATGAHSFEENVEQHPSTLSVQEGDSAVIKCTYSDSASNYFPWYKQELGKRPQLIIDIRSNVGEKKDQRIAVTLNKTAKHFSLHITETQPEDSAVYFCAATEDYQLIWGAGTKLIIKPDTRASTKGPSVFPLAPSSKSTSGGTAALGCLVKDYFPEPVTVSWNSGALTSGVHTFPAVLQSSGLYSLSSVVTVPSSSLGTQTYICNVNHKPSNTKVDKRVEPKSCTTPGERSSLPAFYPGTSGSCSGCGSLSLPLLAGLVAADAVASLLIVGAVFLCARPRRSPAQEDGKVYINMPGRGRAKRSGSGVKQTLNFDLLKLAGDVESNPGPSRGHMALPVTALLLPLALLLHAARPSQFRVSPLDRTWNLGETVELKCQVLLSNPTSGCSWLFQPRGAAASPTFLLYLSQNKPKAAEGLDTQRFSGKRLGDTFVLTLSDFRRENEGYYFCSALSNSIMYFSHFVPVFLPAKPTTTPAPRPPTPAPTIASQPLSLRPEACRPAAGGAVHTRGLDFACDIYIWAPLAGTCGVLLLSLVITLYCNHRNRRRVCKCPRPVVKSGDKPSLSARYV

SEQ ID NO: 10927 - protein, 750 aa, synthetic construct
MALPVTALLLPLALLLHAARPGITQSPKYLFRKEGQNVTLSCEQNLNHDAMYWYRQDPGQGLRLIYYSQIVNDFQKGDIAEGYSVSREKKESFPLTVTSAQKNPTAFYLCASSPGALYEQYFGPGTRLTVTLEGDIENTSLAPEDPTFPADTWGTYLLTTETGLQKDHALWDHTAQNLLRMGLAFLVLVALVWFLVEDWLSRKRTRERASRASTWEGRRRLNTQTLRAKRSGSGATNFSLLKQAGDVEENPGPTSMDWIWRILFLVGAATGAHSFEENVEQHPSTLSVQEGDSAVIKCTYSDSASNYFPWYKQELGKRPQLIIDIRSNVGEKKDQRIAVTLNKTAKHFSLHITETQPEDSAVYFCAATEDYQLIWGAGTKLIIKPDTRGDIENTSLAPEDPTFPADTWGTYLLTTETGLQKDHALWDHTAQNLLRMGLAFLVLVALVWFLVEDWLSRKRTRERASRASTWEGRRRLNTQTLRAKRSGSGVKQTLNFDLLKLAGDVESNPGPSRGHMALPVTALLLPLALLLHAARPSQFRVSPLDRTWNLGETVELKCQVLLSNPTSGCSWLFQPRGAAASPTFLLYLSQNKPKAAEGLDTQRFSGKRLGDTFVLTLSDFRRENEGYYFCSALSNSIMYFSHFVPVFLPAKPTTTPAPRPPTPAPTIASQPLSLRPEACRPAAGGAVHTRGLDFACDIYIWAPLAGTCGVLLLSLVITLYCNHRNRRRVCKCPRPVVKSGDKPSLSARYV

SEQ ID NO: 10928 - protein, 694 aa, synthetic construct
MALPVTALLLPLALLLHAARPGITQSPKYLFRKEGQNVTLSCEQNLNHDAMYWYRQDPGQGLRLIYYSQIVNDFQKGDIAEGYSVSREKKESFPLTVTSAQKNPTAFYLCASSPGALYEQYFGPGTRLTVTLEITQGLAVSTISSFFPPGYQVSFCLVMVLLFAVDTGLYFSVKTNIRSSTRDWKDHKFKWRKDPQDKRAKRSGSGATNFSLLKQAGDVEENPGPTSMDWIWRILFLVGAATGAHSFEENVEQHPSTLSVQEGDSAVIKCTYSDSASNYFPWYKQELGKRPQLIIDIRSNVGEKKDQRIAVTLNKTAKHFSLHITETQPEDSAVYFCAATEDYQLIWGAGTKLIIKPDTRITQGLAVSTISSFFPPGYQVSFCLVMVLLFAVDTGLYFSVKTNIRSSTRDWKDHKFKWRKDPQDKRAKRSGSGVKQTLNFDLLKLAGDVESNPGPSRGHMALPVTALLLPLALLLHAARPSQFRVSPLDRTWNLGETVELKCQVLLSNPTSGCSWLFQPRGAAASPTFLLYLSQNKPKAAEGLDTQRFSGKRLGDTFVLTLSDFRRENEGYYFCSALSNSIMYFSHFVPVFLPAKPTTTPAPRPPTPAPTIASQPLSLRPEACRPAAGGAVHTRGLDFACDIYIWAPLAGTCGVLLLSLVITLYCNHRNRRRVCKCPRPVVKSGDKPSLSARYV

SEQ ID NO: 10929 - protein, 796 aa, synthetic construct
MALPVTALLLPLALLLHAARPGVTQTPKFRVLKTGQSMTLLCAQDMNHEYMYWYRQDPGMGLRLIHYSVGEGTTAKGEVPDGYNVSRLKKQNFLLGLESAAPSQTSVYFCASRGYHRLNNEQFFGPGTRLTVGQPKANPTVTLFPPSSEELQANKATLVCLISDFYPGAVTVAWKADGSPVKAGVETTKPSKQSNNKYAASSYLSLTPEQWKSHRSYSCQVTHEGSTVEKTVAPTECSGSQSFGLLDPKLCYLLDGILFIYGVILTALFLRVKFSRSADAPAYQQGQNQLYNELNLGRREEYDVLDKRRGRDPEMGGKPQRRKNPQEGLYNELQKDKMAEAYSEIGMKGERRRGKGHDGLYQGLSTATKDTYDALHMQALPPRRAKRSGSGATNFSLLKQAGDVEENPGPTSMDWIWRILFLVGAATGAHSFEQRKEVEQDPGPFNVPEGATVAFNCTYSNSASQSFFWYRQDCRKEPKLLMSVYSSGNEDGRFTAQLNRASQYISLLIRDSKLSDSATYLCVVKPDPGAGSYQLTFGKGTKLSVIPNASTKGPSVFPLAPSSKSTSGGTAALGCLVKDYFPEPVTVSWNSGALTSGVHTFPAVLQSSGLYSLSSVVTVPSSSLGTQTYICNVNHKPSNTKVDKRVEPKSCGTQSFGLLDPKLCYLLDGILFIYGVILTALFLRVKFSRSADAPAYQQGQNQLYNELNLGRREEYDVLDKRRGRDPEMGGKPQRRKNPQEGLYNELQKDKMAEAYSEIGMKGERRRGKGHDGLYQGLSTATKDTYDALHMQALPPR

SEQ ID NO: 10930 - protein, 562 aa, synthetic construct
MALPVTALLLPLALLLHAARPGVTQTPKFRVLKTGQSMTLLCAQDMNHEYMYWYRQDPGMGLRLIHYSVGEGTTAKGEVPDGYNVSRLKKQNFLLGLESAAPSQTSVYFCASRGYHRLNNEQFFGPGTRLTVLEQSFGLLDPKLCYLLDGILFIYGVILTALFLRVKFSRSADAPAYQQGQNQLYNELNLGRREEYDVLDKRRGRDPEMGGKPQRRKNPQEGLYNELQKDKMAEAYSEIGMKGERRRGKGHDGLYQGLSTATKDTYDALHMQALPPRRAKRSGSGATNFSLLKQAGDVEENPGPTSMDWIWRILFLVGAATGAHSFEQRKEVEQDPGPFNVPEGATVAFNCTYSNSASQSFFWYRQDCRKEPKLLMSVYSSGNEDGRFTAQLNRASQYISLLIRDSKLSDSATYLCVVKPDPGAGSYQLTFGKGTKLSVIPNTRQSFGLLDPKLCYLLDGILFIYGVILTALFLRVKFSRSADAPAYQQGQNQLYNELNLGRREEYDVLDKRRGRDPEMGGKPQRRKNPQEGLYNELQKDKMAEAYSEIGMKGERRRGKGHD

SEQ ID NO: 10931 - protein, 946 aa, synthetic construct
MALPVTALLLPLALLLHAARPGVTQTPKFRVLKTGQSMTLLCAQDMNHEYMYWYRQDPGMGLRLIHYSVGEGTTAKGEVPDGYNVSRLKKQNFLLGLESAAPSQTSVYFCASRGYHRLNNEQFFGPGTRLTVLETTPGERSSLPAFYPGTSGSCSGCGSLSLPLLAGLVAADAVASLLIVGAVFLCARPRRSPAQEDGKVYINMPGRGSTSRVKFSRSADAPAYQQGQNQLYNELNLGRREEYDVLDKRRGRDPEMGGKPQRRKNPQEGLYNELQKDKMAEAYSEIGMKGERRRGKGHDGLYQGLSTATKDTYDALHMQALPPRRAKRSGSGATNFSLLKQAGDVEENPGPMDWIWRILFLVGAATGAHSFEQRKEVEQDPGPFNVPEGATVAFNCTYSNSASQSFFWYRQDCRKEPKLLMSVYSSGNEDGRFTAQLNRASQYISLLIRDSKLSDSATYLCVVKPDPGAGSYQLTFGKGTKLSVIPNTRTTPGERSSLPAFYPGTSGSCSGCGSLSLPLLAGLVAADAVASLLIVGAVFLCARPRRSPAQEDGKVYINMPGRGSSRRVKFSRSADAPAYQQGQNQLYNELNLGRREEYDVLDKRRGRDPEMGGKPQRRKNPQEGLYNELQKDKMAEAYSEIGMKGERRRGKGHDGLYQGLSTATKDTYDALHMQALPPRRAKRSGSGVKQTLNFDLLKLAGDVESNPGPGHMALPVTALLLPLALLLHAARPSQFRVSPLDRTWNLGETVELKCQVLLSNPTSGCSWLFQPRGAAASPTFLLYLSQNKPKAAEGLDTQRFSGKRLGDTFVLTLSDFRRENEGYYFCSALSNSIMYFSHFVPVFLPAKPTTTPAPRPPTPAPTIASQPLSLRPEACRPAAGGAVHTRGLDFACDIYIWAPLAGTCGVLLLSLVITLYCNHRNRRRVCKCPRPVVKSGDKPSLSARYV

SEQ ID NO: 10932 - protein, 946 aa, synthetic construct; identical to SEQ ID NO: 10931

SEQ ID NO: 10933 - protein, 1112 aa, synthetic construct
MALPVTALLLPLALLLHAARPGVTQTPKFRVLKTGQSMTLLCAQDMNHEYMYWYRQDPGMGLRLIHYSVGEGTTAKGEVPDGYNVSRLKKQNFLLGLESAAPSQTSVYFCASRGYHRLNNEQFFGPGTRLTVLEGQPKANPTVTLFPPSSEELQANKATLVCLISDFYPGAVTVAWKADGSPVKAGVETTKPSKQSNNKYAASSYLSLTPEQWKSHRSYSCQVTHEGSTVEKTVAPTECSGSTTPGERSSLPAFYPGTSGSCSGCGSLSLPLLAGLVAADAVASLLIVGAVFLCARPRRSPAQEDGKVYINMPGRGSTSRVKFSRSADAPAYQQGQNQLYNELNLGRREEYDVLDKRRGRDPEMGGKPQRRKNPQEGLYNELQKDKMAEAYSEIGMKGERRRGKGHDGLYQGLSTATKDTYDALHMQALPPRRAKRSGSGATNFSLLKQAGDVEENPGPMDWIWRILFLVGAATGAHSFEQRKEVEQDPGPFNVPEGATVAFNCTYSNSASQSFFWYRQDCRKEPKLLMSVYSSGNEDGRFTAQLNRASQYISLLIRDSKLSDSATYLCVVKPDPGAGSYQLTFGKGTKLSVIPNTRASTKGPSVFPLAPSSKSTSGGTAALGCLVKDYFPEPVTVSWNSGALTSGVHTFPAVLQSSGLYSLSSVVTVPSSSLGTQTYICNVNHKPSNTKVDKRVEPKSCGTTTPGERSSLPAFYPGTSGSCSGCGSLSLPLLAGLVAADAVASLLIVGAVFLCARPRRSPAQEDGKVYINMPGRGSSRRVKFSRSADAPAYQQGQNQLYNELNLGRREEYDVLDKRRGRDPEMGGKPQRRKNPQEGLYNELQKDKMAEAYSEIGMKGERRRGKGHDGLYQGLSTATKDTYDALHMQALPPRRAKRSGSGVKQTLNFDLLKLAGDVESNPGPGHMATYEVLCEVARKLGTDDREVVLFLLNVFIPQPTLAQLIGALRALKEEGRLTFPLLAECLFRAGRRDLLRDLLHLDPRFLERHLAGTMSYFSPYQLTVLHVDGELCARDIRSLIFLSKDTIGSRSTPQTFLHWVYCMENLDLLGPTDVDALMSMLRSLSRVDLQRQVQTLMGLHLSGPSHSQHYRHTP

SEQ ID NO: 10934 - protein, 1165 aa, synthetic construct
MALPVTALLLPLALLLHAARPGVTQTPKFRVLKTGQSMTLLCAQDMNHEYMYWYRQDPGMGLRLIHYSVGEGTTAKGEVPDGYNVSRLKKQNFLLGLESAAPSQTSVYFCASRGYHRLNNEQFFGPGTRLTVLEGQPKANPTVTLFPPSSEELQANKATLVCLISDFYPGAVTVAWKADGSPVKAGVETTKPSKQSNNKYAASSYLSLTPEQWKSHRSYSCQVTHEGSTVEKTVAPTECSGSTTPGERSSLPAFYPGTSGSCSGCGSLSLPLLAGLVAADAVASLLIVGAVFLCARPRRSPAQEDGKVYINMPGRGSTSRVKFSRSADAPAYQQGQNQLYNELNLGRREEYDVLDKRRGRDPEMGGKPQRRKNPQEGLYNELQKDKMAEAYSEIGMKGERRRGKGHDGLYQGLSTATKDTYDALHMQALPPRRAKRSGSGATNFSLLKQAGDVEENPGPMDWIWRILFLVGAATGAHSFEQRKEVEQDPGPFNVPEGATVAFNCTYSNSASQSFFWYRQDCRKEPKLLMSVYSSGNEDGRFTAQLNRASQYISLLIRDSKLSDSATYLCVVKPDPGAGSYQLTFGKGTKLSVIPNTRASTKGPSVFPLAPSSKSTSGGTAALGCLVKDYFPEPVTVSWNSGALTSGVHTFPAVLQSSGLYSLSSVVTVPSSSLGTQTYICNVNHKPSNTKVDKRVEPKSCGTTTPGERSSLPAFYPGTSGSCSGCGSLSLPLLAGLVAADAVASLLIVGAVFLCARPRRSPAQEDGKVYINMPGRGSSRRVKFSRSADAPAYQQGQNQLYNELNLGRREEYDVLDKRRGRDPEMGGKPQRRKNPQEGLYNELQKDKMAEAYSEIGMKGERRRGKGHDGLYQGLSTATKDTYDALHMQALPPRRAKRSGSGVKQTLNFDLLKLAGDVESNPGPGHMSDSKEVPSLPFLRHLLEELDSHEDSLLLFLCHDAAPGCTTVTQALCSLSQQRKLTLAALVEMLYVLQRMDLLKSRFGLSKEGAEQLLGTSFLTRYRKLMVCVGEELDSSELRALRLFACNLNPSLSTALSESSRFVELVLALENVGLVSPSSVSVLADMLRTLRRLDLCQQLVEYEQQEQARYRYCYAASPSLPVRTLRRGHGASEHEQLCMPVQESSDSPELLRTPVQESSSDSPEQTT

SEQ ID NO: 10935 - protein, 1159 aa, synthetic construct
MALPVTALLLPLALLLHAARPGVTQTPKFRVLKTGQSMTLLCAQDMNHEYMYWYRQDPGMGLRLIHYSVGEGTTAKGEVPDGYNVSRLKKQNFLLGLESAAPSQTSVYFCASRGYHRLNNEQFFGPGTRLTVLEGQPKANPTVTLFPPSSEELQANKATLVCLISDFYPGAVTVAWKADGSPVKAGVETTKPSKQSNNKYAASSYLSLTPEQWKSHRSYSCQVTHEGSTVEKTVAPTECSGSTTPGERSSLPAFYPGTSGSCSGCGSLSLPLLAGLVAADAVASLLIVGAVFLCARPRRSPAQEDGKVYINMPGRGSTSRVKFSRSADAPAYQQGQNQLYNELNLGRREEYDVLDKRRGRDPEMGGKPQRRKNPQEGLYNELQKDKMAEAYSEIGMKGERRRGKGHDGLYQGLSTATKDTYDALHMQALPPRRAKRSGSGATNFSLLKQAGDVEENPGPMDWIWRILFLVGAATGAHSFEQRKEVEQDPGPFNVPEGATVAFNCTYSNSASQSFFWYRQDCRKEPKLLMSVYSSGNEDGRFTAQLNRASQYISLLIRDSKLSDSATYLCVVKPDPGAGSYQLTFGKGTKLSVIPNTRASTKGPSVFPLAPSSKSTSGGTAALGCLVKDYFPEPVTVSWNSGALTSGVHTFPAVLQSSGLYSLSSVVTVPSSSLGTQTYICNVNHKPSNTKVDKRVEPKSCGTTTPGERSSLPAFYPGTSGSCSGCGSLSLPLLAGLVAADAVASLLIVGAVFLCARPRRSPAQEDGKVYINMPGRGSSRRVKFSRSADAPAYQQGQNQLYNELNLGRREEYDVLDKRRGRDPEMGGKPQRRKNPQEGLYNELQKDKMAEAYSEIGMKGERRRGKGHDGLYQGLSTATKDTYDALHMQALPPRRAKRSGSGVKQTLNFDLLKLAGDVESNPGPGHMALPVTALLLPLALLLHAARPSQFRVSPLDRTWNLGETVELKCQVLLSNPTSGCSWLFQPRGAAASPTFLLYLSQNKPKAAEGLDTQRFSGKRLGDTFVLTLSDFRRENEGYYFCSALSNSIMYFSHFVPVFLPAKPTTTPAPRPPTPAPTIASQPLSLRPEACRPAAGGAVHTRGLDFACDIYIWAPLAGTCGVLLLSLVITLYCNHRNRRRVCKCPRPVVKSGDKPSLSARYV

SEQ ID NO: 10936 - protein, 1296 aa, synthetic construct
MALPVTALLLPLALLLHAARPEVQLVESGGGLVQAGGSLRLSCAASGRTFSMGWFRQAPGKEREFVAAITYSGGSPYYADSVKGRFTISRDNAKNTVYLQMNSLKPEDTAVYYCAANPTYGSDWNAENWGQGTQVTVSSGTGGGGSGGGGSGGGGSEFGVTQTPKFRVLKTGQSMTLLCAQDMNHEYMYWYRQDPGMGLRLIHYSVGEGTTAKGEVPDGYNVSRLKKQNFLLGLESAAPSQTSVYFCASRGYHRLNNEQFFGPGTRLTVLEGQPKANPTVTLFPPSSEELQANKATLVCLISDFYPGAVTVAWKADGSPVKAGVETTKPSKQSNNKYAASSYLSLTPEQWKSHRSYSCQVTHEGSTVEKTVAPTECSGSTTPGERSSLPAFYPGTSGSCSGCGSLSLPLLAGLVAADAVASLLIVGAVFLCARPRRSPAQEDGKVYINMPGRGSTSRVKFSRSADAPAYQQGQNQLYNELNLGRREEYDVLDKRRGRDPEMGGKPQRRKNPQEGLYNELQKDKMAEAYSEIGMKGERRRGKGHDGLYQGLSTATKDTYDALHMQALPPRRAKRSGSGATNFSLLKQAGDVEENPGPMDWIWRILFLVGAATGAHSFEQRKEVEQDPGPFNVPEGATVAFNCTYSNSASQSFFWYRQDCRKEPKLLMSVYSSGNEDGRFTAQLNRASQYISLLIRDSKLSDSATYLCVVKPDPGAGSYQLTFGKGTKLSVIPNTRASTKGPSVFPLAPSSKSTSGGTAALGCLVKDYFPEPVTVSWNSGALTSGVHTFPAVLQSSGLYSLSSVVTVPSSSLGTQTYICNVNHKPSNTKVDKRVEPKSCGTTTPGERSSLPAFYPGTSGSCSGCGSLSLPLLAGLVAADAVASLLIVGAVFLCARPRRSPAQEDGKVYINMPGRGSSRRVKFSRSADAPAYQQGQNQLYNELNLGRREEYDVLDKRRGRDPEMGGKPQRRKNPQEGLYNELQKDKMAEAYSEIGMKGERRRGKGHDGLYQGLSTATKDTYDALHMQALPPRRAKRSGSGVKQTLNFDLLKLAGDVESNPGPGHMALPVTALLLPLALLLHAARPSQFRVSPLDRTWNLGETVELKCQVLLSNPTSGCSWLFQPRGAAASPTFLLYLSQNKPKAAEGLDTQRFSGKRLGDTFVLTLSDFRRENEGYYFCSALSNSIMYFSHFVPVFLPAKPTTTPAPRPPTPAPTIASQPLSLRPEACRPAAGGAVHTRGLDFACDIYIWAPLAGTCGVLLLSLVITLYCNHRNRRRVCKCPRPVVKSGDKPSLSARYV

SEQ ID NO: 10937 - protein, 1433 aa, synthetic construct
MALPVTALLLPLALLLHAARPEVQLVESGGGLVQAGGSLRLSCAASGRTFSMGWFRQAPGKEREFVAAITYSGGSPYYADSVKGRFTISRDNAKNTVYLQMNSLKPEDTAVYYCAANPTYGSDWNAENWGQGTQVTVSSGTGGGGSGGGGSGGGGSEFGVTQTPKFRVLKTGQSMTLLCAQDMNHEYMYWYRQDPGMGLRLIHYSVGEGTTAKGEVPDGYNVSRLKKQNFLLGLESAAPSQTSVYFCASRGYHRLNNEQFFGPGTRLTVLEGQPKANPTVTLFPPSSEELQANKATLVCLISDFYPGAVTVAWKADGSPVKAGVETTKPSKQSNNKYAASSYLSLTPEQWKSHRSYSCQVTHEGSTVEKTVAPTECSGSTTPGERSSLPAFYPGTSGSCSGCGSLSLPLLAGLVAADAVASLLIVGAVFLCARPRRSPAQEDGKVYINMPGRGSTSRVKFSRSADAPAYQQGQNQLYNELNLGRREEYDVLDKRRGRDPEMGGKPQRRKNPQEGLYNELQKDKMAEAYSEIGMKGERRRGKGHDGLYQGLSTATKDTYDALHMQALPPRRAKRSGSGATNFSLLKQAGDVEENPGPMDWIWRILFLVGAATGAHSGPEVQLVESGGGLVQAGGSLRLSCAASGRTFTMGWFRQAPGKEREFVAAISLSPTLAYYADSVKGRFTISRDNAKNTVVLQMNSLKPEDTALYYCAADRKSVMSIRPDYWGQGTQVTVSSGSGGGGSGGGGSGGGGSFEQRKEVEQDPGPFNVPEGATVAFNCTYSNSASQSFFWYRQDCRKEPKLLMSVYSSGNEDGRFTAQLNRASQYISLLIRDSKLSDSATYLCVVKPDPGAGSYQLTFGKGTKLSVIPNTRASTKGPSVFPLAPSSKSTSGGTAALGCLVKDYFPEPVTVSWNSGALTSGVHTFPAVLQSSGLYSLSSVVTVPSSSLGTQTYICNVNHKPSNTKVDKRVEPKSCGTTTPGERSSLPAFYPGTSGSCSGCGSLSLPLLAGLVAADAVASLLIVGAVFLCARPRRSPAQEDGKVYINMPGRGSSRRVKFSRSADAPAYQQGQNQLYNELNLGRREEYDVLDKRRGRDPEMGGKPQRRKNPQEGLYNELQKDKMAEAYSEIGMKGERRRGKGHDGLYQGLSTATKDTYDALHMQALPPRRAKRSGSGVKQTLNFDLLKLAGDVESNPGPGHMALPVTALLLPLALLLHAARPSQFRVSPLDRTWNLGETVELKCQVLLSNPTSGCSWLFQPRGAAASPTFLLYLSQNKPKAAEGLDTQRFSGKRLGDTFVLTLSDFRRENEGYYFCSALSNSIMYFSHFVPVFLPAKPTTTPAPRPPTPAPTIASQPLSLRPEACRPAAGGAVHTRGLDFACDIYIWAPLAGTCGVLLLSLVITLYCNHRNRRRVCKCPRPVVKSGDKPSLSARYV

SEQ ID NO: 10938 - protein, 817 aa, synthetic construct
MALPVTALLLPLALLLHAARPEFGVTQTPKFRVLKTGQSMTLLCAQDMNHEYMYWYRQDPGMGLRLIHYSVGEGTTAKGEVPDGYNVSRLKKQNFLLGLESAAPSQTSVYFCASRGYHRLNNEQFFGPGTRLTVLEDLKNVFPPEVAVFEPSEAEISHTQKATLVCLATGFYPDHVELSWWVNGKEVHSGVSTDPQPLKEQPALNDSRYCLSSRLRVSATFWQNPRNHFRCQVQFYGLSENDEWTQDRAKPVTQIVSAEAWGRADCGSQSFGLLDPKLCYLLDGILFIYGVILTALFLRVKFSRSADAPAYQQGQNQLYNELNLGRREEYDVLDKRRGRDPEMGGKPQRRKNPQEGLYNELQKDKMAEAYSEIGMKGERRRGKGHDGLYQGLSTATKDTYDALHMQALPPRRAKRSGSGATNFSLLKQAGDVEENPGPTSMDWIWRILFLVGAATGAHSFEQRKEVEQDPGPFNVPEGATVAFNCTYSNSASQSFFWYRQDCRKEPKLLMSVYSSGNEDGRFTAQLNRASQYISLLIRDSKLSDSATYLCVVKPDPGAGSYQLTFGKGTKLSVIPNTRIQNPDPAVYQLRDSKSSDKSVCLFTDFDSQTNVSQSKDSDVYITDKTVLDMRSMDFKSNSAVAWSNKSDFACANAFNNSIIPEDTFFPSPESSCGTQSFGLLDPKLCYLLDGILFIYGVILTALFLRVKFSRSADAPAYQQGQNQLYNELNLGRREEYDVLDKRRGRDPEMGGKPQRRKNPQEGLYNELQKDKMAEAYSEIGMKGERRRGKGHDGLYQGLSTATKDTYDALHMQALPPR

SEQ ID NO: 10939 - protein, 859 aa, synthetic construct
MALPVTALLLPLALLLHAARPEFGVTQTPKFRVLKTGQSMTLLCAQDMNHEYMYWYRQDPGMGLRLIHYSVGEGTTAKGEVPDGYNVSRLKKQNFLLGLESAAPSQTSVYFCASRGYHRLNNEQFFGPGTRLTVLEDLKNVFPPEVAVFEPSEAEISHTQKATLVCLATGFYPDHVELSWWVNGKEVHSGVSTDPQPLKEQPALNDSRYCLSSRLRVSATFWQNPRNHFRCQVQFYGLSENDEWTQDRAKPVTQIVSAEAWGRADCGSQSFGLLDPKLCYLLDGILFIYGVILTALFLRVKFSRSADAPAYQQGQNQLYNELNLGRREEYDVLDKRRGRDPEMGGKPQRRKNPQEGLYNELQKDKMAEAYSEIGMKGERRRGKGHDGLYQGLSTATKDTYDALHMQALPPRRAKRSGSGATNFSLLKQAGDVEENPGPTSMDWIWRILFLVGAATGAHSFEQRKEVEQDPGPFNVPEGATVAFNCTYSNSASQSFFWYRQDCRKEPKLLMSVYSSGNEDGRFTAQLNRASQYISLLIRDSKLSDSATYLCVVKPDPGAGSYQLTFGKGTKLSVIPNTRIQNPDPAVYQLRDSKSSDKSVCLFTDFDSQTNVSQSKDSDVYITDKTVLDMRSMDFKSNSAVAWSNKSDFACANAFNNSIIPEDTFFPSPESSCGTQSFGLLDPKLCYLLDGILFIYGVILTALFLKRGRKKLLYIFKQPFMRPVQTTQEEDGCSCRFPEEEEGGCELRVKFSRSADAPAYQQGQNQLYNELNLGRREEYDVLDKRRGRDPEMGGKPQRRKNPQEGLYNELQKDKMAEAYSEIGMKGERRRGKGHDGLYQGLSTATKDTYDALHMQALPPR

SEQ ID NO: 10940 - protein, 858 aa, synthetic construct
MALPVTALLLPLALLLHAARPEFGVTQTPKFRVLKTGQSMTLLCAQDMNHEYMYWYRQDPGMGLRLIHYSVGEGTTAKGEVPDGYNVSRLKKQNFLLGLESAAPSQTSVYFCASRGYHRLNNEQFFGPGTRLTVLEDLKNVFPPEVAVFEPSEAEISHTQKATLVCLATGFYPDHVELSWWVNGKEVHSGVSTDPQPLKEQPALNDSRYCLSSRLRVSATFWQNPRNHFRCQVQFYGLSENDEWTQDRAKPVTQIVSAEAWGRADCGSQSFGLLDPKLCYLLDGILFIYGVILTALFLRVKFSRSADAPAYQQGQNQLYNELNLGRREEYDVLDKRRGRDPEMGGKPQRRKNPQEGLYNELQKDKMAEAYSEIGMKGERRRGKGHDGLYQGLSTATKDTYDALHMQALPPRRAKRSGSGATNFSLLKQAGDVEENPGPTSMDWIWRILFLVGAATGAHSFEQRKEVEQDPGPFNVPEGATVAFNCTYSNSASQSFFWYRQDCRKEPKLLMSVYSSGNEDGRFTAQLNRASQYISLLIRDSKLSDSATYLCVVKPDPGAGSYQLTFGKGTKLSVIPNTRIQNPDPAVYQLRDSKSSDKSVCLFTDFDSQTNVSQSKDSDVYITDKTVLDMRSMDFKSNSAVAWSNKSDFACANAFNNSIIPEDTFFPSPESSCGTQSFGLLDPKLCYLLDGILFIYGVILTALFLRSKRSRLLHSDYMNMTPRRPGPTRKHYQPYAPPRDFAAYRSRVKFSRSADAPAYQQGQNQLYNELNLGRREEYDVLDKRRGRDPEMGGKPQRRKNPQEGLYNELQKDKMAEAYSEIGMKGERRRGKGHDGLYQGLSTATKDTYDALHMQALPPR

SEQ ID NO: 10941 - protein, 853 aa, synthetic construct
MALPVTALLLPLALLLHAARPEFGVTQTPKFRVLKTGQSMTLLCAQDMNHEYMYWYRQDPGMGLRLIHYSVGEGTTAKGEVPDGYNVSRLKKQNFLLGLESAAPSQTSVYFCASRGYHRLNNEQFFGPGTRLTVLEDLKNVFPPEVAVFEPSEAEISHTQKATLVCLATGFYPDHVELSWWVNGKEVHSGVSTDPQPLKEQPALNDSRYCLSSRLRVSATFWQNPRNHFRCQVQFYGLSENDEWTQDRAKPVTQIVSAEAWGRADCGSQSFGLLDPKLCYLLDGILFIYGVILTALFLRVKFSRSADAPAYQQGQNQLYNELNLGRREEYDVLDKRRGRDPEMGGKPQRRKNPQEGLYNELQKDKMAEAYSEIGMKGERRRGKGHDGLYQGLSTATKDTYDALHMQALPPRRAKRSGSGATNFSLLKQAGDVEENPGPTSMDWIWRILFLVGAATGAHSFEQRKEVEQDPGPFNVPEGATVAFNCTYSNSASQSFFWYRQDCRKEPKLLMSVYSSGNEDGRFTAQLNRASQYISLLIRDSKLSDSATYLCVVKPDPGAGSYQLTFGKGTKLSVIPNTRIQNPDPAVYQLRDSKSSDKSVCLFTDFDSQTNVSQSKDSDVYITDKTVLDMRSMDFKSNSAVAWSNKSDFACANAFNNSIIPEDTFFPSPESSCGTQSFGLLDPKLCYLLDGILFIYGVILTALFLRDQRLPPDAHKPPGGGSFRTPIQEEQADAHSTLAKIRVKFSRSADAPAYQQGQNQLYNELNLGRREEYDVLDKRRGRDPEMGGKPQRRKNPQEGLYNELQKDKMAEAYSEIGMKGERRRGKGHDGLYQGLSTATKDTYDALHMQALPPR

SEQ ID NO: 10942 - protein, 937 aa, synthetic construct
MALPVTALLLPLALLLHAARPEFGVTQTPKFRVLKTGQSMTLLCAQDMNHEYMYWYRQDPGMGLRLIHYSVGEGTTAKGEVPDGYNVSRLKKQNFLLGLESAAPSQTSVYFCASRGYHRLNNEQFFGPGTRLTVLEDLKNVFPPEVAVFEPSEAEISHTQKATLVCLATGFYPDHVELSWWVNGKEVHSGVSTDPQPLKEQPALNDSRYCLSSRLRVSATFWQNPRNHFRCQVQFYGLSENDEWTQDRAKPVTQIVSAEAWGRADCGSQSFGLLDPKLCYLLDGILFIYGVILTALFLRVKFSRSADAPAYQQGQNQLYNELNLGRREEYDVLDKRRGRDPEMGGKPQRRKNPQEGLYNELQKDKMAEAYSEIGMKGERRRGKGHDGLYQGLSTATKDTYDALHMQALPPRRAKRSGSGATNFSLLKQAGDVEENPGPTSMDWIWRILFLVGAATGAHSFEQRKEVEQDPGPFNVPEGATVAFNCTYSNSASQSFFWYRQDCRKEPKLLMSVYSSGNEDGRFTAQLNRASQYISLLIRDSKLSDSATYLCVVKPDPGAGSYQLTFGKGTKLSVIPNTRIQNPDPAVYQLRDSKSSDKSVCLFTDFDSQTNVSQSKDSDVYITDKTVLDMRSMDFKSNSAVAWSNKSDFACANAFNNSIIPEDTFFPSPESSCGTQSFGLLDPKLCYLLDGILFIYGVILTALFLWRRKRKEKQSETSPKEFLTIYEDVKDLKTRRNHEQEQTFPGGGSTIYSMIQSQSSAPTSQEPAYTLYSLIQPSRKSGSRKRNHSPSFNSTIYEVIGKSQPKAQNPARLSRKELENFDVYSRVKFSRSADAPAYQQGQNQLYNELNLGRREEYDVLDKRRGRDPEMGGKPQRRKNPQEGLYNELQKDKMAEAYSEIGMKGERRRGKGHDGLYQGLSTATKDTYDALHMQALPPR

SEQ ID NO: 10943 - protein, 900 aa, synthetic construct
MALPVTALLLPLALLLHAARPEFGVTQTPKFRVLKTGQSMTLLCAQDMNHEYMYWYRQDPGMGLRLIHYSVGEGTTAKGEVPDGYNVSRLKKQNFLLGLESAAPSQTSVYFCASRGYHRLNNEQFFGPGTRLTVLEDLKNVFPPEVAVFEPSEAEISHTQKATLVCLATGFYPDHVELSWWVNGKEVHSGVSTDPQPLKEQPALNDSRYCLSSRLRVSATFWQNPRNHFRCQVQFYGLSENDEWTQDRAKPVTQIVSAEAWGRADCGSQSFGLLDPKLCYLLDGILFIYGVILTALFLRSKRSRLLHSDYMNMTPRRPGPTRKHYQPYAPPRDFAAYRSRVKFSRSADAPAYQQGQNQLYNELNLGRREEYDVLDKRRGRDPEMGGKPQRRKNPQEGLYNELQKDKMAEAYSEIGMKGERRRGKGHDGLYQGLSTATKDTYDALHMQALPPRRAKRSGSGATNFSLLKQAGDVEENPGPTSMDWIWRILFLVGAATGAHSFEQRKEVEQDPGPFNVPEGATVAFNCTYSNSASQSFFWYRQDCRKEPKLLMSVYSSGNEDGRFTAQLNRASQYISLLIRDSKLSDSATYLCVVKPDPGAGSYQLTFGKGTKLSVIPNTRIQNPDPAVYQLRDSKSSDKSVCLFTDFDSQTNVSQSKDSDVYITDKTVLDMRSMDFKSNSAVAWSNKSDFACANAFNNSIIPEDTFFPSPESSCGTQSFGLLDPKLCYLLDGILFIYGVILTALFLKRGRKKLLYIFKQPFMRPVQTTQEEDGCSCRFPEEEEGGCELRVKFSRSADAPAYQQGQNQLYNELNLGRREEYDVLDKRRGRDPEMGGKPQRRKNPQEGLYNELQKDKMAEAYSEIGMKGERRRGKGHDGLYQGLSTATKDTYDALHMQALPPR

SEQ ID NO: 10944 - protein, 899 aa, synthetic construct
MALPVTALLLPLALLLHAARPEFGVTQTPKFRVLKTGQSMTLLCAQDMNHEYMYWYRQDPGMGLRLIHYSVGEGTTAKGEVPDGYNVSRLKKQNFLLGLESAAPSQTSVYFCASRGYHRLNNEQFFGPGTRLTVLEDLKNVFPPEVAVFEPSEAEISHTQKATLVCLATGFYPDHVELSWWVNGKEVHSGVSTDPQPLKEQPALNDSRYCLSSRLRVSATFWQNPRNHFRCQVQFYGLSENDEWTQDRAKPVTQIVSAEAWGRADCGSQSFGLLDPKLCYLLDGILFIYGVILTALFLRSKRSRLLHSDYMNMTPRRPGPTRKHYQPYAPPRDFAAYRSRVKFSRSADAPAYQQGQNQLYNELNLGRREEYDVLDKRRGRDPEMGGKPQRRKNPQEGLYNELQKDKMAEAYSEIGMKGERRRGKGHDGLYQGLSTATKDTYDALHMQALPPRRAKRSGSGATNFSLLKQAGDVEENPGPTSMDWIWRILFLVGAATGAHSFEQRKEVEQDPGPFNVPEGATVAFNCTYSNSASQSFFWYRQDCRKEPKLLMSVYSSGNEDGRFTAQLNRASQYISLLIRDSKLSDSATYLCVVKPDPGAGSYQLTFGKGTKLSVIPNTRIQNPDPAVYQLRDSKSSDKSVCLFTDFDSQTNVSQSKDSDVYITDKTVLDMRSMDFKSNSAVAWSNKSDFACANAFNNSIIPEDTFFPSPESSCGTQSFGLLDPKLCYLLDGILFIYGVILTALFLRSKRSRLLHSDYMNMTPRRPGPTRKHYQPYAPPRDFAAYRSRVKFSRSADAPAYQQGQNQLYNELNLGRREEYDVLDKRRGRDPEMGGKPQRRKNPQEGLYNELQKDKMAEAYSEIGMKGERRRGKGHDGLYQGLSTATKDTYDALHMQALPPR

SEQ ID NO: 10945 - protein, 900 aa, synthetic construct; identical to SEQ ID NO: 10943

SEQ ID NO: 10946 - protein, 817 aa, synthetic construct
MALPVTALLLPLALLLHAARPEFGVTQTPKFRVLKTGQSMTLLCAQDMNHEYMYWYRQDPGMGLRLIHYSVGEGTTAKGEVPDGYNVSRLKKQNFLLGLESAAPSQTSVYFCASRGYHRLNNEQFFGPGTRLTVLEDLKNVFPPEVAVFEPSEAEISHTQKATLVCLATGFYPDHVELSWWVNGKEVHSGVSTDPQPLKEQPALNDSRYCLSSRLRVSATFWQNPRNHFRCQVQFYGLSENDEWTQDRAKPVTQIVSAEAWGRADCGSQSFGLLDPKLCYLLDGILFIYGVILTALFLRVKFSRSADAPAYQQGQNQLYNELNLGRREEYDVLDKRRGRDPEMGGKPQRRKNPQEGLFNELQKDKMAEAFSEIGMKGERRRGKGHDGLFQGLSTATKDTFDALHMQALPPRRAKRSGSGATNFSLLKQAGDVEENPGPTSMDWIWRILFLVGAATGAHSFEQRKEVEQDPGPFNVPEGATVAFNCTYSNSASQSFFWYRQDCRKEPKLLMSVYSSGNEDGRFTAQLNRASQYISLLIRDSKLSDSATYLCVVKPDPGAGSYQLTFGKGTKLSVIPNTRIQNPDPAVYQLRDSKSSDKSVCLFTDFDSQTNVSQSKDSDVYITDKTVLDMRSMDFKSNSAVAWSNKSDFACANAFNNSIIPEDTFFPSPESSCGTQSFGLLDPKLCYLLDGILFIYGVILTALFLRVKFSRSADAPAYQQGQNQLYNELNLGRREEYDVLDKRRGRDPEMGGKPQRRKNPQEGLYNELQKDKMAEAYSEIGMKGERRRGKGHDGLYQGLSTATKDTYDALHMQALPPR

SEQ ID NO: 10947 - protein, 817 aa, synthetic construct; identical to SEQ ID NO: 10946

SEQ ID NO: 10948 - protein, 859 aa, synthetic construct
MALPVTALLLPLALLLHAARPEFGVTQTPKFRVLKTGQSMTLLCAQDMNHEYMYWYRQDPGMGLRLIHYSVGEGTTAKGEVPDGYNVSRLKKQNFLLGLESAAPSQTSVYFCASRGYHRLNNEQFFGPGTRLTVLEDLKNVFPPEVAVFEPSEAEISHTQKATLVCLATGFYPDHVELSWWVNGKEVHSGVSTDPQPLKEQPALNDSRYCLSSRLRVSATFWQNPRNHFRCQVQFYGLSENDEWTQDRAKPVTQIVSAEAWGRADCGSQSFGLLDPKLCYLLDGILFIYGVILTALFLRVKFSRSADAPAYQQGQNQLYNELNLGRREEYDVLDKRRGRDPEMGGKPQRRKNPQEGLFNELQKDKMAEAFSEIGMKGERRRGKGHDGLFQGLSTATKDTFDALHMQALPPRRAKRSGSGATNFSLLKQAGDVEENPGPTSMDWIWRILFLVGAATGAHSFEQRKEVEQDPGPFNVPEGATVAFNCTYSNSASQSFFWYRQDCRKEPKLLMSVYSSGNEDGRFTAQLNRASQYISLLIRDSKLSDSATYLCVVKPDPGAGSYQLTFGKGTKLSVIPNTRIQNPDPAVYQLRDSKSSDKSVCLFTDFDSQTNVSQSKDSDVYITDKTVLDMRSMDFKSNSAVAWSNKSDFACANAFNNSIIPEDTFFPSPESSCGTQSFGLLDPKLCYLLDGILFIYGVILTALFLKRGRKKLLYIFKQPFMRPVQTTQEEDGCSCRFPEEEEGGCELRVKFSRSADAPAYQQGQNQLYNELNLGRREEYDVLDKRRGRDPEMGGKPQRRKNPQEGLYNELQKDKMAEAYSEIGMKGERRRGKGHDGLYQGLSTATKDTYDALHMQALPPR

SEQ ID NO: 10949 - protein, 858 aa, synthetic construct
MALPVTALLLPLALLLHAARPEFGVTQTPKFRVLKTGQSMTLLCAQDMNHEYMYWYRQDPGMGLRLIHYSVGEGTTAKGEVPDGYNVSRLKKQNFLLGLESAAPSQTSVYFCASRGYHRLNNEQFFGPGTRLTVLEDLKNVFPPEVAVFEPSEAEISHTQKATLVCLATGFYPDHVELSWWVNGKEVHSGVSTDPQPLKEQPALNDSRYCLSSRLRVSATFWQNPRNHFRCQVQFYGLSENDEWTQDRAKPVTQIVSAEAWGRADCGSQSFGLLDPKLCYLLDGILFIYGVILTALFLRVKFSRSADAPAYQQGQNQLYNELNLGRREEYDVLDKRRGRDPEMGGKPQRRKNPQEGLFNELQKDKMAEAFSEIGMKGERRRGKGHDGLFQGLSTATKDTFDALHMQALPPRRAKRSGSGATNFSLLKQAGDVEENPGPTSMDWIWRILFLVGAATGAHSFEQRKEVEQDPGPFNVPEGATVAFNCTYSNSASQSFFWYRQDCRKEPKLLMSVYSSGNEDGRFTAQLNRASQYISLLIRDSKLSDSATYLCVVKPDPGAGSYQLTFGKGTKLSVIPNTRIQNPDPAVYQLRDSKSSDKSVCLFTDFDSQTNVSQSKDSDVYITDKTVLDMRSMDFKSNSAVAWSNKSDFACANAFNNSIIPEDTFFPSPESSCGTQSFGLLDPKLCYLLDGILFIYGVILTALFLRSKRSRLLHSDYMNMTPRRPGPTRKHYQPYAPPRDFAAYRSRVKFSRSADAPAYQQGQNQLYNELNLGRREEYDVLDKRRGRDPEMGGKPQRRKNPQEGLYNELQKDKMAEAYSEIGMKGERRRGKGHDGLYQGLSTATKDTYDALHMQALPPR

SEQ ID NO: 10950 - protein, 853 aa, synthetic construct
MALPVTALLLPLALLLHAARPEFGVTQTPKFRVLKTGQSMTLLCAQDMNHEYMYWYRQDPGMGLRLIHYSVGEGTTAKGEVPDGYNVSRLKKQNFLLGLESAAPSQTSVYFCASRGYHRLNNEQFFGPGTRLTVLEDLKNVFPPEVAVFEPSEAEISHTQKATLVCLATGFYPDHVELSWWVNGKEVHSGVSTDPQPLKEQPALNDSRYCLSSRLRVSATFWQNPRNHFRCQVQFYGLSENDEWTQDRAKPVTQIVSAEAWGRADCGSQSFGLLDPKLCYLLDGILFIYGVILTALFLRVKFSRSADAPAYQQGQNQLYNELNLGRREEYDVLDKRRGRDPEMGGKPQRRKNPQEGLFNELQKDKMAEAFSEIGMKGERRRGKGHDGLFQGLSTATKDTFDALHMQALPPRRAKRSGSGATNFSLLKQAGDVEENPGPTSMDWIWRILFLVGAATGAHSFEQRKEVEQDPGPFNVPEGATVAFNCTYSNSASQSFFWYRQDCRKEPKLLMSVYSSGNEDGRFTAQLNRASQYISLLIRDSKLSDSATYLCVVKPDPGAGSYQLTFGKGTKLSVIPNTRIQNPDPAVYQLRDSKSSDKSVCLFTDFDSQTNVSQSKDSDVYITDKTVLDMRSMDFKSNSAVAWSNKSDFACANAFNNSIIPEDTFFPSPESSCGTQSFGLLDPKLCYLLDGILFIYGVILTALFLRDQRLPPDAHKPPGGGSFRTPIQEEQADAHSTLAKIRVKFSRSADAPAYQQGQNQLYNELNLGRREEYDVLDKRRGRDPEMGGKPQRRKNPQEGLYNELQKDKMAEAYSEIGMKGERRRGKGHDGLYQGLSTATKDTYDALHMQALPPR

SEQ ID NO: 10951 - protein, 937 aa, synthetic construct
MALPVTALLLPLALLLHAARPEFGVTQTPKFRVLKTGQSMTLLCAQDMNHEYMYWYRQDPGMGLRLIHYSVGEGTTAKGEVPDGYNVSRLKKQNFLLGLESAAPSQTSVYFCASRGYHRLNNEQFFGPGTRLTVLEDLKNVFPPEVAVFEPSEAEISHTQKATLVCLATGFYPDHVELSWWVNGKEVHSGVSTDPQPLKEQPALNDSRYCLSSRLRVSATFWQNPRNHFRCQVQFYGLSENDEWTQDRAKPVTQIVSAEAWGRADCGSQSFGLLDPKLCYLLDGILFIYGVILTALFLRVKFSRSADAPAYQQGQNQLYNELNLGRREEYDVLDKRRGRDPEMGGKPQRRKNPQEGLFNELQKDKMAEAFSEIGMKGERRRGKGHDGLFQGLSTATKDTFDALHMQALPPRRAKRSGSGATNFSLLKQAGDVEENPGPTSMDWIWRILFLVGAATGAHSFEQRKEVEQDPGPFNVPEGATVAFNCTYSNSASQSFFWYRQDCRKEPKLLMSVYSSGNEDGRFTAQLNRASQYISLLIRDSKLSDSATYLCVVKPDPGAGSYQLTFGKGTKLSVIPNTRIQNPDPAVYQLRDSKSSDKSVCLFTDFDSQTNVSQSKDSDVYITDKTVLDMRSMDFKSNSAVAWSNKSDFACANAFNNSIIPEDTFFPSPESSCGTQSFGLLDPKLCYLLDGILFIYGVILTALFLWRRKRKEKQSETSPKEFLTIYEDVKDLKTRRNHEQEQTFPGGGSTIYSMIQSQSSAPTSQEPAYTLYSLIQPSRKSGSRKRNHSPSFNSTIYEVIGKSQPKAQNPARLSRKELENFDVYSRVKFSRSADAPAYQQGQNQLYNELNLGRREEYDVLDKRRGRDPEMGGKPQRRKNPQEGLYNELQKDKMAEAYSEIGMKGERRRGKGHDGLYQGLSTATKDTYDALHMQALPPR

SEQ ID NO: 10952 - protein, 858 aa, synthetic construct; identical to SEQ ID NO: 10949

SEQ ID NO: 10953 - protein, 859 aa, synthetic construct; identical to SEQ ID NO: 10948

SEQ ID NO: 10954 - protein, 817 aa, synthetic construct
MALPVTALLLPLALLLHAARPEFGVTQTPKFRVLKTGQSMTLLCAQDMNHEYMYWYRQDPGMGLRLIHYSVGEGTTAKGEVPDGYNVSRLKKQNFLLGLESAAPSQTSVYFCASRGYHRLNNEQFFGPGTRLTVLEDLKNVFPPEVAVFEPSEAEISHTQKATLVCLATGFYPDHVELSWWVNGKEVHSGVSTDPQPLKEQPALNDSRYCLSSRLRVSATFWQNPRNHFRCQVQFYGLSENDEWTQDRAKPVTQIVSAEAWGRADCGSQSFGLLDPKLCYLLDGILFIYGVILTALFLRVKFSRSADAPAYQQGQNQLYNELNLGRREEYDVLDKRRGRDPEMGGKPQRRKNPQEGLFNELQKDKMAEAFSEIGMKGERRRGKGHDGLFQGLSTATKDTFDALHMQALPPRRAKRSGSGATNFSLLKQAGDVEENPGPTSMDWIWRILFLVGAATGAHSFEQRKEVEQDPGPFNVPEGATVAFNCTYSNSASQSFFWYRQDCRKEPKLLMSVYSSGNEDGRFTAQLNRASQYISLLIRDSKLSDSATYLCVVKPDPGAGSYQLTFGKGTKLSVIPNTRIQNPDPAVYQLRDSKSSDKSVCLFTDFDSQTNVSQSKDSDVYITDKTVLDMRSMDFKSNSAVAWSNKSDFACANAFNNSIIPEDTFFPSPESSCGTQSFGLLDPKLSYLLDGILFIYGVILTALFLRVKFSRSADAPAYQQGQNQLYNELNLGRREEYDVLDKRRGRDPEMGGKPQRRKNPQEGLYNELQKDKMAEAYSEIGMKGERRRGKGHDGLYQGLSTATKDTYDALHMQALPPR

SEQ ID NO: 10955 - protein, 817 aa, synthetic construct; identical to SEQ ID NO: 10954

SEQ ID NO: 10956 - protein, 817 aa, synthetic construct
MALPVTALLLPLALLLHAARPEFGVTQTPKFRVLKTGQSMTLLCAQDMNHEYMYWYRQDPGMGLRLIHYSVGEGTTAKGEVPDGYNVSRLKKQNFLLGLESAAPSQTSVYFCASRGYHRLNNEQFFGPGTRLTVLEDLKNVFPPEVAVFEPSEAEISHTQKATLVCLATGFYPDHVELSWWVNGKEVHSGVSTDPQPLKEQPALNDSRYCLSSRLRVSATFWQNPRNHFRCQVQFYGLSENDEWTQDRAKPVTQIVSAEAWGRADCGSQSFGLLDPKLSYLLDGILFIYGVILTALFLRVKFSRSADAPAYQQGQNQLYNELNLGRREEYDVLDKRRGRDPEMGGKPQRRKNPQEGLYNELQKDKMAEAYSEIGMKGERRRGKGHDGLYQGLSTATKDTYDALHMQALPPRRAKRSGSGATNFSLLKQAGDVEENPGPTSMDWIWRILFLVGAATGAHSFEQRKEVEQDPGPFNVPEGATVAFNCTYSNSASQSFFWYRQDCRKEPKLLMSVYSSGNEDGRFTAQLNRASQYISLLIRDSKLSDSATYLCVVKPDPGAGSYQLTFGKGTKLSVIPNTRIQNPDPAVYQLRDSKSSDKSVCLFTDFDSQTNVSQSKDSDVYITDKTVLDMRSMDFKSNSAVAWSNKSDFACANAFNNSIIPEDTFFPSPESSCGTQSFGLLDPKLSYLLDGILFIYGVILTALFLRVKFSRSADAPAYQQGQNQLYNELNLGRREEYDVLDKRRGRDPEMGGKPQRRKNPQEGLYNELQKDKMAEAYSEIGMKGERRRGKGHDGLYQGLSTATKDTYDALHMQALPPR

SEQ ID NO: 10957 - protein, 721 aa, synthetic construct
MALPVTALLLPLALLLHAARPEFGVTQTPKFRVLKTGQSMTLLCAQDMNHEYMYWYRQDPGMGLRLIHYSVGEGTTAKGEVPDGYNVSRLKKQNFLLGLESAAPSQTSVYFCASRGYHRLNNEQFFGPGTRLTVLEDLKNVFPPEVAVFEPSEAEISHTQKATLVCLATGFYPDHVELSWWVNGKEVHSGVSTDPQPLKEQPALNDSRYCLSSRLRVSATFWQNPRNHFRCQVQFYGLSENDEWTQDRAKPVTQIVSAEAWGRADCGSTTPGERSSLPAFYPGTSGSCSGCGSLSLPLLAGLVAADAVASLLIVGAVFLCARPRRSPAQEDGKVYINMPGRGRAKRSGSGATNFSLLKQAGDVEENPGPTSMDWIWRILFLVGAATGAHSFEQRKEVEQDPGPFNVPEGATVAFNCTYSNSASQSFFWYRQDCRKEPKLLMSVYSSGNEDGRFTAQLNRASQYISLLIRDSKLSDSATYLCVVKPDPGAGSYQLTFGKGTKLSVIPNTRIQNPDPAVYQLRDSKSSDKSVCLFTDFDSQTNVSQSKDSDVYITDKTVLDMRSMDFKSNSAVAWSNKSDFACANAFNNSIIPEDTFFPSPESSCGTTTPGERSSLPAFYPGTSGSCSGCGSLSLPLLAGLVAADAVASLLIVGAVFKRGRKKLLYIFKQPFMRPVQTTQEEDGCSCRFPEEEEGGCELLCARPRRSPAQEDGKVYINMPGRG

SEQ ID NO: 10958 - protein, 720 aa, synthetic construct
MALPVTALLLPLALLLHAARPEFGVTQTPKFRVLKTGQSMTLLCAQDMNHEYMYWYRQDPGMGLRLIHYSVGEGTTAKGEVPDGYNVSRLKKQNFLLGLESAAPSQTSVYFCASRGYHRLNNEQFFGPGTRLTVLEDLKNVFPPEVAVFEPSEAEISHTQKATLVCLATGFYPDHVELSWWVNGKEVHSGVSTDPQPLKEQPALNDSRYCLSSRLRVSATFWQNPRNHFRCQVQFYGLSENDEWTQDRAKPVTQIVSAEAWGRADCGSTTPGERSSLPAFYPGTSGSCSGCGSLSLPLLAGLVAADAVASLLIVGAVFLCARPRRSPAQEDGKVYINMPGRGRAKRSGSGATNFSLLKQAGDVEENPGPTSMDWIWRILFLVGAATGAHSFEQRKEVEQDPGPFNVPEGATVAFNCTYSNSASQSFFWYRQDCRKEPKLLMSVYSSGNEDGRFTAQLNRASQYISLLIRDSKLSDSATYLCVVKPDPGAGSYQLTFGKGTKLSVIPNTRIQNPDPAVYQLRDSKSSDKSVCLFTDFDSQTNVSQSKDSDVYITDKTVLDMRSMDFKSNSAVAWSNKSDFACANAFNNSIIPEDTFFPSPESSCGTTTPGERSSLPAFYPGTSGSCSGCGSLSLPLLAGLVAADAVASLLIVGAVFRSKRSRLLHSDYMNMTPRRPGPTRKHYQPYAPPRDFAAYRSLCARPRRSPAQEDGKVYINMPGRG

SEQ ID NO: 10959 - protein, 715 aa, synthetic construct
MALPVTALLLPLALLLHAARPEFGVTQTPKFRVLKTGQSMTLLCAQDMNHEYMYWYRQDPGMGLRLIHYSVGEGTTAKGEVPDGYNVSRLKKQNFLLGLESAAPSQTSVYFCASRGYHRLNNEQFFGPGTRLTVLEDLKNVFPPEVAVFEPSEAEISHTQKATLVCLATGFYPDHVELSWWVNGKEVHSGVSTDPQPLKEQPALNDSRYCLSSRLRVSATFWQNPRNHFRCQVQFYGLSENDEWTQDRAKPVTQIVSAEAWGRADCGSTTPGERSSLPAFYPGTSGSCSGCGSLSLPLLAGLVAADAVASLLIVGAVFLCARPRRSPAQEDGKVYINMPGRGRAKRSGSGATNFSLLKQAGDVEENPGPTSMDWIWRILFLVGAATGAHSFEQRKEVEQDPGPFNVPEGATVAFNCTYSNSASQSFFWYRQDCRKEPKLLMSVYSSGNEDGRFTAQLNRASQYISLLIRDSKLSDSATYLCVVKPDPGAGSYQLTFGKGTKLSVIPNTRIQNPDPAVYQLRDSKSSDKSVCLFTDFDSQTNVSQSKDSDVYITDKTVLDMRSMDFKSNSAVAWSNKSDFACANAFNNSIIPEDTFFPSPESSCGTTTPGERSSLPAFYPGTSGSCSGCGSLSLPLLAGLVAADAVASLLIVGAVFRDQRLPPDAHKPPGGGSFRTPIQEEQADAHSTLAKILCARPRRSPAQEDGKVYINMPGRG

SEQ ID NO: 10960 - protein, 799 aa, synthetic construct
MALPVTALLLPLALLLHAARPEFGVTQTPKFRVLKTGQSMTLLCAQDMNHEYMYWYRQDPGMGLRLIHYSVGEGTTAKGEVPDGYNVSRLKKQNFLLGLESAAPSQTSVYFCASRGYHRLNNEQFFGPGTRLTVLEDLKNVFPPEVAVFEPSEAEISHTQKATLVCLATGFYPDHVELSWWVNGKEVHSGVSTDPQPLKEQPALNDSRYCLSSRLRVSATFWQNPRNHFRCQVQFYGLSENDEWTQDRAKPVTQIVSAEAWGRADCGSTTPGERSSLPAFYPGTSGSCSGCGSLSLPLLAGLVAADAVASLLIVGAVFLCARPRRSPAQEDGKVYINMPGRGRAKRSGSGATNFSLLKQAGDVEENPGPTSMDWIWRILFLVGAATGAHSFEQRKEVEQDPGPFNVPEGATVAFNCTYSNSASQSFFWYRQDCRKEPKLLMSVYSSGNEDGRFTAQLNRASQYISLLIRDSKLSDSATYLCVVKPDPGAGSYQLTFGKGTKLSVIPNTRIQNPDPAVYQLRDSKSSDKSVCLFTDFDSQTNVSQSKDSDVYITDKTVLDMRSMDFKSNSAVAWSNKSDFACANAFNNSIIPEDTFFPSPESSCGTTTPGERSSLPAFYPGTSGSCSGCGSLSLPLLAGLVAADAVASLLIVGAVFWRRKRKEKQSETSPKEFLTIYEDVKDLKTRRNHEQEQTFPGGGSTIYSMIQSQSSAPTSQEPAYTLYSLIQPSRKSGSRKRNHSPSFNSTIYEVIGKSQPKAQNPARLSRKELENFDVYSLCARPRRSPAQEDGKVYINMPGRG

SEQ ID NO: 10961 - protein, 750 aa, synthetic construct
MALPVTALLLPLALLLHAARPEFGVTQTPKFRVLKTGQSMTLLCAQDMNHEYMYWYRQDPGMGLRLIHYSVGEGTTAKGEVPDGYNVSRLKKQNFLLGLESAAPSQTSVYFCASRGYHRLNNEQFFGPGTRLTVLEDLKNVFPPEVAVFEPSEAEISHTQKATLVCLATGFYPDHVELSWWVNGKEVHSGVSTDPQPLKEQPALNDSRYCLSSRLRVSATFWQNPRNHFRCQVQFYGLSENDEWTQDRAKPVTQIVSAEAWGRADCGSLGEPQLCYILDAILFLYGIVLTLLYCKRGRKKLLYIFKQPFMRPVQTTQEEDGCSCRFPEEEEGGCELRLKIQVRKAAITSYEKSDGVYTGLSTRNQETYETLKHEKPPQRAKRSGSGATNFSLLKQAGDVEENPGPTSMDWIWRILFLVGAATGAHSFEQRKEVEQDPGPFNVPEGATVAFNCTYSNSASQSFFWYRQDCRKEPKLLMSVYSSGNEDGRFTAQLNRASQYISLLIRDSKLSDSATYLCVVKPDPGAGSYQLTFGKGTKLSVIPNTRIQNPDPAVYQLRDSKSSDKSVCLFTDFDSQTNVSQSKDSDVYITDKTVLDMRSMDFKSNSAVAWSNKSDFACANAFNNSIIPEDTFFPSPESSCGTLGEPQLCYILDAILFLYGIVLTLLYCRSKRSRLLHSDYMNMTPRRPGPTRKHYQPYAPPRDFAAYRSRLKIQVRKAAITSYEKSDGVYTGLSTRNQETYETLKHEKPPQ

SEQ ID NO: 10962 - protein, 745 aa, synthetic construct
MALPVTALLLPLALLLHAARPEFGVTQTPKFRVLKTGQSMTLLCAQDMNHEYMYWYRQDPGMGLRLIHYSVGEGTTAKGEVPDGYNVSRLKKQNFLLGLESAAPSQTSVYFCASRGYHRLNNEQFFGPGTRLTVLEDLKNVFPPEVAVFEPSEAEISHTQKATLVCLATGFYPDHVELSWWVNGKEVHSGVSTDPQPLKEQPALNDSRYCLSSRLRVSATFWQNPRNHFRCQVQFYGLSENDEWTQDRAKPVTQIVSAEAWGRADCGSLGEPQLCYILDAILFLYGIVLTLLYCKRGRKKLLYIFKQPFMRPVQTTQEEDGCSCRFPEEEEGGCELRLKIQVRKAAITSYEKSDGVYTGLSTRNQETYETLKHEKPPQRAKRSGSGATNFSLLKQAGDVEENPGPTSMDWIWRILFLVGAATGAHSFEQRKEVEQDPGPFNVPEGATVAFNCTYSNSASQSFFWYRQDCRKEPKLLMSVYSSGNEDGRFTAQLNRASQYISLLIRDSKLSDSATYLCVVKPDPGAGSYQLTFGKGTKLSVIPNTRIQNPDPAVYQLRDSKSSDKSVCLFTDFDSQTNVSQSKDSDVYITDKTVLDMRSMDFKSNSAVAWSNKSDFACANAFNNSIIPEDTFFPSPESSCGTLGEPQLCYILDAILFLYGIVLTLLYCRDQRLPPDAHKPPGGGSFRTPIQEEQADAHSTLAKIRLKIQVRKAAITSYEKSDGVYTGLSTRNQETYETLKHEKPPQ

SEQ ID NO: 10963 - protein, 829 aa, synthetic construct
MALPVTALLLPLALLLHAARPEFGVTQTPKFRVLKTGQSMTLLCAQDMNHEYMYWYRQDPGMGLRLIHYSVGEGTTAKGEVPDGYNVSRLKKQNFLLGLESAAPSQTSVYFCASRGYHRLNNEQFFGPGTRLTVLEDLKNVFPPEVAVFEPSEAEISHTQKATLVCLATGFYPDHVELSWWVNGKEVHSGVSTDPQPLKEQPALNDSRYCLSSRLRVSATFWQNPRNHFRCQVQFYGLSENDEWTQDRAKPVTQIVSAEAWGRADCGSLGEPQLCYILDAILFLYGIVLTLLYCKRGRKKLLYIFKQPFMRPVQTTQEEDGCSCRFPEEEEGGCELRLKIQVRKAAITSYEKSDGVYTGLSTRNQETYETLKHEKPPQRAKRSGSGATNFSLLKQAGDVEENPGPTSMDWIWRILFLVGAATGAHSFEQRKEVEQDPGPFNVPEGATVAFNCTYSNSASQSFFWYRQDCRKEPKLLMSVYSSGNEDGRFTAQLNRASQYISLLIRDSKLSDSATYLCVVKPDPGAGSYQLTFGKGTKLSVIPNTRIQNPDPAVYQLRDSKSSDKSVCLFTDFDSQTNVSQSKDSDVYITDKTVLDMRSMDFKSNSAVAWSNKSDFACANAFNNSIIPEDTFFPSPESSCGTLGEPQLCYILDAILFLYGIVLTLLYCWRRKRKEKQSETSPKEFLTIYEDVKDLKTRRNHEQEQTFPGGGSTIYSMIQSQSSAPTSQEPAYTLYSLIQPSRKSGSRKRNHSPSFNSTIYEVIGKSQPKAQNPARLSRKELENFDVYSRLKIQVRKAAITSYEKSDGVYTGLSTRNQETYETLKHEKPPQ

SEQ ID NO: 10964 - protein, 751 aa, synthetic construct
MALPVTALLLPLALLLHAARPEFGVTQTPKFRVLKTGQSMTLLCAQDMNHEYMYWYRQDPGMGLRLIHYSVGEGTTAKGEVPDGYNVSRLKKQNFLLGLESAAPSQTSVYFCASRGYHRLNNEQFFGPGTRLTVLEDLKNVFPPEVAVFEPSEAEISHTQKATLVCLATGFYPDHVELSWWVNGKEVHSGVSTDPQPLKEQPALNDSRYCLSSRLRVSATFWQNPRNHFRCQVQFYGLSENDEWTQDRAKPVTQIVSAEAWGRADCGSLGEPQLCYILDAILFLYGIVLTLLYCKRGRKKLLYIFKQPFMRPVQTTQEEDGCSCRFPEEEEGGCELRLKIQVRKAAITSYEKSDGVYTGLSTRNQETYETLKHEKPPQRAKRSGSGATNFSLLKQAGDVEENPGPTSMDWIWRILFLVGAATGAHSFEQRKEVEQDPGPFNVPEGATVAFNCTYSNSASQSFFWYRQDCRKEPKLLMSVYSSGNEDGRFTAQLNRASQYISLLIRDSKLSDSATYLCVVKPDPGAGSYQLTFGKGTKLSVIPNTRIQNPDPAVYQLRDSKSSDKSVCLFTDFDSQTNVSQSKDSDVYITDKTVLDMRSMDFKSNSAVAWSNKSDFACANAFNNSIIPEDTFFPSPESSCGTLGEPQLCYILDAILFLYGIVLTLLYCKRGRKKLLYIFKQPFMRPVQTTQEEDGCSCRFPEEEEGGCELRLKIQVRKAAITSYEKSDGVYTGLSTRNQETYETLKHEKPPQ

SEQ ID NO: 10965 - protein, 750 aa, synthetic construct; identical to SEQ ID NO: 10961

SEQ ID NO: 10966 - protein, 749 aa, synthetic construct
MALPVTALLLPLALLLHAARPEFGVTQTPKFRVLKTGQSMTLLCAQDMNHEYMYWYRQDPGMGLRLIHYSVGEGTTAKGEVPDGYNVSRLKKQNFLLGLESAAPSQTSVYFCASRGYHRLNNEQFFGPGTRLTVLEDLKNVFPPEVAVFEPSEAEISHTQKATLVCLATGFYPDHVELSWWVNGKEVHSGVSTDPQPLKEQPALNDSRYCLSSRLRVSATFWQNPRNHFRCQVQFYGLSENDEWTQDRAKPVTQIVSAEAWGRADCGSLGEPQLCYILDAILFLYGIVLTLLYCRSKRSRLLHSDYMNMTPRRPGPTRKHYQPYAPPRDFAAYRSRLKIQVRKAAITSYEKSDGVYTGLSTRNQETYETLKHEKPPQRAKRSGSGATNFSLLKQAGDVEENPGPTSMDWIWRILFLVGAATGAHSFEQRKEVEQDPGPFNVPEGATVAFNCTYSNSASQSFFWYRQDCRKEPKLLMSVYSSGNEDGRFTAQLNRASQYISLLIRDSKLSDSATYLCVVKPDPGAGSYQLTFGKGTKLSVIPNTRIQNPDPAVYQLRDSKSSDKSVCLFTDFDSQTNVSQSKDSDVYITDKTVLDMRSMDFKSNSAVAWSNKSDFACANAFNNSIIPEDTFFPSPESSCGTLGEPQLCYILDAILFLYGIVLTLLYCRSKRSRLLHSDYMNMTPRRPGPTRKHYQPYAPPRDFAAYRSRLKIQVRKAAITSYEKSDGVYTGLSTRNQETYETLKHEKPPQ

SEQ ID NO: 10967 - protein, 667 aa, synthetic construct
MALPVTALLLPLALLLHAARPEFGVTQTPKFRVLKTGQSMTLLCAQDMNHEYMYWYRQDPGMGLRLIHYSVGEGTTAKGEVPDGYNVSRLKKQNFLLGLESAAPSQTSVYFCASRGYHRLNNEQFFGPGTRLTVLEDLKNVFPPEVAVFEPSEAEISHTQKATLVCLATGFYPDHVELSWWVNGKEVHSGVSTDPQPLKEQPALNDSRYCLSSRLRVSATFWQNPRNHFRCQVQFYGLSENDEWTQDRAKPVTQIVSAEAWGRADCGSLGEPQLSYILDAILFLYGIVLTLLYCRLKIQVRKAAITSYEKSDGVYTGLSTRNQETYETLKHEKPPQRAKRSGSGATNFSLLKQAGDVEENPGPTSMDWIWRILFLVGAATGAHSFEQRKEVEQDPGPFNVPEGATVAFNCTYSNSASQSFFWYRQDCRKEPKLLMSVYSSGNEDGRFTAQLNRASQYISLLIRDSKLSDSATYLCVVKPDPGAGSYQLTFGKGTKLSVIPNTRIQNPDPAVYQLRDSKSSDKSVCLFTDFDSQTNVSQSKDSDVYITDKTVLDMRSMDFKSNSAVAWSNKSDFACANAFNNSIIPEDTFFPSPESSCGTLGEPQLSYILDAILFLYGIVLTLLYCRLKIQVRKAAITSYEKSDGVYTGLSTRNQETYETLKHEKPPQ

SEQ ID NO: 10968 - protein, 703 aa, synthetic construct
MALPVTALLLPLALLLHAARPEFGVTQTPKFRVLKTGQSMTLLCAQDMNHEYMYWYRQDPGMGLRLIHYSVGEGTTAKGEVPDGYNVSRLKKQNFLLGLESAAPSQTSVYFCASRGYHRLNNEQFFGPGTRLTVLEDLKNVFPPEVAVFEPSEAEISHTQKATLVCLATGFYPDHVELSWWVNGKEVHSGVSTDPQPLKEQPALNDSRYCLSSRLRVSATFWQNPRNHFRCQVQFYGLSENDEWTQDRAKPVTQIVSAEAWGRADCGSQAQSDCSCSTVSPGVLAGIVMGDLVLTVLIALAVYFLGRLVPRGRGAAEAATRKQRITETESPYQELQGQRSDVYSDLNTQRPYYKRAKRSGSGATNFSLLKQAGDVEENPGPTSMDWIWRILFLVGAATGAHSFEQRKEVEQDPGPFNVPEGATVAFNCTYSNSASQSFFWYRQDCRKEPKLLMSVYSSGNEDGRFTAQLNRASQYISLLIRDSKLSDSATYLCVVKPDPGAGSYQLTFGKGTKLSVIPNTRIQNPDPAVYQLRDSKSSDKSVCLFTDFDSQTNVSQSKDSDVYITDKTVLDMRSMDFKSNSAVAWSNKSDFACANAFNNSIIPEDTFFPSPESSCGTQAQSDCSSSTVSPGVLAGIVMGDLVLTVLIALAVYFLGRLVPRGRGAAEAATRKQRITETESPYQELQGQRSDVYSDLNTQRPYYK

SEQ ID NO: 10969 - protein, 745 aa, synthetic construct
MALPVTALLLPLALLLHAARPEFGVTQTPKFRVLKTGQSMTLLCAQDMNHEYMYWYRQDPGMGLRLIHYSVGEGTTAKGEVPDGYNVSRLKKQNFLLGLESAAPSQTSVYFCASRGYHRLNNEQFFGPGTRLTVLEDLKNVFPPEVAVFEPSEAEISHTQKATLVCLATGFYPDHVELSWWVNGKEVHSGVSTDPQPLKEQPALNDSRYCLSSRLRVSATFWQNPRNHFRCQVQFYGLSENDEWTQDRAKPVTQIVSAEAWGRADCGSQAQSDCSCSTVSPGVLAGIVMGDLVLTVLIALAVYFLGRLVPRGRGAAEAATRKQRITETESPYQELQGQRSDVYSDLNTQRPYYKRAKRSGSGATNFSLLKQAGDVEENPGPTSMDWIWRILFLVGAATGAHSFEQRKEVEQDPGPFNVPEGATVAFNCTYSNSASQSFFWYRQDCRKEPKLLMSVYSSGNEDGRFTAQLNRASQYISLLIRDSKLSDSATYLCVVKPDPGAGSYQLTFGKGTKLSVIPNTRIQNPDPAVYQLRDSKSSDKSVCLFTDFDSQTNVSQSKDSDVYITDKTVLDMRSMDFKSNSAVAWSNKSDFACANAFNNSIIPEDTFFPSPESSCGTQAQSDCSCSTVSPGVLAGIVMGDLVLTVLIALAVYFLGRLVPRGRGAAEAATRKQRITETESPYQELQGQRSDVYSDLNTQKRGRKKLLYIFKQPFMRPVQTTQEEDGCSCRFPEEEEGGCELRPYYK

SEQ ID NO: 10970 - protein, 744 aa, synthetic construct
MALPVTALLLPLALLLHAARPEFGVTQTPKFRVLKTGQSMTLLCAQDMNHEYMYWYRQDPGMGLRLIHYSVGEGTTAKGEVPDGYNVSRLKKQNFLLGLESAAPSQTSVYFCASRGYHRLNNEQFFGPGTRLTVLEDLKNVFPPEVAVFEPSEAEISHTQKATLVCLATGFYPDHVELSWWVNGKEVHSGVSTDPQPLKEQPALNDSRYCLSSRLRVSATFWQNPRNHFRCQVQFYGLSENDEWTQDRAKPVTQIVSAEAWGRADCGSQAQSDCSCSTVSPGVLAGIVMGDLVLTVLIALAVYFLGRLVPRGRGAAEAATRKQRITETESPYQELQGQRSDVYSDLNTQRPYYKRAKRSGSGATNFSLLKQAGDVEENPGPTSMDWIWRILFLVGAATGAHSFEQRKEVEQDPGPFNVPEGATVAFNCTYSNSASQSFFWYRQDCRKEPKLLMSVYSSGNEDGRFTAQLNRASQYISLLIRDSKLSDSATYLCVVKPDPGAGSYQLTFGKGTKLSVIPNTRIQNPDPAVYQLRDSKSSDKSVCLFTDFDSQTNVSQSKDSDVYITDKTVLDMRSMDFKSNSAVAWSNKSDFACANAFNNSIIPEDTFFPSPESSCGTQAQSDCSCSTVSPGVLAGIVMGDLVLTVLIALAVYFLGRLVPRGRGAAEAATRKQRITETESPYQELQGQRSDVYSDLNTQRSKRSRLLHSDYMNMTPRRPGPTRKHYQPYAPPRDFAAYRSRPYYK

SEQ ID NO: 10971 - protein, 739 aa, synthetic construct
MALPVTALLLPLALLLHAARPEFGVTQTPKFRVLKTGQSMTLLCAQDMNHEYMYWYRQDPGMGLRLIHYSVGEGTTAKGEVPDGYNVSRLKKQNFLLGLESAAPSQTSVYFCASRGYHRLNNEQFFGPGTRLTVLEDLKNVFPPEVAVFEPSEAEISHTQKATLVCLATGFYPDHVELSWWVNGKEVHSGVSTDPQPLKEQPALNDSRYCLSSRLRVSATFWQNPRNHFRCQVQFYGLSENDEWTQDRAKPVTQIVSAEAWGRADCGSQAQSDCSCSTVSPGVLAGIVMGDLVLTVLIALAVYFLGRLVPRGRGAAEAATRKQRITETESPYQELQGQRSDVYSDLNTQRPYYKRAKRSGSGATNFSLLKQAGDVEENPGPTSMDWIWRILFLVGAATGAHSFEQRKEVEQDPGPFNVPEGATVAFNCTYSNSASQSFFWYRQDCRKEPKLLMSVYSSGNEDGRFTAQLNRASQYISLLIRDSKLSDSATYLCVVKPDPGAGSYQLTFGKGTKLSVIPNTRIQNPDPAVYQLRDSKSSDKSVCLFTDFDSQTNVSQSKDSDVYITDKTVLDMRSMDFKSNSAVAWSNKSDFACANAFNNSIIPEDTFFPSPESSCGTQAQSDCSCSTVSPGVLAGIVMGDLVLTVLIALAVYFLGRLVPRGRGAAEAATRKQRITETESPYQELQGQRSDVYSDLNTQRDQRLPPDAHKPPGGGSFRTPIQEEQADAHSTLAKIRPYYK

SEQ ID NO: 10972 - protein, 823 aa, synthetic construct
MALPVTALLLPLALLLHAARPEFGVTQTPKFRVLKTGQSMTLLCAQDMNHEYMYWYRQDPGMGLRLIHYSVGEGTTAKGEVPDGYNVSRLKKQNFLLGLESAAPSQTSVYFCASRGYHRLNNEQFFGPGTRLTVLEDLKNVFPPEVAVFEPSEAEISHTQKATLVCLATGFYPDHVELSWWVNGKEVHSGVSTDPQPLKEQPALNDSRYCLSSRLRVSATFWQNPRNHFRCQVQFYGLSENDEWTQDRAKPVTQIVSAEAWGRADCGSQAQSDCSCSTVSPGVLAGIVMGDLVLTVLIALAVYFLGRLVPRGRGAAEAATRKQRITETESPYQELQGQRSDVYSDLNTQRPYYKRAKRSGSGATNFSLLKQAGDVEENPGPTSMDWIWRILFLVGAATGAHSFEQRKEVEQDPGPFNVPEGATVAFNCTYSNSASQSFFWYRQDCRKEPKLLMSVYSSGNEDGRFTAQLNRASQYISLLIRDSKLSDSATYLCVVKPDPGAGSYQLTFGKGTKLSVIPNTRIQNPDPAVYQLRDSKSSDKSVCLFTDFDSQTNVSQSKDSDVYITDKTVLDMRSMDFKSNSAVAWSNKSDFACANAFNNSIIPEDTFFPSPESSCGTQAQSDCSCSTVSPGVLAGIVMGDLVLTVLIALAVYFLGRLVPRGRGAAEAATRKQRITETESPYQELQGQRSDVYSDLNTQWRRKRKEKQSETSPKEFLTIYEDVKDLKTRRNHEQEQTFPGGGSTIYSMIQSQSSAPTSQEPAYTLYSLIQPSRKSGSRKRNHSPSFNSTIYEVIGKSQPKAQNPARLSRKELENFDVYSRPYYK

SEQ ID NO: 10973 - protein, 915 aa, synthetic construct
MALPVTALLLPLALLLHAARPEFGVTQTPKFRVLKTGQSMTLLCAQDMNHEYMYWYRQDPGMGLRLIHYSVGEGTTAKGEVPDGYNVSRLKKQNFLLGLESAAPSQTSVYFCASRGYHRLNNEQFFGPGTRLTVLEDLKNVFPPEVAVFEPSEAEISHTQKATLVCLATGFYPDHVELSWWVNGKEVHSGVSTDPQPLKEQPALNDSRYCLSSRLRVSATFWQNPRNHFRCQVQFYGLSENDEWTQDRAKPVTQIVSAEAWGRADCGSQAQSDCSCSTVSPGVLAGIVMGDLVLTVLIALAVYFLGRLVPRGRGAAEAATRKQRITETESPYQELQGQRSDVYSDLNTQRVKFSRSADAPAYQQGQNQLYNELNLGRREEYDVLDKRRGRDPEMGGKPQRRKNPQEGLYNELQKDKMAEAYSEIGMKGERRRGKGHDGLYQGLSTATKDTYDALHMQALPPRRAKRSGSGATNFSLLKQAGDVEENPGPTSMDWIWRILFLVGAATGAHSFEQRKEVEQDPGPFNVPEGATVAFNCTYSNSASQSFFWYRQDCRKEPKLLMSVYSSGNEDGRFTAQLNRASQYISLLIRDSKLSDSATYLCVVKPDPGAGSYQLTFGKGTKLSVIPNTRIQNPDPAVYQLRDSKSSDKSVCLFTDFDSQTNVSQSKDSDVYITDKTVLDMRSMDFKSNSAVAWSNKSDFACANAFNNSIIPEDTFFPSPESSCGTTTPGERSSLPAFYPGTSGSCSGCGSLSLPLLAGLVAADAVASLLIVGAVFLCARPRRSPAQEDGKVYINMPGRGSSRRVKFSRSADAPAYQQGQNQLYNELNLGRREEYDVLDKRRGRDPEMGGKPQRRKNPQEGLYNELQKDKMAEAYSEIGMKGERRRGKGHDGLYQGLSTATKDTYDALHMQALPPR

SEQ ID NO: 10974 - protein, 841 aa, synthetic construct
MALPVTALLLPLALLLHAARPEFGVTQTPKFRVLKTGQSMTLLCAQDMNHEYMYWYRQDPGMGLRLIHYSVGEGTTAKGEVPDGYNVSRLKKQNFLLGLESAAPSQTSVYFCASRGYHRLNNEQFFGPGTRLTVLEDLKNVFPPEVAVFEPSEAEISHTQKATLVCLATGFYPDHVELSWWVNGKEVHSGVSTDPQPLKEQPALNDSRYCLSSRLRVSATFWQNPRNHFRCQVQFYGLSENDEWTQDRAKPVTQIVSAEAWGRADCGSQAQSDCSCSTVSPGVLAGIVMGDLVLTVLIALAVYFLGRLVPRGRGAAEAATRKQRITETESPYQELQGQRSDVYSDLNTQRVKFSRSADAPAYQQGQNQLYNELNLGRREEYDVLDKRRGRDPEMGGKPQRRKNPQEGLYNELQKDKMAEAYSEIGMKGERRRGKGHDGLYQGLSTATKDTYDALHMQALPPRRAKRSGSGATNFSLLKQAGDVEENPGPTSMDWIWRILFLVGAATGAHSFEQRKEVEQDPGPFNVPEGATVAFNCTYSNSASQSFFWYRQDCRKEPKLLMSVYSSGNEDGRFTAQLNRASQYISLLIRDSKLSDSATYLCVVKPDPGAGSYQLTFGKGTKLSVIPNTRIQNPDPAVYQLRDSKSSDKSVCLFTDFDSQTNVSQSKDSDVYITDKTVLDMRSMDFKSNSAVAWSNKSDFACANAFNNSIIPEDTFFPSPESSCGTTTPGERSSLPAFYPGTSGSCSGCGSLSLPLLAGLVAADAVASLLIVGAVFKRGRKKLLYIFKQPFMRPVQTTQEEDGCSCRFPEEEEGGCELLCARPRRSPAQEDGKVYINMPGRG

SEQ ID NO: 10975 - protein, 840 aa, synthetic construct
MALPVTALLLPLALLLHAARPEFGVTQTPKFRVLKTGQSMTLLCAQDMNHEYMYWYRQDPGMGLRLIHYSVGEGTTAKGEVPDGYNVSRLKKQNFLLGLESAAPSQTSVYFCASRGYHRLNNEQFFGPGTRLTVLEDLKNVFPPEVAVFEPSEAEISHTQKATLVCLATGFYPDHVELSWWVNGKEVHSGVSTDPQPLKEQPALNDSRYCLSSRLRVSATFWQNPRNHFRCQVQFYGLSENDEWTQDRAKPVTQIVSAEAWGRADCGSQAQSDCSCSTVSPGVLAGIVMGDLVLTVLIALAVYFLGRLVPRGRGAAEAATRKQRITETESPYQELQGQRSDVYSDLNTQRVKFSRSADAPAYQQGQNQLYNELNLGRREEYDVLDKRRGRDPEMGGKPQRRKNPQEGLYNELQKDKMAEAYSEIGMKGERRRGKGHDGLYQGLSTATKDTYDALHMQALPPRRAKRSGSGATNFSLLKQAGDVEENPGPTSMDWIWRILFLVGAATGAHSFEQRKEVEQDPGPFNVPEGATVAFNCTYSNSASQSFFWYRQDCRKEPKLLMSVYSSGNEDGRFTAQLNRASQYISLLIRDSKLSDSATYLCVVKPDPGAGSYQLTFGKGTKLSVIPNTRIQNPDPAVYQLRDSKSSDKSVCLFTDFDSQTNVSQSKDSDVYITDKTVLDMRSMDFKSNSAVAWSNKSDFACANAFNNSIIPEDTFFPSPESSCGTTTPGERSSLPAFYPGTSGSCSGCGSLSLPLLAGLVAADAVASLLIVGAVFRSKRSRLLHSDYMNMTPRRPGPTRKHYQPYAPPRDFAAYRSLCARPRRSPAQEDGKVYINMPGRG

SEQ ID NO: 10976 - protein, 1086 aa, synthetic construct
MALPVTALLLPLALLLHAARPEFGVTQTPKFRVLKTGQSMTLLCAQDMNHEYMYWYRQDPGMGLRLIHYSVGEGTTAKGEVPDGYNVSRLKKQNFLLGLESAAPSQTSVYFCASRGYHRLNNEQFFGPGTRLTVLEDLKNVFPPEVAVFEPSEAEISHTQKATLVCLATGFYPDHVELSWWVNGKEVHSGVSTDPQPLKEQPALNDSRYCLSSRLRVSATFWQNPRNHFRCQVQFYGLSENDEWTQDRAKPVTQIVSAEAWGRADCGSQSFGLLDPKLCYLLDGILFIYGVILTALFLRVKFSRSADAPAYQQGQNQLYNELNLGRREEYDVLDKRRGRDPEMGGKPQRRKNPQEGLYNELQKDKMAEAYSEIGMKGERRRGKGHDGLYQGLSTATKDTYDALHMQALPPRRAKRSGSGATNFSLLKQAGDVEENPGPTSMDWIWRILFLVGAATGAHSFEQRKEVEQDPGPFNVPEGATVAFNCTYSNSASQSFFWYRQDCRKEPKLLMSVYSSGNEDGRFTAQLNRASQYISLLIRDSKLSDSATYLCVVKPDPGAGSYQLTFGKGTKLSVIPNTRIQNPDPAVYQLRDSKSSDKSVCLFTDFDSQTNVSQSKDSDVYITDKTVLDMRSMDFKSNSAVAWSNKSDFACANAFNNSIIPEDTFFPSPESSCGTQSFGLLDPKLCYLLDGILFIYGVILTALFLRVKFSRSADAPAYQQGQNQLYNELNLGRREEYDVLDKRRGRDPEMGGKPQRRKNPQEGLYNELQKDKMAEAYSEIGMKGERRRGKGHDGLYQGLSTATKDTYDALHMQALPPRRAKRSGSGVKQTLNFDLLKLAGDVESNPGPSRGHMALPVTALLLPLALLLHAARPSQFRVSPLDRTWNLGETVELKCQVLLSNPTSGCSWLFQPRGAAASPTFLLYLSQNKPKAAEGLDTQRFSGKRLGDTFVLTLSDFRRENEGYYFCSALSNSIMYFSHFVPVFLPAKPTTTPAPRPPTPAPTIASQPLSLRPEACRPAAGGAVHTRGLDFACDIYIWAPLAGTCGVLLLSLVITLYCNHRNRRRVCKCPRPVVKSGDKPSLSARYV

SEQ ID NO: 10977 - protein, 826 aa, synthetic construct
MALPVTALLLPLALLLHAARPEFGVTQTPKFRVLKTGQSMTLLCAQDMNHEYMYWYRQDPGMGLRLIHYSVGEGTTAKGEVPDGYNVSRLKKQNFLLGLESAAPSQTSVYFCASRGYHRLNNEQFFGPGTRLTVLEDLKNVFPPEVAVFEPSEAEISHTQKATLVCLATGFYPDHVELSWWVNGKEVHSGVSTDPQPLKEQPALNDSRYCLSSRLRVSATFWQNPRNHFRCQVQFYGLSENDEWTQDRAKPVTQIVSAEAWGRADCGSQSFGLLDPKLCYLLDGILFIYGVILTALFLRVKFSRSADAPAYQQGQNQLYNELNLGRREEYDVLDKRRGRDPEMGGKPQRRKNPQEGLYNELQKDKMAEAYSEIGMKGERRRGKGHDGLYQGLSTATKDTYDALHMQALPPRRAKRSGSGATNFSLLKQAGDVEENPGPTSMDWIWRILFLVGAATGAHSFEQRKEVEQDPGPFNVPEGATVAFNCTYSNSASQSFFWYRQDCRKEPKLLMSVYSSGNEDGRFTAQLNRASQYISLLIRDSKLSDSATYLCVVKPDPGAGSYQLTFGKGTKLSVIPNTRASTKGPSVFPLAPSSKSTSGGTAALGCLVKDYFPEPVTVSWNSGALTSGVHTFPAVLQSSGLYSLSSVVTVPSSSLGTQTYICNVNHKPSNTKVDKRVEPKSCGTQSFGLLDPKLSYLLDGILFIYGVILTALFLRVKFSRSADAPAYQQGQNQLYNELNLGRREEYDVLDKRRGRDPEMGGKPQRRKNPQEGLYNELQKDKMAEAYSEIGMKGERRRGKGHDGLYQGLSTATKDTYDALHMQALPPR

SEQ ID NO: 10978 - protein, 817 aa, synthetic construct
MALPVTALLLPLALLLHAARPEFGVTQTPKFRVLKTGQSMTLLCAQDMNHEYMYWYRQDPGMGLRLIHYSVGEGTTAKGEVPDGYNVSRLKKQNFLLGLESAAPSQTSVYFCASRGYHRLNNEQFFGPGTRLTVLEDLKNVFPPEVAVFEPSEAEISHTQKATLVCLATGFYPDHVELSWWVNGKEVHSGVSTDPQPLKEQPALNDSRYCLSSRLRVSATFWQNPRNHFRCQVQFYGLSENDEWTQDRAKPVTQIVSAEAWGRADCGSQSFGLLDPKLCYLLDGILFIYGVILTALFLRVKFSRSADAPAYQQGQNQLYNELNLGRREEYDVLDKRRGRDPEMGGKPQRRKNPQEGLYNELQKDKMAEAYSEIGMKGERRRGKGHDGLYQGLSTATKDTYDALHMQALPPRRAKRSGSGATNFSLLKQAGDVEENPGPTSMDWIWRILFLVGAATGAHSFEQRKEVEQDPGPFNVPEGATVAFNCTYSNSASQSFFWYRQDCRKEPKLLMSVYSSGNEDGRFTAQLNRASQYISLLIRDSKLSDSATYLCVVKPDPGAGSYQLTFGKGTKLSVIPNTRIQNPDPAVYQLRDSKSSDKSVCLFTDFDSQTNVSQSKDSDVYITDKTVLDMRSMDFKSNSAVAWSNKSDFACANAFNNSIIPEDTFFPSPESSCGTQSFGLLDPKLSYLLDGILFIYGVILTALFLRVKFSRSADAPAYQQGQNQLYNELNLGRREEYDVLDKRRGRDPEMGGKPQRRKNPQEGLYNELQKDKMAEAYSEIGMKGERRRGKGHDGLYQGLSTATKDTYDALHMQALPPR

SEQ ID NO: 10979 - protein, 987 aa, synthetic construct
MALPVTALLLPLALLLHAARPEFGVTQTPKFRVLKTGQSMTLLCAQDMNHEYMYWYRQDPGMGLRLIHYSVGEGTTAKGEVPDGYNVSRLKKQNFLLGLESAAPSQTSVYFCASRGYHRLNNEQFFGPGTRLTVLEGQPKANPTVTLFPPSSEELQANKATLVCLISDFYPGAVTVAWKADGSPVKAGVETTKPSKQSNNKYAASSYLSLTPEQWKSHRSYSCQVTHEGSTVEKTVAPTECSGSLGEPQLCYILDAILFLYGIVLTLLYCRLKIQVRKAAITSYEKSDGVYTGLSTRNQETYETLKHEKPPQRAKRSGSGATNFSLLKQAGDVEENPGPTSMDWIWRILFLVGAATGAHSFEQRKEVEQDPGPFNVPEGATVAFNCTYSNSASQSFFWYRQDCRKEPKLLMSVYSSGNEDGRFTAQLNRASQYISLLIRDSKLSDSATYLCVVKPDPGAGSYQLTFGKGTKLSVIPNTRIQNPDPAVYQLRDSKSSDKSVCLFTDFDSQTNVSQSKDSDVYITDKTVLDMRSMDFKSNSAVAWSNKSDFACANAFNNSIIPEDTFFPSPESSCGTQSFGLLDPKLCYLLDGILFIYGVILTALFLRVKFSRSADAPAYQQGQNQLYNELNLGRREEYDVLDKRRGRDPEMGGKPQRRKNPQEGLYNELQKDKMAEAYSEIGMKGERRRGKGHDGLYQGLSTATKDTYDALHMQALPPRRAKRSGSGVKQTLNFDLLKLAGDVESNPGPSRGHMALPVTALLLPLALLLHAARPSQFRVSPLDRTWNLGETVELKCQVLLSNPTSGCSWLFQPRGAAASPTFLLYLSQNKPKAAEGLDTQRFSGKRLGDTFVLTLSDFRRENEGYYFCSALSNSIMYFSHFVPVFLPAKPTTTPAPRPPTPAPTIASQPLSLRPEACRPAAGGAVHTRGLDFACDIYIWAPLAGTCGVLLLSLVITLYCNHRNRRRVCKCPRPVVKSGDKPSLSARYV

SEQ ID NO: 10980 - protein, 751 aa, synthetic construct
MALPVTALLLPLALLLHAARPEFGVTQTPKFRVLKTGQSMTLLCAQDMNHEYMYWYRQDPGMGLRLIHYSVGEGTTAKGEVPDGYNVSRLKKQNFLLGLESAAPSQTSVYFCASRGYHRLNNEQFFGPGTRLTVLEDLKNVFPPEVAVFEPSEAEISHTQKATLVCLATGFYPDHVELSWWVNGKEVHSGVSTDPQPLKEQPALNDSRYCLSSRLRVSATFWQNPRNHFRCQVQFYGLSENDEWTQDRAKPVTQIVSAEAWGRADCGSQSFGLLDPKLCYLLDGILFIYGVILTALFLRVKFSRSADAPAYQQGQNQLYNELNLGRREEYDVLDKRRGRDPEMGGKPQRRKNPQEGLYNELQKDKMAEAYSEIGMKGERRRGKGHDGLYQGLSTATKDTYDALHMQALPPRRAKRSGSGATNFSLLKQAGDVEENPGPTSMDWIWRILFLVGAATGAHSFEQRKEVEQDPGPFNVPEGATVAFNCTYSNSASQSFFWYRQDCRKEPKLLMSVYSSGNEDGRFTAQLNRASQYISLLIRDSKLSDSATYLCVVKPDPGAGSYQLTFGKGTKLSVIPNTRASTKGPSVFPLAPSSKSTSGGTAALGCLVKDYFPEPVTVSWNSGALTSGVHTFPAVLQSSGLYSLSSVVTVPSSSLGTQTYICNVNHKPSNTKVDKRVEPKSCGTLGEPQLCYILDAILFLYGIVLTLLYCRLKIQVRKAAITSYEKSDGVYTGLSTRNQETYETLKHEKPPQ

SEQ ID NO: 10981 - protein, 751 aa, synthetic construct; identical to SEQ ID NO: 10980

SEQ ID NO: 10982 - protein, 742 aa, synthetic construct
MALPVTALLLPLALLLHAARPEFGVTQTPKFRVLKTGQSMTLLCAQDMNHEYMYWYRQDPGMGLRLIHYSVGEGTTAKGEVPDGYNVSRLKKQNFLLGLESAAPSQTSVYFCASRGYHRLNNEQFFGPGTRLTVLEDLKNVFPPEVAVFEPSEAEISHTQKATLVCLATGFYPDHVELSWWVNGKEVHSGVSTDPQPLKEQPALNDSRYCLSSRLRVSATFWQNPRNHFRCQVQFYGLSENDEWTQDRAKPVTQIVSAEAWGRADCGSQSFGLLDPKLCYLLDGILFIYGVILTALFLRVKFSRSADAPAYQQGQNQLYNELNLGRREEYDVLDKRRGRDPEMGGKPQRRKNPQEGLYNELQKDKMAEAYSEIGMKGERRRGKGHDGLYQGLSTATKDTYDALHMQALPPRRAKRSGSGATNFSLLKQAGDVEENPGPTSMDWIWRILFLVGAATGAHSFEQRKEVEQDPGPFNVPEGATVAFNCTYSNSASQSFFWYRQDCRKEPKLLMSVYSSGNEDGRFTAQLNRASQYISLLIRDSKLSDSATYLCVVKPDPGAGSYQLTFGKGTKLSVIPNTRIQNPDPAVYQLRDSKSSDKSVCLFTDFDSQTNVSQSKDSDVYITDKTVLDMRSMDFKSNSAVAWSNKSDFACANAFNNSIIPEDTFFPSPESSCGTLGEPQLCYILDAILFLYGIVLTLLYCRLKIQVRKAAITSYEKSDGVYTGLSTRNQETYETLKHEKPPQ

SEQ ID NO: 10983 - protein, 991 aa, synthetic construct
MALPVTALLLPLALLLHAARPEFGVTQTPKFRVLKTGQSMTLLCAQDMNHEYMYWYRQDPGMGLRLIHYSVGEGTTAKGEVPDGYNVSRLKKQNFLLGLESAAPSQTSVYFCASRGYHRLNNEQFFGPGTRLTVLEGQPKANPTVTLFPPSSEELQANKATLVCLISDFYPGAVTVAWKADGSPVKAGVETTKPSKQSNNKYAASSYLSLTPEQWKSHRSYSCQVTHEGSTVEKTVAPTECSTTPGERSSLPAFYPGTSGSCSGCGSLSLPLLAGLVAADAVASLLIVGAVFLCARPRRSPAQEDGKVYINMPGRGRAKRSGSGATNFSLLKQAGDVEENPGPTSMDWIWRILFLVGAATGAHSFEQRKEVEQDPGPFNVPEGATVAFNCTYSNSASQSFFWYRQDCRKEPKLLMSVYSSGNEDGRFTAQLNRASQYISLLIRDSKLSDSATYLCVVKPDPGAGSYQLTFGKGTKLSVIPNTRIQNPDPAVYQLRDSKSSDKSVCLFTDFDSQTNVSQSKDSDVYITDKTVLDMRSMDFKSNSAVAWSNKSDFACANAFNNSIIPEDTFFPSPESSCGTQSFGLLDPKLCYLLDGILFIYGVILTALFLRVKFSRSADAPAYQQGQNQLYNELNLGRREEYDVLDKRRGRDPEMGGKPQRRKNPQEGLYNELQKDKMAEAYSEIGMKGERRRGKGHDGLYQGLSTATKDTYDALHMQALPPRRAKRSGSGVKQTLNFDLLKLAGDVESNPGPSRGHMALPVTALLLPLALLLHAARPSQFRVSPLDRTWNLGETVELKCQVLLSNPTSGCSWLFQPRGAAASPTFLLYLSQNKPKAAEGLDTQRFSGKRLGDTFVLTLSDFRRENEGYYFCSALSNSIMYFSHFVPVFLPAKPTTTPAPRPPTPAPTIASQPLSLRPEACRPAAGGAVHTRGLDFACDIYIWAPLAGTCGVLLLSLVITLYCNHRNRRRVCKCPRPVVKSGDKPSLSARYV

SEQ ID NO: 10984 - protein, 1024 aa, synthetic construct
MALPVTALLLPLALLLHAARPEFGVTQTPKFRVLKTGQSMTLLCAQDMNHEYMYWYRQDPGMGLRLIHYSVGEGTTAKGEVPDGYNVSRLKKQNFLLGLESAAPSQTSVYFCASRGYHRLNNEQFFGPGTRLTVLEDLKNVFPPEVAVFEPSEAEISHTQKATLVCLATGFYPDHVELSWWVNGKEVHSGVSTDPQPLKEQPALNDSRYCLSSRLRVSATFWQNPRNHFRCQVQFYGLSENDEWTQDRAKPVTQIVSAEAWGRADCGSQSFGLLDPKLCYLLDGILFIYGVILTALFLRVKFSRSADAPAYQQGQNQLYNELNLGRREEYDVLDKRRGRDPEMGGKPQRRKNPQEGLYNELQKDKMAEAYSEIGMKGERRRGKGHDGLYQGLSTATKDTYDALHMQALPPRRAKRSGSGATNFSLLKQAGDVEENPGPTSMDWIWRILFLVGAATGAHSFEQRKEVEQDPGPFNVPEGATVAFNCTYSNSASQSFFWYRQDCRKEPKLLMSVYSSGNEDGRFTAQLNRASQYISLLIRDSKLSDSATYLCVVKPDPGAGSYQLTFGKGTKLSVIPNTRASTKGPSVFPLAPSSKSTSGGTAALGCLVKDYFPEPVTVSWNSGALTSGVHTFPAVLQSSGLYSLSSVVTVPSSSLGTQTYICNVNHKPSNTKVDKRVEPKSCTTPGERSSLPAFYPGTSGSCSGCGSLSLPLLAGLVAADAVASLLIVGAVFLCARPRRSPAQEDGKVYINMPGRGRAKRSGSGVKQTLNFDLLKLAGDVESNPGPSRGHMALPVTALLLPLALLLHAARPSQFRVSPLDRTWNLGETVELKCQVLLSNPTSGCSWLFQPRGAAASPTFLLYLSQNKPKAAEGLDTQRFSGKRLGDTFVLTLSDFRRENEGYYFCSALSNSIMYFSHFVPVFLPAKPTTTPAPRPPTPAPTIASQPLSLRPEACRPAAGGAVHTRGLDFACDIYIWAPLAGTCGVLLLSLVITLYCNHRNRRRVCKCPRPVVKSGDKPSLSARYV

SEQ ID NO: 10985 - protein, 936 aa, synthetic construct
MALPVTALLLPLALLLHAARPGVTQTPKFRVLKTGQSMTLLCAQDMNHEYMYWYRQDPGMGLRLIHYSVGEGTTAKGEVPDGYNVSRLKKQNFLLGLESAAPSQTSVYFCASRGYHRLNNEQFFGPGTRLTVLELWVSQPPEIRTLEGSSAFLPCSFNASQGRLAIGSVTWFRDEVVPGKEVRNGTPEFRGRLAPLASSRFLHDHQAELHIRDVRGHDASIYVCRVEVLGLGVGTGNGTRLVVEKEHPQLGAGTVLLLRAGFYAVSFLSVAVGSTVYYQGKCLTWKGPRRQLPAVVPAPLPPPCGSSAHLLPPVPGGRAKRSGSGATNFSLLKQAGDVEENPGPTSMDWIWRILFLVGAATGAHSFEQRKEVEQDPGPFNVPEGATVAFNCTYSNSASQSFFWYRQDCRKEPKLLMSVYSSGNEDGRFTAQLNRASQYISLLIRDSKLSDSATYLCVVKPDPGAGSYQLTFGKGTKLSVIPNTRLWVSQPPEIRTLEGSSAFLPCSFNASQGRLAIGSVTWFRDEVVPGKEVRNGTPEFRGRLAPLASSRFLHDHQAELHIRDVRGHDASIYVCRVEVLGLGVGTGNGTRLVVEKEHPQLGAGTVLLLRAGFYAVSFLSVAVGSTVYYQGKCLTWKGPRRQLPAVVPAPLPPPCGSSAHLLPPVPGGRAKRSGSGVKQTLNFDLLKLAGDVESNPGPSRGHMALPVTALLLPLALLLHAARPSQFRVSPLDRTWNLGETVELKCQVLLSNPTSGCSWLFQPRGAAASPTFLLYLSQNKPKAAEGLDTQRFSGKRLGDTFVLTLSDFRRENEGYYFCSALSNSIMYFSHFVPVFLPAKPTTTPAPRPPTPAPTIASQPLSLRPEACRPAAGGAVHTRGLDFACDIYIWAPLAGTCGVLLLSLVITLYCNHRNRRRVCKCPRPVVKSGDKPSLSARYV

SEQ ID NO: 10986 - protein, 1071 aa, synthetic construct
MALPVTALLLPLALLLHAARPEFGVTQTPKFRVLKTGQSMTLLCAQDMNHEYMYWYRQDPGMGLRLIHYSVGEGTTAKGEVPDGYNVSRLKKQNFLLGLESAAPSQTSVYFCASRGYHRLNNEQFFGPGTRLTVLEGQPKANPTVTLFPPSSEELQANKATLVCLISDFYPGAVTVAWKADGSPVKAGVETTKPSKQSNNKYAASSYLSLTPEQWKSHRSYSCQVTHEGSTVEKTVAPTECSGSQSFGLLDPKLCYLLDGILFIYGVILTALFLRVKFSRSADAPAYQQGQNQLYNELNLGRREEYDVLDKRRGRDPEMGGKPQRRKNPQEGLYNELQKDKMAEAYSEIGMKGERRRGKGHDGLYQGLSTATKDTYDALHMQALPPRRAKRSGSGATNFSLLKQAGDVEENPGPTSMDWIWRILFLVGAATGAHSFEQRKEVEQDPGPFNVPEGATVAFNCTYSNSASQSFFWYRQDCRKEPKLLMSVYSSGNEDGRFTAQLNRASQYISLLIRDSKLSDSATYLCVVKPDPGAGSYQLTFGKGTKLSVIPNTRASTKGPSVFPLAPSSKSTSGGTAALGCLVKDYFPEPVTVSWNSGALTSGVHTFPAVLQSSGLYSLSSVVTVPSSSLGTQTYICNVNHKPSNTKVDKRVEPKSCGTQSFGLLDPKLCYLLDGILFIYGVILTALFLRVKFSRSADAPAYQQGQNQLYNELNLGRREEYDVLDKRRGRDPEMGGKPQRRKNPQEGLYNELQKDKMAEAYSEIGMKGERRRGKGHDGLYQGLSTATKDTYDALHMQALPPRRAKRSGSGVKQTLNFDLLKLAGDVESNPGPSRGHMALPVTALLLPLALLLHAARPSQFRVSPLDRTWNLGETVELKCQVLLSNPTSGCSWLFQPRGAAASPTFLLYLSQNKPKAAEGLDTQRFSGKRLGDTFVLTLSDFRRENEGYYFCSALSNSIMYFSHFVPVFLPAKPTTTPAPRPPTPAPTIASQPLSLRPEACRPAAGGAVHTRGLDFACDIYIWAPLAGTCGVLLLSLVITLYCNHRNRRRVCKCPRPVVKSGDKPSLSARYV

SEQ ID NO: 10987 - protein, 1089 aa, synthetic construct
MALPVTALLLPLALLLHAARPEFGVTQTPKFRVLKTGQSMTLLCAQDMNHEYMYWYRQDPGMGLRLIHYSVGEGTTAKGEVPDGYNVSRLKKQNFLLGLESAAPSQTSVYFCASRGYHRLNNEQFFGPGTRLTVLEGQPKANPTVTLFPPSSEELQANKATLVCLISDFYPGAVTVAWKADGSPVKAGVETTKPSKQSNNKYAASSYLSLTPEQWKSHRSYSCQVTHEGSTVEKTVAPTECSGSQSFGLLDPKLCYLLDGILFIYGVILTALFLRVKFSRSADAPAYQQGQNQLYNELNLGRREEYDVLDKRRGRDPEMGGKPQRRKNPQEGLYNELQKDKMAEAYSEIGMKGERRRGKGHDGLYQGLSTATKDTYDALHMQALPPRRAKRSGSGATNFSLLKQAGDVEENPGPTSMDWIWRILFLVGAATGAHSFEQRKEVEQDPGPFNVPEGATVAFNCTYSNSASQSFFWYRQDCRKEPKLLMSVYSSGNEDGRFTAQLNRASQYISLLIRDSKLSDSATYLCVVKPDPGAGSYQLTFGKGTKLSVIPNTRASPTSPKVFPLSLCSTQPDGNVVIACLVQGFFPQEPLSVTWSESGQGVTARNFPPSQDASGDLYTTSSQLTLPATQCLAGKSVTCHVKHYTNPSQDVTVPCPVPSTPPTPSPSTPPTPSPSGTQSFGLLDPKLCYLLDGILFIYGVILTALFLRVKFSRSADAPAYQQGQNQLYNELNLGRREEYDVLDKRRGRDPEMGGKPQRRKNPQEGLYNELQKDKMAEAYSEIGMKGERRRGKGHDGLYQGLSTATKDTYDALHMQALPPRRAKRSGSGVKQTLNFDLLKLAGDVESNPGPSRGHMALPVTALLLPLALLLHAARPSQFRVSPLDRTWNLGETVELKCQVLLSNPTSGCSWLFQPRGAAASPTFLLYLSQNKPKAAEGLDTQRFSGKRLGDTFVLTLSDFRRENEGYYFCSALSNSIMYFSHFVPVFLPAKPTTTPAPRPPTPAPTIASQPLSLRPEACRPAAGGAVHTRGLDFACDIYIWAPLAGTCGVLLLSLVITLYCNHRNRRRVCKCPRPVVKSGDKPSLSARYV

SEQ ID NO: 10988 - protein, 1070 aa, synthetic construct
MALPVTALLLPLALLLHAARPEFGVTQTPKFRVLKTGQSMTLLCAQDMNHEYMYWYRQDPGMGLRLIHYSVGEGTTAKGEVPDGYNVSRLKKQNFLLGLESAAPSQTSVYFCASRGYHRLNNEQFFGPGTRLTVLEGQPKANPTVTLFPPSSEELQANKATLVCLISDFYPGAVTVAWKADGSPVKAGVETTKPSKQSNNKYAASSYLSLTPEQWKSHRSYSCQVTHEGSTVEKTVAPTECSGSQSFGLLDPKLCYLLDGILFIYGVILTALFLRVKFSRSADAPAYQQGQNQLYNELNLGRREEYDVLDKRRGRDPEMGGKPQRRKNPQEGLYNELQKDKMAEAYSEIGMKGERRRGKGHDGLYQGLSTATKDTYDALHMQALPPRRAKRSGSGATNFSLLKQAGDVEENPGPTSMDWIWRILFLVGAATGAHSFEQRKEVEQDPGPFNVPEGATVAFNCTYSNSASQSFFWYRQDCRKEPKLLMSVYSSGNEDGRFTAQLNRASQYISLLIRDSKLSDSATYLCVVKPDPGAGSYQLTFGKGTKLSVIPNTRASTKGPSVFPLAPCSRSTSESTAALGCLVKDYFPEPVTVSWNSGALTSGVHTFPAVLQSSGLYSLSSVVTVPSSNFGTQTYTCNVDHKPSNTKVDKTVERKCGTQSFGLLDPKLCYLLDGILFIYGVILTALFLRVKFSRSADAPAYQQGQNQLYNELNLGRREEYDVLDKRRGRDPEMGGKPQRRKNPQEGLYNELQKDKMAEAYSEIGMKGERRRGKGHDGLYQGLSTATKDTYDALHMQALPPRRAKRSGSGVKQTLNFDLLKLAGDVESNPGPSRGHMALPVTALLLPLALLLHAARPSQFRVSPLDRTWNLGETVELKCQVLLSNPTSGCSWLFQPRGAAASPTFLLYLSQNKPKAAEGLDTQRFSGKRLGDTFVLTLSDFRRENEGYYFCSALSNSIMYFSHFVPVFLPAKPTTTPAPRPPTPAPTIASQPLSLRPEACRPAAGGAVHTRGLDFACDIYIWAPLAGTCGVLLLSLVITLYCNHRNRRRVCKCPRPVVKSGDKPSLSARYV

SEQ ID NO: 10989 - protein, 1125 aa, synthetic construct
MALPVTALLLPLALLLHAARPGVTQTPKFRVLKTGQSMTLLCAQDMNHEYMYWYRQDPGMGLRLIHYSVGEGTTAKGEVPDGYNVSRLKKQNFLLGLESAAPSQTSVYFCASRGYHRLNNEQFFGPGTRLTVLEGQPKANPTVTLFPPSSEELQANKATLVCLISDFYPGAVTVAWKADGSPVKAGVETTKPSKQSNNKYAASSYLSLTPEQWKSHRSYSCQVTHEGSTVEKTVAPTECSGSQSFGLLDPKLCYLLDGILFIYGVILTALFLRVKFSRSADAPAYQQGQNQLYNELNLGRREEYDVLDKRRGRDPEMGGKPQRRKNPQEGLYNELQKDKMAEAYSEIGMKGERRRGKGHDGLYQGLSTATKDTYDALHMQALPPRRAKRSGSGATNFSLLKQAGDVEENPGPTSMDWIWRILFLVGAATGAHSFEQRKEVEQDPGPFNVPEGATVAFNCTYSNSASQSFFWYRQDCRKEPKLLMSVYSSGNEDGRFTAQLNRASQYISLLIRDSKLSDSATYLCVVKPDPGAGSYQLTFGKGTKLSVIPNTRAPTKAPDVFPIISGCRHPKDNSPVVLACLITGYHPTSVTVTWYMGTQSQPQRTFPEIQRRDSYYMTSSQLSTPLQQWRQGEYKCVVQHTASKSKKEIFRWPESPKAQASSVPTAQPQAEGSLAKATTAPATTRNTGRGGEEKKKEKEKEEQEERETKTPGTQSFGLLDPKLCYLLDGILFIYGVILTALFLRVKFSRSADAPAYQQGQNQLYNELNLGRREEYDVLDKRRGRDPEMGGKPQRRKNPQEGLYNELQKDKMAEAYSEIGMKGERRRGKGHDGLYQGLSTATKDTYDALHMQALPPRRAKRSGSGVKQTLNFDLLKLAGDVESNPGPSRGHMALPVTALLLPLALLLHAARPSQFRVSPLDRTWNLGETVELKCQVLLSNPTSGCSWLFQPRGAAASPTFLLYLSQNKPKAAEGLDTQRFSGKRLGDTFVLTLSDFRRENEGYYFCSALSNSIMYFSHFVPVFLPAKPTTTPAPRPPTPAPTIASQPLSLRPEACRPAAGGAVHTRGLDFACDIYIWAPLAGTCGVLLLSLVITLYCNHRNRRRVCKCPRPVVKSGDKPSLSARYV

SEQ ID NO: 10990 - protein, 1067 aa, synthetic construct
MALPVTALLLPLALLLHAARPGVTQTPKFRVLKTGQSMTLLCAQDMNHEYMYWYRQDPGMGLRLIHYSVGEGTTAKGEVPDGYNVSRLKKQNFLLGLESAAPSQTSVYFCASRGYHRLNNEQFFGPGTRLTVLEGQPKANPTVTLFPPSSEELQANKATLVCLISDFYPGAVTVAWKADGSPVKAGVETTKPSKQSNNKYAASSYLSLTPEQWKSHRSYSCQVTHEGSTVEKTVAPTECSGSQSFGLLDPKLCYLLDGILFIYGVILTALFLRVKFSRSADAPAYQQGQNQLYNELNLGRREEYDVLDKRRGRDPEMGGKPQRRKNPQEGLYNELQKDKMAEAYSEIGMKGERRRGKGHDGLYQGLSTATKDTYDALHMQALPPRRAKRSGSGATNFSLLKQAGDVEENPGPTSMDWIWRILFLVGAATGAHSFEQRKEVEQDPGPFNVPEGATVAFNCTYSNSASQSFFWYRQDCRKEPKLLMSVYSSGNEDGRFTAQLNRASQYISLLIRDSKLSDSATYLCVVKPDPGAGSYQLTFGKGTKLSVIPNTRASTKGPSVFPLAPCSRSTSESTAALGCLVKDYFPEPVTVSWNSGALTSGVHTFPAVLQSSGLYSLSSVVTVPSSNFGTQTYTCNVDHKPSNTKVDKTVERKGTQSFGLLDPKLCYLLDGILFIYGVILTALFLRVKFSRSADAPAYQQGQNQLYNELNLGRREEYDVLDKRRGRDPEMGGKPQRRKNPQEGLYNELQKDKMAEAYSEIGMKGERRRGKGHDGLYQGLSTATKDTYDALHMQALPPRRAKRSGSGVKQTLNFDLLKLAGDVESNPGPSRGHMALPVTALLLPLALLLHAARPSQFRVSPLDRTWNLGETVELKCQVLLSNPTSGCSWLFQPRGAAASPTFLLYLSQNKPKAAEGLDTQRFSGKRLGDTFVLTLSDFRRENEGYYFCSALSNSIMYFSHFVPVFLPAKPTTTPAPRPPTPAPTIASQPLSLRPEACRPAAGGAVHTRGLDFACDIYIWAPLAGTCGVLLLSLVITLYCNHRNRRRVCKCPRPVVKSGDKPSLSARYV

SEQ ID NO: 10991 - protein, 1074 aa, synthetic construct
MALPVTALLLPLALLLHAARPGVTQTPKFRVLKTGQSMTLLCAQDMNHEYMYWYRQDPGMGLRLIHYSVGEGTTAKGEVPDGYNVSRLKKQNFLLGLESAAPSQTSVYFCASRGYHRLNNEQFFGPGTRLTVLEGQPKANPTVTLFPPSSEELQANKATLVCLISDFYPGAVTVAWKADGSPVKAGVETTKPSKQSNNKYAASSYLSLTPEQWKSHRSYSCQVTHEGSTVEKTVAPTECSGSQSFGLLDPKLCYLLDGILFIYGVILTALFLRVKFSRSADAPAYQQGQNQLYNELNLGRREEYDVLDKRRGRDPEMGGKPQRRKNPQEGLYNELQKDKMAEAYSEIGMKGERRRGKGHDGLYQGLSTATKDTYDALHMQALPPRRAKRSGSGATNFSLLKQAGDVEENPGPTSMDWIWRILFLVGAATGAHSFEQRKEVEQDPGPFNVPEGATVAFNCTYSNSASQSFFWYRQDCRKEPKLLMSVYSSGNEDGRFTAQLNRASQYISLLIRDSKLSDSATYLCVVKPDPGAGSYQLTFGKGTKLSVIPNTRASPTSPKVFPLSLDSTPQDGNVVVACLVQGFFPQEPLSVTWSESGQNVTARNFPPSQDASGDLYTTSSQLTLPATQCPDGKSVTCHVKHYTNPSQDVTVPCPVPPPPPGTQSFGLLDPKLCYLLDGILFIYGVILTALFLRVKFSRSADAPAYQQGQNQLYNELNLGRREEYDVLDKRRGRDPEMGGKPQRRKNPQEGLYNELQKDKMAEAYSEIGMKGERRRGKGHDGLYQGLSTATKDTYDALHMQALPPRRAKRSGSGVKQTLNFDLLKLAGDVESNPGPSRGHMALPVTALLLPLALLLHAARPSQFRVSPLDRTWNLGETVELKCQVLLSNPTSGCSWLFQPRGAAASPTFLLYLSQNKPKAAEGLDTQRFSGKRLGDTFVLTLSDFRRENEGYYFCSALSNSIMYFSHFVPVFLPAKPTTTPAPRPPTPAPTIASQPLSLRPEACRPAAGGAVHTRGLDFACDIYIWAPLAGTCGVLLLSLVITLYCNHRNRRRVCKCPRPVVKSGDKPSLSARYV

SEQ ID NO: 10992 - protein, 1069 aa, synthetic construct
MALPVTALLLPLALLLHAARPGVTQTPKFRVLKTGQSMTLLCAQDMNHEYMYWYRQDPGMGLRLIHYSVGEGTTAKGEVPDGYNVSRLKKQNFLLGLESAAPSQTSVYFCASRGYHRLNNEQFFGPGTRLTVLEGQPKANPTVTLFPPSSEELQANKATLVCLISDFYPGAVTVAWKADGSPVKAGVETTKPSKQSNNKYAASSYLSLTPEQWKSHRSYSCQVTHEGSTVEKTVAPTECSGSQSFGLLDPKLCYLLDGILFIYGVILTALFLRVKFSRSADAPAYQQGQNQLYNELNLGRREEYDVLDKRRGRDPEMGGKPQRRKNPQEGLYNELQKDKMAEAYSEIGMKGERRRGKGHDGLYQGLSTATKDTYDALHMQALPPRRAKRSGSGATNFSLLKQAGDVEENPGPTSMDWIWRILFLVGAATGAHSFEQRKEVEQDPGPFNVPEGATVAFNCTYSNSASQSFFWYRQDCRKEPKLLMSVYSSGNEDGRFTAQLNRASQYISLLIRDSKLSDSATYLCVVKPDPGAGSYQLTFGKGTKLSVIPNTRASTQSPSVFPLTRCCKNIPSNATSVTLGCLATGYFPEPVMVTWDTGSLNGTTMTLPATTLTLSGHYATISLLTVSGAWAKQMFTCRVAHTPSSTDWVDNKTFSGTQSFGLLDPKLCYLLDGILFIYGVILTALFLRVKFSRSADAPAYQQGQNQLYNELNLGRREEYDVLDKRRGRDPEMGGKPQRRKNPQEGLYNELQKDKMAEAYSEIGMKGERRRGKGHDGLYQGLSTATKDTYDALHMQALPPRRAKRSGSGVKQTLNFDLLKLAGDVESNPGPSRGHMALPVTALLLPLALLLHAARPSQFRVSPLDRTWNLGETVELKCQVLLSNPTSGCSWLFQPRGAAASPTFLLYLSQNKPKAAEGLDTQRFSGKRLGDTFVLTLSDFRRENEGYYFCSALSNSIMYFSHFVPVFLPAKPTTTPAPRPPTPAPTIASQPLSLRPEACRPAAGGAVHTRGLDFACDIYIWAPLAGTCGVLLLSLVITLYCNHRNRRRVCKCPRPVVKSGDKPSLSARYV

SEQ ID NO: 10993 - protein, 1069 aa, synthetic construct
MALPVTALLLPLALLLHAARPGVTQTPKFRVLKTGQSMTLLCAQDMNHEYMYWYRQDPGMGLRLIHYSVGEGTTAKGEVPDGYNVSRLKKQNFLLGLESAAPSQTSVYFCASRGYHRLNNEQFFGPGTRLTVLEGQPKANPTVTLFPPSSEELQANKATLVCLISDFYPGAVTVAWKADGSPVKAGVETTKPSKQSNNKYAASSYLSLTPEQWKSHRSYSCQVTHEGSTVEKTVAPTECSGSQSFGLLDPKLCYLLDGILFIYGVILTALFLRVKFSRSADAPAYQQGQNQLYNELNLGRREEYDVLDKRRGRDPEMGGKPQRRKNPQEGLYNELQKDKMAEAYSEIGMKGERRRGKGHDGLYQGLSTATKDTYDALHMQALPPRRAKRSGSGATNFSLLKQAGDVEENPGPTSMDWIWRILFLVGAATGAHSFEQRKEVEQDPGPFNVPEGATVAFNCTYSNSASQSFFWYRQDCRKEPKLLMSVYSSGNEDGRFTAQLNRASQYISLLIRDSKLSDSATYLCVVKPDPGAGSYQLTFGKGTKLSVIPNTRASTKGPSVFPLAPCSRSTSESTAALGCLVKDYFPEPVTVSWNSGALTSGVHTFPAVLQSSGLYSLSSVVTVPSSSLGTKTYTCNVDHKPSNTKVDKRVESKYGGTQSFGLLDPKLCYLLDGILFIYGVILTALFLRVKFSRSADAPAYQQGQNQLYNELNLGRREEYDVLDKRRGRDPEMGGKPQRRKNPQEGLYNELQKDKMAEAYSEIGMKGERRRGKGHDGLYQGLSTATKDTYDALHMQALPPRRAKRSGSGVKQTLNFDLLKLAGDVESNPGPSRGHMALPVTALLLPLALLLHAARPSQFRVSPLDRTWNLGETVELKCQVLLSNPTSGCSWLFQPRGAAASPTFLLYLSQNKPKAAEGLDTQRFSGKRLGDTFVLTLSDFRRENEGYYFCSALSNSIMYFSHFVPVFLPAKPTTTPAPRPPTPAPTIASQPLSLRPEACRPAAGGAVHTRGLDFACDIYIWAPLAGTCGVLLLSLVITLYCNHRNRRRVCKCPRPVVKSGDKPSLSARYV

SEQ ID NO: 10994 - protein, 1069 aa, synthetic construct
MALPVTALLLPLALLLHAARPGVTQTPKFRVLKTGQSMTLLCAQDMNHEYMYWYRQDPGMGLRLIHYSVGEGTTAKGEVPDGYNVSRLKKQNFLLGLESAAPSQTSVYFCASRGYHRLNNEQFFGPGTRLTVLEGQPKANPTVTLFPPSSEELQANKATLVCLISDFYPGAVTVAWKADGSPVKAGVETTKPSKQSNNKYAASSYLSLTPEQWKSHRSYSCQVTHEGSTVEKTVAPTECSGSQSFGLLDPKLCYLLDGILFIYGVILTALFLRVKFSRSADAPAYQQGQNQLYNELNLGRREEYDVLDKRRGRDPEMGGKPQRRKNPQEGLYNELQKDKMAEAYSEIGMKGERRRGKGHDGLYQGLSTATKDTYDALHMQALPPRRAKRSGSGATNFSLLKQAGDVEENPGPTSMDWIWRILFLVGAATGAHSFEQRKEVEQDPGPFNVPEGATVAFNCTYSNSASQSFFWYRQDCRKEPKLLMSVYSSGNEDGRFTAQLNRASQYISLLIRDSKLSDSATYLCVVKPDPGAGSYQLTFGKGTKLSVIPNTRASTKGPSVFPLAPCSRSTSESTAALGCLVKDYFPEPVTVSWNSGALTSGVHTFPAVLQSSGLYSLSSVVTVPSSNFGTQTYTCNVDHKPSNTKVDKTVERKCCGTQSFGLLDPKLCYLLDGILFIYGVILTALFLRVKFSRSADAPAYQQGQNQLYNELNLGRREEYDVLDKRRGRDPEMGGKPQRRKNPQEGLYNELQKDKMAEAYSEIGMKGERRRGKGHDGLYQGLSTATKDTYDALHMQALPPRRAKRSGSGVKQTLNFDLLKLAGDVESNPGPSRGHMALPVTALLLPLALLLHAARPSQFRVSPLDRTWNLGETVELKCQVLLSNPTSGCSWLFQPRGAAASPTFLLYLSQNKPKAAEGLDTQRFSGKRLGDTFVLTLSDFRRENEGYYFCSALSNSIMYFSHFVPVFLPAKPTTTPAPRPPTPAPTIASQPLSLRPEACRPAAGGAVHTRGLDFACDIYIWAPLAGTCGVLLLSLVITLYCNHRNRRRVCKCPRPVVKSGDKPSLSARYV

SEQ ID NO: 10995 - protein, 1084 aa, synthetic construct
MALPVTALLLPLALLLHAARPGVTQTPKFRVLKTGQSMTLLCAQDMNHEYMYWYRQDPGMGLRLIHYSVGEGTTAKGEVPDGYNVSRLKKQNFLLGLESAAPSQTSVYFCASRGYHRLNNEQFFGPGTRLTVLEDLKNVFPPEVAVFEPSEAEISHTQKATLVCLATGFYPDHVELSWWVNGKEVHSGVSTDPQPLKEQPALNDSRYCLSSRLRVSATFWQNPRNHFRCQVQFYGLSENDEWTQDRAKPVTQIVSAEAWGRADCGSQSFGLLDPKLCYLLDGILFIYGVILTALFLRVKFSRSADAPAYQQGQNQLYNELNLGRREEYDVLDKRRGRDPEMGGKPQRRKNPQEGLYNELQKDKMAEAYSEIGMKGERRRGKGHDGLYQGLSTATKDTYDALHMQALPPRRAKRSGSGATNFSLLKQAGDVEENPGPTSMDWIWRILFLVGAATGAHSFEQRKEVEQDPGPFNVPEGATVAFNCTYSNSASQSFFWYRQDCRKEPKLLMSVYSSGNEDGRFTAQLNRASQYISLLIRDSKLSDSATYLCVVKPDPGAGSYQLTFGKGTKLSVIPNTRIQNPDPAVYQLRDSKSSDKSVCLFTDFDSQTNVSQSKDSDVYITDKTVLDMRSMDFKSNSAVAWSNKSDFACANAFNNSIIPEDTFFPSPESSCGTQSFGLLDPKLCYLLDGILFIYGVILTALFLRVKFSRSADAPAYQQGQNQLYNELNLGRREEYDVLDKRRGRDPEMGGKPQRRKNPQEGLYNELQKDKMAEAYSEIGMKGERRRGKGHDGLYQGLSTATKDTYDALHMQALPPRRAKRSGSGVKQTLNFDLLKLAGDVESNPGPSRGHMALPVTALLLPLALLLHAARPSQFRVSPLDRTWNLGETVELKCQVLLSNPTSGCSWLFQPRGAAASPTFLLYLSQNKPKAAEGLDTQRFSGKRLGDTFVLTLSDFRRENEGYYFCSALSNSIMYFSHFVPVFLPAKPTTTPAPRPPTPAPTIASQPLSLRPEACRPAAGGAVHTRGLDFACDIYIWAPLAGTCGVLLLSLVITLYCNHRNRRRVCKCPRPVVKSGDKPSLSARYV

SEQ ID NO: 10996 - protein, 1084 aa, synthetic construct
MALPVTALLLPLALLLHAARPGVTQTPKFRVLKTGQSMTLLCAQDMNHEYMYWYRQDPGMGLRLIHYSVGEGTTAKGEVPDGYNVSRLKKQNFLLGLESAAPSQTSVYFCASRGYHRLNNEQFFGPGTRLTVLEDLKNVFPPEVAVFEPSKAEIAHTQKATLVCLATGFYPDHVELSWWVNGKEVHSGVCTDPQPLKEQPALNDSRYCLSSRLRVSATFWQNPRNHFRCQVQFYGLSENDEWTQDRAKPVTQIVSAEAWGRADCGSQSFGLLDPKLCYLLDGILFIYGVILTALFLRVKFSRSADAPAYQQGQNQLYNELNLGRREEYDVLDKRRGRDPEMGGKPQRRKNPQEGLYNELQKDKMAEAYSEIGMKGERRRGKGHDGLYQGLSTATKDTYDALHMQALPPRRAKRSGSGATNFSLLKQAGDVEENPGPTSMDWIWRILFLVGAATGAHSFEQRKEVEQDPGPFNVPEGATVAFNCTYSNSASQSFFWYRQDCRKEPKLLMSVYSSGNEDGRFTAQLNRASQYISLLIRDSKLSDSATYLCVVKPDPGAGSYQLTFGKGTKLSVIPNTRIQNPDPAVYQLRDSKSSDKSVCLFTDFDSQTNVSQSKDSDVYITDKCVLDMRSMDFKSNSAVAWSNKSDFACANAFNNSIIPEDTFFPSSDVPCGTQSFGLLDPKLCYLLDGILFIYGVILTALFLRVKFSRSADAPAYQQGQNQLYNELNLGRREEYDVLDKRRGRDPEMGGKPQRRKNPQEGLYNELQKDKMAEAYSEIGMKGERRRGKGHDGLYQGLSTATKDTYDALHMQALPPRRAKRSGSGVKQTLNFDLLKLAGDVESNPGPSRGHMALPVTALLLPLALLLHAARPSQFRVSPLDRTWNLGETVELKCQVLLSNPTSGCSWLFQPRGAAASPTFLLYLSQNKPKAAEGLDTQRFSGKRLGDTFVLTLSDFRRENEGYYFCSALSNSIMYFSHFVPVFLPAKPTTTPAPRPPTPAPTIASQPLSLRPEACRPAAGGAVHTRGLDFACDIYIWAPLAGTCGVLLLSLVITLYCNHRNRRRVCKCPRPVVKSGDKPSLSARYV

SEQ ID NO: 10997 - protein, 815 aa, synthetic construct
MALPVTALLLPLALLLHAARPGVTQTPKFRVLKTGQSMTLLCAQDMNHEYMYWYRQDPGMGLRLIHYSVGEGTTAKGEVPDGYNVSRLKKQNFLLGLESAAPSQTSVYFCASRGYHRLNNEQFFGPGTRLTVLEDLKNVFPPEVAVFEPSEAEISHTQKATLVCLATGFYPDHVELSWWVNGKEVHSGVCTDPQPLKEQPALNDSRYCLSSRLRVSATFWQNPRNHFRCQVQFYGLSENDEWTQDRAKPVTQIVSAEAWGRADCGSQSFGLLDPKLCYLLDGILFIYGVILTALFLRVKFSRSADAPAYQQGQNQLYNELNLGRREEYDVLDKRRGRDPEMGGKPQRRKNPQEGLYNELQKDKMAEAYSEIGMKGERRRGKGHDGLYQGLSTATKDTYDALHMQALPPRRAKRSGSGATNFSLLKQAGDVEENPGPTSMDWIWRILFLVGAATGAHSFEQRKEVEQDPGPFNVPEGATVAFNCTYSNSASQSFFWYRQDCRKEPKLLMSVYSSGNEDGRFTAQLNRASQYISLLIRDSKLSDSATYLCVVKPDPGAGSYQLTFGKGTKLSVIPNTRIQNPDPAVYQLRDSKSSDKSVCLFTDFDSQTNVSQSKDSDVYITDKCVLDMRSMDFKSNSAVAWSNKSDFACANAFNNSIIPEDTFFPSPESSCGTQSFGLLDPKLCYLLDGILFIYGVILTALFLRVKFSRSADAPAYQQGQNQLYNELNLGRREEYDVLDKRRGRDPEMGGKPQRRKNPQEGLYNELQKDKMAEAYSEIGMKGERRRGKGHDGLYQGLSTATKDTYDALHMQALPPR

SEQ ID NO: 10998 - protein, 856 aa, synthetic construct
MALPVTALLLPLALLLHAARPGVTQTPKFRVLKTGQSMTLLCAQDMNHEYMYWYRQDPGMGLRLIHYSVGEGTTAKGEVPDGYNVSRLKKQNFLLGLESAAPSQTSVYFCASRGYHRLNNEQFFGPGTRLTVLEQSFGLLDPKLCYLLDGILFIYGVILTALFLRVKFSRSADAPAYQQGQNQLYNELNLGRREEYDVLDKRRGRDPEMGGKPQRRKNPQEGLYNELQKDKMAEAYSEIGMKGERRRGKGHDGLYQGLSTATKDTYDALHMQALPPRRAKRSGSGATNFSLLKQAGDVEENPGPTSMDWIWRILFLVGAATGAHSFEQRKEVEQDPGPFNVPEGATVAFNCTYSNSASQSFFWYRQDCRKEPKLLMSVYSSGNEDGRFTAQLNRASQYISLLIRDSKLSDSATYLCVVKPDPGAGSYQLTFGKGTKLSVIPNTRQSFGLLDPKLCYLLDGILFIYGVILTALFLRVKFSRSADAPAYQQGQNQLYNELNLGRREEYDVLDKRRGRDPEMGGKPQRRKNPQEGLYNELQKDKMAEAYSEIGMKGERRRGKGHDGLYQGLSTATKDTYDALHMQALPPRRAKRSGSGVKQTLNFDLLKLAGDVESNPGPSRGHMALPVTALLLPLALLLHAARPSQFRVSPLDRTWNLGETVELKCQVLLSNPTSGCSWLFQPRGAAASPTFLLYLSQNKPKAAEGLDTQRFSGKRLGDTFVLTLSDFRRENEGYYFCSALSNSIMYFSHFVPVFLPAKPTTTPAPRPPTPAPTIASQPLSLRPEACRPAAGGAVHTRGLDFACDIYIWAPLAGTCGVLLLSLVITLYCNHRNRRRVCKCPRPVVKSGDKPSLSARYV

SEQ ID NO: 10999 - protein, 856 aa, synthetic construct
MALPVTALLLPLALLLHAARPGVTQTPKFRVLKTGQSMTLLCAQDMNHEYMYWYRQDPGMGLRLIHYSVGEGTTAKGEVPDGYNVSRLKKQNFLLGLESAAPSQTSVYFCASRGYHRLNNEQFFGPGTRLTVLEDLKNVFPPEVAVFEPSEAEISHTQKATLVCLATGFYPDHVELSWWVNGKEVHSGVCTDPQPLKEQPALNDSRYCLSSRLRVSATFWQNPRNHFRCQVQFYGLSENDEWTQDRAKPVTQIVSAEAWGRADCGSQSFGLLDPKLCYLLDGILFIYGVILTALFLRSKRSRLLHSDYMNMTPRRPGPTRKHYQPYAPPRDFAAYRSRVKFSRSADAPAYQQGQNQLYNELNLGRREEYDVLDKRRGRDPEMGGKPQRRKNPQEGLYNELQKDKMAEAYSEIGMKGERRRGKGHDGLYQGLSTATKDTYDALHMQALPPRRAKRSGSGATNFSLLKQAGDVEENPGPTSMDWIWRILFLVGAATGAHSFEQRKEVEQDPGPFNVPEGATVAFNCTYSNSASQSFFWYRQDCRKEPKLLMSVYSSGNEDGRFTAQLNRASQYISLLIRDSKLSDSATYLCVVKPDPGAGSYQLTFGKGTKLSVIPNTRIQNPDPAVYQLRDSKSSDKSVCLFTDFDSQTNVSQSKDSDVYITDKCVLDMRSMDFKSNSAVAWSNKSDFACANAFNNSIIPEDTFFPSPESSCGTQSFGLLDPKLCYLLDGILFIYGVILTALFLRVKFSRSADAPAYQQGQNQLYNELNLGRREEYDVLDKRRGRDPEMGGKPQRRKNPQEGLYNELQKDKMAEAYSEIGMKGERRRGKGHDGLYQGLSTATKDTYDALHMQALPPR

SEQ ID NO: 11000 - protein, 897 aa, synthetic construct
MALPVTALLLPLALLLHAARPGVTQTPKFRVLKTGQSMTLLCAQDMNHEYMYWYRQDPGMGLRLIHYSVGEGTTAKGEVPDGYNVSRLKKQNFLLGLESAAPSQTSVYFCASRGYHRLNNEQFFGPGTRLTVLEDLKNVFPPEVAVFEPSEAEISHTQKATLVCLATGFYPDHVELSWWVNGKEVHSGVCTDPQPLKEQPALNDSRYCLSSRLRVSATFWQNPRNHFRCQVQFYGLSENDEWTQDRAKPVTQIVSAEAWGRADCGSQSFGLLDPKLCYLLDGILFIYGVILTALFLRSKRSRLLHSDYMNMTPRRPGPTRKHYQPYAPPRDFAAYRSRVKFSRSADAPAYQQGQNQLYNELNLGRREEYDVLDKRRGRDPEMGGKPQRRKNPQEGLYNELQKDKMAEAYSEIGMKGERRRGKGHDGLYQGLSTATKDTYDALHMQALPPRRAKRSGSGATNFSLLKQAGDVEENPGPTSMDWIWRILFLVGAATGAHSFEQRKEVEQDPGPFNVPEGATVAFNCTYSNSASQSFFWYRQDCRKEPKLLMSVYSSGNEDGRFTAQLNRASQYISLLIRDSKLSDSATYLCVVKPDPGAGSYQLTFGKGTKLSVIPNTRIQNPDPAVYQLRDSKSSDKSVCLFTDFDSQTNVSQSKDSDVYITDKCVLDMRSMDFKSNSAVAWSNKSDFACANAFNNSIIPEDTFFPSPESSCGTQSFGLLDPKLCYLLDGILFIYGVILTALFLRSKRSRLLHSDYMNMTPRRPGPTRKHYQPYAPPRDFAAYRSRVKFSRSADAPAYQQGQNQLYNELNLGRREEYDVLDKRRGRDPEMGGKPQRRKNPQEGLYNELQKDKMAEAYSEIGMKGERRRGKGHDGLYQGLSTATKDTYDALHMQALPPR

SEQ ID NO: 11001 - protein, 815 aa, synthetic construct
MALPVTALLLPLALLLHAARPGVTQTPKFRVLKTGQSMTLLCAQDMNHEYMYWYRQDPGMGLRLIHYSVGEGTTAKGEVPDGYNVSRLKKQNFLLGLESAAPSQTSVYFCASRGYHRLNNEQFFGPGTRLTVLEDLKNVFPPEVAVFEPSEAEISHTQKATLVCLATGFYPDHVELSWWVNGKEVHSGVSTDPQPLKEQPALNDSRYCLSSRLRVSATFWQNPRNHFRCQVQFYGLSENDEWTQDRAKPVTQIVSAEAWGRADCGSQSFGLLDPKLCYLLDGILFIYGVILTALFLRVKFSRSADAPAYQQGQNQLYNELNLGRREEYDVLDKRRGRDPEMGGKPQRRKNPQEGLYNELQKDKMAEAYSEIGMKGERRRGKGHDGLYQGLSTATKDTYDALHMQALPPRRAKRSGSGATNFSLLKQAGDVEENPGPTSMDWIWRILFLVGAATGAHSFEQRKEVEQDPGPFNVPEGATVAFNCTYSNSASQSFFWYRQDCRKEPKLLMSVYSSGNEDGRFTAQLNRASQYISLLIRDSKLSDSATYLCVVKPDPGAGSYQLTFGKGTKLSVIPNTRIQNPDPAVYQLRDSKSSDKSVCLFTDFDSQTNVSQSKDSDVYITDKTVLDMRSMDFKSNSAVAWSNKSDFACANAFNNSIIPEDTFFPSPESSCGTQSFGLLDPKLCYLLDGILFIYGVILTALFLRVKFSRSADAPAYQQGQNQLYNELNLGRREEYDVLDKRRGRDPEMGGKPQRRKNPQEGLYNELQKDKMAEAYSEIGMKGERRRGKGHDGLYQGLSTATKDTYDALHMQALPPR

SEQ ID NO: 11002 - protein, 1059 aa, synthetic construct
MALPVTALLLPLALLLHAARPGVTQTPKFRVLKTGQSMTLLCAQDMNHEYMYWYRQDPGMGLRLIHYSVGEGTTAKGEVPDGYNVSRLKKQNFLLGLESAAPSQTSVYFCASRGYHRLNNEQFFGPGTRLTVLEDKQLDADVSPKPTIFLPSIAETKLQKAGTYLCLLEKFFPDVIKIHWQEKKSNTILGSQEGNTMKTNDTYMKFSWLTVPEKSLDKEHRCIVRHENNKNGVDQEIIFPPIKTDVITGSQSFGLLDPKLCYLLDGILFIYGVILTALFLRVKFSRSADAPAYQQGQNQLYNELNLGRREEYDVLDKRRGRDPEMGGKPQRRKNPQEGLYNELQKDKMAEAYSEIGMKGERRRGKGHDGLYQGLSTATKDTYDALHMQALPPRRAKRSGSGATNFSLLKQAGDVEENPGPTSMDWIWRILFLVGAATGAHSFEQRKEVEQDPGPFNVPEGATVAFNCTYSNSASQSFFWYRQDCRKEPKLLMSVYSSGNEDGRFTAQLNRASQYISLLIRDSKLSDSATYLCVVKPDPGAGSYQLTFGKGTKLSVIPNTRSQPHTKPSVFVMKNGTNVACLVKEFYPKDIRINLVSSKKITEFDPAIVISPSGKYNAVKLGKYEDSNSVTCSVQHDNKTVHSTDFGTQSFGLLDPKLCYLLDGILFIYGVILTALFLRVKFSRSADAPAYQQGQNQLYNELNLGRREEYDVLDKRRGRDPEMGGKPQRRKNPQEGLYNELQKDKMAEAYSEIGMKGERRRGKGHDGLYQGLSTATKDTYDALHMQALPPRRAKRSGSGVKQTLNFDLLKLAGDVESNPGPSRGHMALPVTALLLPLALLLHAARPSQFRVSPLDRTWNLGETVELKCQVLLSNPTSGCSWLFQPRGAAASPTFLLYLSQNKPKAAEGLDTQRFSGKRLGDTFVLTLSDFRRENEGYYFCSALSNSIMYFSHFVPVFLPAKPTTTPAPRPPTPAPTIASQPLSLRPEACRPAAGGAVHTRGLDFACDIYIWAPLAGTCGVLLLSLVITLYCNHRNRRRVCKCPRPVVKSGDKPSLSARYV

SEQ ID NO: 11003 - protein, 927 aa, synthetic construct
MALPVTALLLPLALLLHAARPGVTQTPKFRVLKTGQSMTLLCAQDMNHEYMYWYRQDPGMGLRLIHYSVGEGTTAKGEVPDGYNVSRLKKQNFLLGLESAAPSQTSVYFCASRGYHRLNNEQFFGPGTRLTVLEGQPKANPTVTLFPPSSEELQANKATLVCLISDFYPGAVTVAWKADGSPVKAGVETTKPSKQSNNKYAASSYLSLTPEQWKSHRSYSCQVTHEGSTVEKTVAPTECSTTPGERSSLPAFYPGTSGSCSGCGSLSLPLLAGLVAADAVASLLIVGAVFLCARPRRSPAQEDGKVYINMPGRGRAKRSGSGATNFSLLKQAGDVEENPGPTSMDWIWRILFLVGAATGAHSFEQRKEVEQDPGPFNVPEGATVAFNCTYSNSASQSFFWYRQDCRKEPKLLMSVYSSGNEDGRFTAQLNRASQYISLLIRDSKLSDSATYLCVVKPDPGAGSYQLTFGKGTKLSVIPNTRASTKGPSVFPLAPSSKSTSGGTAALGCLVKDYFPEPVTVSWNSGALTSGVHTFPAVLQSSGLYSLSSVVTVPSSSLGTQTYICNVNHKPSNTKVDKRVEPKSCTTPGERSSLPAFYPGTSGSCSGCGSLSLPLLAGLVAADAVASLLIVGAVFLCARPRRSPAQEDGKVYINMPGRGRAKRSGSGVKQTLNFDLLKLAGDVESNPGPSRGHMALPVTALLLPLALLLHAARPSQFRVSPLDRTWNLGETVELKCQVLLSNPTSGCSWLFQPRGAAASPTFLLYLSQNKPKAAEGLDTQRFSGKRLGDTFVLTLSDFRRENEGYYFCSALSNSIMYFSHFVPVFLPAKPTTTPAPRPPTPAPTIASQPLSLRPEACRPAAGGAVHTRGLDFACDIYIWAPLAGTCGVLLLSLVITLYCNHRNRRRVCKCPRPVVKSGDKPSLSARYV

SEQ ID NO: 11004 - protein, 756 aa, synthetic construct
MALPVTALLLPLALLLHAARPGVTQTPKFRVLKTGQSMTLLCAQDMNHEYMYWYRQDPGMGLRLIHYSVGEGTTAKGEVPDGYNVSRLKKQNFLLGLESAAPSQTSVYFCASRGYHRLNNEQFFGPGTRLTVLEGDIENTSLAPEDPTFPADTWGTYLLTTETGLQKDHALWDHTAQNLLRMGLAFLVLVALVWFLVEDWLSRKRTRERASRASTWEGRRRLNTQTLRAKRSGSGATNFSLLKQAGDVEENPGPTSMDWIWRILFLVGAATGAHSFEQRKEVEQDPGPFNVPEGATVAFNCTYSNSASQSFFWYRQDCRKEPKLLMSVYSSGNEDGRFTAQLNRASQYISLLIRDSKLSDSATYLCVVKPDPGAGSYQLTFGKGTKLSVIPNTRGDIENTSLAPEDPTFPADTWGTYLLTTETGLQKDHALWDHTAQNLLRMGLAFLVLVALVWFLVEDWLSRKRTRERASRASTWEGRRRLNTQTLRAKRSGSGVKQTLNFDLLKLAGDVESNPGPSRGHMALPVTALLLPLALLLHAARPSQFRVSPLDRTWNLGETVELKCQVLLSNPTSGCSWLFQPRGAAASPTFLLYLSQNKPKAAEGLDTQRFSGKRLGDTFVLTLSDFRRENEGYYFCSALSNSIMYFSHFVPVFLPAKPTTTPAPRPPTPAPTIASQPLSLRPEACRPAAGGAVHTRGLDFACDIYIWAPLAGTCGVLLLSLVITLYCNHRNRRRVCKCPRPVVKSGDKPSLSARYV

SEQ ID NO: 11005 - protein, 700 aa, synthetic construct
MALPVTALLLPLALLLHAARPGVTQTPKFRVLKTGQSMTLLCAQDMNHEYMYWYRQDPGMGLRLIHYSVGEGTTAKGEVPDGYNVSRLKKQNFLLGLESAAPSQTSVYFCASRGYHRLNNEQFFGPGTRLTVLEITQGLAVSTISSFFPPGYQVSFCLVMVLLFAVDTGLYFSVKTNIRSSTRDWKDHKFKWRKDPQDKRAKRSGSGATNFSLLKQAGDVEENPGPTSMDWIWRILFLVGAATGAHSFEQRKEVEQDPGPFNVPEGATVAFNCTYSNSASQSFFWYRQDCRKEPKLLMSVYSSGNEDGRFTAQLNRASQYISLLIRDSKLSDSATYLCVVKPDPGAGSYQLTFGKGTKLSVIPNTRITQGLAVSTISSFFPPGYQVSFCLVMVLLFAVDTGLYFSVKTNIRSSTRDWKDHKFKWRKDPQDKRAKRSGSGVKQTLNFDLLKLAGDVESNPGPSRGHMALPVTALLLPLALLLHAARPSQFRVSPLDRTWNLGETVELKCQVLLSNPTSGCSWLFQPRGAAASPTFLLYLSQNKPKAAEGLDTQRFSGKRLGDTFVLTLSDFRRENEGYYFCSALSNSIMYFSHFVPVFLPAKPTTTPAPRPPTPAPTIASQPLSLRPEACRPAAGGAVHTRGLDFACDIYIWAPLAGTCGVLLLSLVITLYCNHRNRRRVCKCPRPVVKSGDKPSLSARYV

SEQ ID NO: 11006 - protein, 795 aa, synthetic construct
MALPVTALLLPLALLLHAARPDVTQTPRNRITKTGKRIMLECSQTKGHDRMYWYRQDPGLGLRLIYYSFDVKDINKGEISDGYSVSRQAQAKFSLSLESAIPNQTALYFCATSGQGAYEEQFFGPGTRLTVGQPKANPTVTLFPPSSEELQANKATLVCLISDFYPGAVTVAWKADGSPVKAGVETTKPSKQSNNKYAASSYLSLTPEQWKSHRSYSCQVTHEGSTVEKTVAPTECSGSQSFGLLDPKLCYLLDGILFIYGVILTALFLRVKFSRSADAPAYQQGQNQLYNELNLGRREEYDVLDKRRGRDPEMGGKPQRRKNPQEGLYNELQKDKMAEAYSEIGMKGERRRGKGHDGLYQGLSTATKDTYDALHMQALPPRRAKRSGSGATNFSLLKQAGDVEENPGPTSMDWIWRILFLVGAATGAHSFEKNQVEQSPQSLIILEGKNCTLQCNYTVSPFSNLRWYKQDTGRGPVSLTILTFSENTKSNGRYTATLDADTKQSSLHITASQLSDSASYICVVSGGTDSWGKLQFGAGTQVVVTPDASTKGPSVFPLAPSSKSTSGGTAALGCLVKDYFPEPVTVSWNSGALTSGVHTFPAVLQSSGLYSLSSVVTVPSSSLGTQTYICNVNHKPSNTKVDKRVEPKSCGTQSFGLLDPKLCYLLDGILFIYGVILTALFLRVKFSRSADAPAYQQGQNQLYNELNLGRREEYDVLDKRRGRDPEMGGKPQRRKNPQEGLYNELQKDKMAEAYSEIGMKGERRRGKGHDGLYQGLSTATKDTYDALHMQALPPR

SEQ ID NO: 11007 - protein, 561 aa, synthetic construct
MALPVTALLLPLALLLHAARPDVTQTPRNRITKTGKRIMLECSQTKGHDRMYWYRQDPGLGLRLIYYSFDVKDINKGEISDGYSVSRQAQAKFSLSLESAIPNQTALYFCATSGQGAYEEQFFGPGTRLTVLEQSFGLLDPKLCYLLDGILFIYGVILTALFLRVKFSRSADAPAYQQGQNQLYNELNLGRREEYDVLDKRRGRDPEMGGKPQRRKNPQEGLYNELQKDKMAEAYSEIGMKGERRRGKGHDGLYQGLSTATKDTYDALHMQALPPRRAKRSGSGATNFSLLKQAGDVEENPGPTSMDWIWRILFLVGAATGAHSFEKNQVEQSPQSLIILEGKNCTLQCNYTVSPFSNLRWYKQDTGRGPVSLTILTFSENTKSNGRYTATLDADTKQSSLHITASQLSDSASYICVVSGGTDSWGKLQFGAGTQVVVTPDTRQSFGLLDPKLCYLLDGILFIYGVILTALFLRVKFSRSADAPAYQQGQNQLYNELNLGRREEYDVLDKRRGRDPEMGGKPQRRKNPQEGLYNELQKDKMAEAYSEIGMKGERRRGKGHD

SEQ ID NO: 11008 - protein, 945 aa, synthetic construct
MALPVTALLLPLALLLHAARPDVTQTPRNRITKTGKRIMLECSQTKGHDRMYWYRQDPGLGLRLIYYSFDVKDINKGEISDGYSVSRQAQAKFSLSLESAIPNQTALYFCATSGQGAYEEQFFGPGTRLTVLETTPGERSSLPAFYPGTSGSCSGCGSLSLPLLAGLVAADAVASLLIVGAVFLCARPRRSPAQEDGKVYINMPGRGSTSRVKFSRSADAPAYQQGQNQLYNELNLGRREEYDVLDKRRGRDPEMGGKPQRRKNPQEGLYNELQKDKMAEAYSEIGMKGERRRGKGHDGLYQGLSTATKDTYDALHMQALPPRRAKRSGSGATNFSLLKQAGDVEENPGPMDWIWRILFLVGAATGAHSFEKNQVEQSPQSLIILEGKNCTLQCNYTVSPFSNLRWYKQDTGRGPVSLTILTFSENTKSNGRYTATLDADTKQSSLHITASQLSDSASYICVVSGGTDSWGKLQFGAGTQVVVTPDTRTTPGERSSLPAFYPGTSGSCSGCGSLSLPLLAGLVAADAVASLLIVGAVFLCARPRRSPAQEDGKVYINMPGRGSSRRVKFSRSADAPAYQQGQNQLYNELNLGRREEYDVLDKRRGRDPEMGGKPQRRKNPQEGLYNELQKDKMAEAYSEIGMKGERRRGKGHDGLYQGLSTATKDTYDALHMQALPPRRAKRSGSGVKQTLNFDLLKLAGDVESNPGPGHMALPVTALLLPLALLLHAARPSQFRVSPLDRTWNLGETVELKCQVLLSNPTSGCSWLFQPRGAAASPTFLLYLSQNKPKAAEGLDTQRFSGKRLGDTFVLTLSDFRRENEGYYFCSALSNSIMYFSHFVPVFLPAKPTTTPAPRPPTPAPTIASQPLSLRPEACRPAAGGAVHTRGLDFACDIYIWAPLAGTCGVLLLSLVITLYCNHRNRRRVCKCPRPVVKSGDKPSLSARYV

SEQ ID NO: 11009 - protein, 945 aa, synthetic construct; identical to SEQ ID NO: 11008

SEQ ID NO: 11010 - protein, 1111 aa, synthetic construct
MALPVTALLLPLALLLHAARPDVTQTPRNRITKTGKRIMLECSQTKGHDRMYWYRQDPGLGLRLIYYSFDVKDINKGEISDGYSVSRQAQAKFSLSLESAIPNQTALYFCATSGQGAYEEQFFGPGTRLTVLEGQPKANPTVTLFPPSSEELQANKATLVCLISDFYPGAVTVAWKADGSPVKAGVETTKPSKQSNNKYAASSYLSLTPEQWKSHRSYSCQVTHEGSTVEKTVAPTECSGSTTPGERSSLPAFYPGTSGSCSGCGSLSLPLLAGLVAADAVASLLIVGAVFLCARPRRSPAQEDGKVYINMPGRGSTSRVKFSRSADAPAYQQGQNQLYNELNLGRREEYDVLDKRRGRDPEMGGKPQRRKNPQEGLYNELQKDKMAEAYSEIGMKGERRRGKGHDGLYQGLSTATKDTYDALHMQALPPRRAKRSGSGATNFSLLKQAGDVEENPGPMDWIWRILFLVGAATGAHSFEKNQVEQSPQSLIILEGKNCTLQCNYTVSPFSNLRWYKQDTGRGPVSLTILTFSENTKSNGRYTATLDADTKQSSLHITASQLSDSASYICVVSGGTDSWGKLQFGAGTQVVVTPDTRASTKGPSVFPLAPSSKSTSGGTAALGCLVKDYFPEPVTVSWNSGALTSGVHTFPAVLQSSGLYSLSSVVTVPSSSLGTQTYICNVNHKPSNTKVDKRVEPKSCGTTTPGERSSLPAFYPGTSGSCSGCGSLSLPLLAGLVAADAVASLLIVGAVFLCARPRRSPAQEDGKVYINMPGRGSSRRVKFSRSADAPAYQQGQNQLYNELNLGRREEYDVLDKRRGRDPEMGGKPQRRKNPQEGLYNELQKDKMAEAYSEIGMKGERRRGKGHDGLYQGLSTATKDTYDALHMQALPPRRAKRSGSGVKQTLNFDLLKLAGDVESNPGPGHMATYEVLCEVARKLGTDDREVVLFLLNVFIPQPTLAQLIGALRALKEEGRLTFPLLAECLFRAGRRDLLRDLLHLDPRFLERHLAGTMSYFSPYQLTVLHVDGELCARDIRSLIFLSKDTIGSRSTPQTFLHWVYCMENLDLLGPTDVDALMSMLRSLSRVDLQRQVQTLMGLHLSGPSHSQHYRHTP

SEQ ID NO: 11011 - protein, 1164 aa, synthetic construct
MALPVTALLLPLALLLHAARPDVTQTPRNRITKTGKRIMLECSQTKGHDRMYWYRQDPGLGLRLIYYSFDVKDINKGEISDGYSVSRQAQAKFSLSLESAIPNQTALYFCATSGQGAYEEQFFGPGTRLTVLEGQPKANPTVTLFPPSSEELQANKATLVCLISDFYPGAVTVAWKADGSPVKAGVETTKPSKQSNNKYAASSYLSLTPEQWKSHRSYSCQVTHEGSTVEKTVAPTECSGSTTPGERSSLPAFYPGTSGSCSGCGSLSLPLLAGLVAADAVASLLIVGAVFLCARPRRSPAQEDGKVYINMPGRGSTSRVKFSRSADAPAYQQGQNQLYNELNLGRREEYDVLDKRRGRDPEMGGKPQRRKNPQEGLYNELQKDKMAEAYSEIGMKGERRRGKGHDGLYQGLSTATKDTYDALHMQALPPRRAKRSGSGATNFSLLKQAGDVEENPGPMDWIWRILFLVGAATGAHSFEKNQVEQSPQSLIILEGKNCTLQCNYTVSPFSNLRWYKQDTGRGPVSLTILTFSENTKSNGRYTATLDADTKQSSLHITASQLSDSASYICVVSGGTDSWGKLQFGAGTQVVVTPDTRASTKGPSVFPLAPSSKSTSGGTAALGCLVKDYFPEPVTVSWNSGALTSGVHTFPAVLQSSGLYSLSSVVTVPSSSLGTQTYICNVNHKPSNTKVDKRVEPKSCGTTTPGERSSLPAFYPGTSGSCSGCGSLSLPLLAGLVAADAVASLLIVGAVFLCARPRRSPAQEDGKVYINMPGRGSSRRVKFSRSADAPAYQQGQNQLYNELNLGRREEYDVLDKRRGRDPEMGGKPQRRKNPQEGLYNELQKDKMAEAYSEIGMKGERRRGKGHDGLYQGLSTATKDTYDALHMQALPPRRAKRSGSGVKQTLNFDLLKLAGDVESNPGPGHMSDSKEVPSLPFLRHLLEELDSHEDSLLLFLCHDAAPGCTTVTQALCSLSQQRKLTLAALVEMLYVLQRMDLLKSRFGLSKEGAEQLLGTSFLTRYRKLMVCVGEELDSSELRALRLFACNLNPSLSTALSESSRFVELVLALENVGLVSPSSVSVLADMLRTLRRLDLCQQLVEYEQQEQARYRYCYAASPSLPVRTLRRGHGASEHEQLCMPVQESSDSPELLRTPVQESSSDSPEQTT

SEQ ID NO: 11012 - protein, 1158 aa, synthetic construct
MALPVTALLLPLALLLHAARPDVTQTPRNRITKTGKRIMLECSQTKGHDRMYWYRQDPGLGLRLIYYSFDVKDINKGEISDGYSVSRQAQAKFSLSLESAIPNQTALYFCATSGQGAYEEQFFGPGTRLTVLEGQPKANPTVTLFPPSSEELQANKATLVCLISDFYPGAVTVAWKADGSPVKAGVETTKPSKQSNNKYAASSYLSLTPEQWKSHRSYSCQVTHEGSTVEKTVAPTECSGSTTPGERSSLPAFYPGTSGSCSGCGSLSLPLLAGLVAADAVASLLIVGAVFLCARPRRSPAQEDGKVYINMPGRGSTSRVKFSRSADAPAYQQGQNQLYNELNLGRREEYDVLDKRRGRDPEMGGKPQRRKNPQEGLYNELQKDKMAEAYSEIGMKGERRRGKGHDGLYQGLSTATKDTYDALHMQALPPRRAKRSGSGATNFSLLKQAGDVEENPGPMDWIWRILFLVGAATGAHSFEKNQVEQSPQSLIILEGKNCTLQCNYTVSPFSNLRWYKQDTGRGPVSLTILTFSENTKSNGRYTATLDADTKQSSLHITASQLSDSASYICVVSGGTDSWGKLQFGAGTQVVVTPDTRASTKGPSVFPLAPSSKSTSGGTAALGCLVKDYFPEPVTVSWNSGALTSGVHTFPAVLQSSGLYSLSSVVTVPSSSLGTQTYICNVNHKPSNTKVDKRVEPKSCGTTTPGERSSLPAFYPGTSGSCSGCGSLSLPLLAGLVAADAVASLLIVGAVFLCARPRRSPAQEDGKVYINMPGRGSSRRVKFSRSADAPAYQQGQNQLYNELNLGRREEYDVLDKRRGRDPEMGGKPQRRKNPQEGLYNELQKDKMAEAYSEIGMKGERRRGKGHDGLYQGLSTATKDTYDALHMQALPPRRAKRSGSGVKQTLNFDLLKLAGDVESNPGPGHMALPVTALLLPLALLLHAARPSQFRVSPLDRTWNLGETVELKCQVLLSNPTSGCSWLFQPRGAAASPTFLLYLSQNKPKAAEGLDTQRFSGKRLGDTFVLTLSDFRRENEGYYFCSALSNSIMYFSHFVPVFLPAKPTTTPAPRPPTPAPTIASQPLSLRPEACRPAAGGAVHTRGLDFACDIYIWAPLAGTCGVLLLSLVITLYCNHRNRRRVCKCPRPVVKSGDKPSLSARYV

SEQ ID NO: 11013 - protein, 1295 aa, synthetic construct
MALPVTALLLPLALLLHAARPEVQLVESGGGLVQAGGSLRLSCAASGRTFSMGWFRQAPGKEREFVAAITYSGGSPYYADSVKGRFTISRDNAKNTVYLQMNSLKPEDTAVYYCAANPTYGSDWNAENWGQGTQVTVSSGTGGGGSGGGGSGGGGSEFDVTQTPRNRITKTGKRIMLECSQTKGHDRMYWYRQDPGLGLRLIYYSFDVKDINKGEISDGYSVSRQAQAKFSLSLESAIPNQTALYFCATSGQGAYEEQFFGPGTRLTVLEGQPKANPTVTLFPPSSEELQANKATLVCLISDFYPGAVTVAWKADGSPVKAGVETTKPSKQSNNKYAASSYLSLTPEQWKSHRSYSCQVTHEGSTVEKTVAPTECSGSTTPGERSSLPAFYPGTSGSCSGCGSLSLPLLAGLVAADAVASLLIVGAVFLCARPRRSPAQEDGKVYINMPGRGSTSRVKFSRSADAPAYQQGQNQLYNELNLGRREEYDVLDKRRGRDPEMGGKPQRRKNPQEGLYNELQKDKMAEAYSEIGMKGERRRGKGHDGLYQGLSTATKDTYDALHMQALPPRRAKRSGSGATNFSLLKQAGDVEENPGPMDWIWRILFLVGAATGAHSFEKNQVEQSPQSLIILEGKNCTLQCNYTVSPFSNLRWYKQDTGRGPVSLTILTFSENTKSNGRYTATLDADTKQSSLHITASQLSDSASYICVVSGGTDSWGKLQFGAGTQVVVTPDTRASTKGPSVFPLAPSSKSTSGGTAALGCLVKDYFPEPVTVSWNSGALTSGVHTFPAVLQSSGLYSLSSVVTVPSSSLGTQTYICNVNHKPSNTKVDKRVEPKSCGTTTPGERSSLPAFYPGTSGSCSGCGSLSLPLLAGLVAADAVASLLIVGAVFLCARPRRSPAQEDGKVYINMPGRGSSRRVKFSRSADAPAYQQGQNQLYNELNLGRREEYDVLDKRRGRDPEMGGKPQRRKNPQEGLYNELQKDKMAEAYSEIGMKGERRRGKGHDGLYQGLSTATKDTYDALHMQALPPRRAKRSGSGVKQTLNFDLLKLAGDVESNPGPGHMALPVTALLLPLALLLHAARPSQFRVSPLDRTWNLGETVELKCQVLLSNPTSGCSWLFQPRGAAASPTFLLYLSQNKPKAAEGLDTQRFSGKRLGDTFVLTLSDFRRENEGYYFCSALSNSIMYFSHFVPVFLPAKPTTTPAPRPPTPAPTIASQPLSLRPEACRPAAGGAVHTRGLDFACDIYIWAPLAGTCGVLLLSLVITLYCNHRNRRRVCKCPRPVVKSGDKPSLSARYV

SEQ ID NO: 11014 - protein, 1432 aa, synthetic construct
MALPVTALLLPLALLLHAARPEVQLVESGGGLVQAGGSLRLSCAASGRTFSMGWFRQAPGKEREFVAAITYSGGSPYYADSVKGRFTISRDNAKNTVYLQMNSLKPEDTAVYYCAANPTYGSDWNAENWGQGTQVTVSSGTGGGGSGGGGSGGGGSEFDVTQTPRNRITKTGKRIMLECSQTKGHDRMYWYRQDPGLGLRLIYYSFDVKDINKGEISDGYSVSRQAQAKFSLSLESAIPNQTALYFCATSGQGAYEEQFFGPGTRLTVLEGQPKANPTVTLFPPSSEELQANKATLVCLISDFYPGAVTVAWKADGSPVKAGVETTKPSKQSNNKYAASSYLSLTPEQWKSHRSYSCQVTHEGSTVEKTVAPTECSGSTTPGERSSLPAFYPGTSGSCSGCGSLSLPLLAGLVAADAVASLLIVGAVFLCARPRRSPAQEDGKVYINMPGRGSTSRVKFSRSADAPAYQQGQNQLYNELNLGRREEYDVLDKRRGRDPEMGGKPQRRKNPQEGLYNELQKDKMAEAYSEIGMKGERRRGKGHDGLYQGLSTATKDTYDALHMQALPPRRAKRSGSGATNFSLLKQAGDVEENPGPMDWIWRILFLVGAATGAHSGPEVQLVESGGGLVQAGGSLRLSCAASGRTFTMGWFRQAPGKEREFVAAISLSPTLAYYADSVKGRFTISRDNAKNTVVLQMNSLKPEDTALYYCAADRKSVMSIRPDYWGQGTQVTVSSGSGGGGSGGGGSGGGGSFEKNQVEQSPQSLIILEGKNCTLQCNYTVSPFSNLRWYKQDTGRGPVSLTILTFSENTKSNGRYTATLDADTKQSSLHITASQLSDSASYICVVSGGTDSWGKLQFGAGTQVVVTPDTRASTKGPSVFPLAPSSKSTSGGTAALGCLVKDYFPEPVTVSWNSGALTSGVHTFPAVLQSSGLYSLSSVVTVPSSSLGTQTYICNVNHKPSNTKVDKRVEPKSCGTTTPGERSSLPAFYPGTSGSCSGCGSLSLPLLAGLVAADAVASLLIVGAVFLCARPRRSPAQEDGKVYINMPGRGSSRRVKFSRSADAPAYQQGQNQLYNELNLGRREEYDVLDKRRGRDPEMGGKPQRRKNPQEGLYNELQKDKMAEAYSEIGMKGERRRGKGHDGLYQGLSTATKDTYDALHMQALPPRRAKRSGSGVKQTLNFDLLKLAGDVESNPGPGHMALPVTALLLPLALLLHAARPSQFRVSPLDRTWNLGETVELKCQVLLSNPTSGCSWLFQPRGAAASPTFLLYLSQNKPKAAEGLDTQRFSGKRLGDTFVLTLSDFRRENEGYYFCSALSNSIMYFSHFVPVFLPAKPTTTPAPRPPTPAPTIASQPLSLRPEACRPAAGGAVHTRGLDFACDIYIWAPLAGTCGVLLLSLVITLYCNHRNRRRVCKCPRPVVKSGDKPSLSARYV

SEQ ID NO: 11015 - protein, 816 aa, synthetic construct
MALPVTALLLPLALLLHAARPEFDVTQTPRNRITKTGKRIMLECSQTKGHDRMYWYRQDPGLGLRLIYYSFDVKDINKGEISDGYSVSRQAQAKFSLSLESAIPNQTALYFCATSGQGAYEEQFFGPGTRLTVLEDLKNVFPPEVAVFEPSEAEISHTQKATLVCLATGFYPDHVELSWWVNGKEVHSGVSTDPQPLKEQPALNDSRYCLSSRLRVSATFWQNPRNHFRCQVQFYGLSENDEWTQDRAKPVTQIVSAEAWGRADCGSQSFGLLDPKLCYLLDGILFIYGVILTALFLRVKFSRSADAPAYQQGQNQLYNELNLGRREEYDVLDKRRGRDPEMGGKPQRRKNPQEGLYNELQKDKMAEAYSEIGMKGERRRGKGHDGLYQGLSTATKDTYDALHMQALPPRRAKRSGSGATNFSLLKQAGDVEENPGPTSMDWIWRILFLVGAATGAHSFEKNQVEQSPQSLIILEGKNCTLQCNYTVSPFSNLRWYKQDTGRGPVSLTILTFSENTKSNGRYTATLDADTKQSSLHITASQLSDSASYICVVSGGTDSWGKLQFGAGTQVVVTPDTRIQNPDPAVYQLRDSKSSDKSVCLFTDFDSQTNVSQSKDSDVYITDKTVLDMRSMDFKSNSAVAWSNKSDFACANAFNNSIIPEDTFFPSPESSCGTQSFGLLDPKLCYLLDGILFIYGVILTALFLRVKFSRSADAPAYQQGQNQLYNELNLGRREEYDVLDKRRGRDPEMGGKPQRRKNPQEGLYNELQKDKMAEAYSEIGMKGERRRGKGHDGLYQGLSTATKDTYDALHMQALPPR

SEQ ID NO: 11016 - protein, 858 aa, synthetic construct
MALPVTALLLPLALLLHAARPEFDVTQTPRNRITKTGKRIMLECSQTKGHDRMYWYRQDPGLGLRLIYYSFDVKDINKGEISDGYSVSRQAQAKFSLSLESAIPNQTALYFCATSGQGAYEEQFFGPGTRLTVLEDLKNVFPPEVAVFEPSEAEISHTQKATLVCLATGFYPDHVELSWWVNGKEVHSGVSTDPQPLKEQPALNDSRYCLSSRLRVSATFWQNPRNHFRCQVQFYGLSENDEWTQDRAKPVTQIVSAEAWGRADCGSQSFGLLDPKLCYLLDGILFIYGVILTALFLRVKFSRSADAPAYQQGQNQLYNELNLGRREEYDVLDKRRGRDPEMGGKPQRRKNPQEGLYNELQKDKMAEAYSEIGMKGERRRGKGHDGLYQGLSTATKDTYDALHMQALPPRRAKRSGSGATNFSLLKQAGDVEENPGPTSMDWIWRILFLVGAATGAHSFEKNQVEQSPQSLIILEGKNCTLQCNYTVSPFSNLRWYKQDTGRGPVSLTILTFSENTKSNGRYTATLDADTKQSSLHITASQLSDSASYICVVSGGTDSWGKLQFGAGTQVVVTPDTRIQNPDPAVYQLRDSKSSDKSVCLFTDFDSQTNVSQSKDSDVYITDKTVLDMRSMDFKSNSAVAWSNKSDFACANAFNNSIIPEDTFFPSPESSCGTQSFGLLDPKLCYLLDGILFIYGVILTALFLKRGRKKLLYIFKQPFMRPVQTTQEEDGCSCRFPEEEEGGCELRVKFSRSADAPAYQQGQNQLYNELNLGRREEYDVLDKRRGRDPEMGGKPQRRKNPQEGLYNELQKDKMAEAYSEIGMKGERRRGKGHDGLYQGLSTATKDTYDALHMQALPPR

SEQ ID NO: 11017 - protein, 857 aa, synthetic construct
MALPVTALLLPLALLLHAARPEFDVTQTPRNRITKTGKRIMLECSQTKGHDRMYWYRQDPGLGLRLIYYSFDVKDINKGEISDGYSVSRQAQAKFSLSLESAIPNQTALYFCATSGQGAYEEQFFGPGTRLTVLEDLKNVFPPEVAVFEPSEAEISHTQKATLVCLATGFYPDHVELSWWVNGKEVHSGVSTDPQPLKEQPALNDSRYCLSSRLRVSATFWQNPRNHFRCQVQFYGLSENDEWTQDRAKPVTQIVSAEAWGRADCGSQSFGLLDPKLCYLLDGILFIYGVILTALFLRVKFSRSADAPAYQQGQNQLYNELNLGRREEYDVLDKRRGRDPEMGGKPQRRKNPQEGLYNELQKDKMAEAYSEIGMKGERRRGKGHDGLYQGLSTATKDTYDALHMQALPPRRAKRSGSGATNFSLLKQAGDVEENPGPTSMDWIWRILFLVGAATGAHSFEKNQVEQSPQSLIILEGKNCTLQCNYTVSPFSNLRWYKQDTGRGPVSLTILTFSENTKSNGRYTATLDADTKQSSLHITASQLSDSASYICVVSGGTDSWGKLQFGAGTQVVVTPDTRIQNPDPAVYQLRDSKSSDKSVCLFTDFDSQTNVSQSKDSDVYITDKTVLDMRSMDFKSNSAVAWSNKSDFACANAFNNSIIPEDTFFPSPESSCGTQSFGLLDPKLCYLLDGILFIYGVILTALFLRSKRSRLLHSDYMNMTPRRPGPTRKHYQPYAPPRDFAAYRSRVKFSRSADAPAYQQGQNQLYNELNLGRREEYDVLDKRRGRDPEMGGKPQRRKNPQEGLYNELQKDKMAEAYSEIGMKGERRRGKGHDGLYQGLSTATKDTYDALHMQALPPR

SEQ ID NO: 11018 - protein, 852 aa, synthetic construct
MALPVTALLLPLALLLHAARPEFDVTQTPRNRITKTGKRIMLECSQTKGHDRMYWYRQDPGLGLRLIYYSFDVKDINKGEISDGYSVSRQAQAKFSLSLESAIPNQTALYFCATSGQGAYEEQFFGPGTRLTVLEDLKNVFPPEVAVFEPSEAEISHTQKATLVCLATGFYPDHVELSWWVNGKEVHSGVSTDPQPLKEQPALNDSRYCLSSRLRVSATFWQNPRNHFRCQVQFYGLSENDEWTQDRAKPVTQIVSAEAWGRADCGSQSFGLLDPKLCYLLDGILFIYGVILTALFLRVKFSRSADAPAYQQGQNQLYNELNLGRREEYDVLDKRRGRDPEMGGKPQRRKNPQEGLYNELQKDKMAEAYSEIGMKGERRRGKGHDGLYQGLSTATKDTYDALHMQALPPRRAKRSGSGATNFSLLKQAGDVEENPGPTSMDWIWRILFLVGAATGAHSFEKNQVEQSPQSLIILEGKNCTLQCNYTVSPFSNLRWYKQDTGRGPVSLTILTFSENTKSNGRYTATLDADTKQSSLHITASQLSDSASYICVVSGGTDSWGKLQFGAGTQVVVTPDTRIQNPDPAVYQLRDSKSSDKSVCLFTDFDSQTNVSQSKDSDVYITDKTVLDMRSMDFKSNSAVAWSNKSDFACANAFNNSIIPEDTFFPSPESSCGTQSFGLLDPKLCYLLDGILFIYGVILTALFLRDQRLPPDAHKPPGGGSFRTPIQEEQADAHSTLAKIRVKFSRSADAPAYQQGQNQLYNELNLGRREEYDVLDKRRGRDPEMGGKPQRRKNPQEGLYNELQKDKMAEAYSEIGMKGERRRGKGHDGLYQGLSTATKDTYDALHMQALPPR

SEQ ID NO: 11019 - protein, 936 aa, synthetic construct
MALPVTALLLPLALLLHAARPEFDVTQTPRNRITKTGKRIMLECSQTKGHDRMYWYRQDPGLGLRLIYYSFDVKDINKGEISDGYSVSRQAQAKFSLSLESAIPNQTALYFCATSGQGAYEEQFFGPGTRLTVLEDLKNVFPPEVAVFEPSEAEISHTQKATLVCLATGFYPDHVELSWWVNGKEVHSGVSTDPQPLKEQPALNDSRYCLSSRLRVSATFWQNPRNHFRCQVQFYGLSENDEWTQDRAKPVTQIVSAEAWGRADCGSQSFGLLDPKLCYLLDGILFIYGVILTALFLRVKFSRSADAPAYQQGQNQLYNELNLGRREEYDVLDKRRGRDPEMGGKPQRRKNPQEGLYNELQKDKMAEAYSEIGMKGERRRGKGHDGLYQGLSTATKDTYDALHMQALPPRRAKRSGSGATNFSLLKQAGDVEENPGPTSMDWIWRILFLVGAATGAHSFEKNQVEQSPQSLIILEGKNCTLQCNYTVSPFSNLRWYKQDTGRGPVSLTILTFSENTKSNGRYTATLDADTKQSSLHITASQLSDSASYICVVSGGTDSWGKLQFGAGTQVVVTPDTRIQNPDPAVYQLRDSKSSDKSVCLFTDFDSQTNVSQSKDSDVYITDKTVLDMRSMDFKSNSAVAWSNKSDFACANAFNNSIIPEDTFFPSPESSCGTQSFGLLDPKLCYLLDGILFIYGVILTALFLWRRKRKEKQSETSPKEFLTIYEDVKDLKTRRNHEQEQTFPGGGSTIYSMIQSQSSAPTSQEPAYTLYSLIQPSRKSGSRKRNHSPSFNSTIYEVIGKSQPKAQNPARLSRKELENFDVYSRVKFSRSADAPAYQQGQNQLYNELNLGRREEYDVLDKRRGRDPEMGGKPQRRKNPQEGLYNELQKDKMAEAYSEIGMKGERRRGKGHDGLYQGLSTATKDTYDALHMQALPPR

SEQ ID NO: 11020 - protein, 899 aa, synthetic construct
MALPVTALLLPLALLLHAARPEFDVTQTPRNRITKTGKRIMLECSQTKGHDRMYWYRQDPGLGLRLIYYSFDVKDINKGEISDGYSVSRQAQAKFSLSLESAIPNQTALYFCATSGQGAYEEQFFGPGTRLTVLEDLKNVFPPEVAVFEPSEAEISHTQKATLVCLATGFYPDHVELSWWVNGKEVHSGVSTDPQPLKEQPALNDSRYCLSSRLRVSATFWQNPRNHFRCQVQFYGLSENDEWTQDRAKPVTQIVSAEAWGRADCGSQSFGLLDPKLCYLLDGILFIYGVILTALFLRSKRSRLLHSDYMNMTPRRPGPTRKHYQPYAPPRDFAAYRSRVKFSRSADAPAYQQGQNQLYNELNLGRREEYDVLDKRRGRDPEMGGKPQRRKNPQEGLYNELQKDKMAEAYSEIGMKGERRRGKGHDGLYQGLSTATKDTYDALHMQALPPRRAKRSGSGATNFSLLKQAGDVEENPGPTSMDWIWRILFLVGAATGAHSFEKNQVEQSPQSLIILEGKNCTLQCNYTVSPFSNLRWYKQDTGRGPVSLTILTFSENTKSNGRYTATLDADTKQSSLHITASQLSDSASYICVVSGGTDSWGKLQFGAGTQVVVTPDTRIQNPDPAVYQLRDSKSSDKSVCLFTDFDSQTNVSQSKDSDVYITDKTVLDMRSMDFKSNSAVAWSNKSDFACANAFNNSIIPEDTFFPSPESSCGTQSFGLLDPKLCYLLDGILFIYGVILTALFLKRGRKKLLYIFKQPFMRPVQTTQEEDGCSCRFPEEEEGGCELRVKFSRSADAPAYQQGQNQLYNELNLGRREEYDVLDKRRGRDPEMGGKPQRRKNPQEGLYNELQKDKMAEAYSEIGMKGERRRGKGHDGLYQGLSTATKDTYDALHMQALPPR

SEQ ID NO: 11021 - protein, 898 aa, synthetic construct
MALPVTALLLPLALLLHAARPEFDVTQTPRNRITKTGKRIMLECSQTKGHDRMYWYRQDPGLGLRLIYYSFDVKDINKGEISDGYSVSRQAQAKFSLSLESAIPNQTALYFCATSGQGAYEEQFFGPGTRLTVLEDLKNVFPPEVAVFEPSEAEISHTQKATLVCLATGFYPDHVELSWWVNGKEVHSGVSTDPQPLKEQPALNDSRYCLSSRLRVSATFWQNPRNHFRCQVQFYGLSENDEWTQDRAKPVTQIVSAEAWGRADCGSQSFGLLDPKLCYLLDGILFIYGVILTALFLRSKRSRLLHSDYMNMTPRRPGPTRKHYQPYAPPRDFAAYRSRVKFSRSADAPAYQQGQNQLYNELNLGRREEYDVLDKRRGRDPEMGGKPQRRKNPQEGLYNELQKDKMAEAYSEIGMKGERRRGKGHDGLYQGLSTATKDTYDALHMQALPPRRAKRSGSGATNFSLLKQAGDVEENPGPTSMDWIWRILFLVGAATGAHSFEKNQVEQSPQSLIILEGKNCTLQCNYTVSPFSNLRWYKQDTGRGPVSLTILTFSENTKSNGRYTATLDADTKQSSLHITASQLSDSASYICVVSGGTDSWGKLQFGAGTQVVVTPDTRIQNPDPAVYQLRDSKSSDKSVCLFTDFDSQTNVSQSKDSDVYITDKTVLDMRSMDFKSNSAVAWSNKSDFACANAFNNSIIPEDTFFPSPESSCGTQSFGLLDPKLCYLLDGILFIYGVILTALFLRSKRSRLLHSDYMNMTPRRPGPTRKHYQPYAPPRDFAAYRSRVKFSRSADAPAYQQGQNQLYNELNLGRREEYDVLDKRRGRDPEMGGKPQRRKNPQEGLYNELQKDKMAEAYSEIGMKGERRRGKGHDGLYQGLSTATKDTYDALHMQALPPR

SEQ ID NO: 11022 - protein, 899 aa, synthetic construct; identical to SEQ ID NO: 11020

SEQ ID NO: 11023 - protein, 816 aa, synthetic construct
MALPVTALLLPLALLLHAARPEFDVTQTPRNRITKTGKRIMLECSQTKGHDRMYWYRQDPGLGLRLIYYSFDVKDINKGEISDGYSVSRQAQAKFSLSLESAIPNQTALYFCATSGQGAYEEQFFGPGTRLTVLEDLKNVFPPEVAVFEPSEAEISHTQKATLVCLATGFYPDHVELSWWVNGKEVHSGVSTDPQPLKEQPALNDSRYCLSSRLRVSATFWQNPRNHFRCQVQFYGLSENDEWTQDRAKPVTQIVSAEAWGRADCGSQSFGLLDPKLCYLLDGILFIYGVILTALFLRVKFSRSADAPAYQQGQNQLYNELNLGRREEYDVLDKRRGRDPEMGGKPQRRKNPQEGLFNELQKDKMAEAFSEIGMKGERRRGKGHDGLFQGLSTATKDTFDALHMQALPPRRAKRSGSGATNFSLLKQAGDVEENPGPTSMDWIWRILFLVGAATGAHSFEKNQVEQSPQSLIILEGKNCTLQCNYTVSPFSNLRWYKQDTGRGPVSLTILTFSENTKSNGRYTATLDADTKQSSLHITASQLSDSASYICVVSGGTDSWGKLQFGAGTQVVVTPDTRIQNPDPAVYQLRDSKSSDKSVCLFTDFDSQTNVSQSKDSDVYITDKTVLDMRSMDFKSNSAVAWSNKSDFACANAFNNSIIPEDTFFPSPESSCGTQSFGLLDPKLCYLLDGILFIYGVILTALFLRVKFSRSADAPAYQQGQNQLYNELNLGRREEYDVLDKRRGRDPEMGGKPQRRKNPQEGLYNELQKDKMAEAYSEIGMKGERRRGKGHDGLYQGLSTATKDTYDALHMQALPPR

SEQ ID NO: 11024 - protein, 816 aa, synthetic construct; identical to SEQ ID NO: 11023

SEQ ID NO: 11025 - protein, 858 aa, synthetic construct
MALPVTALLLPLALLLHAARPEFDVTQTPRNRITKTGKRIMLECSQTKGHDRMYWYRQDPGLGLRLIYYSFDVKDINKGEISDGYSVSRQAQAKFSLSLESAIPNQTALYFCATSGQGAYEEQFFGPGTRLTVLEDLKNVFPPEVAVFEPSEAEISHTQKATLVCLATGFYPDHVELSWWVNGKEVHSGVSTDPQPLKEQPALNDSRYCLSSRLRVSATFWQNPRNHFRCQVQFYGLSENDEWTQDRAKPVTQIVSAEAWGRADCGSQSFGLLDPKLCYLLDGILFIYGVILTALFLRVKFSRSADAPAYQQGQNQLYNELNLGRREEYDVLDKRRGRDPEMGGKPQRRKNPQEGLFNELQKDKMAEAFSEIGMKGERRRGKGHDGLFQGLSTATKDTFDALHMQALPPRRAKRSGSGATNFSLLKQAGDVEENPGPTSMDWIWRILFLVGAATGAHSFEKNQVEQSPQSLIILEGKNCTLQCNYTVSPFSNLRWYKQDTGRGPVSLTILTFSENTKSNGRYTATLDADTKQSSLHITASQLSDSASYICVVSGGTDSWGKLQFGAGTQVVVTPDTRIQNPDPAVYQLRDSKSSDKSVCLFTDFDSQTNVSQSKDSDVYITDKTVLDMRSMDFKSNSAVAWSNKSDFACANAFNNSIIPEDTFFPSPESSCGTQSFGLLDPKLCYLLDGILFIYGVILTALFLKRGRKKLLYIFKQPFMRPVQTTQEEDGCSCRFPEEEEGGCELRVKFSRSADAPAYQQGQNQLYNELNLGRREEYDVLDKRRGRDPEMGGKPQRRKNPQEGLYNELQKDKMAEAYSEIGMKGERRRGKGHDGLYQGLSTATKDTYDALHMQALPPR

SEQ ID NO: 11026 - protein, 857 aa, synthetic construct
MALPVTALLLPLALLLHAARPEFDVTQTPRNRITKTGKRIMLECSQTKGHDRMYWYRQDPGLGLRLIYYSFDVKDINKGEISDGYSVSRQAQAKFSLSLESAIPNQTALYFCATSGQGAYEEQFFGPGTRLTVLEDLKNVFPPEVAVFEPSEAEISHTQKATLVCLATGFYPDHVELSWWVNGKEVHSGVSTDPQPLKEQPALNDSRYCLSSRLRVSATFWQNPRNHFRCQVQFYGLSENDEWTQDRAKPVTQIVSAEAWGRADCGSQSFGLLDPKLCYLLDGILFIYGVILTALFLRVKFSRSADAPAYQQGQNQLYNELNLGRREEYDVLDKRRGRDPEMGGKPQRRKNPQEGLFNELQKDKMAEAFSEIGMKGERRRGKGHDGLFQGLSTATKDTFDALHMQALPPRRAKRSGSGATNFSLLKQAGDVEENPGPTSMDWIWRILFLVGAATGAHSFEKNQVEQSPQSLIILEGKNCTLQCNYTVSPFSNLRWYKQDTGRGPVSLTILTFSENTKSNGRYTATLDADTKQSSLHITASQLSDSASYICVVSGGTDSWGKLQFGAGTQVVVTPDTRIQNPDPAVYQLRDSKSSDKSVCLFTDFDSQTNVSQSKDSDVYITDKTVLDMRSMDFKSNSAVAWSNKSDFACANAFNNSIIPEDTFFPSPESSCGTQSFGLLDPKLCYLLDGILFIYGVILTALFLRSKRSRLLHSDYMNMTPRRPGPTRKHYQPYAPPRDFAAYRSRVKFSRSADAPAYQQGQNQLYNELNLGRREEYDVLDKRRGRDPEMGGKPQRRKNPQEGLYNELQKDKMAEAYSEIGMKGERRRGKGHDGLYQGLSTATKDTYDALHMQALPPR

SEQ ID NO: 11027 - protein, 852 aa, synthetic construct
MALPVTALLLPLALLLHAARPEFDVTQTPRNRITKTGKRIMLECSQTKGHDRMYWYRQDPGLGLRLIYYSFDVKDINKGEISDGYSVSRQAQAKFSLSLESAIPNQTALYFCATSGQGAYEEQFFGPGTRLTVLEDLKNVFPPEVAVFEPSEAEISHTQKATLVCLATGFYPDHVELSWWVNGKEVHSGVSTDPQPLKEQPALNDSRYCLSSRLRVSATFWQNPRNHFRCQVQFYGLSENDEWTQDRAKPVTQIVSAEAWGRADCGSQSFGLLDPKLCYLLDGILFIYGVILTALFLRVKFSRSADAPAYQQGQNQLYNELNLGRREEYDVLDKRRGRDPEMGGKPQRRKNPQEGLFNELQKDKMAEAFSEIGMKGERRRGKGHDGLFQGLSTATKDTFDALHMQALPPRRAKRSGSGATNFSLLKQAGDVEENPGPTSMDWIWRILFLVGAATGAHSFEKNQVEQSPQSLIILEGKNCTLQCNYTVSPFSNLRWYKQDTGRGPVSLTILTFSENTKSNGRYTATLDADTKQSSLHITASQLSDSASYICVVSGGTDSWGKLQFGAGTQVVVTPDTRIQNPDPAVYQLRDSKSSDKSVCLFTDFDSQTNVSQSKDSDVYITDKTVLDMRSMDFKSNSAVAWSNKSDFACANAFNNSIIPEDTFFPSPESSCGTQSFGLLDPKLCYLLDGILFIYGVILTALFLRDQRLPPDAHKPPGGGSFRTPIQEEQADAHSTLAKIRVKFSRSADAPAYQQGQNQLYNELNLGRREEYDVLDKRRGRDPEMGGKPQRRKNPQEGLYNELQKDKMAEAYSEIGMKGERRRGKGHDGLYQGLSTATKDTYDALHMQALPPR

SEQ ID NO: 11028 - protein, 936 aa, synthetic construct
MALPVTALLLPLALLLHAARPEFDVTQTPRNRITKTGKRIMLECSQTKGHDRMYWYRQDPGLGLRLIYYSFDVKDINKGEISDGYSVSRQAQAKFSLSLESAIPNQTALYFCATSGQGAYEEQFFGPGTRLTVLEDLKNVFPPEVAVFEPSEAEISHTQKATLVCLATGFYPDHVELSWWVNGKEVHSGVSTDPQPLKEQPALNDSRYCLSSRLRVSATFWQNPRNHFRCQVQFYGLSENDEWTQDRAKPVTQIVSAEAWGRADCGSQSFGLLDPKLCYLLDGILFIYGVILTALFLRVKFSRSADAPAYQQGQNQLYNELNLGRREEYDVLDKRRGRDPEMGGKPQRRKNPQEGLFNELQKDKMAEAFSEIGMKGERRRGKGHDGLFQGLSTATKDTFDALHMQALPPRRAKRSGSGATNFSLLKQAGDVEENPGPTSMDWIWRILFLVGAATGAHSFEKNQVEQSPQSLIILEGKNCTLQCNYTVSPFSNLRWYKQDTGRGPVSLTILTFSENTKSNGRYTATLDADTKQSSLHITASQLSDSASYICVVSGGTDSWGKLQFGAGTQVVVTPDTRIQNPDPAVYQLRDSKSSDKSVCLFTDFDSQTNVSQSKDSDVYITDKTVLDMRSMDFKSNSAVAWSNKSDFACANAFNNSIIPEDTFFPSPESSCGTQSFGLLDPKLCYLLDGILFIYGVILTALFLWRRKRKEKQSETSPKEFLTIYEDVKDLKTRRNHEQEQTFPGGGSTIYSMIQSQSSAPTSQEPAYTLYSLIQPSRKSGSRKRNHSPSFNSTIYEVIGKSQPKAQNPARLSRKELENFDVYSRVKFSRSADAPAYQQGQNQLYNELNLGRREEYDVLDKRRGRDPEMGGKPQRRKNPQEGLYNELQKDKMAEAYSEIGMKGERRRGKGHDGLYQGLSTATKDTYDALHMQALPPR

SEQ ID NO: 11029 - protein, 857 aa, synthetic construct; identical to SEQ ID NO: 11026

SEQ ID NO: 11030 - protein, 858 aa, synthetic construct; identical to SEQ ID NO: 11025

SEQ ID NO: 11031 - protein, 816 aa, synthetic construct
MALPVTALLLPLALLLHAARPEFDVTQTPRNRITKTGKRIMLECSQTKGHDRMYWYRQDPGLGLRLIYYSFDVKDINKGEISDGYSVSRQAQAKFSLSLESAIPNQTALYFCATSGQGAYEEQFFGPGTRLTVLEDLKNVFPPEVAVFEPSEAEISHTQKATLVCLATGFYPDHVELSWWVNGKEVHSGVSTDPQPLKEQPALNDSRYCLSSRLRVSATFWQNPRNHFRCQVQFYGLSENDEWTQDRAKPVTQIVSAEAWGRADCGSQSFGLLDPKLCYLLDGILFIYGVILTALFLRVKFSRSADAPAYQQGQNQLYNELNLGRREEYDVLDKRRGRDPEMGGKPQRRKNPQEGLFNELQKDKMAEAFSEIGMKGERRRGKGHDGLFQGLSTATKDTFDALHMQALPPRRAKRSGSGATNFSLLKQAGDVEENPGPTSMDWIWRILFLVGAATGAHSFEKNQVEQSPQSLIILEGKNCTLQCNYTVSPFSNLRWYKQDTGRGPVSLTILTFSENTKSNGRYTATLDADTKQSSLHITASQLSDSASYICVVSGGTDSWGKLQFGAGTQVVVTPDTRIQNPDPAVYQLRDSKSSDKSVCLFTDFDSQTNVSQSKDSDVYITDKTVLDMRSMDFKSNSAVAWSNKSDFACANAFNNSIIPEDTFFPSPESSCGTQSFGLLDPKLSYLLDGILFIYGVILTALFLRVKFSRSADAPAYQQGQNQLYNELNLGRREEYDVLDKRRGRDPEMGGKPQRRKNPQEGLYNELQKDKMAEAYSEIGMKGERRRGKGHDGLYQGLSTATKDTYDALHMQALPPR

SEQ ID NO: 11032 - protein, 816 aa, synthetic construct; identical to SEQ ID NO: 11031

SEQ ID NO: 11033 - protein, 816 aa, synthetic construct
MALPVTALLLPLALLLHAARPEFDVTQTPRNRITKTGKRIMLECSQTKGHDRMYWYRQDPGLGLRLIYYSFDVKDINKGEISDGYSVSRQAQAKFSLSLESAIPNQTALYFCATSGQGAYEEQFFGPGTRLTVLEDLKNVFPPEVAVFEPSEAEISHTQKATLVCLATGFYPDHVELSWWVNGKEVHSGVSTDPQPLKEQPALNDSRYCLSSRLRVSATFWQNPRNHFRCQVQFYGLSENDEWTQDRAKPVTQIVSAEAWGRADCGSQSFGLLDPKLSYLLDGILFIYGVILTALFLRVKFSRSADAPAYQQGQNQLYNELNLGRREEYDVLDKRRGRDPEMGGKPQRRKNPQEGLYNELQKDKMAEAYSEIGMKGERRRGKGHDGLYQGLSTATKDTYDALHMQALPPRRAKRSGSGATNFSLLKQAGDVEENPGPTSMDWIWRILFLVGAATGAHSFEKNQVEQSPQSLIILEGKNCTLQCNYTVSPFSNLRWYKQDTGRGPVSLTILTFSENTKSNGRYTATLDADTKQSSLHITASQLSDSASYICVVSGGTDSWGKLQFGAGTQVVVTPDTRIQNPDPAVYQLRDSKSSDKSVCLFTDFDSQTNVSQSKDSDVYITDKTVLDMRSMDFKSNSAVAWSNKSDFACANAFNNSIIPEDTFFPSPESSCGTQSFGLLDPKLSYLLDGILFIYGVILTALFLRVKFSRSADAPAYQQGQNQLYNELNLGRREEYDVLDKRRGRDPEMGGKPQRRKNPQEGLYNELQKDKMAEAYSEIGMKGERRRGKGHDGLYQGLSTATKDTYDALHMQALPPR

SEQ ID NO: 11034 - protein, 720 aa, synthetic construct
MALPVTALLLPLALLLHAARPEFDVTQTPRNRITKTGKRIMLECSQTKGHDRMYWYRQDPGLGLRLIYYSFDVKDINKGEISDGYSVSRQAQAKFSLSLESAIPNQTALYFCATSGQGAYEEQFFGPGTRLTVLEDLKNVFPPEVAVFEPSEAEISHTQKATLVCLATGFYPDHVELSWWVNGKEVHSGVSTDPQPLKEQPALNDSRYCLSSRLRVSATFWQNPRNHFRCQVQFYGLSENDEWTQDRAKPVTQIVSAEAWGRADCGSTTPGERSSLPAFYPGTSGSCSGCGSLSLPLLAGLVAADAVASLLIVGAVFLCARPRRSPAQEDGKVYINMPGRGRAKRSGSGATNFSLLKQAGDVEENPGPTSMDWIWRILFLVGAATGAHSFEKNQVEQSPQSLIILEGKNCTLQCNYTVSPFSNLRWYKQDTGRGPVSLTILTFSENTKSNGRYTATLDADTKQSSLHITASQLSDSASYICVVSGGTDSWGKLQFGAGTQVVVTPDTRIQNPDPAVYQLRDSKSSDKSVCLFTDFDSQTNVSQSKDSDVYITDKTVLDMRSMDFKSNSAVAWSNKSDFACANAFNNSIIPEDTFFPSPESSCGTTTPGERSSLPAFYPGTSGSCSGCGSLSLPLLAGLVAADAVASLLIVGAVFKRGRKKLLYIFKQPFMRPVQTTQEEDGCSCRFPEEEEGGCELLCARPRRSPAQEDGKVYINMPGRG

SEQ ID NO: 11035 - protein, 719 aa, synthetic construct
MALPVTALLLPLALLLHAARPEFDVTQTPRNRITKTGKRIMLECSQTKGHDRMYWYRQDPGLGLRLIYYSFDVKDINKGEISDGYSVSRQAQAKFSLSLESAIPNQTALYFCATSGQGAYEEQFFGPGTRLTVLEDLKNVFPPEVAVFEPSEAEISHTQKATLVCLATGFYPDHVELSWWVNGKEVHSGVSTDPQPLKEQPALNDSRYCLSSRLRVSATFWQNPRNHFRCQVQFYGLSENDEWTQDRAKPVTQIVSAEAWGRADCGSTTPGERSSLPAFYPGTSGSCSGCGSLSLPLLAGLVAADAVASLLIVGAVFLCARPRRSPAQEDGKVYINMPGRGRAKRSGSGATNFSLLKQAGDVEENPGPTSMDWIWRILFLVGAATGAHSFEKNQVEQSPQSLIILEGKNCTLQCNYTVSPFSNLRWYKQDTGRGPVSLTILTFSENTKSNGRYTATLDADTKQSSLHITASQLSDSASYICVVSGGTDSWGKLQFGAGTQVVVTPDTRIQNPDPAVYQLRDSKSSDKSVCLFTDFDSQTNVSQSKDSDVYITDKTVLDMRSMDFKSNSAVAWSNKSDFACANAFNNSIIPEDTFFPSPESSCGTTTPGERSSLPAFYPGTSGSCSGCGSLSLPLLAGLVAADAVASLLIVGAVFRSKRSRLLHSDYMNMTPRRPGPTRKHYQPYAPPRDFAAYRSLCARPRRSPAQEDGKVYINMPGRG

SEQ ID NO: 11036 - protein, 714 aa, synthetic construct
MALPVTALLLPLALLLHAARPEFDVTQTPRNRITKTGKRIMLECSQTKGHDRMYWYRQDPGLGLRLIYYSFDVKDINKGEISDGYSVSRQAQAKFSLSLESAIPNQTALYFCATSGQGAYEEQFFGPGTRLTVLEDLKNVFPPEVAVFEPSEAEISHTQKATLVCLATGFYPDHVELSWWVNGKEVHSGVSTDPQPLKEQPALNDSRYCLSSRLRVSATFWQNPRNHFRCQVQFYGLSENDEWTQDRAKPVTQIVSAEAWGRADCGSTTPGERSSLPAFYPGTSGSCSGCGSLSLPLLAGLVAADAVASLLIVGAVFLCARPRRSPAQEDGKVYINMPGRGRAKRSGSGATNFSLLKQAGDVEENPGPTSMDWIWRILFLVGAATGAHSFEKNQVEQSPQSLIILEGKNCTLQCNYTVSPFSNLRWYKQDTGRGPVSLTILTFSENTKSNGRYTATLDADTKQSSLHITASQLSDSASYICVVSGGTDSWGKLQFGAGTQVVVTPDTRIQNPDPAVYQLRDSKSSDKSVCLFTDFDSQTNVSQSKDSDVYITDKTVLDMRSMDFKSNSAVAWSNKSDFACANAFNNSIIPEDTFFPSPESSCGTTTPGERSSLPAFYPGTSGSCSGCGSLSLPLLAGLVAADAVASLLIVGAVFRDQRLPPDAHKPPGGGSFRTPIQEEQADAHSTLAKILCARPRRSPAQEDGKVYINMPGRG

SEQ ID NO: 11037 - protein, 798 aa, synthetic construct
MALPVTALLLPLALLLHAARPEFDVTQTPRNRITKTGKRIMLECSQTKGHDRMYWYRQDPGLGLRLIYYSFDVKDINKGEISDGYSVSRQAQAKFSLSLESAIPNQTALYFCATSGQGAYEEQFFGPGTRLTVLEDLKNVFPPEVAVFEPSEAEISHTQKATLVCLATGFYPDHVELSWWVNGKEVHSGVSTDPQPLKEQPALNDSRYCLSSRLRVSATFWQNPRNHFRCQVQFYGLSENDEWTQDRAKPVTQIVSAEAWGRADCGSTTPGERSSLPAFYPGTSGSCSGCGSLSLPLLAGLVAADAVASLLIVGAVFLCARPRRSPAQEDGKVYINMPGRGRAKRSGSGATNFSLLKQAGDVEENPGPTSMDWIWRILFLVGAATGAHSFEKNQVEQSPQSLIILEGKNCTLQCNYTVSPFSNLRWYKQDTGRGPVSLTILTFSENTKSNGRYTATLDADTKQSSLHITASQLSDSASYICVVSGGTDSWGKLQFGAGTQVVVTPDTRIQNPDPAVYQLRDSKSSDKSVCLFTDFDSQTNVSQSKDSDVYITDKTVLDMRSMDFKSNSAVAWSNKSDFACANAFNNSIIPEDTFFPSPESSCGTTTPGERSSLPAFYPGTSGSCSGCGSLSLPLLAGLVAADAVASLLIVGAVFWRRKRKEKQSETSPKEFLTIYEDVKDLKTRRNHEQEQTFPGGGSTIYSMIQSQSSAPTSQEPAYTLYSLIQPSRKSGSRKRNHSPSFNSTIYEVIGKSQPKAQNPARLSRKELENFDVYSLCARPRRSPAQEDGKVYINMPGRG

SEQ ID NO: 11038 - protein, 749 aa, synthetic construct
MALPVTALLLPLALLLHAARPEFDVTQTPRNRITKTGKRIMLECSQTKGHDRMYWYRQDPGLGLRLIYYSFDVKDINKGEISDGYSVSRQAQAKFSLSLESAIPNQTALYFCATSGQGAYEEQFFGPGTRLTVLEDLKNVFPPEVAVFEPSEAEISHTQKATLVCLATGFYPDHVELSWWVNGKEVHSGVSTDPQPLKEQPALNDSRYCLSSRLRVSATFWQNPRNHFRCQVQFYGLSENDEWTQDRAKPVTQIVSAEAWGRADCGSLGEPQLCYILDAILFLYGIVLTLLYCKRGRKKLLYIFKQPFMRPVQTTQEEDGCSCRFPEEEEGGCELRLKIQVRKAAITSYEKSDGVYTGLSTRNQETYETLKHEKPPQRAKRSGSGATNFSLLKQAGDVEENPGPTSMDWIWRILFLVGAATGAHSFEKNQVEQSPQSLIILEGKNCTLQCNYTVSPFSNLRWYKQDTGRGPVSLTILTFSENTKSNGRYTATLDADTKQSSLHITASQLSDSASYICVVSGGTDSWGKLQFGAGTQVVVTPDTRIQNPDPAVYQLRDSKSSDKSVCLFTDFDSQTNVSQSKDSDVYITDKTVLDMRSMDFKSNSAVAWSNKSDFACANAFNNSIIPEDTFFPSPESSCGTLGEPQLCYILDAILFLYGIVLTLLYCRSKRSRLLHSDYMNMTPRRPGPTRKHYQPYAPPRDFAAYRSRLKIQVRKAAITSYEKSDGVYTGLSTRNQETYETLKHEKPPQ

SEQ ID NO: 11039 - protein, 744 aa, synthetic construct
MALPVTALLLPLALLLHAARPEFDVTQTPRNRITKTGKRIMLECSQTKGHDRMYWYRQDPGLGLRLIYYSFDVKDINKGEISDGYSVSRQAQAKFSLSLESAIPNQTALYFCATSGQGAYEEQFFGPGTRLTVLEDLKNVFPPEVAVFEPSEAEISHTQKATLVCLATGFYPDHVELSWWVNGKEVHSGVSTDPQPLKEQPALNDSRYCLSSRLRVSATFWQNPRNHFRCQVQFYGLSENDEWTQDRAKPVTQIVSAEAWGRADCGSLGEPQLCYILDAILFLYGIVLTLLYCKRGRKKLLYIFKQPFMRPVQTTQEEDGCSCRFPEEEEGGCELRLKIQVRKAAITSYEKSDGVYTGLSTRNQETYETLKHEKPPQRAKRSGSGATNFSLLKQAGDVEENPGPTSMDWIWRILFLVGAATGAHSFEKNQVEQSPQSLIILEGKNCTLQCNYTVSPFSNLRWYKQDTGRGPVSLTILTFSENTKSNGRYTATLDADTKQSSLHITASQLSDSASYICVVSGGTDSWGKLQFGAGTQVVVTPDTRIQNPDPAVYQLRDSKSSDKSVCLFTDFDSQTNVSQSKDSDVYITDKTVLDMRSMDFKSNSAVAWSNKSDFACANAFNNSIIPEDTFFPSPESSCGTLGEPQLCYILDAILFLYGIVLTLLYCRDQRLPPDAHKPPGGGSFRTPIQEEQADAHSTLAKIRLKIQVRKAAITSYEKSDGVYTGLSTRNQETYETLKHEKPPQ

SEQ ID NO: 11040 - protein, 828 aa, synthetic construct
MALPVTALLLPLALLLHAARPEFDVTQTPRNRITKTGKRIMLECSQTKGHDRMYWYRQDPGLGLRLIYYSFDVKDINKGEISDGYSVSRQAQAKFSLSLESAIPNQTALYFCATSGQGAYEEQFFGPGTRLTVLEDLKNVFPPEVAVFEPSEAEISHTQKATLVCLATGFYPDHVELSWWVNGKEVHSGVSTDPQPLKEQPALNDSRYCLSSRLRVSATFWQNPRNHFRCQVQFYGLSENDEWTQDRAKPVTQIVSAEAWGRADCGSLGEPQLCYILDAILFLYGIVLTLLYCKRGRKKLLYIFKQPFMRPVQTTQEEDGCSCRFPEEEEGGCELRLKIQVRKAAITSYEKSDGVYTGLSTRNQETYETLKHEKPPQRAKRSGSGATNFSLLKQAGDVEENPGPTSMDWIWRILFLVGAATGAHSFEKNQVEQSPQSLIILEGKNCTLQCNYTVSPFSNLRWYKQDTGRGPVSLTILTFSENTKSNGRYTATLDADTKQSSLHITASQLSDSASYICVVSGGTDSWGKLQFGAGTQVVVTPDTRIQNPDPAVYQLRDSKSSDKSVCLFTDFDSQTNVSQSKDSDVYITDKTVLDMRSMDFKSNSAVAWSNKSDFACANAFNNSIIPEDTFFPSPESSCGTLGEPQLCYILDAILFLYGIVLTLLYCWRRKRKEKQSETSPKEFLTIYEDVKDLKTRRNHEQEQTFPGGGSTIYSMIQSQSSAPTSQEPAYTLYSLIQPSRKSGSRKRNHSPSFNSTIYEVIGKSQPKAQNPARLSRKELENFDVYSRLKIQVRKAAITSYEKSDGVYTGLSTRNQETYETLKHEKPPQ

SEQ ID NO: 11041 - protein, 750 aa, synthetic construct
MALPVTALLLPLALLLHAARPEFDVTQTPRNRITKTGKRIMLECSQTKGHDRMYWYRQDPGLGLRLIYYSFDVKDINKGEISDGYSVSRQAQAKFSLSLESAIPNQTALYFCATSGQGAYEEQFFGPGTRLTVLEDLKNVFPPEVAVFEPSEAEISHTQKATLVCLATGFYPDHVELSWWVNGKEVHSGVSTDPQPLKEQPALNDSRYCLSSRLRVSATFWQNPRNHFRCQVQFYGLSENDEWTQDRAKPVTQIVSAEAWGRADCGSLGEPQLCYILDAILFLYGIVLTLLYCKRGRKKLLYIFKQPFMRPVQTTQEEDGCSCRFPEEEEGGCELRLKIQVRKAAITSYEKSDGVYTGLSTRNQETYETLKHEKPPQRAKRSGSGATNFSLLKQAGDVEENPGPTSMDWIWRILFLVGAATGAHSFEKNQVEQSPQSLIILEGKNCTLQCNYTVSPFSNLRWYKQDTGRGPVSLTILTFSENTKSNGRYTATLDADTKQSSLHITASQLSDSASYICVVSGGTDSWGKLQFGAGTQVVVTPDTRIQNPDPAVYQLRDSKSSDKSVCLFTDFDSQTNVSQSKDSDVYITDKTVLDMRSMDFKSNSAVAWSNKSDFACANAFNNSIIPEDTFFPSPESSCGTLGEPQLCYILDAILFLYGIVLTLLYCKRGRKKLLYIFKQPFMRPVQTTQEEDGCSCRFPEEEEGGCELRLKIQVRKAAITSYEKSDGVYTGLSTRNQETYETLKHEKPPQ

SEQ ID NO: 11042 - protein, 749 aa, synthetic construct; identical to SEQ ID NO: 11038

SEQ ID NO: 11043 - protein, 748 aa, synthetic construct
MALPVTALLLPLALLLHAARPEFDVTQTPRNRITKTGKRIMLECSQTKGHDRMYWYRQDPGLGLRLIYYSFDVKDINKGEISDGYSVSRQAQAKFSLSLESAIPNQTALYFCATSGQGAYEEQFFGPGTRLTVLEDLKNVFPPEVAVFEPSEAEISHTQKATLVCLATGFYPDHVELSWWVNGKEVHSGVSTDPQPLKEQPALNDSRYCLSSRLRVSATFWQNPRNHFRCQVQFYGLSENDEWTQDRAKPVTQIVSAEAWGRADCGSLGEPQLCYILDAILFLYGIVLTLLYCRSKRSRLLHSDYMNMTPRRPGPTRKHYQPYAPPRDFAAYRSRLKIQVRKAAITSYEKSDGVYTGLSTRNQETYETLKHEKPPQRAKRSGSGATNFSLLKQAGDVEENPGPTSMDWIWRILFLVGAATGAHSFEKNQVEQSPQSLIILEGKNCTLQCNYTVSPFSNLRWYKQDTGRGPVSLTILTFSENTKSNGRYTATLDADTKQSSLHITASQLSDSASYICVVSGGTDSWGKLQFGAGTQVVVTPDTRIQNPDPAVYQLRDSKSSDKSVCLFTDFDSQTNVSQSKDSDVYITDKTVLDMRSMDFKSNSAVAWSNKSDFACANAFNNSIIPEDTFFPSPESSCGTLGEPQLCYILDAILFLYGIVLTLLYCRSKRSRLLHSDYMNMTPRRPGPTRKHYQPYAPPRDFAAYRSRLKIQVRKAAITSYEKSDGVYTGLSTRNQETYETLKHEKPPQ

SEQ ID NO: 11044 - protein, 666 aa, synthetic construct
MALPVTALLLPLALLLHAARPEFDVTQTPRNRITKTGKRIMLECSQTKGHDRMYWYRQDPGLGLRLIYYSFDVKDINKGEISDGYSVSRQAQAKFSLSLESAIPNQTALYFCATSGQGAYEEQFFGPGTRLTVLEDLKNVFPPEVAVFEPSEAEISHTQKATLVCLATGFYPDHVELSWWVNGKEVHSGVSTDPQPLKEQPALNDSRYCLSSRLRVSATFWQNPRNHFRCQVQFYGLSENDEWTQDRAKPVTQIVSAEAWGRADCGSLGEPQLSYILDAILFLYGIVLTLLYCRLKIQVRKAAITSYEKSDGVYTGLSTRNQETYETLKHEKPPQRAKRSGSGATNFSLLKQAGDVEENPGPTSMDWIWRILFLVGAATGAHSFEKNQVEQSPQSLIILEGKNCTLQCNYTVSPFSNLRWYKQDTGRGPVSLTILTFSENTKSNGRYTATLDADTKQSSLHITASQLSDSASYICVVSGGTDSWGKLQFGAGTQVVVTPDTRIQNPDPAVYQLRDSKSSDKSVCLFTDFDSQTNVSQSKDSDVYITDKTVLDMRSMDFKSNSAVAWSNKSDFACANAFNNSIIPEDTFFPSPESSCGTLGEPQLSYILDAILFLYGIVLTLLYCRLKIQVRKAAITSYEKSDGVYTGLSTRNQETYETLKHEKPPQ

SEQ ID NO: 11045 - protein, 702 aa, synthetic construct
MALPVTALLLPLALLLHAARPEFDVTQTPRNRITKTGKRIMLECSQTKGHDRMYWYRQDPGLGLRLIYYSFDVKDINKGEISDGYSVSRQAQAKFSLSLESAIPNQTALYFCATSGQGAYEEQFFGPGTRLTVLEDLKNVFPPEVAVFEPSEAEISHTQKATLVCLATGFYPDHVELSWWVNGKEVHSGVSTDPQPLKEQPALNDSRYCLSSRLRVSATFWQNPRNHFRCQVQFYGLSENDEWTQDRAKPVTQIVSAEAWGRADCGSQAQSDCSCSTVSPGVLAGIVMGDLVLTVLIALAVYFLGRLVPRGRGAAEAATRKQRITETESPYQELQGQRSDVYSDLNTQRPYYKRAKRSGSGATNFSLLKQAGDVEENPGPTSMDWIWRILFLVGAATGAHSFEKNQVEQSPQSLIILEGKNCTLQCNYTVSPFSNLRWYKQDTGRGPVSLTILTFSENTKSNGRYTATLDADTKQSSLHITASQLSDSASYICVVSGGTDSWGKLQFGAGTQVVVTPDTRIQNPDPAVYQLRDSKSSDKSVCLFTDFDSQTNVSQSKDSDVYITDKTVLDMRSMDFKSNSAVAWSNKSDFACANAFNNSIIPEDTFFPSPESSCGTQAQSDCSSSTVSPGVLAGIVMGDLVLTVLIALAVYFLGRLVPRGRGAAEAATRKQRITETESPYQELQGQRSDVYSDLNTQRPYYK

SEQ ID NO: 11046 - protein, 744 aa, synthetic construct
MALPVTALLLPLALLLHAARPEFDVTQTPRNRITKTGKRIMLECSQTKGHDRMYWYRQDPGLGLRLIYYSFDVKDINKGEISDGYSVSRQAQAKFSLSLESAIPNQTALYFCATSGQGAYEEQFFGPGTRLTVLEDLKNVFPPEVAVFEPSEAEISHTQKATLVCLATGFYPDHVELSWWVNGKEVHSGVSTDPQPLKEQPALNDSRYCLSSRLRVSATFWQNPRNHFRCQVQFYGLSENDEWTQDRAKPVTQIVSAEAWGRADCGSQAQSDCSCSTVSPGVLAGIVMGDLVLTVLIALAVYFLGRLVPRGRGAAEAATRKQRITETESPYQELQGQRSDVYSDLNTQRPYYKRAKRSGSGATNFSLLKQAGDVEENPGPTSMDWIWRILFLVGAATGAHSFEKNQVEQSPQSLIILEGKNCTLQCNYTVSPFSNLRWYKQDTGRGPVSLTILTFSENTKSNGRYTATLDADTKQSSLHITASQLSDSASYICVVSGGTDSWGKLQFGAGTQVVVTPDTRIQNPDPAVYQLRDSKSSDKSVCLFTDFDSQTNVSQSKDSDVYITDKTVLDMRSMDFKSNSAVAWSNKSDFACANAFNNSIIPEDTFFPSPESSCGTQAQSDCSCSTVSPGVLAGIVMGDLVLTVLIALAVYFLGRLVPRGRGAAEAATRKQRITETESPYQELQGQRSDVYSDLNTQKRGRKKLLYIFKQPFMRPVQTTQEEDGCSCRFPEEEEGGCELRPYYK

SEQ ID NO: 11047 - protein, 743 aa, synthetic construct
MALPVTALLLPLALLLHAARPEFDVTQTPRNRITKTGKRIMLECSQTKGHDRMYWYRQDPGLGLRLIYYSFDVKDINKGEISDGYSVSRQAQAKFSLSLESAIPNQTALYFCATSGQGAYEEQFFGPGTRLTVLEDLKNVFPPEVAVFEPSEAEISHTQKATLVCLATGFYPDHVELSWWVNGKEVHSGVSTDPQPLKEQPALNDSRYCLSSRLRVSATFWQNPRNHFRCQVQFYGLSENDEWTQDRAKPVTQIVSAEAWGRADCGSQAQSDCSCSTVSPGVLAGIVMGDLVLTVLIALAVYFLGRLVPRGRGAAEAATRKQRITETESPYQELQGQRSDVYSDLNTQRPYYKRAKRSGSGATNFSLLKQAGDVEENPGPTSMDWIWRILFLVGAATGAHSFEKNQVEQSPQSLIILEGKNCTLQCNYTVSPFSNLRWYKQDTGRGPVSLTILTFSENTKSNGRYTATLDADTKQSSLHITASQLSDSASYICVVSGGTDSWGKLQFGAGTQVVVTPDTRIQNPDPAVYQLRDSKSSDKSVCLFTDFDSQTNVSQSKDSDVYITDKTVLDMRSMDFKSNSAVAWSNKSDFACANAFNNSIIPEDTFFPSPESSCGTQAQSDCSCSTVSPGVLAGIVMGDLVLTVLIALAVYFLGRLVPRGRGAAEAATRKQRITETESPYQELQGQRSDVYSDLNTQRSKRSRLLHSDYMNMTPRRPGPTRKHYQPYAPPRDFAAYRSRPYYK

SEQ ID NO: 11048 - protein, 738 aa, synthetic construct
MALPVTALLLPLALLLHAARPEFDVTQTPRNRITKTGKRIMLECSQTKGHDRMYWYRQDPGLGLRLIYYSFDVKDINKGEISDGYSVSRQAQAKFSLSLESAIPNQTALYFCATSGQGAYEEQFFGPGTRLTVLEDLKNVFPPEVAVFEPSEAEISHTQKATLVCLATGFYPDHVELSWWVNGKEVHSGVSTDPQPLKEQPALNDSRYCLSSRLRVSATFWQNPRNHFRCQVQFYGLSENDEWTQDRAKPVTQIVSAEAWGRADCGSQAQSDCSCSTVSPGVLAGIVMGDLVLTVLIALAVYFLGRLVPRGRGAAEAATRKQRITETESPYQELQGQRSDVYSDLNTQRPYYKRAKRSGSGATNFSLLKQAGDVEENPGPTSMDWIWRILFLVGAATGAHSFEKNQVEQSPQSLIILEGKNCTLQCNYTVSPFSNLRWYKQDTGRGPVSLTILTFSENTKSNGRYTATLDADTKQSSLHITASQLSDSASYICVVSGGTDSWGKLQFGAGTQVVVTPDTRIQNPDPAVYQLRDSKSSDKSVCLFTDFDSQTNVSQSKDSDVYITDKTVLDMRSMDFKSNSAVAWSNKSDFACANAFNNSIIPEDTFFPSPESSCGTQAQSDCSCSTVSPGVLAGIVMGDLVLTVLIALAVYFLGRLVPRGRGAAEAATRKQRITETESPYQELQGQRSDVYSDLNTQRDQRLPPDAHKPPGGGSFRTPIQEEQADAHSTLAKIRPYYK

SEQ ID NO: 11049 - protein, 822 aa, synthetic construct
MALPVTALLLPLALLLHAARPEFDVTQTPRNRITKTGKRIMLECSQTKGHDRMYWYRQDPGLGLRLIYYSFDVKDINKGEISDGYSVSRQAQAKFSLSLESAIPNQTALYFCATSGQGAYEEQFFGPGTRLTVLEDLKNVFPPEVAVFEPSEAEISHTQKATLVCLATGFYPDHVELSWWVNGKEVHSGVSTDPQPLKEQPALNDSRYCLSSRLRVSATFWQNPRNHFRCQVQFYGLSENDEWTQDRAKPVTQIVSAEAWGRADCGSQAQSDCSCSTVSPGVLAGIVMGDLVLTVLIALAVYFLGRLVPRGRGAAEAATRKQRITETESPYQELQGQRSDVYSDLNTQRPYYKRAKRSGSGATNFSLLKQAGDVEENPGPTSMDWIWRILFLVGAATGAHSFEKNQVEQSPQSLIILEGKNCTLQCNYTVSPFSNLRWYKQDTGRGPVSLTILTFSENTKSNGRYTATLDADTKQSSLHITASQLSDSASYICVVSGGTDSWGKLQFGAGTQVVVTPDTRIQNPDPAVYQLRDSKSSDKSVCLFTDFDSQTNVSQSKDSDVYITDKTVLDMRSMDFKSNSAVAWSNKSDFACANAFNNSIIPEDTFFPSPESSCGTQAQSDCSCSTVSPGVLAGIVMGDLVLTVLIALAVYFLGRLVPRGRGAAEAATRKQRITETESPYQELQGQRSDVYSDLNTQWRRKRKEKQSETSPKEFLTIYEDVKDLKTRRNHEQEQTFPGGGSTIYSMIQSQSSAPTSQEPAYTLYSLIQPSRKSGSRKRNHSPSFNSTIYEVIGKSQPKAQNPARLSRKELENFDVYSRPYYK

SEQ ID NO: 11050 - protein, 914 aa, synthetic construct
MALPVTALLLPLALLLHAARPEFDVTQTPRNRITKTGKRIMLECSQTKGHDRMYWYRQDPGLGLRLIYYSFDVKDINKGEISDGYSVSRQAQAKFSLSLESAIPNQTALYFCATSGQGAYEEQFFGPGTRLTVLEDLKNVFPPEVAVFEPSEAEISHTQKATLVCLATGFYPDHVELSWWVNGKEVHSGVSTDPQPLKEQPALNDSRYCLSSRLRVSATFWQNPRNHFRCQVQFYGLSENDEWTQDRAKPVTQIVSAEAWGRADCGSQAQSDCSCSTVSPGVLAGIVMGDLVLTVLIALAVYFLGRLVPRGRGAAEAATRKQRITETESPYQELQGQRSDVYSDLNTQRVKFSRSADAPAYQQGQNQLYNELNLGRREEYDVLDKRRGRDPEMGGKPQRRKNPQEGLYNELQKDKMAEAYSEIGMKGERRRGKGHDGLYQGLSTATKDTYDALHMQALPPRRAKRSGSGATNFSLLKQAGDVEENPGPTSMDWIWRILFLVGAATGAHSFEKNQVEQSPQSLIILEGKNCTLQCNYTVSPFSNLRWYKQDTGRGPVSLTILTFSENTKSNGRYTATLDADTKQSSLHITASQLSDSASYICVVSGGTDSWGKLQFGAGTQVVVTPDTRIQNPDPAVYQLRDSKSSDKSVCLFTDFDSQTNVSQSKDSDVYITDKTVLDMRSMDFKSNSAVAWSNKSDFACANAFNNSIIPEDTFFPSPESSCGTTTPGERSSLPAFYPGTSGSCSGCGSLSLPLLAGLVAADAVASLLIVGAVFLCARPRRSPAQEDGKVYINMPGRGSSRRVKFSRSADAPAYQQGQNQLYNELNLGRREEYDVLDKRRGRDPEMGGKPQRRKNPQEGLYNELQKDKMAEAYSEIGMKGERRRGKGHDGLYQGLSTATKDTYDALHMQALPPR

SEQ ID NO: 11051 - protein, 840 aa, synthetic construct
MALPVTALLLPLALLLHAARPEFDVTQTPRNRITKTGKRIMLECSQTKGHDRMYWYRQDPGLGLRLIYYSFDVKDINKGEISDGYSVSRQAQAKFSLSLESAIPNQTALYFCATSGQGAYEEQFFGPGTRLTVLEDLKNVFPPEVAVFEPSEAEISHTQKATLVCLATGFYPDHVELSWWVNGKEVHSGVSTDPQPLKEQPALNDSRYCLSSRLRVSATFWQNPRNHFRCQVQFYGLSENDEWTQDRAKPVTQIVSAEAWGRADCGSQAQSDCSCSTVSPGVLAGIVMGDLVLTVLIALAVYFLGRLVPRGRGAAEAATRKQRITETESPYQELQGQRSDVYSDLNTQRVKFSRSADAPAYQQGQNQLYNELNLGRREEYDVLDKRRGRDPEMGGKPQRRKNPQEGLYNELQKDKMAEAYSEIGMKGERRRGKGHDGLYQGLSTATKDTYDALHMQALPPRRAKRSGSGATNFSLLKQAGDVEENPGPTSMDWIWRILFLVGAATGAHSFEKNQVEQSPQSLIILEGKNCTLQCNYTVSPFSNLRWYKQDTGRGPVSLTILTFSENTKSNGRYTATLDADTKQSSLHITASQLSDSASYICVVSGGTDSWGKLQFGAGTQVVVTPDTRIQNPDPAVYQLRDSKSSDKSVCLFTDFDSQTNVSQSKDSDVYITDKTVLDMRSMDFKSNSAVAWSNKSDFACANAFNNSIIPEDTFFPSPESSCGTTTPGERSSLPAFYPGTSGSCSGCGSLSLPLLAGLVAADAVASLLIVGAVFKRGRKKLLYIFKQPFMRPVQTTQEEDGCSCRFPEEEEGGCELLCARPRRSPAQEDGKVYINMPGRG

SEQ ID NO: 11052 - protein, 839 aa, synthetic construct
MALPVTALLLPLALLLHAARPEFDVTQTPRNRITKTGKRIMLECSQTKGHDRMYWYRQDPGLGLRLIYYSFDVKDINKGEISDGYSVSRQAQAKFSLSLESAIPNQTALYFCATSGQGAYEEQFFGPGTRLTVLEDLKNVFPPEVAVFEPSEAEISHTQKATLVCLATGFYPDHVELSWWVNGKEVHSGVSTDPQPLKEQPALNDSRYCLSSRLRVSATFWQNPRNHFRCQVQFYGLSENDEWTQDRAKPVTQIVSAEAWGRADCGSQAQSDCSCSTVSPGVLAGIVMGDLVLTVLIALAVYFLGRLVPRGRGAAEAATRKQRITETESPYQELQGQRSDVYSDLNTQRVKFSRSADAPAYQQGQNQLYNELNLGRREEYDVLDKRRGRDPEMGGKPQRRKNPQEGLYNELQKDKMAEAYSEIGMKGERRRGKGHDGLYQGLSTATKDTYDALHMQALPPRRAKRSGSGATNFSLLKQAGDVEENPGPTSMDWIWRILFLVGAATGAHSFEKNQVEQSPQSLIILEGKNCTLQCNYTVSPFSNLRWYKQDTGRGPVSLTILTFSENTKSNGRYTATLDADTKQSSLHITASQLSDSASYICVVSGGTDSWGKLQFGAGTQVVVTPDTRIQNPDPAVYQLRDSKSSDKSVCLFTDFDSQTNVSQSKDSDVYITDKTVLDMRSMDFKSNSAVAWSNKSDFACANAFNNSIIPEDTFFPSPESSCGTTTPGERSSLPAFYPGTSGSCSGCGSLSLPLLAGLVAADAVASLLIVGAVFRSKRSRLLHSDYMNMTPRRPGPTRKHYQPYAPPRDFAAYRSLCARPRRSPAQEDGKVYINMPGRG

SEQ ID NO: 11053 - protein, 1085 aa, synthetic construct
MALPVTALLLPLALLLHAARPEFDVTQTPRNRITKTGKRIMLECSQTKGHDRMYWYRQDPGLGLRLIYYSFDVKDINKGEISDGYSVSRQAQAKFSLSLESAIPNQTALYFCATSGQGAYEEQFFGPGTRLTVLEDLKNVFPPEVAVFEPSEAEISHTQKATLVCLATGFYPDHVELSWWVNGKEVHSGVSTDPQPLKEQPALNDSRYCLSSRLRVSATFWQNPRNHFRCQVQFYGLSENDEWTQDRAKPVTQIVSAEAWGRADCGSQSFGLLDPKLCYLLDGILFIYGVILTALFLRVKFSRSADAPAYQQGQNQLYNELNLGRREEYDVLDKRRGRDPEMGGKPQRRKNPQEGLYNELQKDKMAEAYSEIGMKGERRRGKGHDGLYQGLSTATKDTYDALHMQALPPRRAKRSGSGATNFSLLKQAGDVEENPGPTSMDWIWRILFLVGAATGAHSFEKNQVEQSPQSLIILEGKNCTLQCNYTVSPFSNLRWYKQDTGRGPVSLTILTFSENTKSNGRYTATLDADTKQSSLHITASQLSDSASYICVVSGGTDSWGKLQFGAGTQVVVTPDTRIQNPDPAVYQLRDSKSSDKSVCLFTDFDSQTNVSQSKDSDVYITDKTVLDMRSMDFKSNSAVAWSNKSDFACANAFNNSIIPEDTFFPSPESSCGTQSFGLLDPKLCYLLDGILFIYGVILTALFLRVKFSRSADAPAYQQGQNQLYNELNLGRREEYDVLDKRRGRDPEMGGKPQRRKNPQEGLYNELQKDKMAEAYSEIGMKGERRRGKGHDGLYQGLSTATKDTYDALHMQALPPRRAKRSGSGVKQTLNFDLLKLAGDVESNPGPSRGHMALPVTALLLPLALLLHAARPSQFRVSPLDRTWNLGETVELKCQVLLSNPTSGCSWLFQPRGAAASPTFLLYLSQNKPKAAEGLDTQRFSGKRLGDTFVLTLSDFRRENEGYYFCSALSNSIMYFSHFVPVFLPAKPTTTPAPRPPTPAPTIASQPLSLRPEACRPAAGGAVHTRGLDFACDIYIWAPLAGTCGVLLLSLVITLYCNHRNRRRVCKCPRPVVKSGDKPSLSARYV

SEQ ID NO: 11054 - protein, 825 aa, synthetic construct
MALPVTALLLPLALLLHAARPEFDVTQTPRNRITKTGKRIMLECSQTKGHDRMYWYRQDPGLGLRLIYYSFDVKDINKGEISDGYSVSRQAQAKFSLSLESAIPNQTALYFCATSGQGAYEEQFFGPGTRLTVLEDLKNVFPPEVAVFEPSEAEISHTQKATLVCLATGFYPDHVELSWWVNGKEVHSGVSTDPQPLKEQPALNDSRYCLSSRLRVSATFWQNPRNHFRCQVQFYGLSENDEWTQDRAKPVTQIVSAEAWGRADCGSQSFGLLDPKLCYLLDGILFIYGVILTALFLRVKFSRSADAPAYQQGQNQLYNELNLGRREEYDVLDKRRGRDPEMGGKPQRRKNPQEGLYNELQKDKMAEAYSEIGMKGERRRGKGHDGLYQGLSTATKDTYDALHMQALPPRRAKRSGSGATNFSLLKQAGDVEENPGPTSMDWIWRILFLVGAATGAHSFEKNQVEQSPQSLIILEGKNCTLQCNYTVSPFSNLRWYKQDTGRGPVSLTILTFSENTKSNGRYTATLDADTKQSSLHITASQLSDSASYICVVSGGTDSWGKLQFGAGTQVVVTPDTRASTKGPSVFPLAPSSKSTSGGTAALGCLVKDYFPEPVTVSWNSGALTSGVHTFPAVLQSSGLYSLSSVVTVPSSSLGTQTYICNVNHKPSNTKVDKRVEPKSCGTQSFGLLDPKLSYLLDGILFIYGVILTALFLRVKFSRSADAPAYQQGQNQLYNELNLGRREEYDVLDKRRGRDPEMGGKPQRRKNPQEGLYNELQKDKMAEAYSEIGMKGERRRGKGHDGLYQGLSTATKDTYDALHMQALPPR

SEQ ID NO: 11055 - protein, 816 aa, synthetic construct
MALPVTALLLPLALLLHAARPEFDVTQTPRNRITKTGKRIMLECSQTKGHDRMYWYRQDPGLGLRLIYYSFDVKDINKGEISDGYSVSRQAQAKFSLSLESAIPNQTALYFCATSGQGAYEEQFFGPGTRLTVLEDLKNVFPPEVAVFEPSEAEISHTQKATLVCLATGFYPDHVELSWWVNGKEVHSGVSTDPQPLKEQPALNDSRYCLSSRLRVSATFWQNPRNHFRCQVQFYGLSENDEWTQDRAKPVTQIVSAEAWGRADCGSQSFGLLDPKLCYLLDGILFIYGVILTALFLRVKFSRSADAPAYQQGQNQLYNELNLGRREEYDVLDKRRGRDPEMGGKPQRRKNPQEGLYNELQKDKMAEAYSEIGMKGERRRGKGHDGLYQGLSTATKDTYDALHMQALPPRRAKRSGSGATNFSLLKQAGDVEENPGPTSMDWIWRILFLVGAATGAHSFEKNQVEQSPQSLIILEGKNCTLQCNYTVSPFSNLRWYKQDTGRGPVSLTILTFSENTKSNGRYTATLDADTKQSSLHITASQLSDSASYICVVSGGTDSWGKLQFGAGTQVVVTPDTRIQNPDPAVYQLRDSKSSDKSVCLFTDFDSQTNVSQSKDSDVYITDKTVLDMRSMDFKSNSAVAWSNKSDFACANAFNNSIIPEDTFFPSPESSCGTQSFGLLDPKLSYLLDGILFIYGVILTALFLRVKFSRSADAPAYQQGQNQLYNELNLGRREEYDVLDKRRGRDPEMGGKPQRRKNPQEGLYNELQKDKMAEAYSEIGMKGERRRGKGHDGLYQGLSTATKDTYDALHMQALPPR

SEQ ID NO: 11056 - protein, 986 aa, synthetic construct
MALPVTALLLPLALLLHAARPEFDVTQTPRNRITKTGKRIMLECSQTKGHDRMYWYRQDPGLGLRLIYYSFDVKDINKGEISDGYSVSRQAQAKFSLSLESAIPNQTALYFCATSGQGAYEEQFFGPGTRLTVLEGQPKANPTVTLFPPSSEELQANKATLVCLISDFYPGAVTVAWKADGSPVKAGVETTKPSKQSNNKYAASSYLSLTPEQWKSHRSYSCQVTHEGSTVEKTVAPTECSGSLGEPQLCYILDAILFLYGIVLTLLYCRLKIQVRKAAITSYEKSDGVYTGLSTRNQETYETLKHEKPPQRAKRSGSGATNFSLLKQAGDVEENPGPTSMDWIWRILFLVGAATGAHSFEKNQVEQSPQSLIILEGKNCTLQCNYTVSPFSNLRWYKQDTGRGPVSLTILTFSENTKSNGRYTATLDADTKQSSLHITASQLSDSASYICVVSGGTDSWGKLQFGAGTQVVVTPDTRIQNPDPAVYQLRDSKSSDKSVCLFTDFDSQTNVSQSKDSDVYITDKTVLDMRSMDFKSNSAVAWSNKSDFACANAFNNSIIPEDTFFPSPESSCGTQSFGLLDPKLCYLLDGILFIYGVILTALFLRVKFSRSADAPAYQQGQNQLYNELNLGRREEYDVLDKRRGRDPEMGGKPQRRKNPQEGLYNELQKDKMAEAYSEIGMKGERRRGKGHDGLYQGLSTATKDTYDALHMQALPPRRAKRSGSGVKQTLNFDLLKLAGDVESNPGPSRGHMALPVTALLLPLALLLHAARPSQFRVSPLDRTWNLGETVELKCQVLLSNPTSGCSWLFQPRGAAASPTFLLYLSQNKPKAAEGLDTQRFSGKRLGDTFVLTLSDFRRENEGYYFCSALSNSIMYFSHFVPVFLPAKPTTTPAPRPPTPAPTIASQPLSLRPEACRPAAGGAVHTRGLDFACDIYIWAPLAGTCGVLLLSLVITLYCNHRNRRRVCKCPRPVVKSGDKPSLSARYV

SEQ ID NO: 11057 - protein, 750 aa, synthetic construct
MALPVTALLLPLALLLHAARPEFDVTQTPRNRITKTGKRIMLECSQTKGHDRMYWYRQDPGLGLRLIYYSFDVKDINKGEISDGYSVSRQAQAKFSLSLESAIPNQTALYFCATSGQGAYEEQFFGPGTRLTVLEDLKNVFPPEVAVFEPSEAEISHTQKATLVCLATGFYPDHVELSWWVNGKEVHSGVSTDPQPLKEQPALNDSRYCLSSRLRVSATFWQNPRNHFRCQVQFYGLSENDEWTQDRAKPVTQIVSAEAWGRADCGSQSFGLLDPKLCYLLDGILFIYGVILTALFLRVKFSRSADAPAYQQGQNQLYNELNLGRREEYDVLDKRRGRDPEMGGKPQRRKNPQEGLYNELQKDKMAEAYSEIGMKGERRRGKGHDGLYQGLSTATKDTYDALHMQALPPRRAKRSGSGATNFSLLKQAGDVEENPGPTSMDWIWRILFLVGAATGAHSFEKNQVEQSPQSLIILEGKNCTLQCNYTVSPFSNLRWYKQDTGRGPVSLTILTFSENTKSNGRYTATLDADTKQSSLHITASQLSDSASYICVVSGGTDSWGKLQFGAGTQVVVTPDTRASTKGPSVFPLAPSSKSTSGGTAALGCLVKDYFPEPVTVSWNSGALTSGVHTFPAVLQSSGLYSLSSVVTVPSSSLGTQTYICNVNHKPSNTKVDKRVEPKSCGTLGEPQLCYILDAILFLYGIVLTLLYCRLKIQVRKAAITSYEKSDGVYTGLSTRNQETYETLKHEKPPQ

SEQ ID NO: 11058 - protein, 750 aa, synthetic construct; identical to SEQ ID NO: 11057

SEQ ID NO: 11059 - protein, 741 aa, synthetic construct
MALPVTALLLPLALLLHAARPEFDVTQTPRNRITKTGKRIMLECSQTKGHDRMYWYRQDPGLGLRLIYYSFDVKDINKGEISDGYSVSRQAQAKFSLSLESAIPNQTALYFCATSGQGAYEEQFFGPGTRLTVLEDLKNVFPPEVAVFEPSEAEISHTQKATLVCLATGFYPDHVELSWWVNGKEVHSGVSTDPQPLKEQPALNDSRYCLSSRLRVSATFWQNPRNHFRCQVQFYGLSENDEWTQDRAKPVTQIVSAEAWGRADCGSQSFGLLDPKLCYLLDGILFIYGVILTALFLRVKFSRSADAPAYQQGQNQLYNELNLGRREEYDVLDKRRGRDPEMGGKPQRRKNPQEGLYNELQKDKMAEAYSEIGMKGERRRGKGHDGLYQGLSTATKDTYDALHMQALPPRRAKRSGSGATNFSLLKQAGDVEENPGPTSMDWIWRILFLVGAATGAHSFEKNQVEQSPQSLIILEGKNCTLQCNYTVSPFSNLRWYKQDTGRGPVSLTILTFSENTKSNGRYTATLDADTKQSSLHITASQLSDSASYICVVSGGTDSWGKLQFGAGTQVVVTPDTRIQNPDPAVYQLRDSKSSDKSVCLFTDFDSQTNVSQSKDSDVYITDKTVLDMRSMDFKSNSAVAWSNKSDFACANAFNNSIIPEDTFFPSPESSCGTLGEPQLCYILDAILFLYGIVLTLLYCRLKIQVRKAAITSYEKSDGVYTGLSTRNQETYETLKHEKPPQ

SEQ ID NO: 11060 - protein, 990 aa, synthetic construct
MALPVTALLLPLALLLHAARPEFDVTQTPRNRITKTGKRIMLECSQTKGHDRMYWYRQDPGLGLRLIYYSFDVKDINKGEISDGYSVSRQAQAKFSLSLESAIPNQTALYFCATSGQGAYEEQFFGPGTRLTVLEGQPKANPTVTLFPPSSEELQANKATLVCLISDFYPGAVTVAWKADGSPVKAGVETTKPSKQSNNKYAASSYLSLTPEQWKSHRSYSCQVTHEGSTVEKTVAPTECSTTPGERSSLPAFYPGTSGSCSGCGSLSLPLLAGLVAADAVASLLIVGAVFLCARPRRSPAQEDGKVYINMPGRGRAKRSGSGATNFSLLKQAGDVEENPGPTSMDWIWRILFLVGAATGAHSFEKNQVEQSPQSLIILEGKNCTLQCNYTVSPFSNLRWYKQDTGRGPVSLTILTFSENTKSNGRYTATLDADTKQSSLHITASQLSDSASYICVVSGGTDSWGKLQFGAGTQVVVTPDTRIQNPDPAVYQLRDSKSSDKSVCLFTDFDSQTNVSQSKDSDVYITDKTVLDMRSMDFKSNSAVAWSNKSDFACANAFNNSIIPEDTFFPSPESSCGTQSFGLLDPKLCYLLDGILFIYGVILTALFLRVKFSRSADAPAYQQGQNQLYNELNLGRREEYDVLDKRRGRDPEMGGKPQRRKNPQEGLYNELQKDKMAEAYSEIGMKGERRRGKGHDGLYQGLSTATKDTYDALHMQALPPRRAKRSGSGVKQTLNFDLLKLAGDVESNPGPSRGHMALPVTALLLPLALLLHAARPSQFRVSPLDRTWNLGETVELKCQVLLSNPTSGCSWLFQPRGAAASPTFLLYLSQNKPKAAEGLDTQRFSGKRLGDTFVLTLSDFRRENEGYYFCSALSNSIMYFSHFVPVFLPAKPTTTPAPRPPTPAPTIASQPLSLRPEACRPAAGGAVHTRGLDFACDIYIWAPLAGTCGVLLLSLVITLYCNHRNRRRVCKCPRPVVKSGDKPSLSARYV

SEQ ID NO: 11061 - protein, 1023 aa, synthetic construct
MALPVTALLLPLALLLHAARPEFDVTQTPRNRITKTGKRIMLECSQTKGHDRMYWYRQDPGLGLRLIYYSFDVKDINKGEISDGYSVSRQAQAKFSLSLESAIPNQTALYFCATSGQGAYEEQFFGPGTRLTVLEDLKNVFPPEVAVFEPSEAEISHTQKATLVCLATGFYPDHVELSWWVNGKEVHSGVSTDPQPLKEQPALNDSRYCLSSRLRVSATFWQNPRNHFRCQVQFYGLSENDEWTQDRAKPVTQIVSAEAWGRADCGSQSFGLLDPKLCYLLDGILFIYGVILTALFLRVKFSRSADAPAYQQGQNQLYNELNLGRREEYDVLDKRRGRDPEMGGKPQRRKNPQEGLYNELQKDKMAEAYSEIGMKGERRRGKGHDGLYQGLSTATKDTYDALHMQALPPRRAKRSGSGATNFSLLKQAGDVEENPGPTSMDWIWRILFLVGAATGAHSFEKNQVEQSPQSLIILEGKNCTLQCNYTVSPFSNLRWYKQDTGRGPVSLTILTFSENTKSNGRYTATLDADTKQSSLHITASQLSDSASYICVVSGGTDSWGKLQFGAGTQVVVTPDTRASTKGPSVFPLAPSSKSTSGGTAALGCLVKDYFPEPVTVSWNSGALTSGVHTFPAVLQSSGLYSLSSVVTVPSSSLGTQTYICNVNHKPSNTKVDKRVEPKSCTTPGERSSLPAFYPGTSGSCSGCGSLSLPLLAGLVAADAVASLLIVGAVFLCARPRRSPAQEDGKVYINMPGRGRAKRSGSGVKQTLNFDLLKLAGDVESNPGPSRGHMALPVTALLLPLALLLHAARPSQFRVSPLDRTWNLGETVELKCQVLLSNPTSGCSWLFQPRGAAASPTFLLYLSQNKPKAAEGLDTQRFSGKRLGDTFVLTLSDFRRENEGYYFCSALSNSIMYFSHFVPVFLPAKPTTTPAPRPPTPAPTIASQPLSLRPEACRPAAGGAVHTRGLDFACDIYIWAPLAGTCGVLLLSLVITLYCNHRNRRRVCKCPRPVVKSGDKPSLSARYV

SEQ ID NO: 11062 - protein, 935 aa, synthetic construct
MALPVTALLLPLALLLHAARPDVTQTPRNRITKTGKRIMLECSQTKGHDRMYWYRQDPGLGLRLIYYSFDVKDINKGEISDGYSVSRQAQAKFSLSLESAIPNQTALYFCATSGQGAYEEQFFGPGTRLTVLELWVSQPPEIRTLEGSSAFLPCSFNASQGRLAIGSVTWFRDEVVPGKEVRNGTPEFRGRLAPLASSRFLHDHQAELHIRDVRGHDASIYVCRVEVLGLGVGTGNGTRLVVEKEHPQLGAGTVLLLRAGFYAVSFLSVAVGSTVYYQGKCLTWKGPRRQLPAVVPAPLPPPCGSSAHLLPPVPGGRAKRSGSGATNFSLLKQAGDVEENPGPTSMDWIWRILFLVGAATGAHSFEKNQVEQSPQSLIILEGKNCTLQCNYTVSPFSNLRWYKQDTGRGPVSLTILTFSENTKSNGRYTATLDADTKQSSLHITASQLSDSASYICVVSGGTDSWGKLQFGAGTQVVVTPDTRLWVSQPPEIRTLEGSSAFLPCSFNASQGRLAIGSVTWFRDEVVPGKEVRNGTPEFRGRLAPLASSRFLHDHQAELHIRDVRGHDASIYVCRVEVLGLGVGTGNGTRLVVEKEHPQLGAGTVLLLRAGFYAVSFLSVAVGSTVYYQGKCLTWKGPRRQLPAVVPAPLPPPCGSSAHLLPPVPGGRAKRSGSGVKQTLNFDLLKLAGDVESNPGPSRGHMALPVTALLLPLALLLHAARPSQFRVSPLDRTWNLGETVELKCQVLLSNPTSGCSWLFQPRGAAASPTFLLYLSQNKPKAAEGLDTQRFSGKRLGDTFVLTLSDFRRENEGYYFCSALSNSIMYFSHFVPVFLPAKPTTTPAPRPPTPAPTIASQPLSLRPEACRPAAGGAVHTRGLDFACDIYIWAPLAGTCGVLLLSLVITLYCNHRNRRRVCKCPRPVVKSGDKPSLSARYV

SEQ ID NO: 11063 - protein, 1070 aa, synthetic construct
MALPVTALLLPLALLLHAARPEFDVTQTPRNRITKTGKRIMLECSQTKGHDRMYWYRQDPGLGLRLIYYSFDVKDINKGEISDGYSVSRQAQAKFSLSLESAIPNQTALYFCATSGQGAYEEQFFGPGTRLTVLEGQPKANPTVTLFPPSSEELQANKATLVCLISDFYPGAVTVAWKADGSPVKAGVETTKPSKQSNNKYAASSYLSLTPEQWKSHRSYSCQVTHEGSTVEKTVAPTECSGSQSFGLLDPKLCYLLDGILFIYGVILTALFLRVKFSRSADAPAYQQGQNQLYNELNLGRREEYDVLDKRRGRDPEMGGKPQRRKNPQEGLYNELQKDKMAEAYSEIGMKGERRRGKGHDGLYQGLSTATKDTYDALHMQALPPRRAKRSGSGATNFSLLKQAGDVEENPGPTSMDWIWRILFLVGAATGAHSFEKNQVEQSPQSLIILEGKNCTLQCNYTVSPFSNLRWYKQDTGRGPVSLTILTFSENTKSNGRYTATLDADTKQSSLHITASQLSDSASYICVVSGGTDSWGKLQFGAGTQVVVTPDTRASTKGPSVFPLAPSSKSTSGGTAALGCLVKDYFPEPVTVSWNSGALTSGVHTFPAVLQSSGLYSLSSVVTVPSSSLGTQTYICNVNHKPSNTKVDKRVEPKSCGTQSFGLLDPKLCYLLDGILFIYGVILTALFLRVKFSRSADAPAYQQGQNQLYNELNLGRREEYDVLDKRRGRDPEMGGKPQRRKNPQEGLYNELQKDKMAEAYSEIGMKGERRRGKGHDGLYQGLSTATKDTYDALHMQALPPRRAKRSGSGVKQTLNFDLLKLAGDVESNPGPSRGHMALPVTALLLPLALLLHAARPSQFRVSPLDRTWNLGETVELKCQVLLSNPTSGCSWLFQPRGAAASPTFLLYLSQNKPKAAEGLDTQRFSGKRLGDTFVLTLSDFRRENEGYYFCSALSNSIMYFSHFVPVFLPAKPTTTPAPRPPTPAPTIASQPLSLRPEACRPAAGGAVHTRGLDFACDIYIWAPLAGTCGVLLLSLVITLYCNHRNRRRVCKCPRPVVKSGDKPSLSARYV

SEQ ID NO: 11064 - protein, 1088 aa, synthetic construct
MALPVTALLLPLALLLHAARPEFDVTQTPRNRITKTGKRIMLECSQTKGHDRMYWYRQDPGLGLRLIYYSFDVKDINKGEISDGYSVSRQAQAKFSLSLESAIPNQTALYFCATSGQGAYEEQFFGPGTRLTVLEGQPKANPTVTLFPPSSEELQANKATLVCLISDFYPGAVTVAWKADGSPVKAGVETTKPSKQSNNKYAASSYLSLTPEQWKSHRSYSCQVTHEGSTVEKTVAPTECSGSQSFGLLDPKLCYLLDGILFIYGVILTALFLRVKFSRSADAPAYQQGQNQLYNELNLGRREEYDVLDKRRGRDPEMGGKPQRRKNPQEGLYNELQKDKMAEAYSEIGMKGERRRGKGHDGLYQGLSTATKDTYDALHMQALPPRRAKRSGSGATNFSLLKQAGDVEENPGPTSMDWIWRILFLVGAATGAHSFEKNQVEQSPQSLIILEGKNCTLQCNYTVSPFSNLRWYKQDTGRGPVSLTILTFSENTKSNGRYTATLDADTKQSSLHITASQLSDSASYICVVSGGTDSWGKLQFGAGTQVVVTPDTRASPTSPKVFPLSLCSTQPDGNVVIACLVQGFFPQEPLSVTWSESGQGVTARNFPPSQDASGDLYTTSSQLTLPATQCLAGKSVTCHVKHYTNPSQDVTVPCPVPSTPPTPSPSTPPTPSPSGTQSFGLLDPKLCYLLDGILFIYGVILTALFLRVKFSRSADAPAYQQGQNQLYNELNLGRREEYDVLDKRRGRDPEMGGKPQRRKNPQEGLYNELQKDKMAEAYSEIGMKGERRRGKGHDGLYQGLSTATKDTYDALHMQALPPRRAKRSGSGVKQTLNFDLLKLAGDVESNPGPSRGHMALPVTALLLPLALLLHAARPSQFRVSPLDRTWNLGETVELKCQVLLSNPTSGCSWLFQPRGAAASPTFLLYLSQNKPKAAEGLDTQRFSGKRLGDTFVLTLSDFRRENEGYYFCSALSNSIMYFSHFVPVFLPAKPTTTPAPRPPTPAPTIASQPLSLRPEACRPAAGGAVHTRGLDFACDIYIWAPLAGTCGVLLLSLVITLYCNHRNRRRVCKCPRPVVKSGDKPSLSARYV

SEQ ID NO: 11065 - protein, 1069 aa, synthetic construct
MALPVTALLLPLALLLHAARPEFDVTQTPRNRITKTGKRIMLECSQTKGHDRMYWYRQDPGLGLRLIYYSFDVKDINKGEISDGYSVSRQAQAKFSLSLESAIPNQTALYFCATSGQGAYEEQFFGPGTRLTVLEGQPKANPTVTLFPPSSEELQANKATLVCLISDFYPGAVTVAWKADGSPVKAGVETTKPSKQSNNKYAASSYLSLTPEQWKSHRSYSCQVTHEGSTVEKTVAPTECSGSQSFGLLDPKLCYLLDGILFIYGVILTALFLRVKFSRSADAPAYQQGQNQLYNELNLGRREEYDVLDKRRGRDPEMGGKPQRRKNPQEGLYNELQKDKMAEAYSEIGMKGERRRGKGHDGLYQGLSTATKDTYDALHMQALPPRRAKRSGSGATNFSLLKQAGDVEENPGPTSMDWIWRILFLVGAATGAHSFEKNQVEQSPQSLIILEGKNCTLQCNYTVSPFSNLRWYKQDTGRGPVSLTILTFSENTKSNGRYTATLDADTKQSSLHITASQLSDSASYICVVSGGTDSWGKLQFGAGTQVVVTPDTRASTKGPSVFPLAPCSRSTSESTAALGCLVKDYFPEPVTVSWNSGALTSGVHTFPAVLQSSGLYSLSSVVTVPSSNFGTQTYTCNVDHKPSNTKVDKTVERKCGTQSFGLLDPKLCYLLDGILFIYGVILTALFLRVKFSRSADAPAYQQGQNQLYNELNLGRREEYDVLDKRRGRDPEMGGKPQRRKNPQEGLYNELQKDKMAEAYSEIGMKGERRRGKGHDGLYQGLSTATKDTYDALHMQALPPRRAKRSGSGVKQTLNFDLLKLAGDVESNPGPSRGHMALPVTALLLPLALLLHAARPSQFRVSPLDRTWNLGETVELKCQVLLSNPTSGCSWLFQPRGAAASPTFLLYLSQNKPKAAEGLDTQRFSGKRLGDTFVLTLSDFRRENEGYYFCSALSNSIMYFSHFVPVFLPAKPTTTPAPRPPTPAPTIASQPLSLRPEACRPAAGGAVHTRGLDFACDIYIWAPLAGTCGVLLLSLVITLYCNHRNRRRVCKCPRPVVKSGDKPSLSARYV

SEQ ID NO: 11066 - protein, 1124 aa, synthetic construct
MALPVTALLLPLALLLHAARPDVTQTPRNRITKTGKRIMLECSQTKGHDRMYWYRQDPGLGLRLIYYSFDVKDINKGEISDGYSVSRQAQAKFSLSLESAIPNQTALYFCATSGQGAYEEQFFGPGTRLTVLEGQPKANPTVTLFPPSSEELQANKATLVCLISDFYPGAVTVAWKADGSPVKAGVETTKPSKQSNNKYAASSYLSLTPEQWKSHRSYSCQVTHEGSTVEKTVAPTECSGSQSFGLLDPKLCYLLDGILFIYGVILTALFLRVKFSRSADAPAYQQGQNQLYNELNLGRREEYDVLDKRRGRDPEMGGKPQRRKNPQEGLYNELQKDKMAEAYSEIGMKGERRRGKGHDGLYQGLSTATKDTYDALHMQALPPRRAKRSGSGATNFSLLKQAGDVEENPGPTSMDWIWRILFLVGAATGAHSFEKNQVEQSPQSLIILEGKNCTLQCNYTVSPFSNLRWYKQDTGRGPVSLTILTFSENTKSNGRYTATLDADTKQSSLHITASQLSDSASYICVVSGGTDSWGKLQFGAGTQVVVTPDTRAPTKAPDVFPIISGCRHPKDNSPVVLACLITGYHPTSVTVTWYMGTQSQPQRTFPEIQRRDSYYMTSSQLSTPLQQWRQGEYKCVVQHTASKSKKEIFRWPESPKAQASSVPTAQPQAEGSLAKATTAPATTRNTGRGGEEKKKEKEKEEQEERETKTPGTQSFGLLDPKLCYLLDGILFIYGVILTALFLRVKFSRSADAPAYQQGQNQLYNELNLGRREEYDVLDKRRGRDPEMGGKPQRRKNPQEGLYNELQKDKMAEAYSEIGMKGERRRGKGHDGLYQGLSTATKDTYDALHMQALPPRRAKRSGSGVKQTLNFDLLKLAGDVESNPGPSRGHMALPVTALLLPLALLLHAARPSQFRVSPLDRTWNLGETVELKCQVLLSNPTSGCSWLFQPRGAAASPTFLLYLSQNKPKAAEGLDTQRFSGKRLGDTFVLTLSDFRRENEGYYFCSALSNSIMYFSHFVPVFLPAKPTTTPAPRPPTPAPTIASQPLSLRPEACRPAAGGAVHTRGLDFACDIYIWAPLAGTCGVLLLSLVITLYCNHRNRRRVCKCPRPVVKSGDKPSLSARYV

SEQ ID NO: 11067 - protein, 1066 aa, synthetic construct
MALPVTALLLPLALLLHAARPDVTQTPRNRITKTGKRIMLECSQTKGHDRMYWYRQDPGLGLRLIYYSFDVKDINKGEISDGYSVSRQAQAKFSLSLESAIPNQTALYFCATSGQGAYEEQFFGPGTRLTVLEGQPKANPTVTLFPPSSEELQANKATLVCLISDFYPGAVTVAWKADGSPVKAGVETTKPSKQSNNKYAASSYLSLTPEQWKSHRSYSCQVTHEGSTVEKTVAPTECSGSQSFGLLDPKLCYLLDGILFIYGVILTALFLRVKFSRSADAPAYQQGQNQLYNELNLGRREEYDVLDKRRGRDPEMGGKPQRRKNPQEGLYNELQKDKMAEAYSEIGMKGERRRGKGHDGLYQGLSTATKDTYDALHMQALPPRRAKRSGSGATNFSLLKQAGDVEENPGPTSMDWIWRILFLVGAATGAHSFEKNQVEQSPQSLIILEGKNCTLQCNYTVSPFSNLRWYKQDTGRGPVSLTILTFSENTKSNGRYTATLDADTKQSSLHITASQLSDSASYICVVSGGTDSWGKLQFGAGTQVVVTPDTRASTKGPSVFPLAPCSRSTSESTAALGCLVKDYFPEPVTVSWNSGALTSGVHTFPAVLQSSGLYSLSSVVTVPSSNFGTQTYTCNVDHKPSNTKVDKTVERKGTQSFGLLDPKLCYLLDGILFIYGVILTALFLRVKFSRSADAPAYQQGQNQLYNELNLGRREEYDVLDKRRGRDPEMGGKPQRRKNPQEGLYNELQKDKMAEAYSEIGMKGERRRGKGHDGLYQGLSTATKDTYDALHMQALPPRRAKRSGSGVKQTLNFDLLKLAGDVESNPGPSRGHMALPVTALLLPLALLLHAARPSQFRVSPLDRTWNLGETVELKCQVLLSNPTSGCSWLFQPRGAAASPTFLLYLSQNKPKAAEGLDTQRFSGKRLGDTFVLTLSDFRRENEGYYFCSALSNSIMYFSHFVPVFLPAKPTTTPAPRPPTPAPTIASQPLSLRPEACRPAAGGAVHTRGLDFACDIYIWAPLAGTCGVLLLSLVITLYCNHRNRRRVCKCPRPVVKSGDKPSLSARYV

SEQ ID NO: 11068 - protein, 1073 aa, synthetic construct
MALPVTALLLPLALLLHAARPDVTQTPRNRITKTGKRIMLECSQTKGHDRMYWYRQDPGLGLRLIYYSFDVKDINKGEISDGYSVSRQAQAKFSLSLESAIPNQTALYFCATSGQGAYEEQFFGPGTRLTVLEGQPKANPTVTLFPPSSEELQANKATLVCLISDFYPGAVTVAWKADGSPVKAGVETTKPSKQSNNKYAASSYLSLTPEQWKSHRSYSCQVTHEGSTVEKTVAPTECSGSQSFGLLDPKLCYLLDGILFIYGVILTALFLRVKFSRSADAPAYQQGQNQLYNELNLGRREEYDVLDKRRGRDPEMGGKPQRRKNPQEGLYNELQKDKMAEAYSEIGMKGERRRGKGHDGLYQGLSTATKDTYDALHMQALPPRRAKRSGSGATNFSLLKQAGDVEENPGPTSMDWIWRILFLVGAATGAHSFEKNQVEQSPQSLIILEGKNCTLQCNYTVSPFSNLRWYKQDTGRGPVSLTILTFSENTKSNGRYTATLDADTKQSSLHITASQLSDSASYICVVSGGTDSWGKLQFGAGTQVVVTPDTRASPTSPKVFPLSLDSTPQDGNVVVACLVQGFFPQEPLSVTWSESGQNVTARNFPPSQDASGDLYTTSSQLTLPATQCPDGKSVTCHVKHYTNPSQDVTVPCPVPPPPPGTQSFGLLDPKLCYLLDGILFIYGVILTALFLRVKFSRSADAPAYQQGQNQLYNELNLGRREEYDVLDKRRGRDPEMGGKPQRRKNPQEGLYNELQKDKMAEAYSEIGMKGERRRGKGHDGLYQGLSTATKDTYDALHMQALPPRRAKRSGSGVKQTLNFDLLKLAGDVESNPGPSRGHMALPVTALLLPLALLLHAARPSQFRVSPLDRTWNLGETVELKCQVLLSNPTSGCSWLFQPRGAAASPTFLLYLSQNKPKAAEGLDTQRFSGKRLGDTFVLTLSDFRRENEGYYFCSALSNSIMYFSHFVPVFLPAKPTTTPAPRPPTPAPTIASQPLSLRPEACRPAAGGAVHTRGLDFACDIYIWAPLAGTCGVLLLSLVITLYCNHRNRRRVCKCPRPVVKSGDKPSLSARYV

SEQ ID NO: 11069 - protein, 1068 aa, synthetic construct
MALPVTALLLPLALLLHAARPDVTQTPRNRITKTGKRIMLECSQTKGHDRMYWYRQDPGLGLRLIYYSFDVKDINKGEISDGYSVSRQAQAKFSLSLESAIPNQTALYFCATSGQGAYEEQFFGPGTRLTVLEGQPKANPTVTLFPPSSEELQANKATLVCLISDFYPGAVTVAWKADGSPVKAGVETTKPSKQSNNKYAASSYLSLTPEQWKSHRSYSCQVTHEGSTVEKTVAPTECSGSQSFGLLDPKLCYLLDGILFIYGVILTALFLRVKFSRSADAPAYQQGQNQLYNELNLGRREEYDVLDKRRGRDPEMGGKPQRRKNPQEGLYNELQKDKMAEAYSEIGMKGERRRGKGHDGLYQGLSTATKDTYDALHMQALPPRRAKRSGSGATNFSLLKQAGDVEENPGPTSMDWIWRILFLVGAATGAHSFEKNQVEQSPQSLIILEGKNCTLQCNYTVSPFSNLRWYKQDTGRGPVSLTILTFSENTKSNGRYTATLDADTKQSSLHITASQLSDSASYICVVSGGTDSWGKLQFGAGTQVVVTPDTRASTQSPSVFPLTRCCKNIPSNATSVTLGCLATGYFPEPVMVTWDTGSLNGTTMTLPATTLTLSGHYATISLLTVSGAWAKQMFTCRVAHTPSSTDWVDNKTFSGTQSFGLLDPKLCYLLDGILFIYGVILTALFLRVKFSRSADAPAYQQGQNQLYNELNLGRREEYDVLDKRRGRDPEMGGKPQRRKNPQEGLYNELQKDKMAEAYSEIGMKGERRRGKGHDGLYQGLSTATKDTYDALHMQALPPRRAKRSGSGVKQTLNFDLLKLAGDVESNPGPSRGHMALPVTALLLPLALLLHAARPSQFRVSPLDRTWNLGETVELKCQVLLSNPTSGCSWLFQPRGAAASPTFLLYLSQNKPKAAEGLDTQRFSGKRLGDTFVLTLSDFRRENEGYYFCSALSNSIMYFSHFVPVFLPAKPTTTPAPRPPTPAPTIASQPLSLRPEACRPAAGGAVHTRGLDFACDIYIWAPLAGTCGVLLLSLVITLYCNHRNRRRVCKCPRPVVKSGDKPSLSARYV

SEQ ID NO: 11070 - protein, 1068 aa, synthetic construct
MALPVTALLLPLALLLHAARPDVTQTPRNRITKTGKRIMLECSQTKGHDRMYWYRQDPGLGLRLIYYSFDVKDINKGEISDGYSVSRQAQAKFSLSLESAIPNQTALYFCATSGQGAYEEQFFGPGTRLTVLEGQPKANPTVTLFPPSSEELQANKATLVCLISDFYPGAVTVAWKADGSPVKAGVETTKPSKQSNNKYAASSYLSLTPEQWKSHRSYSCQVTHEGSTVEKTVAPTECSGSQSFGLLDPKLCYLLDGILFIYGVILTALFLRVKFSRSADAPAYQQGQNQLYNELNLGRREEYDVLDKRRGRDPEMGGKPQRRKNPQEGLYNELQKDKMAEAYSEIGMKGERRRGKGHDGLYQGLSTATKDTYDALHMQALPPRRAKRSGSGATNFSLLKQAGDVEENPGPTSMDWIWRILFLVGAATGAHSFEKNQVEQSPQSLIILEGKNCTLQCNYTVSPFSNLRWYKQDTGRGPVSLTILTFSENTKSNGRYTATLDADTKQSSLHITASQLSDSASYICVVSGGTDSWGKLQFGAGTQVVVTPDTRASTKGPSVFPLAPCSRSTSESTAALGCLVKDYFPEPVTVSWNSGALTSGVHTFPAVLQSSGLYSLSSVVTVPSSSLGTKTYTCNVDHKPSNTKVDKRVESKYGGTQSFGLLDPKLCYLLDGILFIYGVILTALFLRVKFSRSADAPAYQQGQNQLYNELNLGRREEYDVLDKRRGRDPEMGGKPQRRKNPQEGLYNELQKDKMAEAYSEIGMKGERRRGKGHDGLYQGLSTATKDTYDALHMQALPPRRAKRSGSGVKQTLNFDLLKLAGDVESNPGPSRGHMALPVTALLLPLALLLHAARPSQFRVSPLDRTWNLGETVELKCQVLLSNPTSGCSWLFQPRGAAASPTFLLYLSQNKPKAAEGLDTQRFSGKRLGDTFVLTLSDFRRENEGYYFCSALSNSIMYFSHFVPVFLPAKPTTTPAPRPPTPAPTIASQPLSLRPEACRPAAGGAVHTRGLDFACDIYIWAPLAGTCGVLLLSLVITLYCNHRNRRRVCKCPRPVVKSGDKPSLSARYV

SEQ ID NO: 11071 - protein, 1068 aa, synthetic construct
MALPVTALLLPLALLLHAARPDVTQTPRNRITKTGKRIMLECSQTKGHDRMYWYRQDPGLGLRLIYYSFDVKDINKGEISDGYSVSRQAQAKFSLSLESAIPNQTALYFCATSGQGAYEEQFFGPGTRLTVLEGQPKANPTVTLFPPSSEELQANKATLVCLISDFYPGAVTVAWKADGSPVKAGVETTKPSKQSNNKYAASSYLSLTPEQWKSHRSYSCQVTHEGSTVEKTVAPTECSGSQSFGLLDPKLCYLLDGILFIYGVILTALFLRVKFSRSADAPAYQQGQNQLYNELNLGRREEYDVLDKRRGRDPEMGGKPQRRKNPQEGLYNELQKDKMAEAYSEIGMKGERRRGKGHDGLYQGLSTATKDTYDALHMQALPPRRAKRSGSGATNFSLLKQAGDVEENPGPTSMDWIWRILFLVGAATGAHSFEKNQVEQSPQSLIILEGKNCTLQCNYTVSPFSNLRWYKQDTGRGPVSLTILTFSENTKSNGRYTATLDADTKQSSLHITASQLSDSASYICVVSGGTDSWGKLQFGAGTQVVVTPDTRASTKGPSVFPLAPCSRSTSESTAALGCLVKDYFPEPVTVSWNSGALTSGVHTFPAVLQSSGLYSLSSVVTVPSSNFGTQTYTCNVDHKPSNTKVDKTVERKCCGTQSFGLLDPKLCYLLDGILFIYGVILTALFLRVKFSRSADAPAYQQGQNQLYNELNLGRREEYDVLDKRRGRDPEMGGKPQRRKNPQEGLYNELQKDKMAEAYSEIGMKGERRRGKGHDGLYQGLSTATKDTYDALHMQALPPRRAKRSGSGVKQTLNFDLLKLAGDVESNPGPSRGHMALPVTALLLPLALLLHAARPSQFRVSPLDRTWNLGETVELKCQVLLSNPTSGCSWLFQPRGAAASPTFLLYLSQNKPKAAEGLDTQRFSGKRLGDTFVLTLSDFRRENEGYYFCSALSNSIMYFSHFVPVFLPAKPTTTPAPRPPTPAPTIASQPLSLRPEACRPAAGGAVHTRGLDFACDIYIWAPLAGTCGVLLLSLVITLYCNHRNRRRVCKCPRPVVKSGDKPSLSARYV

SEQ ID NO: 11072 - protein, 1083 aa, synthetic construct
MALPVTALLLPLALLLHAARPDVTQTPRNRITKTGKRIMLECSQTKGHDRMYWYRQDPGLGLRLIYYSFDVKDINKGEISDGYSVSRQAQAKFSLSLESAIPNQTALYFCATSGQGAYEEQFFGPGTRLTVLEDLKNVFPPEVAVFEPSEAEISHTQKATLVCLATGFYPDHVELSWWVNGKEVHSGVSTDPQPLKEQPALNDSRYCLSSRLRVSATFWQNPRNHFRCQVQFYGLSENDEWTQDRAKPVTQIVSAEAWGRADCGSQSFGLLDPKLCYLLDGILFIYGVILTALFLRVKFSRSADAPAYQQGQNQLYNELNLGRREEYDVLDKRRGRDPEMGGKPQRRKNPQEGLYNELQKDKMAEAYSEIGMKGERRRGKGHDGLYQGLSTATKDTYDALHMQALPPRRAKRSGSGATNFSLLKQAGDVEENPGPTSMDWIWRILFLVGAATGAHSFEKNQVEQSPQSLIILEGKNCTLQCNYTVSPFSNLRWYKQDTGRGPVSLTILTFSENTKSNGRYTATLDADTKQSSLHITASQLSDSASYICVVSGGTDSWGKLQFGAGTQVVVTPDTRIQNPDPAVYQLRDSKSSDKSVCLFTDFDSQTNVSQSKDSDVYITDKTVLDMRSMDFKSNSAVAWSNKSDFACANAFNNSIIPEDTFFPSPESSCGTQSFGLLDPKLCYLLDGILFIYGVILTALFLRVKFSRSADAPAYQQGQNQLYNELNLGRREEYDVLDKRRGRDPEMGGKPQRRKNPQEGLYNELQKDKMAEAYSEIGMKGERRRGKGHDGLYQGLSTATKDTYDALHMQALPPRRAKRSGSGVKQTLNFDLLKLAGDVESNPGPSRGHMALPVTALLLPLALLLHAARPSQFRVSPLDRTWNLGETVELKCQVLLSNPTSGCSWLFQPRGAAASPTFLLYLSQNKPKAAEGLDTQRFSGKRLGDTFVLTLSDFRRENEGYYFCSALSNSIMYFSHFVPVFLPAKPTTTPAPRPPTPAPTIASQPLSLRPEACRPAAGGAVHTRGLDFACDIYIWAPLAGTCGVLLLSLVITLYCNHRNRRRVCKCPRPVVKSGDKPSLSARYV

SEQ ID NO: 11073 - protein, 1083 aa, synthetic construct
MALPVTALLLPLALLLHAARPDVTQTPRNRITKTGKRIMLECSQTKGHDRMYWYRQDPGLGLRLIYYSFDVKDINKGEISDGYSVSRQAQAKFSLSLESAIPNQTALYFCATSGQGAYEEQFFGPGTRLTVLEDLKNVFPPEVAVFEPSKAEIAHTQKATLVCLATGFYPDHVELSWWVNGKEVHSGVCTDPQPLKEQPALNDSRYCLSSRLRVSATFWQNPRNHFRCQVQFYGLSENDEWTQDRAKPVTQIVSAEAWGRADCGSQSFGLLDPKLCYLLDGILFIYGVILTALFLRVKFSRSADAPAYQQGQNQLYNELNLGRREEYDVLDKRRGRDPEMGGKPQRRKNPQEGLYNELQKDKMAEAYSEIGMKGERRRGKGHDGLYQGLSTATKDTYDALHMQALPPRRAKRSGSGATNFSLLKQAGDVEENPGPTSMDWIWRILFLVGAATGAHSFEKNQVEQSPQSLIILEGKNCTLQCNYTVSPFSNLRWYKQDTGRGPVSLTILTFSENTKSNGRYTATLDADTKQSSLHITASQLSDSASYICVVSGGTDSWGKLQFGAGTQVVVTPDTRIQNPDPAVYQLRDSKSSDKSVCLFTDFDSQTNVSQSKDSDVYITDKCVLDMRSMDFKSNSAVAWSNKSDFACANAFNNSIIPEDTFFPSSDVPCGTQSFGLLDPKLCYLLDGILFIYGVILTALFLRVKFSRSADAPAYQQGQNQLYNELNLGRREEYDVLDKRRGRDPEMGGKPQRRKNPQEGLYNELQKDKMAEAYSEIGMKGERRRGKGHDGLYQGLSTATKDTYDALHMQALPPRRAKRSGSGVKQTLNFDLLKLAGDVESNPGPSRGHMALPVTALLLPLALLLHAARPSQFRVSPLDRTWNLGETVELKCQVLLSNPTSGCSWLFQPRGAAASPTFLLYLSQNKPKAAEGLDTQRFSGKRLGDTFVLTLSDFRRENEGYYFCSALSNSIMYFSHFVPVFLPAKPTTTPAPRPPTPAPTIASQPLSLRPEACRPAAGGAVHTRGLDFACDIYIWAPLAGTCGVLLLSLVITLYCNHRNRRRVCKCPRPVVKSGDKPSLSARYV

SEQ ID NO: 11074 - protein, 814 aa, synthetic construct
MALPVTALLLPLALLLHAARPDVTQTPRNRITKTGKRIMLECSQTKGHDRMYWYRQDPGLGLRLIYYSFDVKDINKGEISDGYSVSRQAQAKFSLSLESAIPNQTALYFCATSGQGAYEEQFFGPGTRLTVLEDLKNVFPPEVAVFEPSEAEISHTQKATLVCLATGFYPDHVELSWWVNGKEVHSGVCTDPQPLKEQPALNDSRYCLSSRLRVSATFWQNPRNHFRCQVQFYGLSENDEWTQDRAKPVTQIVSAEAWGRADCGSQSFGLLDPKLCYLLDGILFIYGVILTALFLRVKFSRSADAPAYQQGQNQLYNELNLGRREEYDVLDKRRGRDPEMGGKPQRRKNPQEGLYNELQKDKMAEAYSEIGMKGERRRGKGHDGLYQGLSTATKDTYDALHMQALPPRRAKRSGSGATNFSLLKQAGDVEENPGPTSMDWIWRILFLVGAATGAHSFEKNQVEQSPQSLIILEGKNCTLQCNYTVSPFSNLRWYKQDTGRGPVSLTILTFSENTKSNGRYTATLDADTKQSSLHITASQLSDSASYICVVSGGTDSWGKLQFGAGTQVVVTPDTRIQNPDPAVYQLRDSKSSDKSVCLFTDFDSQTNVSQSKDSDVYITDKCVLDMRSMDFKSNSAVAWSNKSDFACANAFNNSIIPEDTFFPSPESSCGTQSFGLLDPKLCYLLDGILFIYGVILTALFLRVKFSRSADAPAYQQGQNQLYNELNLGRREEYDVLDKRRGRDPEMGGKPQRRKNPQEGLYNELQKDKMAEAYSEIGMKGERRRGKGHDGLYQGLSTATKDTYDALHMQALPPR

SEQ ID NO: 11075 - protein, 855 aa, synthetic construct
MALPVTALLLPLALLLHAARPDVTQTPRNRITKTGKRIMLECSQTKGHDRMYWYRQDPGLGLRLIYYSFDVKDINKGEISDGYSVSRQAQAKFSLSLESAIPNQTALYFCATSGQGAYEEQFFGPGTRLTVLEQSFGLLDPKLCYLLDGILFIYGVILTALFLRVKFSRSADAPAYQQGQNQLYNELNLGRREEYDVLDKRRGRDPEMGGKPQRRKNPQEGLYNELQKDKMAEAYSEIGMKGERRRGKGHDGLYQGLSTATKDTYDALHMQALPPRRAKRSGSGATNFSLLKQAGDVEENPGPTSMDWIWRILFLVGAATGAHSFEKNQVEQSPQSLIILEGKNCTLQCNYTVSPFSNLRWYKQDTGRGPVSLTILTFSENTKSNGRYTATLDADTKQSSLHITASQLSDSASYICVVSGGTDSWGKLQFGAGTQVVVTPDTRQSFGLLDPKLCYLLDGILFIYGVILTALFLRVKFSRSADAPAYQQGQNQLYNELNLGRREEYDVLDKRRGRDPEMGGKPQRRKNPQEGLYNELQKDKMAEAYSEIGMKGERRRGKGHDGLYQGLSTATKDTYDALHMQALPPRRAKRSGSGVKQTLNFDLLKLAGDVESNPGPSRGHMALPVTALLLPLALLLHAARPSQFRVSPLDRTWNLGETVELKCQVLLSNPTSGCSWLFQPRGAAASPTFLLYLSQNKPKAAEGLDTQRFSGKRLGDTFVLTLSDFRRENEGYYFCSALSNSIMYFSHFVPVFLPAKPTTTPAPRPPTPAPTIASQPLSLRPEACRPAAGGAVHTRGLDFACDIYIWAPLAGTCGVLLLSLVITLYCNHRNRRRVCKCPRPVVKSGDKPSLSARYV

SEQ ID NO: 11076 - protein, 855 aa, synthetic construct
MALPVTALLLPLALLLHAARPDVTQTPRNRITKTGKRIMLECSQTKGHDRMYWYRQDPGLGLRLIYYSFDVKDINKGEISDGYSVSRQAQAKFSLSLESAIPNQTALYFCATSGQGAYEEQFFGPGTRLTVLEDLKNVFPPEVAVFEPSEAEISHTQKATLVCLATGFYPDHVELSWWVNGKEVHSGVCTDPQPLKEQPALNDSRYCLSSRLRVSATFWQNPRNHFRCQVQFYGLSENDEWTQDRAKPVTQIVSAEAWGRADCGSQSFGLLDPKLCYLLDGILFIYGVILTALFLRSKRSRLLHSDYMNMTPRRPGPTRKHYQPYAPPRDFAAYRSRVKFSRSADAPAYQQGQNQLYNELNLGRREEYDVLDKRRGRDPEMGGKPQRRKNPQEGLYNELQKDKMAEAYSEIGMKGERRRGKGHDGLYQGLSTATKDTYDALHMQALPPRRAKRSGSGATNFSLLKQAGDVEENPGPTSMDWIWRILFLVGAATGAHSFEKNQVEQSPQSLIILEGKNCTLQCNYTVSPFSNLRWYKQDTGRGPVSLTILTFSENTKSNGRYTATLDADTKQSSLHITASQLSDSASYICVVSGGTDSWGKLQFGAGTQVVVTPDTRIQNPDPAVYQLRDSKSSDKSVCLFTDFDSQTNVSQSKDSDVYITDKCVLDMRSMDFKSNSAVAWSNKSDFACANAFNNSIIPEDTFFPSPESSCGTQSFGLLDPKLCYLLDGILFIYGVILTALFLRVKFSRSADAPAYQQGQNQLYNELNLGRREEYDVLDKRRGRDPEMGGKPQRRKNPQEGLYNELQKDKMAEAYSEIGMKGERRRGKGHDGLYQGLSTATKDTYDALHMQALPPR

SEQ ID NO: 11077 - protein, 896 aa, synthetic construct
MALPVTALLLPLALLLHAARPDVTQTPRNRITKTGKRIMLECSQTKGHDRMYWYRQDPGLGLRLIYYSFDVKDINKGEISDGYSVSRQAQAKFSLSLESAIPNQTALYFCATSGQGAYEEQFFGPGTRLTVLEDLKNVFPPEVAVFEPSEAEISHTQKATLVCLATGFYPDHVELSWWVNGKEVHSGVCTDPQPLKEQPALNDSRYCLSSRLRVSATFWQNPRNHFRCQVQFYGLSENDEWTQDRAKPVTQIVSAEAWGRADCGSQSFGLLDPKLCYLLDGILFIYGVILTALFLRSKRSRLLHSDYMNMTPRRPGPTRKHYQPYAPPRDFAAYRSRVKFSRSADAPAYQQGQNQLYNELNLGRREEYDVLDKRRGRDPEMGGKPQRRKNPQEGLYNELQKDKMAEAYSEIGMKGERRRGKGHDGLYQGLSTATKDTYDALHMQALPPRRAKRSGSGATNFSLLKQAGDVEENPGPTSMDWIWRILFLVGAATGAHSFEKNQVEQSPQSLIILEGKNCTLQCNYTVSPFSNLRWYKQDTGRGPVSLTILTFSENTKSNGRYTATLDADTKQSSLHITASQLSDSASYICVVSGGTDSWGKLQFGAGTQVVVTPDTRIQNPDPAVYQLRDSKSSDKSVCLFTDFDSQTNVSQSKDSDVYITDKCVLDMRSMDFKSNSAVAWSNKSDFACANAFNNSIIPEDTFFPSPESSCGTQSFGLLDPKLCYLLDGILFIYGVILTALFLRSKRSRLLHSDYMNMTPRRPGPTRKHYQPYAPPRDFAAYRSRVKFSRSADAPAYQQGQNQLYNELNLGRREEYDVLDKRRGRDPEMGGKPQRRKNPQEGLYNELQKDKMAEAYSEIGMKGERRRGKGHDGLYQGLSTATKDTYDALHMQALPPR

SEQ ID NO: 11078 - protein, 814 aa, synthetic construct
MALPVTALLLPLALLLHAARPDVTQTPRNRITKTGKRIMLECSQTKGHDRMYWYRQDPGLGLRLIYYSFDVKDINKGEISDGYSVSRQAQAKFSLSLESAIPNQTALYFCATSGQGAYEEQFFGPGTRLTVLEDLKNVFPPEVAVFEPSEAEISHTQKATLVCLATGFYPDHVELSWWVNGKEVHSGVSTDPQPLKEQPALNDSRYCLSSRLRVSATFWQNPRNHFRCQVQFYGLSENDEWTQDRAKPVTQIVSAEAWGRADCGSQSFGLLDPKLCYLLDGILFIYGVILTALFLRVKFSRSADAPAYQQGQNQLYNELNLGRREEYDVLDKRRGRDPEMGGKPQRRKNPQEGLYNELQKDKMAEAYSEIGMKGERRRGKGHDGLYQGLSTATKDTYDALHMQALPPRRAKRSGSGATNFSLLKQAGDVEENPGPTSMDWIWRILFLVGAATGAHSFEKNQVEQSPQSLIILEGKNCTLQCNYTVSPFSNLRWYKQDTGRGPVSLTILTFSENTKSNGRYTATLDADTKQSSLHITASQLSDSASYICVVSGGTDSWGKLQFGAGTQVVVTPDTRIQNPDPAVYQLRDSKSSDKSVCLFTDFDSQTNVSQSKDSDVYITDKTVLDMRSMDFKSNSAVAWSNKSDFACANAFNNSIIPEDTFFPSPESSCGTQSFGLLDPKLCYLLDGILFIYGVILTALFLRVKFSRSADAPAYQQGQNQLYNELNLGRREEYDVLDKRRGRDPEMGGKPQRRKNPQEGLYNELQKDKMAEAYSEIGMKGERRRGKGHDGLYQGLSTATKDTYDALHMQALPPR

SEQ ID NO: 11079 - protein, 1058 aa, synthetic construct
MALPVTALLLPLALLLHAARPDVTQTPRNRITKTGKRIMLECSQTKGHDRMYWYRQDPGLGLRLIYYSFDVKDINKGEISDGYSVSRQAQAKFSLSLESAIPNQTALYFCATSGQGAYEEQFFGPGTRLTVLEDKQLDADVSPKPTIFLPSIAETKLQKAGTYLCLLEKFFPDVIKIHWQEKKSNTILGSQEGNTMKTNDTYMKFSWLTVPEKSLDKEHRCIVRHENNKNGVDQEIIFPPIKTDVITGSQSFGLLDPKLCYLLDGILFIYGVILTALFLRVKFSRSADAPAYQQGQNQLYNELNLGRREEYDVLDKRRGRDPEMGGKPQRRKNPQEGLYNELQKDKMAEAYSEIGMKGERRRGKGHDGLYQGLSTATKDTYDALHMQALPPRRAKRSGSGATNFSLLKQAGDVEENPGPTSMDWIWRILFLVGAATGAHSFEKNQVEQSPQSLIILEGKNCTLQCNYTVSPFSNLRWYKQDTGRGPVSLTILTFSENTKSNGRYTATLDADTKQSSLHITASQLSDSASYICVVSGGTDSWGKLQFGAGTQVVVTPDTRSQPHTKPSVFVMKNGTNVACLVKEFYPKDIRINLVSSKKITEFDPAIVISPSGKYNAVKLGKYEDSNSVTCSVQHDNKTVHSTDFGTQSFGLLDPKLCYLLDGILFIYGVILTALFLRVKFSRSADAPAYQQGQNQLYNELNLGRREEYDVLDKRRGRDPEMGGKPQRRKNPQEGLYNELQKDKMAEAYSEIGMKGERRRGKGHDGLYQGLSTATKDTYDALHMQALPPRRAKRSGSGVKQTLNFDLLKLAGDVESNPGPSRGHMALPVTALLLPLALLLHAARPSQFRVSPLDRTWNLGETVELKCQVLLSNPTSGCSWLFQPRGAAASPTFLLYLSQNKPKAAEGLDTQRFSGKRLGDTFVLTLSDFRRENEGYYFCSALSNSIMYFSHFVPVFLPAKPTTTPAPRPPTPAPTIASQPLSLRPEACRPAAGGAVHTRGLDFACDIYIWAPLAGTCGVLLLSLVITLYCNHRNRRRVCKCPRPVVKSGDKPSLSARYV

SEQ ID NO: 11080 - protein, 926 aa, synthetic construct
MALPVTALLLPLALLLHAARPDVTQTPRNRITKTGKRIMLECSQTKGHDRMYWYRQDPGLGLRLIYYSFDVKDINKGEISDGYSVSRQAQAKFSLSLESAIPNQTALYFCATSGQGAYEEQFFGPGTRLTVLEGQPKANPTVTLFPPSSEELQANKATLVCLISDFYPGAVTVAWKADGSPVKAGVETTKPSKQSNNKYAASSYLSLTPEQWKSHRSYSCQVTHEGSTVEKTVAPTECSTTPGERSSLPAFYPGTSGSCSGCGSLSLPLLAGLVAADAVASLLIVGAVFLCARPRRSPAQEDGKVYINMPGRGRAKRSGSGATNFSLLKQAGDVEENPGPTSMDWIWRILFLVGAATGAHSFEKNQVEQSPQSLIILEGKNCTLQCNYTVSPFSNLRWYKQDTGRGPVSLTILTFSENTKSNGRYTATLDADTKQSSLHITASQLSDSASYICVVSGGTDSWGKLQFGAGTQVVVTPDTRASTKGPSVFPLAPSSKSTSGGTAALGCLVKDYFPEPVTVSWNSGALTSGVHTFPAVLQSSGLYSLSSVVTVPSSSLGTQTYICNVNHKPSNTKVDKRVEPKSCTTPGERSSLPAFYPGTSGSCSGCGSLSLPLLAGLVAADAVASLLIVGAVFLCARPRRSPAQEDGKVYINMPGRGRAKRSGSGVKQTLNFDLLKLAGDVESNPGPSRGHMALPVTALLLPLALLLHAARPSQFRVSPLDRTWNLGETVELKCQVLLSNPTSGCSWLFQPRGAAASPTFLLYLSQNKPKAAEGLDTQRFSGKRLGDTFVLTLSDFRRENEGYYFCSALSNSIMYFSHFVPVFLPAKPTTTPAPRPPTPAPTIASQPLSLRPEACRPAAGGAVHTRGLDFACDIYIWAPLAGTCGVLLLSLVITLYCNHRNRRRVCKCPRPVVKSGDKPSLSARYV

SEQ ID NO: 11081 - protein, 755 aa, synthetic construct
MALPVTALLLPLALLLHAARPDVTQTPRNRITKTGKRIMLECSQTKGHDRMYWYRQDPGLGLRLIYYSFDVKDINKGEISDGYSVSRQAQAKFSLSLESAIPNQTALYFCATSGQGAYEEQFFGPGTRLTVLEGDIENTSLAPEDPTFPADTWGTYLLTTETGLQKDHALWDHTAQNLLRMGLAFLVLVALVWFLVEDWLSRKRTRERASRASTWEGRRRLNTQTLRAKRSGSGATNFSLLKQAGDVEENPGPTSMDWIWRILFLVGAATGAHSFEKNQVEQSPQSLIILEGKNCTLQCNYTVSPFSNLRWYKQDTGRGPVSLTILTFSENTKSNGRYTATLDADTKQSSLHITASQLSDSASYICVVSGGTDSWGKLQFGAGTQVVVTPDTRGDIENTSLAPEDPTFPADTWGTYLLTTETGLQKDHALWDHTAQNLLRMGLAFLVLVALVWFLVEDWLSRKRTRERASRASTWEGRRRLNTQTLRAKRSGSGVKQTLNFDLLKLAGDVESNPGPSRGHMALPVTALLLPLALLLHAARPSQFRVSPLDRTWNLGETVELKCQVLLSNPTSGCSWLFQPRGAAASPTFLLYLSQNKPKAAEGLDTQRFSGKRLGDTFVLTLSDFRRENEGYYFCSALSNSIMYFSHFVPVFLPAKPTTTPAPRPPTPAPTIASQPLSLRPEACRPAAGGAVHTRGLDFACDIYIWAPLAGTCGVLLLSLVITLYCNHRNRRRVCKCPRPVVKSGDKPSLSARYV

SEQ ID NO: 11082 - protein, 699 aa, synthetic construct
MALPVTALLLPLALLLHAARPDVTQTPRNRITKTGKRIMLECSQTKGHDRMYWYRQDPGLGLRLIYYSFDVKDINKGEISDGYSVSRQAQAKFSLSLESAIPNQTALYFCATSGQGAYEEQFFGPGTRLTVLEITQGLAVSTISSFFPPGYQVSFCLVMVLLFAVDTGLYFSVKTNIRSSTRDWKDHKFKWRKDPQDKRAKRSGSGATNFSLLKQAGDVEENPGPTSMDWIWRILFLVGAATGAHSFEKNQVEQSPQSLIILEGKNCTLQCNYTVSPFSNLRWYKQDTGRGPVSLTILTFSENTKSNGRYTATLDADTKQSSLHITASQLSDSASYICVVSGGTDSWGKLQFGAGTQVVVTPDTRITQGLAVSTISSFFPPGYQVSFCLVMVLLFAVDTGLYFSVKTNIRSSTRDWKDHKFKWRKDPQDKRAKRSGSGVKQTLNFDLLKLAGDVESNPGPSRGHMALPVTALLLPLALLLHAARPSQFRVSPLDRTWNLGETVELKCQVLLSNPTSGCSWLFQPRGAAASPTFLLYLSQNKPKAAEGLDTQRFSGKRLGDTFVLTLSDFRRENEGYYFCSALSNSIMYFSHFVPVFLPAKPTTTPAPRPPTPAPTIASQPLSLRPEACRPAAGGAVHTRGLDFACDIYIWAPLAGTCGVLLLSLVITLYCNHRNRRRVCKCPRPVVKSGDKPSLSARYV

SEQ ID NO: 11083 - protein, 793 aa, synthetic construct
MALPVTALLLPLALLLHAARPSRYLVKRTGEKVFLECVQDMDHENMFWYRQDPGLGLRLIYFSYDVKMKEKGDIPEGYSVSREKKERFSLILESASTNQTSMYLCASSLWGRLAKNIQYFGAGTRLSVLEGQPKANPTVTLFPPSSEELQANKATLVCLISDFYPGAVTVAWKADGSPVKAGVETTKPSKQSNNKYAASSYLSLTPEQWKSHRSYSCQVTHEGSTVEKTVAPTECSGSQSFGLLDPKLCYLLDGILFIYGVILTALFLRVKFSRSADAPAYQQGQNQLYNELNLGRREEYDVLDKRRGRDPEMGGKPQRRKNPQEGLYNELQKDKMAEAYSEIGMKGERRRGKGHDGLYQGLSTATKDTYDALHMQALPPRRAKRSGSGATNFSLLKQAGDVEENPGPTSMDWIWRILFLVGAATGAHSFEEDQVTQSPEALRLQEGESSSLNCSYTVSGLRGLFWYRQDPGKGPEFLFTLYSAGEEKEKERLKATLTKKESFLHITAPKPEDSATYLCAVQANRGSTLGRLYFGRGTQLTVWPDASTKGPSVFPLAPSSKSTSGGTAALGCLVKDYFPEPVTVSWNSGALTSGVHTFPAVLQSSGLYSLSSVVTVPSSSLGTQTYICNVNHKPSNTKVDKRVEPKSCGTQSFGLLDPKLCYLLDGILFIYGVILTALFLRVKFSRSADAPAYQQGQNQLYNELNLGRREEYDVLDKRRGRDPEMGGKPQRRKNPQEGLYNELQKDKMAEAYSEIGMKGERRRGKGHDGLYQGLSTATKDTYDALHMQALPPR

SEQ ID NO: 11084 - protein, 559 aa, synthetic construct
MALPVTALLLPLALLLHAARPSRYLVKRTGEKVFLECVQDMDHENMFWYRQDPGLGLRLIYFSYDVKMKEKGDIPEGYSVSREKKERFSLILESASTNQTSMYLCASSLWGRLAKNIQYFGAGTRLSVLELEQSFGLLDPKLCYLLDGILFIYGVILTALFLRVKFSRSADAPAYQQGQNQLYNELNLGRREEYDVLDKRRGRDPEMGGKPQRRKNPQEGLYNELQKDKMAEAYSEIGMKGERRRGKGHDGLYQGLSTATKDTYDALHMQALPPRRAKRSGSGATNFSLLKQAGDVEENPGPTSMDWIWRILFLVGAATGAHSFEEDQVTQSPEALRLQEGESSSLNCSYTVSGLRGLFWYRQDPGKGPEFLFTLYSAGEEKEKERLKATLTKKESFLHITAPKPEDSATYLCAVQANRGSTLGRLYFGRGTQLTVWPDTRQSFGLLDPKLCYLLDGILFIYGVILTALFLRVKFSRSADAPAYQQGQNQLYNELNLGRREEYDVLDKRRGRDPEMGGKPQRRKNPQEGLYNELQKDKMAEAYSEIGMKGERRRGKGHD

SEQ ID NO: 11085 - protein, 943 aa, synthetic construct
MALPVTALLLPLALLLHAARPSRYLVKRTGEKVFLECVQDMDHENMFWYRQDPGLGLRLIYFSYDVKMKEKGDIPEGYSVSREKKERFSLILESASTNQTSMYLCASSLWGRLAKNIQYFGAGTRLSVLELETTPGERSSLPAFYPGTSGSCSGCGSLSLPLLAGLVAADAVASLLIVGAVFLCARPRRSPAQEDGKVYINMPGRGSTSRVKFSRSADAPAYQQGQNQLYNELNLGRREEYDVLDKRRGRDPEMGGKPQRRKNPQEGLYNELQKDKMAEAYSEIGMKGERRRGKGHDGLYQGLSTATKDTYDALHMQALPPRRAKRSGSGATNFSLLKQAGDVEENPGPMDWIWRILFLVGAATGAHSFEEDQVTQSPEALRLQEGESSSLNCSYTVSGLRGLFWYRQDPGKGPEFLFTLYSAGEEKEKERLKATLTKKESFLHITAPKPEDSATYLCAVQANRGSTLGRLYFGRGTQLTVWPDTRTTPGERSSLPAFYPGTSGSCSGCGSLSLPLLAGLVAADAVASLLIVGAVFLCARPRRSPAQEDGKVYINMPGRGSSRRVKFSRSADAPAYQQGQNQLYNELNLGRREEYDVLDKRRGRDPEMGGKPQRRKNPQEGLYNELQKDKMAEAYSEIGMKGERRRGKGHDGLYQGLSTATKDTYDALHMQALPPRRAKRSGSGVKQTLNFDLLKLAGDVESNPGPGHMALPVTALLLPLALLLHAARPSQFRVSPLDRTWNLGETVELKCQVLLSNPTSGCSWLFQPRGAAASPTFLLYLSQNKPKAAEGLDTQRFSGKRLGDTFVLTLSDFRRENEGYYFCSALSNSIMYFSHFVPVFLPAKPTTTPAPRPPTPAPTIASQPLSLRPEACRPAAGGAVHTRGLDFACDIYIWAPLAGTCGVLLLSLVITLYCNHRNRRRVCKCPRPVVKSGDKPSLSARYV

SEQ ID NO: 11086 - protein, 943 aa, synthetic construct; identical to SEQ ID NO: 11085

SEQ ID NO: 11087 - protein, 1109 aa, synthetic construct
MALPVTALLLPLALLLHAARPSRYLVKRTGEKVFLECVQDMDHENMFWYRQDPGLGLRLIYFSYDVKMKEKGDIPEGYSVSREKKERFSLILESASTNQTSMYLCASSLWGRLAKNIQYFGAGTRLSVLELEGQPKANPTVTLFPPSSEELQANKATLVCLISDFYPGAVTVAWKADGSPVKAGVETTKPSKQSNNKYAASSYLSLTPEQWKSHRSYSCQVTHEGSTVEKTVAPTECSGSTTPGERSSLPAFYPGTSGSCSGCGSLSLPLLAGLVAADAVASLLIVGAVFLCARPRRSPAQEDGKVYINMPGRGSTSRVKFSRSADAPAYQQGQNQLYNELNLGRREEYDVLDKRRGRDPEMGGKPQRRKNPQEGLYNELQKDKMAEAYSEIGMKGERRRGKGHDGLYQGLSTATKDTYDALHMQALPPRRAKRSGSGATNFSLLKQAGDVEENPGPMDWIWRILFLVGAATGAHSFEEDQVTQSPEALRLQEGESSSLNCSYTVSGLRGLFWYRQDPGKGPEFLFTLYSAGEEKEKERLKATLTKKESFLHITAPKPEDSATYLCAVQANRGSTLGRLYFGRGTQLTVWPDTRASTKGPSVFPLAPSSKSTSGGTAALGCLVKDYFPEPVTVSWNSGALTSGVHTFPAVLQSSGLYSLSSVVTVPSSSLGTQTYICNVNHKPSNTKVDKRVEPKSCGTTTPGERSSLPAFYPGTSGSCSGCGSLSLPLLAGLVAADAVASLLIVGAVFLCARPRRSPAQEDGKVYINMPGRGSSRRVKFSRSADAPAYQQGQNQLYNELNLGRREEYDVLDKRRGRDPEMGGKPQRRKNPQEGLYNELQKDKMAEAYSEIGMKGERRRGKGHDGLYQGLSTATKDTYDALHMQALPPRRAKRSGSGVKQTLNFDLLKLAGDVESNPGPGHMATYEVLCEVARKLGTDDREVVLFLLNVFIPQPTLAQLIGALRALKEEGRLTFPLLAECLFRAGRRDLLRDLLHLDPRFLERHLAGTMSYFSPYQLTVLHVDGELCARDIRSLIFLSKDTIGSRSTPQTFLHWVYCMENLDLLGPTDVDALMSMLRSLSRVDLQRQVQTLMGLHLSGPSHSQHYRHTP

SEQ ID NO: 11088 - protein, 1162 aa, synthetic construct
MALPVTALLLPLALLLHAARPSRYLVKRTGEKVFLECVQDMDHENMFWYRQDPGLGLRLIYFSYDVKMKEKGDIPEGYSVSREKKERFSLILESASTNQTSMYLCASSLWGRLAKNIQYFGAGTRLSVLELEGQPKANPTVTLFPPSSEELQANKATLVCLISDFYPGAVTVAWKADGSPVKAGVETTKPSKQSNNKYAASSYLSLTPEQWKSHRSYSCQVTHEGSTVEKTVAPTECSGSTTPGERSSLPAFYPGTSGSCSGCGSLSLPLLAGLVAADAVASLLIVGAVFLCARPRRSPAQEDGKVYINMPGRGSTSRVKFSRSADAPAYQQGQNQLYNELNLGRREEYDVLDKRRGRDPEMGGKPQRRKNPQEGLYNELQKDKMAEAYSEIGMKGERRRGKGHDGLYQGLSTATKDTYDALHMQALPPRRAKRSGSGATNFSLLKQAGDVEENPGPMDWIWRILFLVGAATGAHSFEEDQVTQSPEALRLQEGESSSLNCSYTVSGLRGLFWYRQDPGKGPEFLFTLYSAGEEKEKERLKATLTKKESFLHITAPKPEDSATYLCAVQANRGSTLGRLYFGRGTQLTVWPDTRASTKGPSVFPLAPSSKSTSGGTAALGCLVKDYFPEPVTVSWNSGALTSGVHTFPAVLQSSGLYSLSSVVTVPSSSLGTQTYICNVNHKPSNTKVDKRVEPKSCGTTTPGERSSLPAFYPGTSGSCSGCGSLSLPLLAGLVAADAVASLLIVGAVFLCARPRRSPAQEDGKVYINMPGRGSSRRVKFSRSADAPAYQQGQNQLYNELNLGRREEYDVLDKRRGRDPEMGGKPQRRKNPQEGLYNELQKDKMAEAYSEIGMKGERRRGKGHDGLYQGLSTATKDTYDALHMQALPPRRAKRSGSGVKQTLNFDLLKLAGDVESNPGPGHMSDSKEVPSLPFLRHLLEELDSHEDSLLLFLCHDAAPGCTTVTQALCSLSQQRKLTLAALVEMLYVLQRMDLLKSRFGLSKEGAEQLLGTSFLTRYRKLMVCVGEELDSSELRALRLFACNLNPSLSTALSESSRFVELVLALENVGLVSPSSVSVLADMLRTLRRLDLCQQLVEYEQQEQARYRYCYAASPSLPVRTLRRGHGASEHEQLCMPVQESSDSPELLRTPVQESSSDSPEQTT

SEQ ID NO: 11089 - protein, 1156 aa, synthetic construct
MALPVTALLLPLALLLHAARPSRYLVKRTGEKVFLECVQDMDHENMFWYRQDPGLGLRLIYFSYDVKMKEKGDIPEGYSVSREKKERFSLILESASTNQTSMYLCASSLWGRLAKNIQYFGAGTRLSVLELEGQPKANPTVTLFPPSSEELQANKATLVCLISDFYPGAVTVAWKADGSPVKAGVETTKPSKQSNNKYAASSYLSLTPEQWKSHRSYSCQVTHEGSTVEKTVAPTECSGSTTPGERSSLPAFYPGTSGSCSGCGSLSLPLLAGLVAADAVASLLIVGAVFLCARPRRSPAQEDGKVYINMPGRGSTSRVKFSRSADAPAYQQGQNQLYNELNLGRREEYDVLDKRRGRDPEMGGKPQRRKNPQEGLYNELQKDKMAEAYSEIGMKGERRRGKGHDGLYQGLSTATKDTYDALHMQALPPRRAKRSGSGATNFSLLKQAGDVEENPGPMDWIWRILFLVGAATGAHSFEEDQVTQSPEALRLQEGESSSLNCSYTVSGLRGLFWYRQDPGKGPEFLFTLYSAGEEKEKERLKATLTKKESFLHITAPKPEDSATYLCAVQANRGSTLGRLYFGRGTQLTVWPDTRASTKGPSVFPLAPSSKSTSGGTAALGCLVKDYFPEPVTVSWNSGALTSGVHTFPAVLQSSGLYSLSSVVTVPSSSLGTQTYICNVNHKPSNTKVDKRVEPKSCGTTTPGERSSLPAFYPGTSGSCSGCGSLSLPLLAGLVAADAVASLLIVGAVFLCARPRRSPAQEDGKVYINMPGRGSSRRVKFSRSADAPAYQQGQNQLYNELNLGRREEYDVLDKRRGRDPEMGGKPQRRKNPQEGLYNELQKDKMAEAYSEIGMKGERRRGKGHDGLYQGLSTATKDTYDALHMQALPPRRAKRSGSGVKQTLNFDLLKLAGDVESNPGPGHMALPVTALLLPLALLLHAARPSQFRVSPLDRTWNLGETVELKCQVLLSNPTSGCSWLFQPRGAAASPTFLLYLSQNKPKAAEGLDTQRFSGKRLGDTFVLTLSDFRRENEGYYFCSALSNSIMYFSHFVPVFLPAKPTTTPAPRPPTPAPTIASQPLSLRPEACRPAAGGAVHTRGLDFACDIYIWAPLAGTCGVLLLSLVITLYCNHRNRRRVCKCPRPVVKSGDKPSLSARYV

SEQ ID NO: 11090 - protein, 1293 aa, synthetic construct
MALPVTALLLPLALLLHAARPEVQLVESGGGLVQAGGSLRLSCAASGRTFSMGWFRQAPGKEREFVAAITYSGGSPYYADSVKGRFTISRDNAKNTVYLQMNSLKPEDTAVYYCAANPTYGSDWNAENWGQGTQVTVSSGTGGGGSGGGGSGGGGSEFSRYLVKRTGEKVFLECVQDMDHENMFWYRQDPGLGLRLIYFSYDVKMKEKGDIPEGYSVSREKKERFSLILESASTNQTSMYLCASSLWGRLAKNIQYFGAGTRLSVLELEGQPKANPTVTLFPPSSEELQANKATLVCLISDFYPGAVTVAWKADGSPVKAGVETTKPSKQSNNKYAASSYLSLTPEQWKSHRSYSCQVTHEGSTVEKTVAPTECSGSTTPGERSSLPAFYPGTSGSCSGCGSLSLPLLAGLVAADAVASLLIVGAVFLCARPRRSPAQEDGKVYINMPGRGSTSRVKFSRSADAPAYQQGQNQLYNELNLGRREEYDVLDKRRGRDPEMGGKPQRRKNPQEGLYNELQKDKMAEAYSEIGMKGERRRGKGHDGLYQGLSTATKDTYDALHMQALPPRRAKRSGSGATNFSLLKQAGDVEENPGPMDWIWRILFLVGAATGAHSFEEDQVTQSPEALRLQEGESSSLNCSYTVSGLRGLFWYRQDPGKGPEFLFTLYSAGEEKEKERLKATLTKKESFLHITAPKPEDSATYLCAVQANRGSTLGRLYFGRGTQLTVWPDTRASTKGPSVFPLAPSSKSTSGGTAALGCLVKDYFPEPVTVSWNSGALTSGVHTFPAVLQSSGLYSLSSVVTVPSSSLGTQTYICNVNHKPSNTKVDKRVEPKSCGTTTPGERSSLPAFYPGTSGSCSGCGSLSLPLLAGLVAADAVASLLIVGAVFLCARPRRSPAQEDGKVYINMPGRGSSRRVKFSRSADAPAYQQGQNQLYNELNLGRREEYDVLDKRRGRDPEMGGKPQRRKNPQEGLYNELQKDKMAEAYSEIGMKGERRRGKGHDGLYQGLSTATKDTYDALHMQALPPRRAKRSGSGVKQTLNFDLLKLAGDVESNPGPGHMALPVTALLLPLALLLHAARPSQFRVSPLDRTWNLGETVELKCQVLLSNPTSGCSWLFQPRGAAASPTFLLYLSQNKPKAAEGLDTQRFSGKRLGDTFVLTLSDFRRENEGYYFCSALSNSIMYFSHFVPVFLPAKPTTTPAPRPPTPAPTIASQPLSLRPEACRPAAGGAVHTRGLDFACDIYIWAPLAGTCGVLLLSLVITLYCNHRNRRRVCKCPRPVVKSGDKPSLSARYV

SEQ ID NO: 11091 - protein, 1430 aa, synthetic construct
MALPVTALLLPLALLLHAARPEVQLVESGGGLVQAGGSLRLSCAASGRTFSMGWFRQAPGKEREFVAAITYSGGSPYYADSVKGRFTISRDNAKNTVYLQMNSLKPEDTAVYYCAANPTYGSDWNAENWGQGTQVTVSSGTGGGGSGGGGSGGGGSEFSRYLVKRTGEKVFLECVQDMDHENMFWYRQDPGLGLRLIYFSYDVKMKEKGDIPEGYSVSREKKERFSLILESASTNQTSMYLCASSLWGRLAKNIQYFGAGTRLSVLELEGQPKANPTVTLFPPSSEELQANKATLVCLISDFYPGAVTVAWKADGSPVKAGVETTKPSKQSNNKYAASSYLSLTPEQWKSHRSYSCQVTHEGSTVEKTVAPTECSGSTTPGERSSLPAFYPGTSGSCSGCGSLSLPLLAGLVAADAVASLLIVGAVFLCARPRRSPAQEDGKVYINMPGRGSTSRVKFSRSADAPAYQQGQNQLYNELNLGRREEYDVLDKRRGRDPEMGGKPQRRKNPQEGLYNELQKDKMAEAYSEIGMKGERRRGKGHDGLYQGLSTATKDTYDALHMQALPPRRAKRSGSGATNFSLLKQAGDVEENPGPMDWIWRILFLVGAATGAHSGPEVQLVESGGGLVQAGGSLRLSCAASGRTFTMGWFRQAPGKEREFVAAISLSPTLAYYADSVKGRFTISRDNAKNTVVLQMNSLKPEDTALYYCAADRKSVMSIRPDYWGQGTQVTVSSGSGGGGSGGGGSGGGGSFEEDQVTQSPEALRLQEGESSSLNCSYTVSGLRGLFWYRQDPGKGPEFLFTLYSAGEEKEKERLKATLTKKESFLHITAPKPEDSATYLCAVQANRGSTLGRLYFGRGTQLTVWPDTRASTKGPSVFPLAPSSKSTSGGTAALGCLVKDYFPEPVTVSWNSGALTSGVHTFPAVLQSSGLYSLSSVVTVPSSSLGTQTYICNVNHKPSNTKVDKRVEPKSCGTTTPGERSSLPAFYPGTSGSCSGCGSLSLPLLAGLVAADAVASLLIVGAVFLCARPRRSPAQEDGKVYINMPGRGSSRRVKFSRSADAPAYQQGQNQLYNELNLGRREEYDVLDKRRGRDPEMGGKPQRRKNPQEGLYNELQKDKMAEAYSEIGMKGERRRGKGHDGLYQGLSTATKDTYDALHMQALPPRRAKRSGSGVKQTLNFDLLKLAGDVESNPGPGHMALPVTALLLPLALLLHAARPSQFRVSPLDRTWNLGETVELKCQVLLSNPTSGCSWLFQPRGAAASPTFLLYLSQNKPKAAEGLDTQRFSGKRLGDTFVLTLSDFRRENEGYYFCSALSNSIMYFSHFVPVFLPAKPTTTPAPRPPTPAPTIASQPLSLRPEACRPAAGGAVHTRGLDFACDIYIWAPLAGTCGVLLLSLVITLYCNHRNRRRVCKCPRPVVKSGDKPSLSARYV

SEQ ID NO: 11092 - protein, 814 aa, synthetic construct
MALPVTALLLPLALLLHAARPEFSRYLVKRTGEKVFLECVQDMDHENMFWYRQDPGLGLRLIYFSYDVKMKEKGDIPEGYSVSREKKERFSLILESASTNQTSMYLCASSLWGRLAKNIQYFGAGTRLSVLELEDLKNVFPPEVAVFEPSEAEISHTQKATLVCLATGFYPDHVELSWWVNGKEVHSGVSTDPQPLKEQPALNDSRYCLSSRLRVSATFWQNPRNHFRCQVQFYGLSENDEWTQDRAKPVTQIVSAEAWGRADCGSQSFGLLDPKLCYLLDGILFIYGVILTALFLRVKFSRSADAPAYQQGQNQLYNELNLGRREEYDVLDKRRGRDPEMGGKPQRRKNPQEGLYNELQKDKMAEAYSEIGMKGERRRGKGHDGLYQGLSTATKDTYDALHMQALPPRRAKRSGSGATNFSLLKQAGDVEENPGPTSMDWIWRILFLVGAATGAHSFEEDQVTQSPEALRLQEGESSSLNCSYTVSGLRGLFWYRQDPGKGPEFLFTLYSAGEEKEKERLKATLTKKESFLHITAPKPEDSATYLCAVQANRGSTLGRLYFGRGTQLTVWPDTRIQNPDPAVYQLRDSKSSDKSVCLFTDFDSQTNVSQSKDSDVYITDKTVLDMRSMDFKSNSAVAWSNKSDFACANAFNNSIIPEDTFFPSPESSCGTQSFGLLDPKLCYLLDGILFIYGVILTALFLRVKFSRSADAPAYQQGQNQLYNELNLGRREEYDVLDKRRGRDPEMGGKPQRRKNPQEGLYNELQKDKMAEAYSEIGMKGERRRGKGHDGLYQGLSTATKDTYDALHMQALPPR

SEQ ID NO: 11093 - protein, 856 aa, synthetic construct
MALPVTALLLPLALLLHAARPEFSRYLVKRTGEKVFLECVQDMDHENMFWYRQDPGLGLRLIYFSYDVKMKEKGDIPEGYSVSREKKERFSLILESASTNQTSMYLCASSLWGRLAKNIQYFGAGTRLSVLELEDLKNVFPPEVAVFEPSEAEISHTQKATLVCLATGFYPDHVELSWWVNGKEVHSGVSTDPQPLKEQPALNDSRYCLSSRLRVSATFWQNPRNHFRCQVQFYGLSENDEWTQDRAKPVTQIVSAEAWGRADCGSQSFGLLDPKLCYLLDGILFIYGVILTALFLRVKFSRSADAPAYQQGQNQLYNELNLGRREEYDVLDKRRGRDPEMGGKPQRRKNPQEGLYNELQKDKMAEAYSEIGMKGERRRGKGHDGLYQGLSTATKDTYDALHMQALPPRRAKRSGSGATNFSLLKQAGDVEENPGPTSMDWIWRILFLVGAATGAHSFEEDQVTQSPEALRLQEGESSSLNCSYTVSGLRGLFWYRQDPGKGPEFLFTLYSAGEEKEKERLKATLTKKESFLHITAPKPEDSATYLCAVQANRGSTLGRLYFGRGTQLTVWPDTRIQNPDPAVYQLRDSKSSDKSVCLFTDFDSQTNVSQSKDSDVYITDKTVLDMRSMDFKSNSAVAWSNKSDFACANAFNNSIIPEDTFFPSPESSCGTQSFGLLDPKLCYLLDGILFIYGVILTALFLKRGRKKLLYIFKQPFMRPVQTTQEEDGCSCRFPEEEEGGCELRVKFSRSADAPAYQQGQNQLYNELNLGRREEYDVLDKRRGRDPEMGGKPQRRKNPQEGLYNELQKDKMAEAYSEIGMKGERRRGKGHDGLYQGLSTATKDTYDALHMQALPPR

SEQ ID NO: 11094 - protein, 855 aa, synthetic construct
MALPVTALLLPLALLLHAARPEFSRYLVKRTGEKVFLECVQDMDHENMFWYRQDPGLGLRLIYFSYDVKMKEKGDIPEGYSVSREKKERFSLILESASTNQTSMYLCASSLWGRLAKNIQYFGAGTRLSVLELEDLKNVFPPEVAVFEPSEAEISHTQKATLVCLATGFYPDHVELSWWVNGKEVHSGVSTDPQPLKEQPALNDSRYCLSSRLRVSATFWQNPRNHFRCQVQFYGLSENDEWTQDRAKPVTQIVSAEAWGRADCGSQSFGLLDPKLCYLLDGILFIYGVILTALFLRVKFSRSADAPAYQQGQNQLYNELNLGRREEYDVLDKRRGRDPEMGGKPQRRKNPQEGLYNELQKDKMAEAYSEIGMKGERRRGKGHDGLYQGLSTATKDTYDALHMQALPPRRAKRSGSGATNFSLLKQAGDVEENPGPTSMDWIWRILFLVGAATGAHSFEEDQVTQSPEALRLQEGESSSLNCSYTVSGLRGLFWYRQDPGKGPEFLFTLYSAGEEKEKERLKATLTKKESFLHITAPKPEDSATYLCAVQANRGSTLGRLYFGRGTQLTVWPDTRIQNPDPAVYQLRDSKSSDKSVCLFTDFDSQTNVSQSKDSDVYITDKTVLDMRSMDFKSNSAVAWSNKSDFACANAFNNSIIPEDTFFPSPESSCGTQSFGLLDPKLCYLLDGILFIYGVILTALFLRSKRSRLLHSDYMNMTPRRPGPTRKHYQPYAPPRDFAAYRSRVKFSRSADAPAYQQGQNQLYNELNLGRREEYDVLDKRRGRDPEMGGKPQRRKNPQEGLYNELQKDKMAEAYSEIGMKGERRRGKGHDGLYQGLSTATKDTYDALHMQALPPR

SEQ ID NO: 11095 - protein, 850 aa, synthetic construct
MALPVTALLLPLALLLHAARPEFSRYLVKRTGEKVFLECVQDMDHENMFWYRQDPGLGLRLIYFSYDVKMKEKGDIPEGYSVSREKKERFSLILESASTNQTSMYLCASSLWGRLAKNIQYFGAGTRLSVLELEDLKNVFPPEVAVFEPSEAEISHTQKATLVCLATGFYPDHVELSWWVNGKEVHSGVSTDPQPLKEQPALNDSRYCLSSRLRVSATFWQNPRNHFRCQVQFYGLSENDEWTQDRAKPVTQIVSAEAWGRADCGSQSFGLLDPKLCYLLDGILFIYGVILTALFLRVKFSRSADAPAYQQGQNQLYNELNLGRREEYDVLDKRRGRDPEMGGKPQRRKNPQEGLYNELQKDKMAEAYSEIGMKGERRRGKGHDGLYQGLSTATKDTYDALHMQALPPRRAKRSGSGATNFSLLKQAGDVEENPGPTSMDWIWRILFLVGAATGAHSFEEDQVTQSPEALRLQEGESSSLNCSYTVSGLRGLFWYRQDPGKGPEFLFTLYSAGEEKEKERLKATLTKKESFLHITAPKPEDSATYLCAVQANRGSTLGRLYFGRGTQLTVWPDTRIQNPDPAVYQLRDSKSSDKSVCLFTDFDSQTNVSQSKDSDVYITDKTVLDMRSMDFKSNSAVAWSNKSDFACANAFNNSIIPEDTFFPSPESSCGTQSFGLLDPKLCYLLDGILFIYGVILTALFLRDQRLPPDAHKPPGGGSFRTPIQEEQADAHSTLAKIRVKFSRSADAPAYQQGQNQLYNELNLGRREEYDVLDKRRGRDPEMGGKPQRRKNPQEGLYNELQKDKMAEAYSEIGMKGERRRGKGHDGLYQGLSTATKDTYDALHMQALPPR

SEQ ID NO: 11096 - protein, 934 aa, synthetic construct
MALPVTALLLPLALLLHAARPEFSRYLVKRTGEKVFLECVQDMDHENMFWYRQDPGLGLRLIYFSYDVKMKEKGDIPEGYSVSREKKERFSLILESASTNQTSMYLCASSLWGRLAKNIQYFGAGTRLSVLELEDLKNVFPPEVAVFEPSEAEISHTQKATLVCLATGFYPDHVELSWWVNGKEVHSGVSTDPQPLKEQPALNDSRYCLSSRLRVSATFWQNPRNHFRCQVQFYGLSENDEWTQDRAKPVTQIVSAEAWGRADCGSQSFGLLDPKLCYLLDGILFIYGVILTALFLRVKFSRSADAPAYQQGQNQLYNELNLGRREEYDVLDKRRGRDPEMGGKPQRRKNPQEGLYNELQKDKMAEAYSEIGMKGERRRGKGHDGLYQGLSTATKDTYDALHMQALPPRRAKRSGSGATNFSLLKQAGDVEENPGPTSMDWIWRILFLVGAATGAHSFEEDQVTQSPEALRLQEGESSSLNCSYTVSGLRGLFWYRQDPGKGPEFLFTLYSAGEEKEKERLKATLTKKESFLHITAPKPEDSATYLCAVQANRGSTLGRLYFGRGTQLTVWPDTRIQNPDPAVYQLRDSKSSDKSVCLFTDFDSQTNVSQSKDSDVYITDKTVLDMRSMDFKSNSAVAWSNKSDFACANAFNNSIIPEDTFFPSPESSCGTQSFGLLDPKLCYLLDGILFIYGVILTALFLWRRKRKEKQSETSPKEFLTIYEDVKDLKTRRNHEQEQTFPGGGSTIYSMIQSQSSAPTSQEPAYTLYSLIQPSRKSGSRKRNHSPSFNSTIYEVIGKSQPKAQNPARLSRKELENFDVYSRVKFSRSADAPAYQQGQNQLYNELNLGRREEYDVLDKRRGRDPEMGGKPQRRKNPQEGLYNELQKDKMAEAYSEIGMKGERRRGKGHDGLYQGLSTATKDTYDALHMQALPPR

SEQ ID NO: 11097 - protein, 897 aa, synthetic construct
MALPVTALLLPLALLLHAARPEFSRYLVKRTGEKVFLECVQDMDHENMFWYRQDPGLGLRLIYFSYDVKMKEKGDIPEGYSVSREKKERFSLILESASTNQTSMYLCASSLWGRLAKNIQYFGAGTRLSVLELEDLKNVFPPEVAVFEPSEAEISHTQKATLVCLATGFYPDHVELSWWVNGKEVHSGVSTDPQPLKEQPALNDSRYCLSSRLRVSATFWQNPRNHFRCQVQFYGLSENDEWTQDRAKPVTQIVSAEAWGRADCGSQSFGLLDPKLCYLLDGILFIYGVILTALFLRSKRSRLLHSDYMNMTPRRPGPTRKHYQPYAPPRDFAAYRSRVKFSRSADAPAYQQGQNQLYNELNLGRREEYDVLDKRRGRDPEMGGKPQRRKNPQEGLYNELQKDKMAEAYSEIGMKGERRRGKGHDGLYQGLSTATKDTYDALHMQALPPRRAKRSGSGATNFSLLKQAGDVEENPGPTSMDWIWRILFLVGAATGAHSFEEDQVTQSPEALRLQEGESSSLNCSYTVSGLRGLFWYRQDPGKGPEFLFTLYSAGEEKEKERLKATLTKKESFLHITAPKPEDSATYLCAVQANRGSTLGRLYFGRGTQLTVWPDTRIQNPDPAVYQLRDSKSSDKSVCLFTDFDSQTNVSQSKDSDVYITDKTVLDMRSMDFKSNSAVAWSNKSDFACANAFNNSIIPEDTFFPSPESSCGTQSFGLLDPKLCYLLDGILFIYGVILTALFLKRGRKKLLYIFKQPFMRPVQTTQEEDGCSCRFPEEEEGGCELRVKFSRSADAPAYQQGQNQLYNELNLGRREEYDVLDKRRGRDPEMGGKPQRRKNPQEGLYNELQKDKMAEAYSEIGMKGERRRGKGHDGLYQGLSTATKDTYDALHMQALPPR

SEQ ID NO: 11098 - protein, 896 aa, synthetic construct
MALPVTALLLPLALLLHAARPEFSRYLVKRTGEKVFLECVQDMDHENMFWYRQDPGLGLRLIYFSYDVKMKEKGDIPEGYSVSREKKERFSLILESASTNQTSMYLCASSLWGRLAKNIQYFGAGTRLSVLELEDLKNVFPPEVAVFEPSEAEISHTQKATLVCLATGFYPDHVELSWWVNGKEVHSGVSTDPQPLKEQPALNDSRYCLSSRLRVSATFWQNPRNHFRCQVQFYGLSENDEWTQDRAKPVTQIVSAEAWGRADCGSQSFGLLDPKLCYLLDGILFIYGVILTALFLRSKRSRLLHSDYMNMTPRRPGPTRKHYQPYAPPRDFAAYRSRVKFSRSADAPAYQQGQNQLYNELNLGRREEYDVLDKRRGRDPEMGGKPQRRKNPQEGLYNELQKDKMAEAYSEIGMKGERRRGKGHDGLYQGLSTATKDTYDALHMQALPPRRAKRSGSGATNFSLLKQAGDVEENPGPTSMDWIWRILFLVGAATGAHSFEEDQVTQSPEALRLQEGESSSLNCSYTVSGLRGLFWYRQDPGKGPEFLFTLYSAGEEKEKERLKATLTKKESFLHITAPKPEDSATYLCAVQANRGSTLGRLYFGRGTQLTVWPDTRIQNPDPAVYQLRDSKSSDKSVCLFTDFDSQTNVSQSKDSDVYITDKTVLDMRSMDFKSNSAVAWSNKSDFACANAFNNSIIPEDTFFPSPESSCGTQSFGLLDPKLCYLLDGILFIYGVILTALFLRSKRSRLLHSDYMNMTPRRPGPTRKHYQPYAPPRDFAAYRSRVKFSRSADAPAYQQGQNQLYNELNLGRREEYDVLDKRRGRDPEMGGKPQRRKNPQEGLYNELQKDKMAEAYSEIGMKGERRRGKGHDGLYQGLSTATKDTYDALHMQALPPR

SEQ ID NO: 11099 - protein, 897 aa, synthetic construct; identical to SEQ ID NO: 11097

SEQ ID NO: 11100 - protein, 814 aa, synthetic construct
MALPVTALLLPLALLLHAARPEFSRYLVKRTGEKVFLECVQDMDHENMFWYRQDPGLGLRLIYFSYDVKMKEKGDIPEGYSVSREKKERFSLILESASTNQTSMYLCASSLWGRLAKNIQYFGAGTRLSVLELEDLKNVFPPEVAVFEPSEAEISHTQKATLVCLATGFYPDHVELSWWVNGKEVHSGVSTDPQPLKEQPALNDSRYCLSSRLRVSATFWQNPRNHFRCQVQFYGLSENDEWTQDRAKPVTQIVSAEAWGRADCGSQSFGLLDPKLCYLLDGILFIYGVILTALFLRVKFSRSADAPAYQQGQNQLYNELNLGRREEYDVLDKRRGRDPEMGGKPQRRKNPQEGLFNELQKDKMAEAFSEIGMKGERRRGKGHDGLFQGLSTATKDTFDALHMQALPPRRAKRSGSGATNFSLLKQAGDVEENPGPTSMDWIWRILFLVGAATGAHSFEEDQVTQSPEALRLQEGESSSLNCSYTVSGLRGLFWYRQDPGKGPEFLFTLYSAGEEKEKERLKATLTKKESFLHITAPKPEDSATYLCAVQANRGSTLGRLYFGRGTQLTVWPDTRIQNPDPAVYQLRDSKSSDKSVCLFTDFDSQTNVSQSKDSDVYITDKTVLDMRSMDFKSNSAVAWSNKSDFACANAFNNSIIPEDTFFPSPESSCGTQSFGLLDPKLCYLLDGILFIYGVILTALFLRVKFSRSADAPAYQQGQNQLYNELNLGRREEYDVLDKRRGRDPEMGGKPQRRKNPQEGLYNELQKDKMAEAYSEIGMKGERRRGKGHDGLYQGLSTATKDTYDALHMQALPPR

SEQ ID NO: 11101 - protein, 814 aa, synthetic construct; identical to SEQ ID NO: 11100

SEQ ID NO: 11102 - protein, 856 aa, synthetic construct
MALPVTALLLPLALLLHAARPEFSRYLVKRTGEKVFLECVQDMDHENMFWYRQDPGLGLRLIYFSYDVKMKEKGDIPEGYSVSREKKERFSLILESASTNQTSMYLCASSLWGRLAKNIQYFGAGTRLSVLELEDLKNVFPPEVAVFEPSEAEISHTQKATLVCLATGFYPDHVELSWWVNGKEVHSGVSTDPQPLKEQPALNDSRYCLSSRLRVSATFWQNPRNHFRCQVQFYGLSENDEWTQDRAKPVTQIVSAEAWGRADCGSQSFGLLDPKLCYLLDGILFIYGVILTALFLRVKFSRSADAPAYQQGQNQLYNELNLGRREEYDVLDKRRGRDPEMGGKPQRRKNPQEGLFNELQKDKMAEAFSEIGMKGERRRGKGHDGLFQGLSTATKDTFDALHMQALPPRRAKRSGSGATNFSLLKQAGDVEENPGPTSMDWIWRILFLVGAATGAHSFEEDQVTQSPEALRLQEGESSSLNCSYTVSGLRGLFWYRQDPGKGPEFLFTLYSAGEEKEKERLKATLTKKESFLHITAPKPEDSATYLCAVQANRGSTLGRLYFGRGTQLTVWPDTRIQNPDPAVYQLRDSKSSDKSVCLFTDFDSQTNVSQSKDSDVYITDKTVLDMRSMDFKSNSAVAWSNKSDFACANAFNNSIIPEDTFFPSPESSCGTQSFGLLDPKLCYLLDGILFIYGVILTALFLKRGRKKLLYIFKQPFMRPVQTTQEEDGCSCRFPEEEEGGCELRVKFSRSADAPAYQQGQNQLYNELNLGRREEYDVLDKRRGRDPEMGGKPQRRKNPQEGLYNELQKDKMAEAYSEIGMKGERRRGKGHDGLYQGLSTATKDTYDALHMQALPPR

SEQ ID NO: 11103 - protein, 855 aa, synthetic construct
MALPVTALLLPLALLLHAARPEFSRYLVKRTGEKVFLECVQDMDHENMFWYRQDPGLGLRLIYFSYDVKMKEKGDIPEGYSVSREKKERFSLILESASTNQTSMYLCASSLWGRLAKNIQYFGAGTRLSVLELEDLKNVFPPEVAVFEPSEAEISHTQKATLVCLATGFYPDHVELSWWVNGKEVHSGVSTDPQPLKEQPALNDSRYCLSSRLRVSATFWQNPRNHFRCQVQFYGLSENDEWTQDRAKPVTQIVSAEAWGRADCGSQSFGLLDPKLCYLLDGILFIYGVILTALFLRVKFSRSADAPAYQQGQNQLYNELNLGRREEYDVLDKRRGRDPEMGGKPQRRKNPQEGLFNELQKDKMAEAFSEIGMKGERRRGKGHDGLFQGLSTATKDTFDALHMQALPPRRAKRSGSGATNFSLLKQAGDVEENPGPTSMDWIWRILFLVGAATGAHSFEEDQVTQSPEALRLQEGESSSLNCSYTVSGLRGLFWYRQDPGKGPEFLFTLYSAGEEKEKERLKATLTKKESFLHITAPKPEDSATYLCAVQANRGSTLGRLYFGRGTQLTVWPDTRIQNPDPAVYQLRDSKSSDKSVCLFTDFDSQTNVSQSKDSDVYITDKTVLDMRSMDFKSNSAVAWSNKSDFACANAFNNSIIPEDTFFPSPESSCGTQSFGLLDPKLCYLLDGILFIYGVILTALFLRSKRSRLLHSDYMNMTPRRPGPTRKHYQPYAPPRDFAAYRSRVKFSRSADAPAYQQGQNQLYNELNLGRREEYDVLDKRRGRDPEMGGKPQRRKNPQEGLYNELQKDKMAEAYSEIGMKGERRRGKGHDGLYQGLSTATKDTYDALHMQALPPR

SEQ ID NO: 11104 - protein, 850 aa, synthetic construct
MALPVTALLLPLALLLHAARPEFSRYLVKRTGEKVFLECVQDMDHENMFWYRQDPGLGLRLIYFSYDVKMKEKGDIPEGYSVSREKKERFSLILESASTNQTSMYLCASSLWGRLAKNIQYFGAGTRLSVLELEDLKNVFPPEVAVFEPSEAEISHTQKATLVCLATGFYPDHVELSWWVNGKEVHSGVSTDPQPLKEQPALNDSRYCLSSRLRVSATFWQNPRNHFRCQVQFYGLSENDEWTQDRAKPVTQIVSAEAWGRADCGSQSFGLLDPKLCYLLDGILFIYGVILTALFLRVKFSRSADAPAYQQGQNQLYNELNLGRREEYDVLDKRRGRDPEMGGKPQRRKNPQEGLFNELQKDKMAEAFSEIGMKGERRRGKGHDGLFQGLSTATKDTFDALHMQALPPRRAKRSGSGATNFSLLKQAGDVEENPGPTSMDWIWRILFLVGAATGAHSFEEDQVTQSPEALRLQEGESSSLNCSYTVSGLRGLFWYRQDPGKGPEFLFTLYSAGEEKEKERLKATLTKKESFLHITAPKPEDSATYLCAVQANRGSTLGRLYFGRGTQLTVWPDTRIQNPDPAVYQLRDSKSSDKSVCLFTDFDSQTNVSQSKDSDVYITDKTVLDMRSMDFKSNSAVAWSNKSDFACANAFNNSIIPEDTFFPSPESSCGTQSFGLLDPKLCYLLDGILFIYGVILTALFLRDQRLPPDAHKPPGGGSFRTPIQEEQADAHSTLAKIRVKFSRSADAPAYQQGQNQLYNELNLGRREEYDVLDKRRGRDPEMGGKPQRRKNPQEGLYNELQKDKMAEAYSEIGMKGERRRGKGHDGLYQGLSTATKDTYDALHMQALPPR

SEQ ID NO: 11105 - protein, 934 aa, synthetic construct
MALPVTALLLPLALLLHAARPEFSRYLVKRTGEKVFLECVQDMDHENMFWYRQDPGLGLRLIYFSYDVKMKEKGDIPEGYSVSREKKERFSLILESASTNQTSMYLCASSLWGRLAKNIQYFGAGTRLSVLELEDLKNVFPPEVAVFEPSEAEISHTQKATLVCLATGFYPDHVELSWWVNGKEVHSGVSTDPQPLKEQPALNDSRYCLSSRLRVSATFWQNPRNHFRCQVQFYGLSENDEWTQDRAKPVTQIVSAEAWGRADCGSQSFGLLDPKLCYLLDGILFIYGVILTALFLRVKFSRSADAPAYQQGQNQLYNELNLGRREEYDVLDKRRGRDPEMGGKPQRRKNPQEGLFNELQKDKMAEAFSEIGMKGERRRGKGHDGLFQGLSTATKDTFDALHMQALPPRRAKRSGSGATNFSLLKQAGDVEENPGPTSMDWIWRILFLVGAATGAHSFEEDQVTQSPEALRLQEGESSSLNCSYTVSGLRGLFWYRQDPGKGPEFLFTLYSAGEEKEKERLKATLTKKESFLHITAPKPEDSATYLCAVQANRGSTLGRLYFGRGTQLTVWPDTRIQNPDPAVYQLRDSKSSDKSVCLFTDFDSQTNVSQSKDSDVYITDKTVLDMRSMDFKSNSAVAWSNKSDFACANAFNNSIIPEDTFFPSPESSCGTQSFGLLDPKLCYLLDGILFIYGVILTALFLWRRKRKEKQSETSPKEFLTIYEDVKDLKTRRNHEQEQTFPGGGSTIYSMIQSQSSAPTSQEPAYTLYSLIQPSRKSGSRKRNHSPSFNSTIYEVIGKSQPKAQNPARLSRKELENFDVYSRVKFSRSADAPAYQQGQNQLYNELNLGRREEYDVLDKRRGRDPEMGGKPQRRKNPQEGLYNELQKDKMAEAYSEIGMKGERRRGKGHDGLYQGLSTATKDTYDALHMQALPPR

SEQ ID NO: 11106 - protein, 855 aa, synthetic construct; identical to SEQ ID NO: 11103

SEQ ID NO: 11107 - protein, 856 aa, synthetic construct; identical to SEQ ID NO: 11102

SEQ ID NO: 11108 - protein, 814 aa, synthetic construct
MALPVTALLLPLALLLHAARPEFSRYLVKRTGEKVFLECVQDMDHENMFWYRQDPGLGLRLIYFSYDVKMKEKGDIPEGYSVSREKKERFSLILESASTNQTSMYLCASSLWGRLAKNIQYFGAGTRLSVLELEDLKNVFPPEVAVFEPSEAEISHTQKATLVCLATGFYPDHVELSWWVNGKEVHSGVSTDPQPLKEQPALNDSRYCLSSRLRVSATFWQNPRNHFRCQVQFYGLSENDEWTQDRAKPVTQIVSAEAWGRADCGSQSFGLLDPKLCYLLDGILFIYGVILTALFLRVKFSRSADAPAYQQGQNQLYNELNLGRREEYDVLDKRRGRDPEMGGKPQRRKNPQEGLFNELQKDKMAEAFSEIGMKGERRRGKGHDGLFQGLSTATKDTFDALHMQALPPRRAKRSGSGATNFSLLKQAGDVEENPGPTSMDWIWRILFLVGAATGAHSFEEDQVTQSPEALRLQEGESSSLNCSYTVSGLRGLFWYRQDPGKGPEFLFTLYSAGEEKEKERLKATLTKKESFLHITAPKPEDSATYLCAVQANRGSTLGRLYFGRGTQLTVWPDTRIQNPDPAVYQLRDSKSSDKSVCLFTDFDSQTNVSQSKDSDVYITDKTVLDMRSMDFKSNSAVAWSNKSDFACANAFNNSIIPEDTFFPSPESSCGTQSFGLLDPKLSYLLDGILFIYGVILTALFLRVKFSRSADAPAYQQGQNQLYNELNLGRREEYDVLDKRRGRDPEMGGKPQRRKNPQEGLYNELQKDKMAEAYSEIGMKGERRRGKGHDGLYQGLSTATKDTYDALHMQALPPR

SEQ ID NO: 11109 - protein, 814 aa, synthetic construct; identical to SEQ ID NO: 11108

SEQ ID NO: 11110 - protein, 814 aa, synthetic construct
MALPVTALLLPLALLLHAARPEFSRYLVKRTGEKVFLECVQDMDHENMFWYRQDPGLGLRLIYFSYDVKMKEKGDIPEGYSVSREKKERFSLILESASTNQTSMYLCASSLWGRLAKNIQYFGAGTRLSVLELEDLKNVFPPEVAVFEPSEAEISHTQKATLVCLATGFYPDHVELSWWVNGKEVHSGVSTDPQPLKEQPALNDSRYCLSSRLRVSATFWQNPRNHFRCQVQFYGLSENDEWTQDRAKPVTQIVSAEAWGRADCGSQSFGLLDPKLSYLLDGILFIYGVILTALFLRVKFSRSADAPAYQQGQNQLYNELNLGRREEYDVLDKRRGRDPEMGGKPQRRKNPQEGLYNELQKDKMAEAYSEIGMKGERRRGKGHDGLYQGLSTATKDTYDALHMQALPPRRAKRSGSGATNFSLLKQAGDVEENPGPTSMDWIWRILFLVGAATGAHSFEEDQVTQSPEALRLQEGESSSLNCSYTVSGLRGLFWYRQDPGKGPEFLFTLYSAGEEKEKERLKATLTKKESFLHITAPKPEDSATYLCAVQANRGSTLGRLYFGRGTQLTVWPDTRIQNPDPAVYQLRDSKSSDKSVCLFTDFDSQTNVSQSKDSDVYITDKTVLDMRSMDFKSNSAVAWSNKSDFACANAFNNSIIPEDTFFPSPESSCGTQSFGLLDPKLSYLLDGILFIYGVILTALFLRVKFSRSADAPAYQQGQNQLYNELNLGRREEYDVLDKRRGRDPEMGGKPQRRKNPQEGLYNELQKDKMAEAYSEIGMKGERRRGKGHDGLYQGLSTATKDTYDALHMQALPPR

SEQ ID NO: 11111 - protein, 718 aa, synthetic construct
MALPVTALLLPLALLLHAARPEFSRYLVKRTGEKVFLECVQDMDHENMFWYRQDPGLGLRLIYFSYDVKMKEKGDIPEGYSVSREKKERFSLILESASTNQTSMYLCASSLWGRLAKNIQYFGAGTRLSVLELEDLKNVFPPEVAVFEPSEAEISHTQKATLVCLATGFYPDHVELSWWVNGKEVHSGVSTDPQPLKEQPALNDSRYCLSSRLRVSATFWQNPRNHFRCQVQFYGLSENDEWTQDRAKPVTQIVSAEAWGRADCGSTTPGERSSLPAFYPGTSGSCSGCGSLSLPLLAGLVAADAVASLLIVGAVFLCARPRRSPAQEDGKVYINMPGRGRAKRSGSGATNFSLLKQAGDVEENPGPTSMDWIWRILFLVGAATGAHSFEEDQVTQSPEALRLQEGESSSLNCSYTVSGLRGLFWYRQDPGKGPEFLFTLYSAGEEKEKERLKATLTKKESFLHITAPKPEDSATYLCAVQANRGSTLGRLYFGRGTQLTVWPDTRIQNPDPAVYQLRDSKSSDKSVCLFTDFDSQTNVSQSKDSDVYITDKTVLDMRSMDFKSNSAVAWSNKSDFACANAFNNSIIPEDTFFPSPESSCGTTTPGERSSLPAFYPGTSGSCSGCGSLSLPLLAGLVAADAVASLLIVGAVFKRGRKKLLYIFKQPFMRPVQTTQEEDGCSCRFPEEEEGGCELLCARPRRSPAQEDGKVYINMPGRG

SEQ ID NO: 11112 - protein, 717 aa, synthetic construct
MALPVTALLLPLALLLHAARPEFSRYLVKRTGEKVFLECVQDMDHENMFWYRQDPGLGLRLIYFSYDVKMKEKGDIPEGYSVSREKKERFSLILESASTNQTSMYLCASSLWGRLAKNIQYFGAGTRLSVLELEDLKNVFPPEVAVFEPSEAEISHTQKATLVCLATGFYPDHVELSWWVNGKEVHSGVSTDPQPLKEQPALNDSRYCLSSRLRVSATFWQNPRNHFRCQVQFYGLSENDEWTQDRAKPVTQIVSAEAWGRADCGSTTPGERSSLPAFYPGTSGSCSGCGSLSLPLLAGLVAADAVASLLIVGAVFLCARPRRSPAQEDGKVYINMPGRGRAKRSGSGATNFSLLKQAGDVEENPGPTSMDWIWRILFLVGAATGAHSFEEDQVTQSPEALRLQEGESSSLNCSYTVSGLRGLFWYRQDPGKGPEFLFTLYSAGEEKEKERLKATLTKKESFLHITAPKPEDSATYLCAVQANRGSTLGRLYFGRGTQLTVWPDTRIQNPDPAVYQLRDSKSSDKSVCLFTDFDSQTNVSQSKDSDVYITDKTVLDMRSMDFKSNSAVAWSNKSDFACANAFNNSIIPEDTFFPSPESSCGTTTPGERSSLPAFYPGTSGSCSGCGSLSLPLLAGLVAADAVASLLIVGAVFRSKRSRLLHSDYMNMTPRRPGPTRKHYQPYAPPRDFAAYRSLCARPRRSPAQEDGKVYINMPGRG

SEQ ID NO: 11113 - protein, 712 aa, synthetic construct
MALPVTALLLPLALLLHAARPEFSRYLVKRTGEKVFLECVQDMDHENMFWYRQDPGLGLRLIYFSYDVKMKEKGDIPEGYSVSREKKERFSLILESASTNQTSMYLCASSLWGRLAKNIQYFGAGTRLSVLELEDLKNVFPPEVAVFEPSEAEISHTQKATLVCLATGFYPDHVELSWWVNGKEVHSGVSTDPQPLKEQPALNDSRYCLSSRLRVSATFWQNPRNHFRCQVQFYGLSENDEWTQDRAKPVTQIVSAEAWGRADCGSTTPGERSSLPAFYPGTSGSCSGCGSLSLPLLAGLVAADAVASLLIVGAVFLCARPRRSPAQEDGKVYINMPGRGRAKRSGSGATNFSLLKQAGDVEENPGPTSMDWIWRILFLVGAATGAHSFEEDQVTQSPEALRLQEGESSSLNCSYTVSGLRGLFWYRQDPGKGPEFLFTLYSAGEEKEKERLKATLTKKESFLHITAPKPEDSATYLCAVQANRGSTLGRLYFGRGTQLTVWPDTRIQNPDPAVYQLRDSKSSDKSVCLFTDFDSQTNVSQSKDSDVYITDKTVLDMRSMDFKSNSAVAWSNKSDFACANAFNNSIIPEDTFFPSPESSCGTTTPGERSSLPAFYPGTSGSCSGCGSLSLPLLAGLVAADAVASLLIVGAVFRDQRLPPDAHKPPGGGSFRTPIQEEQADAHSTLAKILCARPRRSPAQEDGKVYINMPGRG

SEQ ID NO: 11114 - protein, 796 aa, synthetic construct
MALPVTALLLPLALLLHAARPEFSRYLVKRTGEKVFLECVQDMDHENMFWYRQDPGLGLRLIYFSYDVKMKEKGDIPEGYSVSREKKERFSLILESASTNQTSMYLCASSLWGRLAKNIQYFGAGTRLSVLELEDLKNVFPPEVAVFEPSEAEISHTQKATLVCLATGFYPDHVELSWWVNGKEVHSGVSTDPQPLKEQPALNDSRYCLSSRLRVSATFWQNPRNHFRCQVQFYGLSENDEWTQDRAKPVTQIVSAEAWGRADCGSTTPGERSSLPAFYPGTSGSCSGCGSLSLPLLAGLVAADAVASLLIVGAVFLCARPRRSPAQEDGKVYINMPGRGRAKRSGSGATNFSLLKQAGDVEENPGPTSMDWIWRILFLVGAATGAHSFEEDQVTQSPEALRLQEGESSSLNCSYTVSGLRGLFWYRQDPGKGPEFLFTLYSAGEEKEKERLKATLTKKESFLHITAPKPEDSATYLCAVQANRGSTLGRLYFGRGTQLTVWPDTRIQNPDPAVYQLRDSKSSDKSVCLFTDFDSQTNVSQSKDSDVYITDKTVLDMRSMDFKSNSAVAWSNKSDFACANAFNNSIIPEDTFFPSPESSCGTTTPGERSSLPAFYPGTSGSCSGCGSLSLPLLAGLVAADAVASLLIVGAVFWRRKRKEKQSETSPKEFLTIYEDVKDLKTRRNHEQEQTFPGGGSTIYSMIQSQSSAPTSQEPAYTLYSLIQPSRKSGSRKRNHSPSFNSTIYEVIGKSQPKAQNPARLSRKELENFDVYSLCARPRRSPAQEDGKVYINMPGRG

SEQ ID NO: 11115 - protein, 747 aa, synthetic construct
MALPVTALLLPLALLLHAARPEFSRYLVKRTGEKVFLECVQDMDHENMFWYRQDPGLGLRLIYFSYDVKMKEKGDIPEGYSVSREKKERFSLILESASTNQTSMYLCASSLWGRLAKNIQYFGAGTRLSVLELEDLKNVFPPEVAVFEPSEAEISHTQKATLVCLATGFYPDHVELSWWVNGKEVHSGVSTDPQPLKEQPALNDSRYCLSSRLRVSATFWQNPRNHFRCQVQFYGLSENDEWTQDRAKPVTQIVSAEAWGRADCGSLGEPQLCYILDAILFLYGIVLTLLYCKRGRKKLLYIFKQPFMRPVQTTQEEDGCSCRFPEEEEGGCELRLKIQVRKAAITSYEKSDGVYTGLSTRNQETYETLKHEKPPQRAKRSGSGATNFSLLKQAGDVEENPGPTSMDWIWRILFLVGAATGAHSFEEDQVTQSPEALRLQEGESSSLNCSYTVSGLRGLFWYRQDPGKGPEFLFTLYSAGEEKEKERLKATLTKKESFLHITAPKPEDSATYLCAVQANRGSTLGRLYFGRGTQLTVWPDTRIQNPDPAVYQLRDSKSSDKSVCLFTDFDSQTNVSQSKDSDVYITDKTVLDMRSMDFKSNSAVAWSNKSDFACANAFNNSIIPEDTFFPSPESSCGTLGEPQLCYILDAILFLYGIVLTLLYCRSKRSRLLHSDYMNMTPRRPGPTRKHYQPYAPPRDFAAYRSRLKIQVRKAAITSYEKSDGVYTGLSTRNQETYETLKHEKPPQ

SEQ ID NO: 11116 - protein, 742 aa, synthetic construct
MALPVTALLLPLALLLHAARPEFSRYLVKRTGEKVFLECVQDMDHENMFWYRQDPGLGLRLIYFSYDVKMKEKGDIPEGYSVSREKKERFSLILESASTNQTSMYLCASSLWGRLAKNIQYFGAGTRLSVLELEDLKNVFPPEVAVFEPSEAEISHTQKATLVCLATGFYPDHVELSWWVNGKEVHSGVSTDPQPLKEQPALNDSRYCLSSRLRVSATFWQNPRNHFRCQVQFYGLSENDEWTQDRAKPVTQIVSAEAWGRADCGSLGEPQLCYILDAILFLYGIVLTLLYCKRGRKKLLYIFKQPFMRPVQTTQEEDGCSCRFPEEEEGGCELRLKIQVRKAAITSYEKSDGVYTGLSTRNQETYETLKHEKPPQRAKRSGSGATNFSLLKQAGDVEENPGPTSMDWIWRILFLVGAATGAHSFEEDQVTQSPEALRLQEGESSSLNCSYTVSGLRGLFWYRQDPGKGPEFLFTLYSAGEEKEKERLKATLTKKESFLHITAPKPEDSATYLCAVQANRGSTLGRLYFGRGTQLTVWPDTRIQNPDPAVYQLRDSKSSDKSVCLFTDFDSQTNVSQSKDSDVYITDKTVLDMRSMDFKSNSAVAWSNKSDFACANAFNNSIIPEDTFFPSPESSCGTLGEPQLCYILDAILFLYGIVLTLLYCRDQRLPPDAHKPPGGGSFRTPIQEEQADAHSTLAKIRLKIQVRKAAITSYEKSDGVYTGLSTRNQETYETLKHEKPPQ

SEQ ID NO: 11117 - protein, 826 aa, synthetic construct
MALPVTALLLPLALLLHAARPEFSRYLVKRTGEKVFLECVQDMDHENMFWYRQDPGLGLRLIYFSYDVKMKEKGDIPEGYSVSREKKERFSLILESASTNQTSMYLCASSLWGRLAKNIQYFGAGTRLSVLELEDLKNVFPPEVAVFEPSEAEISHTQKATLVCLATGFYPDHVELSWWVNGKEVHSGVSTDPQPLKEQPALNDSRYCLSSRLRVSATFWQNPRNHFRCQVQFYGLSENDEWTQDRAKPVTQIVSAEAWGRADCGSLGEPQLCYILDAILFLYGIVLTLLYCKRGRKKLLYIFKQPFMRPVQTTQEEDGCSCRFPEEEEGGCELRLKIQVRKAAITSYEKSDGVYTGLSTRNQETYETLKHEKPPQRAKRSGSGATNFSLLKQAGDVEENPGPTSMDWIWRILFLVGAATGAHSFEEDQVTQSPEALRLQEGESSSLNCSYTVSGLRGLFWYRQDPGKGPEFLFTLYSAGEEKEKERLKATLTKKESFLHITAPKPEDSATYLCAVQANRGSTLGRLYFGRGTQLTVWPDTRIQNPDPAVYQLRDSKSSDKSVCLFTDFDSQTNVSQSKDSDVYITDKTVLDMRSMDFKSNSAVAWSNKSDFACANAFNNSIIPEDTFFPSPESSCGTLGEPQLCYILDAILFLYGIVLTLLYCWRRKRKEKQSETSPKEFLTIYEDVKDLKTRRNHEQEQTFPGGGSTIYSMIQSQSSAPTSQEPAYTLYSLIQPSRKSGSRKRNHSPSFNSTIYEVIGKSQPKAQNPARLSRKELENFDVYSRLKIQVRKAAITSYEKSDGVYTGLSTRNQETYETLKHEKPPQ

SEQ ID NO: 11118 - protein, 748 aa, synthetic construct
MALPVTALLLPLALLLHAARPEFSRYLVKRTGEKVFLECVQDMDHENMFWYRQDPGLGLRLIYFSYDVKMKEKGDIPEGYSVSREKKERFSLILESASTNQTSMYLCASSLWGRLAKNIQYFGAGTRLSVLELEDLKNVFPPEVAVFEPSEAEISHTQKATLVCLATGFYPDHVELSWWVNGKEVHSGVSTDPQPLKEQPALNDSRYCLSSRLRVSATFWQNPRNHFRCQVQFYGLSENDEWTQDRAKPVTQIVSAEAWGRADCGSLGEPQLCYILDAILFLYGIVLTLLYCKRGRKKLLYIFKQPFMRPVQTTQEEDGCSCRFPEEEEGGCELRLKIQVRKAAITSYEKSDGVYTGLSTRNQETYETLKHEKPPQRAKRSGSGATNFSLLKQAGDVEENPGPTSMDWIWRILFLVGAATGAHSFEEDQVTQSPEALRLQEGESSSLNCSYTVSGLRGLFWYRQDPGKGPEFLFTLYSAGEEKEKERLKATLTKKESFLHITAPKPEDSATYLCAVQANRGSTLGRLYFGRGTQLTVWPDTRIQNPDPAVYQLRDSKSSDKSVCLFTDFDSQTNVSQSKDSDVYITDKTVLDMRSMDFKSNSAVAWSNKSDFACANAFNNSIIPEDTFFPSPESSCGTLGEPQLCYILDAILFLYGIVLTLLYCKRGRKKLLYIFKQPFMRPVQTTQEEDGCSCRFPEEEEGGCELRLKIQVRKAAITSYEKSDGVYTGLSTRNQETYETLKHEKPPQ

SEQ ID NO: 11119 - protein, 747 aa, synthetic construct; identical to SEQ ID NO: 11115

SEQ ID NO: 11120 - protein, 746 aa, synthetic construct
MALPVTALLLPLALLLHAARPEFSRYLVKRTGEKVFLECVQDMDHENMFWYRQDPGLGLRLIYFSYDVKMKEKGDIPEGYSVSREKKERFSLILESASTNQTSMYLCASSLWGRLAKNIQYFGAGTRLSVLELEDLKNVFPPEVAVFEPSEAEISHTQKATLVCLATGFYPDHVELSWWVNGKEVHSGVSTDPQPLKEQPALNDSRYCLSSRLRVSATFWQNPRNHFRCQVQFYGLSENDEWTQDRAKPVTQIVSAEAWGRADCGSLGEPQLCYILDAILFLYGIVLTLLYCRSKRSRLLHSDYMNMTPRRPGPTRKHYQPYAPPRDFAAYRSRLKIQVRKAAITSYEKSDGVYTGLSTRNQETYETLKHEKPPQRAKRSGSGATNFSLLKQAGDVEENPGPTSMDWIWRILFLVGAATGAHSFEEDQVTQSPEALRLQEGESSSLNCSYTVSGLRGLFWYRQDPGKGPEFLFTLYSAGEEKEKERLKATLTKKESFLHITAPKPEDSATYLCAVQANRGSTLGRLYFGRGTQLTVWPDTRIQNPDPAVYQLRDSKSSDKSVCLFTDFDSQTNVSQSKDSDVYITDKTVLDMRSMDFKSNSAVAWSNKSDFACANAFNNSIIPEDTFFPSPESSCGTLGEPQLCYILDAILFLYGIVLTLLYCRSKRSRLLHSDYMNMTPRRPGPTRKHYQPYAPPRDFAAYRSRLKIQVRKAAITSYEKSDGVYTGLSTRNQETYETLKHEKPPQ

SEQ ID NO: 11121 - protein, 664 aa, synthetic construct
MALPVTALLLPLALLLHAARPEFSRYLVKRTGEKVFLECVQDMDHENMFWYRQDPGLGLRLIYFSYDVKMKEKGDIPEGYSVSREKKERFSLILESASTNQTSMYLCASSLWGRLAKNIQYFGAGTRLSVLELEDLKNVFPPEVAVFEPSEAEISHTQKATLVCLATGFYPDHVELSWWVNGKEVHSGVSTDPQPLKEQPALNDSRYCLSSRLRVSATFWQNPRNHFRCQVQFYGLSENDEWTQDRAKPVTQIVSAEAWGRADCGSLGEPQLSYILDAILFLYGIVLTLLYCRLKIQVRKAAITSYEKSDGVYTGLSTRNQETYETLKHEKPPQRAKRSGSGATNFSLLKQAGDVEENPGPTSMDWIWRILFLVGAATGAHSFEEDQVTQSPEALRLQEGESSSLNCSYTVSGLRGLFWYRQDPGKGPEFLFTLYSAGEEKEKERLKATLTKKESFLHITAPKPEDSATYLCAVQANRGSTLGRLYFGRGTQLTVWPDTRIQNPDPAVYQLRDSKSSDKSVCLFTDFDSQTNVSQSKDSDVYITDKTVLDMRSMDFKSNSAVAWSNKSDFACANAFNNSIIPEDTFFPSPESSCGTLGEPQLSYILDAILFLYGIVLTLLYCRLKIQVRKAAITSYEKSDGVYTGLSTRNQETYETLKHEKPPQ

SEQ ID NO: 11122 - protein, 700 aa, synthetic construct
MALPVTALLLPLALLLHAARPEFSRYLVKRTGEKVFLECVQDMDHENMFWYRQDPGLGLRLIYFSYDVKMKEKGDIPEGYSVSREKKERFSLILESASTNQTSMYLCASSLWGRLAKNIQYFGAGTRLSVLELEDLKNVFPPEVAVFEPSEAEISHTQKATLVCLATGFYPDHVELSWWVNGKEVHSGVSTDPQPLKEQPALNDSRYCLSSRLRVSATFWQNPRNHFRCQVQFYGLSENDEWTQDRAKPVTQIVSAEAWGRADCGSQAQSDCSCSTVSPGVLAGIVMGDLVLTVLIALAVYFLGRLVPRGRGAAEAATRKQRITETESPYQELQGQRSDVYSDLNTQRPYYKRAKRSGSGATNFSLLKQAGDVEENPGPTSMDWIWRILFLVGAATGAHSFEEDQVTQSPEALRLQEGESSSLNCSYTVSGLRGLFWYRQDPGKGPEFLFTLYSAGEEKEKERLKATLTKKESFLHITAPKPEDSATYLCAVQANRGSTLGRLYFGRGTQLTVWPDTRIQNPDPAVYQLRDSKSSDKSVCLFTDFDSQTNVSQSKDSDVYITDKTVLDMRSMDFKSNSAVAWSNKSDFACANAFNNSIIPEDTFFPSPESSCGTQAQSDCSSSTVSPGVLAGIVMGDLVLTVLIALAVYFLGRLVPRGRGAAEAATRKQRITETESPYQELQGQRSDVYSDLNTQRPYYK

SEQ ID NO: 11123 - protein, 742 aa, synthetic construct
MALPVTALLLPLALLLHAARPEFSRYLVKRTGEKVFLECVQDMDHENMFWYRQDPGLGLRLIYFSYDVKMKEKGDIPEGYSVSREKKERFSLILESASTNQTSMYLCASSLWGRLAKNIQYFGAGTRLSVLELEDLKNVFPPEVAVFEPSEAEISHTQKATLVCLATGFYPDHVELSWWVNGKEVHSGVSTDPQPLKEQPALNDSRYCLSSRLRVSATFWQNPRNHFRCQVQFYGLSENDEWTQDRAKPVTQIVSAEAWGRADCGSQAQSDCSCSTVSPGVLAGIVMGDLVLTVLIALAVYFLGRLVPRGRGAAEAATRKQRITETESPYQELQGQRSDVYSDLNTQRPYYKRAKRSGSGATNFSLLKQAGDVEENPGPTSMDWIWRILFLVGAATGAHSFEEDQVTQSPEALRLQEGESSSLNCSYTVSGLRGLFWYRQDPGKGPEFLFTLYSAGEEKEKERLKATLTKKESFLHITAPKPEDSATYLCAVQANRGSTLGRLYFGRGTQLTVWPDTRIQNPDPAVYQLRDSKSSDKSVCLFTDFDSQTNVSQSKDSDVYITDKTVLDMRSMDFKSNSAVAWSNKSDFACANAFNNSIIPEDTFFPSPESSCGTQAQSDCSCSTVSPGVLAGIVMGDLVLTVLIALAVYFLGRLVPRGRGAAEAATRKQRITETESPYQELQGQRSDVYSDLNTQKRGRKKLLYIFKQPFMRPVQTTQEEDGCSCRFPEEEEGGCELRPYYK

SEQ ID NO: 11124 - protein, 741 aa, synthetic construct
MALPVTALLLPLALLLHAARPEFSRYLVKRTGEKVFLECVQDMDHENMFWYRQDPGLGLRLIYFSYDVKMKEKGDIPEGYSVSREKKERFSLILESASTNQTSMYLCASSLWGRLAKNIQYFGAGTRLSVLELEDLKNVFPPEVAVFEPSEAEISHTQKATLVCLATGFYPDHVELSWWVNGKEVHSGVSTDPQPLKEQPALNDSRYCLSSRLRVSATFWQNPRNHFRCQVQFYGLSENDEWTQDRAKPVTQIVSAEAWGRADCGSQAQSDCSCSTVSPGVLAGIVMGDLVLTVLIALAVYFLGRLVPRGRGAAEAATRKQRITETESPYQELQGQRSDVYSDLNTQRPYYKRAKRSGSGATNFSLLKQAGDVEENPGPTSMDWIWRILFLVGAATGAHSFEEDQVTQSPEALRLQEGESSSLNCSYTVSGLRGLFWYRQDPGKGPEFLFTLYSAGEEKEKERLKATLTKKESFLHITAPKPEDSATYLCAVQANRGSTLGRLYFGRGTQLTVWPDTRIQNPDPAVYQLRDSKSSDKSVCLFTDFDSQTNVSQSKDSDVYITDKTVLDMRSMDFKSNSAVAWSNKSDFACANAFNNSIIPEDTFFPSPESSCGTQAQSDCSCSTVSPGVLAGIVMGDLVLTVLIALAVYFLGRLVPRGRGAAEAATRKQRITETESPYQELQGQRSDVYSDLNTQRSKRSRLLHSDYMNMTPRRPGPTRKHYQPYAPPRDFAAYRSRPYYK

SEQ ID NO: 11125 - protein, 736 aa, synthetic construct
MALPVTALLLPLALLLHAARPEFSRYLVKRTGEKVFLECVQDMDHENMFWYRQDPGLGLRLIYFSYDVKMKEKGDIPEGYSVSREKKERFSLILESASTNQTSMYLCASSLWGRLAKNIQYFGAGTRLSVLELEDLKNVFPPEVAVFEPSEAEISHTQKATLVCLATGFYPDHVELSWWVNGKEVHSGVSTDPQPLKEQPALNDSRYCLSSRLRVSATFWQNPRNHFRCQVQFYGLSENDEWTQDRAKPVTQIVSAEAWGRADCGSQAQSDCSCSTVSPGVLAGIVMGDLVLTVLIALAVYFLGRLVPRGRGAAEAATRKQRITETESPYQELQGQRSDVYSDLNTQRPYYKRAKRSGSGATNFSLLKQAGDVEENPGPTSMDWIWRILFLVGAATGAHSFEEDQVTQSPEALRLQEGESSSLNCSYTVSGLRGLFWYRQDPGKGPEFLFTLYSAGEEKEKERLKATLTKKESFLHITAPKPEDSATYLCAVQANRGSTLGRLYFGRGTQLTVWPDTRIQNPDPAVYQLRDSKSSDKSVCLFTDFDSQTNVSQSKDSDVYITDKTVLDMRSMDFKSNSAVAWSNKSDFACANAFNNSIIPEDTFFPSPESSCGTQAQSDCSCSTVSPGVLAGIVMGDLVLTVLIALAVYFLGRLVPRGRGAAEAATRKQRITETESPYQELQGQRSDVYSDLNTQRDQRLPPDAHKPPGGGSFRTPIQEEQADAHSTLAKIRPYYK

SEQ ID NO: 11126 - protein, 820 aa, synthetic construct
MALPVTALLLPLALLLHAARPEFSRYLVKRTGEKVFLECVQDMDHENMFWYRQDPGLGLRLIYFSYDVKMKEKGDIPEGYSVSREKKERFSLILESASTNQTSMYLCASSLWGRLAKNIQYFGAGTRLSVLELEDLKNVFPPEVAVFEPSEAEISHTQKATLVCLATGFYPDHVELSWWVNGKEVHSGVSTDPQPLKEQPALNDSRYCLSSRLRVSATFWQNPRNHFRCQVQFYGLSENDEWTQDRAKPVTQIVSAEAWGRADCGSQAQSDCSCSTVSPGVLAGIVMGDLVLTVLIALAVYFLGRLVPRGRGAAEAATRKQRITETESPYQELQGQRSDVYSDLNTQRPYYKRAKRSGSGATNFSLLKQAGDVEENPGPTSMDWIWRILFLVGAATGAHSFEEDQVTQSPEALRLQEGESSSLNCSYTVSGLRGLFWYRQDPGKGPEFLFTLYSAGEEKEKERLKATLTKKESFLHITAPKPEDSATYLCAVQANRGSTLGRLYFGRGTQLTVWPDTRIQNPDPAVYQLRDSKSSDKSVCLFTDFDSQTNVSQSKDSDVYITDKTVLDMRSMDFKSNSAVAWSNKSDFACANAFNNSIIPEDTFFPSPESSCGTQAQSDCSCSTVSPGVLAGIVMGDLVLTVLIALAVYFLGRLVPRGRGAAEAATRKQRITETESPYQELQGQRSDVYSDLNTQWRRKRKEKQSETSPKEFLTIYEDVKDLKTRRNHEQEQTFPGGGSTIYSMIQSQSSAPTSQEPAYTLYSLIQPSRKSGSRKRNHSPSFNSTIYEVIGKSQPKAQNPARLSRKELENFDVYSRPYYK

SEQ ID NO: 11127 - protein, 912 aa, synthetic construct
MALPVTALLLPLALLLHAARPEFSRYLVKRTGEKVFLECVQDMDHENMFWYRQDPGLGLRLIYFSYDVKMKEKGDIPEGYSVSREKKERFSLILESASTNQTSMYLCASSLWGRLAKNIQYFGAGTRLSVLELEDLKNVFPPEVAVFEPSEAEISHTQKATLVCLATGFYPDHVELSWWVNGKEVHSGVSTDPQPLKEQPALNDSRYCLSSRLRVSATFWQNPRNHFRCQVQFYGLSENDEWTQDRAKPVTQIVSAEAWGRADCGSQAQSDCSCSTVSPGVLAGIVMGDLVLTVLIALAVYFLGRLVPRGRGAAEAATRKQRITETESPYQELQGQRSDVYSDLNTQRVKFSRSADAPAYQQGQNQLYNELNLGRREEYDVLDKRRGRDPEMGGKPQRRKNPQEGLYNELQKDKMAEAYSEIGMKGERRRGKGHDGLYQGLSTATKDTYDALHMQALPPRRAKRSGSGATNFSLLKQAGDVEENPGPTSMDWIWRILFLVGAATGAHSFEEDQVTQSPEALRLQEGESSSLNCSYTVSGLRGLFWYRQDPGKGPEFLFTLYSAGEEKEKERLKATLTKKESFLHITAPKPEDSATYLCAVQANRGSTLGRLYFGRGTQLTVWPDTRIQNPDPAVYQLRDSKSSDKSVCLFTDFDSQTNVSQSKDSDVYITDKTVLDMRSMDFKSNSAVAWSNKSDFACANAFNNSIIPEDTFFPSPESSCGTTTPGERSSLPAFYPGTSGSCSGCGSLSLPLLAGLVAADAVASLLIVGAVFLCARPRRSPAQEDGKVYINMPGRGSSRRVKFSRSADAPAYQQGQNQLYNELNLGRREEYDVLDKRRGRDPEMGGKPQRRKNPQEGLYNELQKDKMAEAYSEIGMKGERRRGKGHDGLYQGLSTATKDTYDALHMQALPPR

SEQ ID NO: 11128 - protein, 838 aa, synthetic construct
MALPVTALLLPLALLLHAARPEFSRYLVKRTGEKVFLECVQDMDHENMFWYRQDPGLGLRLIYFSYDVKMKEKGDIPEGYSVSREKKERFSLILESASTNQTSMYLCASSLWGRLAKNIQYFGAGTRLSVLELEDLKNVFPPEVAVFEPSEAEISHTQKATLVCLATGFYPDHVELSWWVNGKEVHSGVSTDPQPLKEQPALNDSRYCLSSRLRVSATFWQNPRNHFRCQVQFYGLSENDEWTQDRAKPVTQIVSAEAWGRADCGSQAQSDCSCSTVSPGVLAGIVMGDLVLTVLIALAVYFLGRLVPRGRGAAEAATRKQRITETESPYQELQGQRSDVYSDLNTQRVKFSRSADAPAYQQGQNQLYNELNLGRREEYDVLDKRRGRDPEMGGKPQRRKNPQEGLYNELQKDKMAEAYSEIGMKGERRRGKGHDGLYQGLSTATKDTYDALHMQALPPRRAKRSGSGATNFSLLKQAGDVEENPGPTSMDWIWRILFLVGAATGAHSFEEDQVTQSPEALRLQEGESSSLNCSYTVSGLRGLFWYRQDPGKGPEFLFTLYSAGEEKEKERLKATLTKKESFLHITAPKPEDSATYLCAVQANRGSTLGRLYFGRGTQLTVWPDTRIQNPDPAVYQLRDSKSSDKSVCLFTDFDSQTNVSQSKDSDVYITDKTVLDMRSMDFKSNSAVAWSNKSDFACANAFNNSIIPEDTFFPSPESSCGTTTPGERSSLPAFYPGTSGSCSGCGSLSLPLLAGLVAADAVASLLIVGAVFKRGRKKLLYIFKQPFMRPVQTTQEEDGCSCRFPEEEEGGCELLCARPRRSPAQEDGKVYINMPGRG

SEQ ID NO: 11129 - protein, 837 aa, synthetic construct
MALPVTALLLPLALLLHAARPEFSRYLVKRTGEKVFLECVQDMDHENMFWYRQDPGLGLRLIYFSYDVKMKEKGDIPEGYSVSREKKERFSLILESASTNQTSMYLCASSLWGRLAKNIQYFGAGTRLSVLELEDLKNVFPPEVAVFEPSEAEISHTQKATLVCLATGFYPDHVELSWWVNGKEVHSGVSTDPQPLKEQPALNDSRYCLSSRLRVSATFWQNPRNHFRCQVQFYGLSENDEWTQDRAKPVTQIVSAEAWGRADCGSQAQSDCSCSTVSPGVLAGIVMGDLVLTVLIALAVYFLGRLVPRGRGAAEAATRKQRITETESPYQELQGQRSDVYSDLNTQRVKFSRSADAPAYQQGQNQLYNELNLGRREEYDVLDKRRGRDPEMGGKPQRRKNPQEGLYNELQKDKMAEAYSEIGMKGERRRGKGHDGLYQGLSTATKDTYDALHMQALPPRRAKRSGSGATNFSLLKQAGDVEENPGPTSMDWIWRILFLVGAATGAHSFEEDQVTQSPEALRLQEGESSSLNCSYTVSGLRGLFWYRQDPGKGPEFLFTLYSAGEEKEKERLKATLTKKESFLHITAPKPEDSATYLCAVQANRGSTLGRLYFGRGTQLTVWPDTRIQNPDPAVYQLRDSKSSDKSVCLFTDFDSQTNVSQSKDSDVYITDKTVLDMRSMDFKSNSAVAWSNKSDFACANAFNNSIIPEDTFFPSPESSCGTTTPGERSSLPAFYPGTSGSCSGCGSLSLPLLAGLVAADAVASLLIVGAVFRSKRSRLLHSDYMNMTPRRPGPTRKHYQPYAPPRDFAAYRSLCARPRRSPAQEDGKVYINMPGRG

SEQ ID NO: 11130 - protein, 1083 aa, synthetic construct
MALPVTALLLPLALLLHAARPEFSRYLVKRTGEKVFLECVQDMDHENMFWYRQDPGLGLRLIYFSYDVKMKEKGDIPEGYSVSREKKERFSLILESASTNQTSMYLCASSLWGRLAKNIQYFGAGTRLSVLELEDLKNVFPPEVAVFEPSEAEISHTQKATLVCLATGFYPDHVELSWWVNGKEVHSGVSTDPQPLKEQPALNDSRYCLSSRLRVSATFWQNPRNHFRCQVQFYGLSENDEWTQDRAKPVTQIVSAEAWGRADCGSQSFGLLDPKLCYLLDGILFIYGVILTALFLRVKFSRSADAPAYQQGQNQLYNELNLGRREEYDVLDKRRGRDPEMGGKPQRRKNPQEGLYNELQKDKMAEAYSEIGMKGERRRGKGHDGLYQGLSTATKDTYDALHMQALPPRRAKRSGSGATNFSLLKQAGDVEENPGPTSMDWIWRILFLVGAATGAHSFEEDQVTQSPEALRLQEGESSSLNCSYTVSGLRGLFWYRQDPGKGPEFLFTLYSAGEEKEKERLKATLTKKESFLHITAPKPEDSATYLCAVQANRGSTLGRLYFGRGTQLTVWPDTRIQNPDPAVYQLRDSKSSDKSVCLFTDFDSQTNVSQSKDSDVYITDKTVLDMRSMDFKSNSAVAWSNKSDFACANAFNNSIIPEDTFFPSPESSCGTQSFGLLDPKLCYLLDGILFIYGVILTALFLRVKFSRSADAPAYQQGQNQLYNELNLGRREEYDVLDKRRGRDPEMGGKPQRRKNPQEGLYNELQKDKMAEAYSEIGMKGERRRGKGHDGLYQGLSTATKDTYDALHMQALPPRRAKRSGSGVKQTLNFDLLKLAGDVESNPGPSRGHMALPVTALLLPLALLLHAARPSQFRVSPLDRTWNLGETVELKCQVLLSNPTSGCSWLFQPRGAAASPTFLLYLSQNKPKAAEGLDTQRFSGKRLGDTFVLTLSDFRRENEGYYFCSALSNSIMYFSHFVPVFLPAKPTTTPAPRPPTPAPTIASQPLSLRPEACRPAAGGAVHTRGLDFACDIYIWAPLAGTCGVLLLSLVITLYCNHRNRRRVCKCPRPVVKSGDKPSLSARYV

SEQ ID NO: 11131 - protein, 823 aa, synthetic construct
MALPVTALLLPLALLLHAARPEFSRYLVKRTGEKVFLECVQDMDHENMFWYRQDPGLGLRLIYFSYDVKMKEKGDIPEGYSVSREKKERFSLILESASTNQTSMYLCASSLWGRLAKNIQYFGAGTRLSVLELEDLKNVFPPEVAVFEPSEAEISHTQKATLVCLATGFYPDHVELSWWVNGKEVHSGVSTDPQPLKEQPALNDSRYCLSSRLRVSATFWQNPRNHFRCQVQFYGLSENDEWTQDRAKPVTQIVSAEAWGRADCGSQSFGLLDPKLCYLLDGILFIYGVILTALFLRVKFSRSADAPAYQQGQNQLYNELNLGRREEYDVLDKRRGRDPEMGGKPQRRKNPQEGLYNELQKDKMAEAYSEIGMKGERRRGKGHDGLYQGLSTATKDTYDALHMQALPPRRAKRSGSGATNFSLLKQAGDVEENPGPTSMDWIWRILFLVGAATGAHSFEEDQVTQSPEALRLQEGESSSLNCSYTVSGLRGLFWYRQDPGKGPEFLFTLYSAGEEKEKERLKATLTKKESFLHITAPKPEDSATYLCAVQANRGSTLGRLYFGRGTQLTVWPDTRASTKGPSVFPLAPSSKSTSGGTAALGCLVKDYFPEPVTVSWNSGALTSGVHTFPAVLQSSGLYSLSSVVTVPSSSLGTQTYICNVNHKPSNTKVDKRVEPKSCGTQSFGLLDPKLSYLLDGILFIYGVILTALFLRVKFSRSADAPAYQQGQNQLYNELNLGRREEYDVLDKRRGRDPEMGGKPQRRKNPQEGLYNELQKDKMAEAYSEIGMKGERRRGKGHDGLYQGLSTATKDTYDALHMQALPPR

SEQ ID NO: 11132 - protein, 814 aa, synthetic construct
MALPVTALLLPLALLLHAARPEFSRYLVKRTGEKVFLECVQDMDHENMFWYRQDPGLGLRLIYFSYDVKMKEKGDIPEGYSVSREKKERFSLILESASTNQTSMYLCASSLWGRLAKNIQYFGAGTRLSVLELEDLKNVFPPEVAVFEPSEAEISHTQKATLVCLATGFYPDHVELSWWVNGKEVHSGVSTDPQPLKEQPALNDSRYCLSSRLRVSATFWQNPRNHFRCQVQFYGLSENDEWTQDRAKPVTQIVSAEAWGRADCGSQSFGLLDPKLCYLLDGILFIYGVILTALFLRVKFSRSADAPAYQQGQNQLYNELNLGRREEYDVLDKRRGRDPEMGGKPQRRKNPQEGLYNELQKDKMAEAYSEIGMKGERRRGKGHDGLYQGLSTATKDTYDALHMQALPPRRAKRSGSGATNFSLLKQAGDVEENPGPTSMDWIWRILFLVGAATGAHSFEEDQVTQSPEALRLQEGESSSLNCSYTVSGLRGLFWYRQDPGKGPEFLFTLYSAGEEKEKERLKATLTKKESFLHITAPKPEDSATYLCAVQANRGSTLGRLYFGRGTQLTVWPDTRIQNPDPAVYQLRDSKSSDKSVCLFTDFDSQTNVSQSKDSDVYITDKTVLDMRSMDFKSNSAVAWSNKSDFACANAFNNSIIPEDTFFPSPESSCGTQSFGLLDPKLSYLLDGILFIYGVILTALFLRVKFSRSADAPAYQQGQNQLYNELNLGRREEYDVLDKRRGRDPEMGGKPQRRKNPQEGLYNELQKDKMAEAYSEIGMKGERRRGKGHDGLYQGLSTATKDTYDALHMQALPPR

SEQ ID NO: 11133 - protein, 984 aa, synthetic construct
MALPVTALLLPLALLLHAARPEFSRYLVKRTGEKVFLECVQDMDHENMFWYRQDPGLGLRLIYFSYDVKMKEKGDIPEGYSVSREKKERFSLILESASTNQTSMYLCASSLWGRLAKNIQYFGAGTRLSVLELEGQPKANPTVTLFPPSSEELQANKATLVCLISDFYPGAVTVAWKADGSPVKAGVETTKPSKQSNNKYAASSYLSLTPEQWKSHRSYSCQVTHEGSTVEKTVAPTECSGSLGEPQLCYILDAILFLYGIVLTLLYCRLKIQVRKAAITSYEKSDGVYTGLSTRNQETYETLKHEKPPQRAKRSGSGATNFSLLKQAGDVEENPGPTSMDWIWRILFLVGAATGAHSFEEDQVTQSPEALRLQEGESSSLNCSYTVSGLRGLFWYRQDPGKGPEFLFTLYSAGEEKEKERLKATLTKKESFLHITAPKPEDSATYLCAVQANRGSTLGRLYFGRGTQLTVWPDTRIQNPDPAVYQLRDSKSSDKSVCLFTDFDSQTNVSQSKDSDVYITDKTVLDMRSMDFKSNSAVAWSNKSDFACANAFNNSIIPEDTFFPSPESSCGTQSFGLLDPKLCYLLDGILFIYGVILTALFLRVKFSRSADAPAYQQGQNQLYNELNLGRREEYDVLDKRRGRDPEMGGKPQRRKNPQEGLYNELQKDKMAEAYSEIGMKGERRRGKGHDGLYQGLSTATKDTYDALHMQALPPRRAKRSGSGVKQTLNFDLLKLAGDVESNPGPSRGHMALPVTALLLPLALLLHAARPSQFRVSPLDRTWNLGETVELKCQVLLSNPTSGCSWLFQPRGAAASPTFLLYLSQNKPKAAEGLDTQRFSGKRLGDTFVLTLSDFRRENEGYYFCSALSNSIMYFSHFVPVFLPAKPTTTPAPRPPTPAPTIASQPLSLRPEACRPAAGGAVHTRGLDFACDIYIWAPLAGTCGVLLLSLVITLYCNHRNRRRVCKCPRPVVKSGDKPSLSARYV

SEQ ID NO: 11134 - protein, 748 aa, synthetic construct
MALPVTALLLPLALLLHAARPEFSRYLVKRTGEKVFLECVQDMDHENMFWYRQDPGLGLRLIYFSYDVKMKEKGDIPEGYSVSREKKERFSLILESASTNQTSMYLCASSLWGRLAKNIQYFGAGTRLSVLELEDLKNVFPPEVAVFEPSEAEISHTQKATLVCLATGFYPDHVELSWWVNGKEVHSGVSTDPQPLKEQPALNDSRYCLSSRLRVSATFWQNPRNHFRCQVQFYGLSENDEWTQDRAKPVTQIVSAEAWGRADCGSQSFGLLDPKLCYLLDGILFIYGVILTALFLRVKFSRSADAPAYQQGQNQLYNELNLGRREEYDVLDKRRGRDPEMGGKPQRRKNPQEGLYNELQKDKMAEAYSEIGMKGERRRGKGHDGLYQGLSTATKDTYDALHMQALPPRRAKRSGSGATNFSLLKQAGDVEENPGPTSMDWIWRILFLVGAATGAHSFEEDQVTQSPEALRLQEGESSSLNCSYTVSGLRGLFWYRQDPGKGPEFLFTLYSAGEEKEKERLKATLTKKESFLHITAPKPEDSATYLCAVQANRGSTLGRLYFGRGTQLTVWPDTRASTKGPSVFPLAPSSKSTSGGTAALGCLVKDYFPEPVTVSWNSGALTSGVHTFPAVLQSSGLYSLSSVVTVPSSSLGTQTYICNVNHKPSNTKVDKRVEPKSCGTLGEPQLCYILDAILFLYGIVLTLLYCRLKIQVRKAAITSYEKSDGVYTGLSTRNQETYETLKHEKPPQ

SEQ ID NO: 11135 - protein, 748 aa, synthetic construct; identical to SEQ ID NO: 11134

SEQ ID NO: 11136 - protein, 739 aa, synthetic construct
MALPVTALLLPLALLLHAARPEFSRYLVKRTGEKVFLECVQDMDHENMFWYRQDPGLGLRLIYFSYDVKMKEKGDIPEGYSVSREKKERFSLILESASTNQTSMYLCASSLWGRLAKNIQYFGAGTRLSVLELEDLKNVFPPEVAVFEPSEAEISHTQKATLVCLATGFYPDHVELSWWVNGKEVHSGVSTDPQPLKEQPALNDSRYCLSSRLRVSATFWQNPRNHFRCQVQFYGLSENDEWTQDRAKPVTQIVSAEAWGRADCGSQSFGLLDPKLCYLLDGILFIYGVILTALFLRVKFSRSADAPAYQQGQNQLYNELNLGRREEYDVLDKRRGRDPEMGGKPQRRKNPQEGLYNELQKDKMAEAYSEIGMKGERRRGKGHDGLYQGLSTATKDTYDALHMQALPPRRAKRSGSGATNFSLLKQAGDVEENPGPTSMDWIWRILFLVGAATGAHSFEEDQVTQSPEALRLQEGESSSLNCSYTVSGLRGLFWYRQDPGKGPEFLFTLYSAGEEKEKERLKATLTKKESFLHITAPKPEDSATYLCAVQANRGSTLGRLYFGRGTQLTVWPDTRIQNPDPAVYQLRDSKSSDKSVCLFTDFDSQTNVSQSKDSDVYITDKTVLDMRSMDFKSNSAVAWSNKSDFACANAFNNSIIPEDTFFPSPESSCGTLGEPQLCYILDAILFLYGIVLTLLYCRLKIQVRKAAITSYEKSDGVYTGLSTRNQETYETLKHEKPPQ

SEQ ID NO: 11137 - protein, 988 aa, synthetic construct
MALPVTALLLPLALLLHAARPEFSRYLVKRTGEKVFLECVQDMDHENMFWYRQDPGLGLRLIYFSYDVKMKEKGDIPEGYSVSREKKERFSLILESASTNQTSMYLCASSLWGRLAKNIQYFGAGTRLSVLELEGQPKANPTVTLFPPSSEELQANKATLVCLISDFYPGAVTVAWKADGSPVKAGVETTKPSKQSNNKYAASSYLSLTPEQWKSHRSYSCQVTHEGSTVEKTVAPTECSTTPGERSSLPAFYPGTSGSCSGCGSLSLPLLAGLVAADAVASLLIVGAVFLCARPRRSPAQEDGKVYINMPGRGRAKRSGSGATNFSLLKQAGDVEENPGPTSMDWIWRILFLVGAATGAHSFEEDQVTQSPEALRLQEGESSSLNCSYTVSGLRGLFWYRQDPGKGPEFLFTLYSAGEEKEKERLKATLTKKESFLHITAPKPEDSATYLCAVQANRGSTLGRLYFGRGTQLTVWPDTRIQNPDPAVYQLRDSKSSDKSVCLFTDFDSQTNVSQSKDSDVYITDKTVLDMRSMDFKSNSAVAWSNKSDFACANAFNNSIIPEDTFFPSPESSCGTQSFGLLDPKLCYLLDGILFIYGVILTALFLRVKFSRSADAPAYQQGQNQLYNELNLGRREEYDVLDKRRGRDPEMGGKPQRRKNPQEGLYNELQKDKMAEAYSEIGMKGERRRGKGHDGLYQGLSTATKDTYDALHMQALPPRRAKRSGSGVKQTLNFDLLKLAGDVESNPGPSRGHMALPVTALLLPLALLLHAARPSQFRVSPLDRTWNLGETVELKCQVLLSNPTSGCSWLFQPRGAAASPTFLLYLSQNKPKAAEGLDTQRFSGKRLGDTFVLTLSDFRRENEGYYFCSALSNSIMYFSHFVPVFLPAKPTTTPAPRPPTPAPTIASQPLSLRPEACRPAAGGAVHTRGLDFACDIYIWAPLAGTCGVLLLSLVITLYCNHRNRRRVCKCPRPVVKSGDKPSLSARYV

SEQ ID NO: 11138 - protein, 1021 aa, synthetic construct
MALPVTALLLPLALLLHAARPEFSRYLVKRTGEKVFLECVQDMDHENMFWYRQDPGLGLRLIYFSYDVKMKEKGDIPEGYSVSREKKERFSLILESASTNQTSMYLCASSLWGRLAKNIQYFGAGTRLSVLELEDLKNVFPPEVAVFEPSEAEISHTQKATLVCLATGFYPDHVELSWWVNGKEVHSGVSTDPQPLKEQPALNDSRYCLSSRLRVSATFWQNPRNHFRCQVQFYGLSENDEWTQDRAKPVTQIVSAEAWGRADCGSQSFGLLDPKLCYLLDGILFIYGVILTALFLRVKFSRSADAPAYQQGQNQLYNELNLGRREEYDVLDKRRGRDPEMGGKPQRRKNPQEGLYNELQKDKMAEAYSEIGMKGERRRGKGHDGLYQGLSTATKDTYDALHMQALPPRRAKRSGSGATNFSLLKQAGDVEENPGPTSMDWIWRILFLVGAATGAHSFEEDQVTQSPEALRLQEGESSSLNCSYTVSGLRGLFWYRQDPGKGPEFLFTLYSAGEEKEKERLKATLTKKESFLHITAPKPEDSATYLCAVQANRGSTLGRLYFGRGTQLTVWPDTRASTKGPSVFPLAPSSKSTSGGTAALGCLVKDYFPEPVTVSWNSGALTSGVHTFPAVLQSSGLYSLSSVVTVPSSSLGTQTYICNVNHKPSNTKVDKRVEPKSCTTPGERSSLPAFYPGTSGSCSGCGSLSLPLLAGLVAADAVASLLIVGAVFLCARPRRSPAQEDGKVYINMPGRGRAKRSGSGVKQTLNFDLLKLAGDVESNPGPSRGHMALPVTALLLPLALLLHAARPSQFRVSPLDRTWNLGETVELKCQVLLSNPTSGCSWLFQPRGAAASPTFLLYLSQNKPKAAEGLDTQRFSGKRLGDTFVLTLSDFRRENEGYYFCSALSNSIMYFSHFVPVFLPAKPTTTPAPRPPTPAPTIASQPLSLRPEACRPAAGGAVHTRGLDFACDIYIWAPLAGTCGVLLLSLVITLYCNHRNRRRVCKCPRPVVKSGDKPSLSARYV

SEQ ID NO: 11139 - protein, 933 aa, synthetic construct
MALPVTALLLPLALLLHAARPSRYLVKRTGEKVFLECVQDMDHENMFWYRQDPGLGLRLIYFSYDVKMKEKGDIPEGYSVSREKKERFSLILESASTNQTSMYLCASSLWGRLAKNIQYFGAGTRLSVLELELWVSQPPEIRTLEGSSAFLPCSFNASQGRLAIGSVTWFRDEVVPGKEVRNGTPEFRGRLAPLASSRFLHDHQAELHIRDVRGHDASIYVCRVEVLGLGVGTGNGTRLVVEKEHPQLGAGTVLLLRAGFYAVSFLSVAVGSTVYYQGKCLTWKGPRRQLPAVVPAPLPPPCGSSAHLLPPVPGGRAKRSGSGATNFSLLKQAGDVEENPGPTSMDWIWRILFLVGAATGAHSFEEDQVTQSPEALRLQEGESSSLNCSYTVSGLRGLFWYRQDPGKGPEFLFTLYSAGEEKEKERLKATLTKKESFLHITAPKPEDSATYLCAVQANRGSTLGRLYFGRGTQLTVWPDTRLWVSQPPEIRTLEGSSAFLPCSFNASQGRLAIGSVTWFRDEVVPGKEVRNGTPEFRGRLAPLASSRFLHDHQAELHIRDVRGHDASIYVCRVEVLGLGVGTGNGTRLVVEKEHPQLGAGTVLLLRAGFYAVSFLSVAVGSTVYYQGKCLTWKGPRRQLPAVVPAPLPPPCGSSAHLLPPVPGGRAKRSGSGVKQTLNFDLLKLAGDVESNPGPSRGHMALPVTALLLPLALLLHAARPSQFRVSPLDRTWNLGETVELKCQVLLSNPTSGCSWLFQPRGAAASPTFLLYLSQNKPKAAEGLDTQRFSGKRLGDTFVLTLSDFRRENEGYYFCSALSNSIMYFSHFVPVFLPAKPTTTPAPRPPTPAPTIASQPLSLRPEACRPAAGGAVHTRGLDFACDIYIWAPLAGTCGVLLLSLVITLYCNHRNRRRVCKCPRPVVKSGDKPSLSARYV

SEQ ID NO: 11140 - protein, 1068 aa, synthetic construct
MALPVTALLLPLALLLHAARPEFSRYLVKRTGEKVFLECVQDMDHENMFWYRQDPGLGLRLIYFSYDVKMKEKGDIPEGYSVSREKKERFSLILESASTNQTSMYLCASSLWGRLAKNIQYFGAGTRLSVLELEGQPKANPTVTLFPPSSEELQANKATLVCLISDFYPGAVTVAWKADGSPVKAGVETTKPSKQSNNKYAASSYLSLTPEQWKSHRSYSCQVTHEGSTVEKTVAPTECSGSQSFGLLDPKLCYLLDGILFIYGVILTALFLRVKFSRSADAPAYQQGQNQLYNELNLGRREEYDVLDKRRGRDPEMGGKPQRRKNPQEGLYNELQKDKMAEAYSEIGMKGERRRGKGHDGLYQGLSTATKDTYDALHMQALPPRRAKRSGSGATNFSLLKQAGDVEENPGPTSMDWIWRILFLVGAATGAHSFEEDQVTQSPEALRLQEGESSSLNCSYTVSGLRGLFWYRQDPGKGPEFLFTLYSAGEEKEKERLKATLTKKESFLHITAPKPEDSATYLCAVQANRGSTLGRLYFGRGTQLTVWPDTRASTKGPSVFPLAPSSKSTSGGTAALGCLVKDYFPEPVTVSWNSGALTSGVHTFPAVLQSSGLYSLSSVVTVPSSSLGTQTYICNVNHKPSNTKVDKRVEPKSCGTQSFGLLDPKLCYLLDGILFIYGVILTALFLRVKFSRSADAPAYQQGQNQLYNELNLGRREEYDVLDKRRGRDPEMGGKPQRRKNPQEGLYNELQKDKMAEAYSEIGMKGERRRGKGHDGLYQGLSTATKDTYDALHMQALPPRRAKRSGSGVKQTLNFDLLKLAGDVESNPGPSRGHMALPVTALLLPLALLLHAARPSQFRVSPLDRTWNLGETVELKCQVLLSNPTSGCSWLFQPRGAAASPTFLLYLSQNKPKAAEGLDTQRFSGKRLGDTFVLTLSDFRRENEGYYFCSALSNSIMYFSHFVPVFLPAKPTTTPAPRPPTPAPTIASQPLSLRPEACRPAAGGAVHTRGLDFACDIYIWAPLAGTCGVLLLSLVITLYCNHRNRRRVCKCPRPVVKSGDKPSLSARYV

SEQ ID NO: 11141 - protein, 1086 aa, synthetic construct
MALPVTALLLPLALLLHAARPEFSRYLVKRTGEKVFLECVQDMDHENMFWYRQDPGLGLRLIYFSYDVKMKEKGDIPEGYSVSREKKERFSLILESASTNQTSMYLCASSLWGRLAKNIQYFGAGTRLSVLELEGQPKANPTVTLFPPSSEELQANKATLVCLISDFYPGAVTVAWKADGSPVKAGVETTKPSKQSNNKYAASSYLSLTPEQWKSHRSYSCQVTHEGSTVEKTVAPTECSGSQSFGLLDPKLCYLLDGILFIYGVILTALFLRVKFSRSADAPAYQQGQNQLYNELNLGRREEYDVLDKRRGRDPEMGGKPQRRKNPQEGLYNELQKDKMAEAYSEIGMKGERRRGKGHDGLYQGLSTATKDTYDALHMQALPPRRAKRSGSGATNFSLLKQAGDVEENPGPTSMDWIWRILFLVGAATGAHSFEEDQVTQSPEALRLQEGESSSLNCSYTVSGLRGLFWYRQDPGKGPEFLFTLYSAGEEKEKERLKATLTKKESFLHITAPKPEDSATYLCAVQANRGSTLGRLYFGRGTQLTVWPDTRASPTSPKVFPLSLCSTQPDGNVVIACLVQGFFPQEPLSVTWSESGQGVTARNFPPSQDASGDLYTTSSQLTLPATQCLAGKSVTCHVKHYTNPSQDVTVPCPVPSTPPTPSPSTPPTPSPSGTQSFGLLDPKLCYLLDGILFIYGVILTALFLRVKFSRSADAPAYQQGQNQLYNELNLGRREEYDVLDKRRGRDPEMGGKPQRRKNPQEGLYNELQKDKMAEAYSEIGMKGERRRGKGHDGLYQGLSTATKDTYDALHMQALPPRRAKRSGSGVKQTLNFDLLKLAGDVESNPGPSRGHMALPVTALLLPLALLLHAARPSQFRVSPLDRTWNLGETVELKCQVLLSNPTSGCSWLFQPRGAAASPTFLLYLSQNKPKAAEGLDTQRFSGKRLGDTFVLTLSDFRRENEGYYFCSALSNSIMYFSHFVPVFLPAKPTTTPAPRPPTPAPTIASQPLSLRPEACRPAAGGAVHTRGLDFACDIYIWAPLAGTCGVLLLSLVITLYCNHRNRRRVCKCPRPVVKSGDKPSLSARYV

SEQ ID NO: 11142 - protein, 1067 aa, synthetic construct
MALPVTALLLPLALLLHAARPEFSRYLVKRTGEKVFLECVQDMDHENMFWYRQDPGLGLRLIYFSYDVKMKEKGDIPEGYSVSREKKERFSLILESASTNQTSMYLCASSLWGRLAKNIQYFGAGTRLSVLELEGQPKANPTVTLFPPSSEELQANKATLVCLISDFYPGAVTVAWKADGSPVKAGVETTKPSKQSNNKYAASSYLSLTPEQWKSHRSYSCQVTHEGSTVEKTVAPTECSGSQSFGLLDPKLCYLLDGILFIYGVILTALFLRVKFSRSADAPAYQQGQNQLYNELNLGRREEYDVLDKRRGRDPEMGGKPQRRKNPQEGLYNELQKDKMAEAYSEIGMKGERRRGKGHDGLYQGLSTATKDTYDALHMQALPPRRAKRSGSGATNFSLLKQAGDVEENPGPTSMDWIWRILFLVGAATGAHSFEEDQVTQSPEALRLQEGESSSLNCSYTVSGLRGLFWYRQDPGKGPEFLFTLYSAGEEKEKERLKATLTKKESFLHITAPKPEDSATYLCAVQANRGSTLGRLYFGRGTQLTVWPDTRASTKGPSVFPLAPCSRSTSESTAALGCLVKDYFPEPVTVSWNSGALTSGVHTFPAVLQSSGLYSLSSVVTVPSSNFGTQTYTCNVDHKPSNTKVDKTVERKCGTQSFGLLDPKLCYLLDGILFIYGVILTALFLRVKFSRSADAPAYQQGQNQLYNELNLGRREEYDVLDKRRGRDPEMGGKPQRRKNPQEGLYNELQKDKMAEAYSEIGMKGERRRGKGHDGLYQGLSTATKDTYDALHMQALPPRRAKRSGSGVKQTLNFDLLKLAGDVESNPGPSRGHMALPVTALLLPLALLLHAARPSQFRVSPLDRTWNLGETVELKCQVLLSNPTSGCSWLFQPRGAAASPTFLLYLSQNKPKAAEGLDTQRFSGKRLGDTFVLTLSDFRRENEGYYFCSALSNSIMYFSHFVPVFLPAKPTTTPAPRPPTPAPTIASQPLSLRPEACRPAAGGAVHTRGLDFACDIYIWAPLAGTCGVLLLSLVITLYCNHRNRRRVCKCPRPVVKSGDKPSLSARYV

SEQ ID NO: 11143 - protein, 1122 aa, synthetic construct
MALPVTALLLPLALLLHAARPSRYLVKRTGEKVFLECVQDMDHENMFWYRQDPGLGLRLIYFSYDVKMKEKGDIPEGYSVSREKKERFSLILESASTNQTSMYLCASSLWGRLAKNIQYFGAGTRLSVLELEGQPKANPTVTLFPPSSEELQANKATLVCLISDFYPGAVTVAWKADGSPVKAGVETTKPSKQSNNKYAASSYLSLTPEQWKSHRSYSCQVTHEGSTVEKTVAPTECSGSQSFGLLDPKLCYLLDGILFIYGVILTALFLRVKFSRSADAPAYQQGQNQLYNELNLGRREEYDVLDKRRGRDPEMGGKPQRRKNPQEGLYNELQKDKMAEAYSEIGMKGERRRGKGHDGLYQGLSTATKDTYDALHMQALPPRRAKRSGSGATNFSLLKQAGDVEENPGPTSMDWIWRILFLVGAATGAHSFEEDQVTQSPEALRLQEGESSSLNCSYTVSGLRGLFWYRQDPGKGPEFLFTLYSAGEEKEKERLKATLTKKESFLHITAPKPEDSATYLCAVQANRGSTLGRLYFGRGTQLTVWPDTRAPTKAPDVFPIISGCRHPKDNSPVVLACLITGYHPTSVTVTWYMGTQSQPQRTFPEIQRRDSYYMTSSQLSTPLQQWRQGEYKCVVQHTASKSKKEIFRWPESPKAQASSVPTAQPQAEGSLAKATTAPATTRNTGRGGEEKKKEKEKEEQEERETKTPGTQSFGLLDPKLCYLLDGILFIYGVILTALFLRVKFSRSADAPAYQQGQNQLYNELNLGRREEYDVLDKRRGRDPEMGGKPQRRKNPQEGLYNELQKDKMAEAYSEIGMKGERRRGKGHDGLYQGLSTATKDTYDALHMQALPPRRAKRSGSGVKQTLNFDLLKLAGDVESNPGPSRGHMALPVTALLLPLALLLHAARPSQFRVSPLDRTWNLGETVELKCQVLLSNPTSGCSWLFQPRGAAASPTFLLYLSQNKPKAAEGLDTQRFSGKRLGDTFVLTLSDFRRENEGYYFCSALSNSIMYFSHFVPVFLPAKPTTTPAPRPPTPAPTIASQPLSLRPEACRPAAGGAVHTRGLDFACDIYIWAPLAGTCGVLLLSLVITLYCNHRNRRRVCKCPRPVVKSGDKPSLSARYV

SEQ ID NO: 11144 - protein, 1064 aa, synthetic construct
MALPVTALLLPLALLLHAARPSRYLVKRTGEKVFLECVQDMDHENMFWYRQDPGLGLRLIYFSYDVKMKEKGDIPEGYSVSREKKERFSLILESASTNQTSMYLCASSLWGRLAKNIQYFGAGTRLSVLELEGQPKANPTVTLFPPSSEELQANKATLVCLISDFYPGAVTVAWKADGSPVKAGVETTKPSKQSNNKYAASSYLSLTPEQWKSHRSYSCQVTHEGSTVEKTVAPTECSGSQSFGLLDPKLCYLLDGILFIYGVILTALFLRVKFSRSADAPAYQQGQNQLYNELNLGRREEYDVLDKRRGRDPEMGGKPQRRKNPQEGLYNELQKDKMAEAYSEIGMKGERRRGKGHDGLYQGLSTATKDTYDALHMQALPPRRAKRSGSGATNFSLLKQAGDVEENPGPTSMDWIWRILFLVGAATGAHSFEEDQVTQSPEALRLQEGESSSLNCSYTVSGLRGLFWYRQDPGKGPEFLFTLYSAGEEKEKERLKATLTKKESFLHITAPKPEDSATYLCAVQANRGSTLGRLYFGRGTQLTVWPDTRASTKGPSVFPLAPCSRSTSESTAALGCLVKDYFPEPVTVSWNSGALTSGVHTFPAVLQSSGLYSLSSVVTVPSSNFGTQTYTCNVDHKPSNTKVDKTVERKGTQSFGLLDPKLCYLLDGILFIYGVILTALFLRVKFSRSADAPAYQQGQNQLYNELNLGRREEYDVLDKRRGRDPEMGGKPQRRKNPQEGLYNELQKDKMAEAYSEIGMKGERRRGKGHDGLYQGLSTATKDTYDALHMQALPPRRAKRSGSGVKQTLNFDLLKLAGDVESNPGPSRGHMALPVTALLLPLALLLHAARPSQFRVSPLDRTWNLGETVELKCQVLLSNPTSGCSWLFQPRGAAASPTFLLYLSQNKPKAAEGLDTQRFSGKRLGDTFVLTLSDFRRENEGYYFCSALSNSIMYFSHFVPVFLPAKPTTTPAPRPPTPAPTIASQPLSLRPEACRPAAGGAVHTRGLDFACDIYIWAPLAGTCGVLLLSLVITLYCNHRNRRRVCKCPRPVVKSGDKPSLSARYV

SEQ ID NO: 11145 - protein, 1071 aa, synthetic construct
MALPVTALLLPLALLLHAARPSRYLVKRTGEKVFLECVQDMDHENMFWYRQDPGLGLRLIYFSYDVKMKEKGDIPEGYSVSREKKERFSLILESASTNQTSMYLCASSLWGRLAKNIQYFGAGTRLSVLELEGQPKANPTVTLFPPSSEELQANKATLVCLISDFYPGAVTVAWKADGSPVKAGVETTKPSKQSNNKYAASSYLSLTPEQWKSHRSYSCQVTHEGSTVEKTVAPTECSGSQSFGLLDPKLCYLLDGILFIYGVILTALFLRVKFSRSADAPAYQQGQNQLYNELNLGRREEYDVLDKRRGRDPEMGGKPQRRKNPQEGLYNELQKDKMAEAYSEIGMKGERRRGKGHDGLYQGLSTATKDTYDALHMQALPPRRAKRSGSGATNFSLLKQAGDVEENPGPTSMDWIWRILFLVGAATGAHSFEEDQVTQSPEALRLQEGESSSLNCSYTVSGLRGLFWYRQDPGKGPEFLFTLYSAGEEKEKERLKATLTKKESFLHITAPKPEDSATYLCAVQANRGSTLGRLYFGRGTQLTVWPDTRASPTSPKVFPLSLDSTPQDGNVVVACLVQGFFPQEPLSVTWSESGQNVTARNFPPSQDASGDLYTTSSQLTLPATQCPDGKSVTCHVKHYTNPSQDVTVPCPVPPPPPGTQSFGLLDPKLCYLLDGILFIYGVILTALFLRVKFSRSADAPAYQQGQNQLYNELNLGRREEYDVLDKRRGRDPEMGGKPQRRKNPQEGLYNELQKDKMAEAYSEIGMKGERRRGKGHDGLYQGLSTATKDTYDALHMQALPPRRAKRSGSGVKQTLNFDLLKLAGDVESNPGPSRGHMALPVTALLLPLALLLHAARPSQFRVSPLDRTWNLGETVELKCQVLLSNPTSGCSWLFQPRGAAASPTFLLYLSQNKPKAAEGLDTQRFSGKRLGDTFVLTLSDFRRENEGYYFCSALSNSIMYFSHFVPVFLPAKPTTTPAPRPPTPAPTIASQPLSLRPEACRPAAGGAVHTRGLDFACDIYIWAPLAGTCGVLLLSLVITLYCNHRNRRRVCKCPRPVVKSGDKPSLSARYV

SEQ ID NO: 11146 - protein, 1066 aa, synthetic construct
MALPVTALLLPLALLLHAARPSRYLVKRTGEKVFLECVQDMDHENMFWYRQDPGLGLRLIYFSYDVKMKEKGDIPEGYSVSREKKERFSLILESASTNQTSMYLCASSLWGRLAKNIQYFGAGTRLSVLELEGQPKANPTVTLFPPSSEELQANKATLVCLISDFYPGAVTVAWKADGSPVKAGVETTKPSKQSNNKYAASSYLSLTPEQWKSHRSYSCQVTHEGSTVEKTVAPTECSGSQSFGLLDPKLCYLLDGILFIYGVILTALFLRVKFSRSADAPAYQQGQNQLYNELNLGRREEYDVLDKRRGRDPEMGGKPQRRKNPQEGLYNELQKDKMAEAYSEIGMKGERRRGKGHDGLYQGLSTATKDTYDALHMQALPPRRAKRSGSGATNFSLLKQAGDVEENPGPTSMDWIWRILFLVGAATGAHSFEEDQVTQSPEALRLQEGESSSLNCSYTVSGLRGLFWYRQDPGKGPEFLFTLYSAGEEKEKERLKATLTKKESFLHITAPKPEDSATYLCAVQANRGSTLGRLYFGRGTQLTVWPDTRASTQSPSVFPLTRCCKNIPSNATSVTLGCLATGYFPEPVMVTWDTGSLNGTTMTLPATTLTLSGHYATISLLTVSGAWAKQMFTCRVAHTPSSTDWVDNKTFSGTQSFGLLDPKLCYLLDGILFIYGVILTALFLRVKFSRSADAPAYQQGQNQLYNELNLGRREEYDVLDKRRGRDPEMGGKPQRRKNPQEGLYNELQKDKMAEAYSEIGMKGERRRGKGHDGLYQGLSTATKDTYDALHMQALPPRRAKRSGSGVKQTLNFDLLKLAGDVESNPGPSRGHMALPVTALLLPLALLLHAARPSQFRVSPLDRTWNLGETVELKCQVLLSNPTSGCSWLFQPRGAAASPTFLLYLSQNKPKAAEGLDTQRFSGKRLGDTFVLTLSDFRRENEGYYFCSALSNSIMYFSHFVPVFLPAKPTTTPAPRPPTPAPTIASQPLSLRPEACRPAAGGAVHTRGLDFACDIYIWAPLAGTCGVLLLSLVITLYCNHRNRRRVCKCPRPVVKSGDKPSLSARYV

SEQ ID NO: 11147 - protein, 1066 aa, synthetic construct
MALPVTALLLPLALLLHAARPSRYLVKRTGEKVFLECVQDMDHENMFWYRQDPGLGLRLIYFSYDVKMKEKGDIPEGYSVSREKKERFSLILESASTNQTSMYLCASSLWGRLAKNIQYFGAGTRLSVLELEGQPKANPTVTLFPPSSEELQANKATLVCLISDFYPGAVTVAWKADGSPVKAGVETTKPSKQSNNKYAASSYLSLTPEQWKSHRSYSCQVTHEGSTVEKTVAPTECSGSQSFGLLDPKLCYLLDGILFIYGVILTALFLRVKFSRSADAPAYQQGQNQLYNELNLGRREEYDVLDKRRGRDPEMGGKPQRRKNPQEGLYNELQKDKMAEAYSEIGMKGERRRGKGHDGLYQGLSTATKDTYDALHMQALPPRRAKRSGSGATNFSLLKQAGDVEENPGPTSMDWIWRILFLVGAATGAHSFEEDQVTQSPEALRLQEGESSSLNCSYTVSGLRGLFWYRQDPGKGPEFLFTLYSAGEEKEKERLKATLTKKESFLHITAPKPEDSATYLCAVQANRGSTLGRLYFGRGTQLTVWPDTRASTKGPSVFPLAPCSRSTSESTAALGCLVKDYFPEPVTVSWNSGALTSGVHTFPAVLQSSGLYSLSSVVTVPSSSLGTKTYTCNVDHKPSNTKVDKRVESKYGGTQSFGLLDPKLCYLLDGILFIYGVILTALFLRVKFSRSADAPAYQQGQNQLYNELNLGRREEYDVLDKRRGRDPEMGGKPQRRKNPQEGLYNELQKDKMAEAYSEIGMKGERRRGKGHDGLYQGLSTATKDTYDALHMQALPPRRAKRSGSGVKQTLNFDLLKLAGDVESNPGPSRGHMALPVTALLLPLALLLHAARPSQFRVSPLDRTWNLGETVELKCQVLLSNPTSGCSWLFQPRGAAASPTFLLYLSQNKPKAAEGLDTQRFSGKRLGDTFVLTLSDFRRENEGYYFCSALSNSIMYFSHFVPVFLPAKPTTTPAPRPPTPAPTIASQPLSLRPEACRPAAGGAVHTRGLDFACDIYIWAPLAGTCGVLLLSLVITLYCNHRNRRRVCKCPRPVVKSGDKPSLSARYV

SEQ ID NO: 11148 - protein, 1066 aa, synthetic construct
MALPVTALLLPLALLLHAARPSRYLVKRTGEKVFLECVQDMDHENMFWYRQDPGLGLRLIYFSYDVKMKEKGDIPEGYSVSREKKERFSLILESASTNQTSMYLCASSLWGRLAKNIQYFGAGTRLSVLELEGQPKANPTVTLFPPSSEELQANKATLVCLISDFYPGAVTVAWKADGSPVKAGVETTKPSKQSNNKYAASSYLSLTPEQWKSHRSYSCQVTHEGSTVEKTVAPTECSGSQSFGLLDPKLCYLLDGILFIYGVILTALFLRVKFSRSADAPAYQQGQNQLYNELNLGRREEYDVLDKRRGRDPEMGGKPQRRKNPQEGLYNELQKDKMAEAYSEIGMKGERRRGKGHDGLYQGLSTATKDTYDALHMQALPPRRAKRSGSGATNFSLLKQAGDVEENPGPTSMDWIWRILFLVGAATGAHSFEEDQVTQSPEALRLQEGESSSLNCSYTVSGLRGLFWYRQDPGKGPEFLFTLYSAGEEKEKERLKATLTKKESFLHITAPKPEDSATYLCAVQANRGSTLGRLYFGRGTQLTVWPDTRASTKGPSVFPLAPCSRSTSESTAALGCLVKDYFPEPVTVSWNSGALTSGVHTFPAVLQSSGLYSLSSVVTVPSSNFGTQTYTCNVDHKPSNTKVDKTVERKCCGTQSFGLLDPKLCYLLDGILFIYGVILTALFLRVKFSRSADAPAYQQGQNQLYNELNLGRREEYDVLDKRRGRDPEMGGKPQRRKNPQEGLYNELQKDKMAEAYSEIGMKGERRRGKGHDGLYQGLSTATKDTYDALHMQALPPRRAKRSGSGVKQTLNFDLLKLAGDVESNPGPSRGHMALPVTALLLPLALLLHAARPSQFRVSPLDRTWNLGETVELKCQVLLSNPTSGCSWLFQPRGAAASPTFLLYLSQNKPKAAEGLDTQRFSGKRLGDTFVLTLSDFRRENEGYYFCSALSNSIMYFSHFVPVFLPAKPTTTPAPRPPTPAPTIASQPLSLRPEACRPAAGGAVHTRGLDFACDIYIWAPLAGTCGVLLLSLVITLYCNHRNRRRVCKCPRPVVKSGDKPSLSARYV

SEQ ID NO: 11149 - protein, 1081 aa, synthetic construct
MALPVTALLLPLALLLHAARPSRYLVKRTGEKVFLECVQDMDHENMFWYRQDPGLGLRLIYFSYDVKMKEKGDIPEGYSVSREKKERFSLILESASTNQTSMYLCASSLWGRLAKNIQYFGAGTRLSVLELEDLKNVFPPEVAVFEPSEAEISHTQKATLVCLATGFYPDHVELSWWVNGKEVHSGVSTDPQPLKEQPALNDSRYCLSSRLRVSATFWQNPRNHFRCQVQFYGLSENDEWTQDRAKPVTQIVSAEAWGRADCGSQSFGLLDPKLCYLLDGILFIYGVILTALFLRVKFSRSADAPAYQQGQNQLYNELNLGRREEYDVLDKRRGRDPEMGGKPQRRKNPQEGLYNELQKDKMAEAYSEIGMKGERRRGKGHDGLYQGLSTATKDTYDALHMQALPPRRAKRSGSGATNFSLLKQAGDVEENPGPTSMDWIWRILFLVGAATGAHSFEEDQVTQSPEALRLQEGESSSLNCSYTVSGLRGLFWYRQDPGKGPEFLFTLYSAGEEKEKERLKATLTKKESFLHITAPKPEDSATYLCAVQANRGSTLGRLYFGRGTQLTVWPDTRIQNPDPAVYQLRDSKSSDKSVCLFTDFDSQTNVSQSKDSDVYITDKTVLDMRSMDFKSNSAVAWSNKSDFACANAFNNSIIPEDTFFPSPESSCGTQSFGLLDPKLCYLLDGILFIYGVILTALFLRVKFSRSADAPAYQQGQNQLYNELNLGRREEYDVLDKRRGRDPEMGGKPQRRKNPQEGLYNELQKDKMAEAYSEIGMKGERRRGKGHDGLYQGLSTATKDTYDALHMQALPPRRAKRSGSGVKQTLNFDLLKLAGDVESNPGPSRGHMALPVTALLLPLALLLHAARPSQFRVSPLDRTWNLGETVELKCQVLLSNPTSGCSWLFQPRGAAASPTFLLYLSQNKPKAAEGLDTQRFSGKRLGDTFVLTLSDFRRENEGYYFCSALSNSIMYFSHFVPVFLPAKPTTTPAPRPPTPAPTIASQPLSLRPEACRPAAGGAVHTRGLDFACDIYIWAPLAGTCGVLLLSLVITLYCNHRNRRRVCKCPRPVVKSGDKPSLSARYV

SEQ ID NO: 11150 - protein, 1081 aa, synthetic construct
MALPVTALLLPLALLLHAARPSRYLVKRTGEKVFLECVQDMDHENMFWYRQDPGLGLRLIYFSYDVKMKEKGDIPEGYSVSREKKERFSLILESASTNQTSMYLCASSLWGRLAKNIQYFGAGTRLSVLELEDLKNVFPPEVAVFEPSKAEIAHTQKATLVCLATGFYPDHVELSWWVNGKEVHSGVCTDPQPLKEQPALNDSRYCLSSRLRVSATFWQNPRNHFRCQVQFYGLSENDEWTQDRAKPVTQIVSAEAWGRADCGSQSFGLLDPKLCYLLDGILFIYGVILTALFLRVKFSRSADAPAYQQGQNQLYNELNLGRREEYDVLDKRRGRDPEMGGKPQRRKNPQEGLYNELQKDKMAEAYSEIGMKGERRRGKGHDGLYQGLSTATKDTYDALHMQALPPRRAKRSGSGATNFSLLKQAGDVEENPGPTSMDWIWRILFLVGAATGAHSFEEDQVTQSPEALRLQEGESSSLNCSYTVSGLRGLFWYRQDPGKGPEFLFTLYSAGEEKEKERLKATLTKKESFLHITAPKPEDSATYLCAVQANRGSTLGRLYFGRGTQLTVWPDTRIQNPDPAVYQLRDSKSSDKSVCLFTDFDSQTNVSQSKDSDVYITDKCVLDMRSMDFKSNSAVAWSNKSDFACANAFNNSIIPEDTFFPSSDVPCGTQSFGLLDPKLCYLLDGILFIYGVILTALFLRVKFSRSADAPAYQQGQNQLYNELNLGRREEYDVLDKRRGRDPEMGGKPQRRKNPQEGLYNELQKDKMAEAYSEIGMKGERRRGKGHDGLYQGLSTATKDTYDALHMQALPPRRAKRSGSGVKQTLNFDLLKLAGDVESNPGPSRGHMALPVTALLLPLALLLHAARPSQFRVSPLDRTWNLGETVELKCQVLLSNPTSGCSWLFQPRGAAASPTFLLYLSQNKPKAAEGLDTQRFSGKRLGDTFVLTLSDFRRENEGYYFCSALSNSIMYFSHFVPVFLPAKPTTTPAPRPPTPAPTIASQPLSLRPEACRPAAGGAVHTRGLDFACDIYIWAPLAGTCGVLLLSLVITLYCNHRNRRRVCKCPRPVVKSGDKPSLSARYV

SEQ ID NO: 11151 - protein, 812 aa, synthetic construct
MALPVTALLLPLALLLHAARPSRYLVKRTGEKVFLECVQDMDHENMFWYRQDPGLGLRLIYFSYDVKMKEKGDIPEGYSVSREKKERFSLILESASTNQTSMYLCASSLWGRLAKNIQYFGAGTRLSVLELEDLKNVFPPEVAVFEPSEAEISHTQKATLVCLATGFYPDHVELSWWVNGKEVHSGVCTDPQPLKEQPALNDSRYCLSSRLRVSATFWQNPRNHFRCQVQFYGLSENDEWTQDRAKPVTQIVSAEAWGRADCGSQSFGLLDPKLCYLLDGILFIYGVILTALFLRVKFSRSADAPAYQQGQNQLYNELNLGRREEYDVLDKRRGRDPEMGGKPQRRKNPQEGLYNELQKDKMAEAYSEIGMKGERRRGKGHDGLYQGLSTATKDTYDALHMQALPPRRAKRSGSGATNFSLLKQAGDVEENPGPTSMDWIWRILFLVGAATGAHSFEEDQVTQSPEALRLQEGESSSLNCSYTVSGLRGLFWYRQDPGKGPEFLFTLYSAGEEKEKERLKATLTKKESFLHITAPKPEDSATYLCAVQANRGSTLGRLYFGRGTQLTVWPDTRIQNPDPAVYQLRDSKSSDKSVCLFTDFDSQTNVSQSKDSDVYITDKCVLDMRSMDFKSNSAVAWSNKSDFACANAFNNSIIPEDTFFPSPESSCGTQSFGLLDPKLCYLLDGILFIYGVILTALFLRVKFSRSADAPAYQQGQNQLYNELNLGRREEYDVLDKRRGRDPEMGGKPQRRKNPQEGLYNELQKDKMAEAYSEIGMKGERRRGKGHDGLYQGLSTATKDTYDALHMQALPPR

SEQ ID NO: 11152 - protein, 853 aa, synthetic construct
MALPVTALLLPLALLLHAARPSRYLVKRTGEKVFLECVQDMDHENMFWYRQDPGLGLRLIYFSYDVKMKEKGDIPEGYSVSREKKERFSLILESASTNQTSMYLCASSLWGRLAKNIQYFGAGTRLSVLELEQSFGLLDPKLCYLLDGILFIYGVILTALFLRVKFSRSADAPAYQQGQNQLYNELNLGRREEYDVLDKRRGRDPEMGGKPQRRKNPQEGLYNELQKDKMAEAYSEIGMKGERRRGKGHDGLYQGLSTATKDTYDALHMQALPPRRAKRSGSGATNFSLLKQAGDVEENPGPTSMDWIWRILFLVGAATGAHSFEEDQVTQSPEALRLQEGESSSLNCSYTVSGLRGLFWYRQDPGKGPEFLFTLYSAGEEKEKERLKATLTKKESFLHITAPKPEDSATYLCAVQANRGSTLGRLYFGRGTQLTVWPDTRQSFGLLDPKLCYLLDGILFIYGVILTALFLRVKFSRSADAPAYQQGQNQLYNELNLGRREEYDVLDKRRGRDPEMGGKPQRRKNPQEGLYNELQKDKMAEAYSEIGMKGERRRGKGHDGLYQGLSTATKDTYDALHMQALPPRRAKRSGSGVKQTLNFDLLKLAGDVESNPGPSRGHMALPVTALLLPLALLLHAARPSQFRVSPLDRTWNLGETVELKCQVLLSNPTSGCSWLFQPRGAAASPTFLLYLSQNKPKAAEGLDTQRFSGKRLGDTFVLTLSDFRRENEGYYFCSALSNSIMYFSHFVPVFLPAKPTTTPAPRPPTPAPTIASQPLSLRPEACRPAAGGAVHTRGLDFACDIYIWAPLAGTCGVLLLSLVITLYCNHRNRRRVCKCPRPVVKSGDKPSLSARYV

SEQ ID NO: 11153 - protein, 853 aa, synthetic construct
MALPVTALLLPLALLLHAARPSRYLVKRTGEKVFLECVQDMDHENMFWYRQDPGLGLRLIYFSYDVKMKEKGDIPEGYSVSREKKERFSLILESASTNQTSMYLCASSLWGRLAKNIQYFGAGTRLSVLELEDLKNVFPPEVAVFEPSEAEISHTQKATLVCLATGFYPDHVELSWWVNGKEVHSGVCTDPQPLKEQPALNDSRYCLSSRLRVSATFWQNPRNHFRCQVQFYGLSENDEWTQDRAKPVTQIVSAEAWGRADCGSQSFGLLDPKLCYLLDGILFIYGVILTALFLRSKRSRLLHSDYMNMTPRRPGPTRKHYQPYAPPRDFAAYRSRVKFSRSADAPAYQQGQNQLYNELNLGRREEYDVLDKRRGRDPEMGGKPQRRKNPQEGLYNELQKDKMAEAYSEIGMKGERRRGKGHDGLYQGLSTATKDTYDALHMQALPPRRAKRSGSGATNFSLLKQAGDVEENPGPTSMDWIWRILFLVGAATGAHSFEEDQVTQSPEALRLQEGESSSLNCSYTVSGLRGLFWYRQDPGKGPEFLFTLYSAGEEKEKERLKATLTKKESFLHITAPKPEDSATYLCAVQANRGSTLGRLYFGRGTQLTVWPDTRIQNPDPAVYQLRDSKSSDKSVCLFTDFDSQTNVSQSKDSDVYITDKCVLDMRSMDFKSNSAVAWSNKSDFACANAFNNSIIPEDTFFPSPESSCGTQSFGLLDPKLCYLLDGILFIYGVILTALFLRVKFSRSADAPAYQQGQNQLYNELNLGRREEYDVLDKRRGRDPEMGGKPQRRKNPQEGLYNELQKDKMAEAYSEIGMKGERRRGKGHDGLYQGLSTATKDTYDALHMQALPPR

SEQ ID NO: 11154 - protein, 894 aa, synthetic construct
MALPVTALLLPLALLLHAARPSRYLVKRTGEKVFLECVQDMDHENMFWYRQDPGLGLRLIYFSYDVKMKEKGDIPEGYSVSREKKERFSLILESASTNQTSMYLCASSLWGRLAKNIQYFGAGTRLSVLELEDLKNVFPPEVAVFEPSEAEISHTQKATLVCLATGFYPDHVELSWWVNGKEVHSGVCTDPQPLKEQPALNDSRYCLSSRLRVSATFWQNPRNHFRCQVQFYGLSENDEWTQDRAKPVTQIVSAEAWGRADCGSQSFGLLDPKLCYLLDGILFIYGVILTALFLRSKRSRLLHSDYMNMTPRRPGPTRKHYQPYAPPRDFAAYRSRVKFSRSADAPAYQQGQNQLYNELNLGRREEYDVLDKRRGRDPEMGGKPQRRKNPQEGLYNELQKDKMAEAYSEIGMKGERRRGKGHDGLYQGLSTATKDTYDALHMQALPPRRAKRSGSGATNFSLLKQAGDVEENPGPTSMDWIWRILFLVGAATGAHSFEEDQVTQSPEALRLQEGESSSLNCSYTVSGLRGLFWYRQDPGKGPEFLFTLYSAGEEKEKERLKATLTKKESFLHITAPKPEDSATYLCAVQANRGSTLGRLYFGRGTQLTVWPDTRIQNPDPAVYQLRDSKSSDKSVCLFTDFDSQTNVSQSKDSDVYITDKCVLDMRSMDFKSNSAVAWSNKSDFACANAFNNSIIPEDTFFPSPESSCGTQSFGLLDPKLCYLLDGILFIYGVILTALFLRSKRSRLLHSDYMNMTPRRPGPTRKHYQPYAPPRDFAAYRSRVKFSRSADAPAYQQGQNQLYNELNLGRREEYDVLDKRRGRDPEMGGKPQRRKNPQEGLYNELQKDKMAEAYSEIGMKGERRRGKGHDGLYQGLSTATKDTYDALHMQALPPR

SEQ ID NO: 11155 - protein, 812 aa, synthetic construct
MALPVTALLLPLALLLHAARPSRYLVKRTGEKVFLECVQDMDHENMFWYRQDPGLGLRLIYFSYDVKMKEKGDIPEGYSVSREKKERFSLILESASTNQTSMYLCASSLWGRLAKNIQYFGAGTRLSVLELEDLKNVFPPEVAVFEPSEAEISHTQKATLVCLATGFYPDHVELSWWVNGKEVHSGVSTDPQPLKEQPALNDSRYCLSSRLRVSATFWQNPRNHFRCQVQFYGLSENDEWTQDRAKPVTQIVSAEAWGRADCGSQSFGLLDPKLCYLLDGILFIYGVILTALFLRVKFSRSADAPAYQQGQNQLYNELNLGRREEYDVLDKRRGRDPEMGGKPQRRKNPQEGLYNELQKDKMAEAYSEIGMKGERRRGKGHDGLYQGLSTATKDTYDALHMQALPPRRAKRSGSGATNFSLLKQAGDVEENPGPTSMDWIWRILFLVGAATGAHSFEEDQVTQSPEALRLQEGESSSLNCSYTVSGLRGLFWYRQDPGKGPEFLFTLYSAGEEKEKERLKATLTKKESFLHITAPKPEDSATYLCAVQANRGSTLGRLYFGRGTQLTVWPDTRIQNPDPAVYQLRDSKSSDKSVCLFTDFDSQTNVSQSKDSDVYITDKTVLDMRSMDFKSNSAVAWSNKSDFACANAFNNSIIPEDTFFPSPESSCGTQSFGLLDPKLCYLLDGILFIYGVILTALFLRVKFSRSADAPAYQQGQNQLYNELNLGRREEYDVLDKRRGRDPEMGGKPQRRKNPQEGLYNELQKDKMAEAYSEIGMKGERRRGKGHDGLYQGLSTATKDTYDALHMQALPPR

SEQ ID NO: 11156 - protein, 1056 aa, synthetic construct
MALPVTALLLPLALLLHAARPSRYLVKRTGEKVFLECVQDMDHENMFWYRQDPGLGLRLIYFSYDVKMKEKGDIPEGYSVSREKKERFSLILESASTNQTSMYLCASSLWGRLAKNIQYFGAGTRLSVLELEDKQLDADVSPKPTIFLPSIAETKLQKAGTYLCLLEKFFPDVIKIHWQEKKSNTILGSQEGNTMKTNDTYMKFSWLTVPEKSLDKEHRCIVRHENNKNGVDQEIIFPPIKTDVITGSQSFGLLDPKLCYLLDGILFIYGVILTALFLRVKFSRSADAPAYQQGQNQLYNELNLGRREEYDVLDKRRGRDPEMGGKPQRRKNPQEGLYNELQKDKMAEAYSEIGMKGERRRGKGHDGLYQGLSTATKDTYDALHMQALPPRRAKRSGSGATNFSLLKQAGDVEENPGPTSMDWIWRILFLVGAATGAHSFEEDQVTQSPEALRLQEGESSSLNCSYTVSGLRGLFWYRQDPGKGPEFLFTLYSAGEEKEKERLKATLTKKESFLHITAPKPEDSATYLCAVQANRGSTLGRLYFGRGTQLTVWPDTRSQPHTKPSVFVMKNGTNVACLVKEFYPKDIRINLVSSKKITEFDPAIVISPSGKYNAVKLGKYEDSNSVTCSVQHDNKTVHSTDFGTQSFGLLDPKLCYLLDGILFIYGVILTALFLRVKFSRSADAPAYQQGQNQLYNELNLGRREEYDVLDKRRGRDPEMGGKPQRRKNPQEGLYNELQKDKMAEAYSEIGMKGERRRGKGHDGLYQGLSTATKDTYDALHMQALPPRRAKRSGSGVKQTLNFDLLKLAGDVESNPGPSRGHMALPVTALLLPLALLLHAARPSQFRVSPLDRTWNLGETVELKCQVLLSNPTSGCSWLFQPRGAAASPTFLLYLSQNKPKAAEGLDTQRFSGKRLGDTFVLTLSDFRRENEGYYFCSALSNSIMYFSHFVPVFLPAKPTTTPAPRPPTPAPTIASQPLSLRPEACRPAAGGAVHTRGLDFACDIYIWAPLAGTCGVLLLSLVITLYCNHRNRRRVCKCPRPVVKSGDKPSLSARYV

SEQ ID NO: 11157 - protein, 924 aa, synthetic construct
MALPVTALLLPLALLLHAARPSRYLVKRTGEKVFLECVQDMDHENMFWYRQDPGLGLRLIYFSYDVKMKEKGDIPEGYSVSREKKERFSLILESASTNQTSMYLCASSLWGRLAKNIQYFGAGTRLSVLELEGQPKANPTVTLFPPSSEELQANKATLVCLISDFYPGAVTVAWKADGSPVKAGVETTKPSKQSNNKYAASSYLSLTPEQWKSHRSYSCQVTHEGSTVEKTVAPTECSTTPGERSSLPAFYPGTSGSCSGCGSLSLPLLAGLVAADAVASLLIVGAVFLCARPRRSPAQEDGKVYINMPGRGRAKRSGSGATNFSLLKQAGDVEENPGPTSMDWIWRILFLVGAATGAHSFEEDQVTQSPEALRLQEGESSSLNCSYTVSGLRGLFWYRQDPGKGPEFLFTLYSAGEEKEKERLKATLTKKESFLHITAPKPEDSATYLCAVQANRGSTLGRLYFGRGTQLTVWPDTRASTKGPSVFPLAPSSKSTSGGTAALGCLVKDYFPEPVTVSWNSGALTSGVHTFPAVLQSSGLYSLSSVVTVPSSSLGTQTYICNVNHKPSNTKVDKRVEPKSCTTPGERSSLPAFYPGTSGSCSGCGSLSLPLLAGLVAADAVASLLIVGAVFLCARPRRSPAQEDGKVYINMPGRGRAKRSGSGVKQTLNFDLLKLAGDVESNPGPSRGHMALPVTALLLPLALLLHAARPSQFRVSPLDRTWNLGETVELKCQVLLSNPTSGCSWLFQPRGAAASPTFLLYLSQNKPKAAEGLDTQRFSGKRLGDTFVLTLSDFRRENEGYYFCSALSNSIMYFSHFVPVFLPAKPTTTPAPRPPTPAPTIASQPLSLRPEACRPAAGGAVHTRGLDFACDIYIWAPLAGTCGVLLLSLVITLYCNHRNRRRVCKCPRPVVKSGDKPSLSARYV

SEQ ID NO: 11158 - protein, 753 aa, synthetic construct
MALPVTALLLPLALLLHAARPSRYLVKRTGEKVFLECVQDMDHENMFWYRQDPGLGLRLIYFSYDVKMKEKGDIPEGYSVSREKKERFSLILESASTNQTSMYLCASSLWGRLAKNIQYFGAGTRLSVLELEGDIENTSLAPEDPTFPADTWGTYLLTTETGLQKDHALWDHTAQNLLRMGLAFLVLVALVWFLVEDWLSRKRTRERASRASTWEGRRRLNTQTLRAKRSGSGATNFSLLKQAGDVEENPGPTSMDWIWRILFLVGAATGAHSFEEDQVTQSPEALRLQEGESSSLNCSYTVSGLRGLFWYRQDPGKGPEFLFTLYSAGEEKEKERLKATLTKKESFLHITAPKPEDSATYLCAVQANRGSTLGRLYFGRGTQLTVWPDTRGDIENTSLAPEDPTFPADTWGTYLLTTETGLQKDHALWDHTAQNLLRMGLAFLVLVALVWFLVEDWLSRKRTRERASRASTWEGRRRLNTQTLRAKRSGSGVKQTLNFDLLKLAGDVESNPGPSRGHMALPVTALLLPLALLLHAARPSQFRVSPLDRTWNLGETVELKCQVLLSNPTSGCSWLFQPRGAAASPTFLLYLSQNKPKAAEGLDTQRFSGKRLGDTFVLTLSDFRRENEGYYFCSALSNSIMYFSHFVPVFLPAKPTTTPAPRPPTPAPTIASQPLSLRPEACRPAAGGAVHTRGLDFACDIYIWAPLAGTCGVLLLSLVITLYCNHRNRRRVCKCPRPVVKSGDKPSLSARYV

SEQ ID NO: 11159 - protein, 697 aa, synthetic construct
MALPVTALLLPLALLLHAARPSRYLVKRTGEKVFLECVQDMDHENMFWYRQDPGLGLRLIYFSYDVKMKEKGDIPEGYSVSREKKERFSLILESASTNQTSMYLCASSLWGRLAKNIQYFGAGTRLSVLELEITQGLAVSTISSFFPPGYQVSFCLVMVLLFAVDTGLYFSVKTNIRSSTRDWKDHKFKWRKDPQDKRAKRSGSGATNFSLLKQAGDVEENPGPTSMDWIWRILFLVGAATGAHSFEEDQVTQSPEALRLQEGESSSLNCSYTVSGLRGLFWYRQDPGKGPEFLFTLYSAGEEKEKERLKATLTKKESFLHITAPKPEDSATYLCAVQANRGSTLGRLYFGRGTQLTVWPDTRITQGLAVSTISSFFPPGYQVSFCLVMVLLFAVDTGLYFSVKTNIRSSTRDWKDHKFKWRKDPQDKRAKRSGSGVKQTLNFDLLKLAGDVESNPGPSRGHMALPVTALLLPLALLLHAARPSQFRVSPLDRTWNLGETVELKCQVLLSNPTSGCSWLFQPRGAAASPTFLLYLSQNKPKAAEGLDTQRFSGKRLGDTFVLTLSDFRRENEGYYFCSALSNSIMYFSHFVPVFLPAKPTTTPAPRPPTPAPTIASQPLSLRPEACRPAAGGAVHTRGLDFACDIYIWAPLAGTCGVLLLSLVITLYCNHRNRRRVCKCPRPVVKSGDKPSLSARYV

SEQ ID NO: 11160 - protein, 789 aa, synthetic construct
MALPVTALLLPLALLLHAARPSRYLVKRTGEKVFLECVQDMDHENMFWYRQDPGLGLRLIYFSYDVKMKEKGDIPEGYSVSREKKERFSLILESASTNQTSMYLCASSFWGRSTDTQYFGPGTRLTVGQPKANPTVTLFPPSSEELQANKATLVCLISDFYPGAVTVAWKADGSPVKAGVETTKPSKQSNNKYAASSYLSLTPEQWKSHRSYSCQVTHEGSTVEKTVAPTECSGSQSFGLLDPKLCYLLDGILFIYGVILTALFLRVKFSRSADAPAYQQGQNQLYNELNLGRREEYDVLDKRRGRDPEMGGKPQRRKNPQEGLYNELQKDKMAEAYSEIGMKGERRRGKGHDGLYQGLSTATKDTYDALHMQALPPRRAKRSGSGATNFSLLKQAGDVEENPGPTSMDWIWRILFLVGAATGAHSFEKQEVTQIPAALSVPEGENLVLNCSFTDSAIYNLQWFRQDPGKGLTSLLLIQSSQREQTSGRLNASLDKSSGRSTLYIAASQPGDSATYLCAVRETSGSRLTFGEGTQLTVNPDASTKGPSVFPLAPSSKSTSGGTAALGCLVKDYFPEPVTVSWNSGALTSGVHTFPAVLQSSGLYSLSSVVTVPSSSLGTQTYICNVNHKPSNTKVDKRVEPKSCGTQSFGLLDPKLCYLLDGILFIYGVILTALFLRVKFSRSADAPAYQQGQNQLYNELNLGRREEYDVLDKRRGRDPEMGGKPQRRKNPQEGLYNELQKDKMAEAYSEIGMKGERRRGKGHDGLYQGLSTATKDTYDALHMQALPPR

SEQ ID NO: 11161 - protein, 555 aa, synthetic construct
MALPVTALLLPLALLLHAARPSRYLVKRTGEKVFLECVQDMDHENMFWYRQDPGLGLRLIYFSYDVKMKEKGDIPEGYSVSREKKERFSLILESASTNQTSMYLCASSFWGRSTDTQYFGPGTRLTVLEQSFGLLDPKLCYLLDGILFIYGVILTALFLRVKFSRSADAPAYQQGQNQLYNELNLGRREEYDVLDKRRGRDPEMGGKPQRRKNPQEGLYNELQKDKMAEAYSEIGMKGERRRGKGHDGLYQGLSTATKDTYDALHMQALPPRRAKRSGSGATNFSLLKQAGDVEENPGPTSMDWIWRILFLVGAATGAHSFEKQEVTQIPAALSVPEGENLVLNCSFTDSAIYNLQWFRQDPGKGLTSLLLIQSSQREQTSGRLNASLDKSSGRSTLYIAASQPGDSATYLCAVRETSGSRLTFGEGTQLTVNPDTRQSFGLLDPKLCYLLDGILFIYGVILTALFLRVKFSRSADAPAYQQGQNQLYNELNLGRREEYDVLDKRRGRDPEMGGKPQRRKNPQEGLYNELQKDKMAEAYSEIGMKGERRRGKGHD

SEQ ID NO: 11162 - protein, 939 aa, synthetic construct
MALPVTALLLPLALLLHAARPSRYLVKRTGEKVFLECVQDMDHENMFWYRQDPGLGLRLIYFSYDVKMKEKGDIPEGYSVSREKKERFSLILESASTNQTSMYLCASSFWGRSTDTQYFGPGTRLTVLETTPGERSSLPAFYPGTSGSCSGCGSLSLPLLAGLVAADAVASLLIVGAVFLCARPRRSPAQEDGKVYINMPGRGSTSRVKFSRSADAPAYQQGQNQLYNELNLGRREEYDVLDKRRGRDPEMGGKPQRRKNPQEGLYNELQKDKMAEAYSEIGMKGERRRGKGHDGLYQGLSTATKDTYDALHMQALPPRRAKRSGSGATNFSLLKQAGDVEENPGPMDWIWRILFLVGAATGAHSFEKQEVTQIPAALSVPEGENLVLNCSFTDSAIYNLQWFRQDPGKGLTSLLLIQSSQREQTSGRLNASLDKSSGRSTLYIAASQPGDSATYLCAVRETSGSRLTFGEGTQLTVNPDTRTTPGERSSLPAFYPGTSGSCSGCGSLSLPLLAGLVAADAVASLLIVGAVFLCARPRRSPAQEDGKVYINMPGRGSSRRVKFSRSADAPAYQQGQNQLYNELNLGRREEYDVLDKRRGRDPEMGGKPQRRKNPQEGLYNELQKDKMAEAYSEIGMKGERRRGKGHDGLYQGLSTATKDTYDALHMQALPPRRAKRSGSGVKQTLNFDLLKLAGDVESNPGPGHMALPVTALLLPLALLLHAARPSQFRVSPLDRTWNLGETVELKCQVLLSNPTSGCSWLFQPRGAAASPTFLLYLSQNKPKAAEGLDTQRFSGKRLGDTFVLTLSDFRRENEGYYFCSALSNSIMYFSHFVPVFLPAKPTTTPAPRPPTPAPTIASQPLSLRPEACRPAAGGAVHTRGLDFACDIYIWAPLAGTCGVLLLSLVITLYCNHRNRRRVCKCPRPVVKSGDKPSLSARYV

SEQ ID NO: 11163 - protein, 939 aa, synthetic construct; identical to SEQ ID NO: 11162

SEQ ID NO: 11164 - protein, 1105 aa, synthetic construct
MALPVTALLLPLALLLHAARPSRYLVKRTGEKVFLECVQDMDHENMFWYRQDPGLGLRLIYFSYDVKMKEKGDIPEGYSVSREKKERFSLILESASTNQTSMYLCASSFWGRSTDTQYFGPGTRLTVLEGQPKANPTVTLFPPSSEELQANKATLVCLISDFYPGAVTVAWKADGSPVKAGVETTKPSKQSNNKYAASSYLSLTPEQWKSHRSYSCQVTHEGSTVEKTVAPTECSGSTTPGERSSLPAFYPGTSGSCSGCGSLSLPLLAGLVAADAVASLLIVGAVFLCARPRRSPAQEDGKVYINMPGRGSTSRVKFSRSADAPAYQQGQNQLYNELNLGRREEYDVLDKRRGRDPEMGGKPQRRKNPQEGLYNELQKDKMAEAYSEIGMKGERRRGKGHDGLYQGLSTATKDTYDALHMQALPPRRAKRSGSGATNFSLLKQAGDVEENPGPMDWIWRILFLVGAATGAHSFEKQEVTQIPAALSVPEGENLVLNCSFTDSAIYNLQWFRQDPGKGLTSLLLIQSSQREQTSGRLNASLDKSSGRSTLYIAASQPGDSATYLCAVRETSGSRLTFGEGTQLTVNPDTRASTKGPSVFPLAPSSKSTSGGTAALGCLVKDYFPEPVTVSWNSGALTSGVHTFPAVLQSSGLYSLSSVVTVPSSSLGTQTYICNVNHKPSNTKVDKRVEPKSCGTTTPGERSSLPAFYPGTSGSCSGCGSLSLPLLAGLVAADAVASLLIVGAVFLCARPRRSPAQEDGKVYINMPGRGSSRRVKFSRSADAPAYQQGQNQLYNELNLGRREEYDVLDKRRGRDPEMGGKPQRRKNPQEGLYNELQKDKMAEAYSEIGMKGERRRGKGHDGLYQGLSTATKDTYDALHMQALPPRRAKRSGSGVKQTLNFDLLKLAGDVESNPGPGHMATYEVLCEVARKLGTDDREVVLFLLNVFIPQPTLAQLIGALRALKEEGRLTFPLLAECLFRAGRRDLLRDLLHLDPRFLERHLAGTMSYFSPYQLTVLHVDGELCARDIRSLIFLSKDTIGSRSTPQTFLHWVYCMENLDLLGPTDVDALMSMLRSLSRVDLQRQVQTLMGLHLSGPSHSQHYRHTP

SEQ ID NO: 11165 - protein, 1158 aa, synthetic construct
MALPVTALLLPLALLLHAARPSRYLVKRTGEKVFLECVQDMDHENMFWYRQDPGLGLRLIYFSYDVKMKEKGDIPEGYSVSREKKERFSLILESASTNQTSMYLCASSFWGRSTDTQYFGPGTRLTVLEGQPKANPTVTLFPPSSEELQANKATLVCLISDFYPGAVTVAWKADGSPVKAGVETTKPSKQSNNKYAASSYLSLTPEQWKSHRSYSCQVTHEGSTVEKTVAPTECSGSTTPGERSSLPAFYPGTSGSCSGCGSLSLPLLAGLVAADAVASLLIVGAVFLCARPRRSPAQEDGKVYINMPGRGSTSRVKFSRSADAPAYQQGQNQLYNELNLGRREEYDVLDKRRGRDPEMGGKPQRRKNPQEGLYNELQKDKMAEAYSEIGMKGERRRGKGHDGLYQGLSTATKDTYDALHMQALPPRRAKRSGSGATNFSLLKQAGDVEENPGPMDWIWRILFLVGAATGAHSFEKQEVTQIPAALSVPEGENLVLNCSFTDSAIYNLQWFRQDPGKGLTSLLLIQSSQREQTSGRLNASLDKSSGRSTLYIAASQPGDSATYLCAVRETSGSRLTFGEGTQLTVNPDTRASTKGPSVFPLAPSSKSTSGGTAALGCLVKDYFPEPVTVSWNSGALTSGVHTFPAVLQSSGLYSLSSVVTVPSSSLGTQTYICNVNHKPSNTKVDKRVEPKSCGTTTPGERSSLPAFYPGTSGSCSGCGSLSLPLLAGLVAADAVASLLIVGAVFLCARPRRSPAQEDGKVYINMPGRGSSRRVKFSRSADAPAYQQGQNQLYNELNLGRREEYDVLDKRRGRDPEMGGKPQRRKNPQEGLYNELQKDKMAEAYSEIGMKGERRRGKGHDGLYQGLSTATKDTYDALHMQALPPRRAKRSGSGVKQTLNFDLLKLAGDVESNPGPGHMSDSKEVPSLPFLRHLLEELDSHEDSLLLFLCHDAAPGCTTVTQALCSLSQQRKLTLAALVEMLYVLQRMDLLKSRFGLSKEGAEQLLGTSFLTRYRKLMVCVGEELDSSELRALRLFACNLNPSLSTALSESSRFVELVLALENVGLVSPSSVSVLADMLRTLRRLDLCQQLVEYEQQEQARYRYCYAASPSLPVRTLRRGHGASEHEQLCMPVQESSDSPELLRTPVQESSSDSPEQTT

SEQ ID NO: 11166 - protein, 1152 aa, synthetic construct
MALPVTALLLPLALLLHAARPSRYLVKRTGEKVFLECVQDMDHENMFWYRQDPGLGLRLIYFSYDVKMKEKGDIPEGYSVSREKKERFSLILESASTNQTSMYLCASSFWGRSTDTQYFGPGTRLTVLEGQPKANPTVTLFPPSSEELQANKATLVCLISDFYPGAVTVAWKADGSPVKAGVETTKPSKQSNNKYAASSYLSLTPEQWKSHRSYSCQVTHEGSTVEKTVAPTECSGSTTPGERSSLPAFYPGTSGSCSGCGSLSLPLLAGLVAADAVASLLIVGAVFLCARPRRSPAQEDGKVYINMPGRGSTSRVKFSRSADAPAYQQGQNQLYNELNLGRREEYDVLDKRRGRDPEMGGKPQRRKNPQEGLYNELQKDKMAEAYSEIGMKGERRRGKGHDGLYQGLSTATKDTYDALHMQALPPRRAKRSGSGATNFSLLKQAGDVEENPGPMDWIWRILFLVGAATGAHSFEKQEVTQIPAALSVPEGENLVLNCSFTDSAIYNLQWFRQDPGKGLTSLLLIQSSQREQTSGRLNASLDKSSGRSTLYIAASQPGDSATYLCAVRETSGSRLTFGEGTQLTVNPDTRASTKGPSVFPLAPSSKSTSGGTAALGCLVKDYFPEPVTVSWNSGALTSGVHTFPAVLQSSGLYSLSSVVTVPSSSLGTQTYICNVNHKPSNTKVDKRVEPKSCGTTTPGERSSLPAFYPGTSGSCSGCGSLSLPLLAGLVAADAVASLLIVGAVFLCARPRRSPAQEDGKVYINMPGRGSSRRVKFSRSADAPAYQQGQNQLYNELNLGRREEYDVLDKRRGRDPEMGGKPQRRKNPQEGLYNELQKDKMAEAYSEIGMKGERRRGKGHDGLYQGLSTATKDTYDALHMQALPPRRAKRSGSGVKQTLNFDLLKLAGDVESNPGPGHMALPVTALLLPLALLLHAARPSQFRVSPLDRTWNLGETVELKCQVLLSNPTSGCSWLFQPRGAAASPTFLLYLSQNKPKAAEGLDTQRFSGKRLGDTFVLTLSDFRRENEGYYFCSALSNSIMYFSHFVPVFLPAKPTTTPAPRPPTPAPTIASQPLSLRPEACRPAAGGAVHTRGLDFACDIYIWAPLAGTCGVLLLSLVITLYCNHRNRRRVCKCPRPVVKSGDKPSLSARYV

SEQ ID NO: 11167 - protein, 1289 aa, synthetic construct
MALPVTALLLPLALLLHAARPEVQLVESGGGLVQAGGSLRLSCAASGRTFSMGWFRQAPGKEREFVAAITYSGGSPYYADSVKGRFTISRDNAKNTVYLQMNSLKPEDTAVYYCAANPTYGSDWNAENWGQGTQVTVSSGTGGGGSGGGGSGGGGSEFSRYLVKRTGEKVFLECVQDMDHENMFWYRQDPGLGLRLIYFSYDVKMKEKGDIPEGYSVSREKKERFSLILESASTNQTSMYLCASSFWGRSTDTQYFGPGTRLTVLEGQPKANPTVTLFPPSSEELQANKATLVCLISDFYPGAVTVAWKADGSPVKAGVETTKPSKQSNNKYAASSYLSLTPEQWKSHRSYSCQVTHEGSTVEKTVAPTECSGSTTPGERSSLPAFYPGTSGSCSGCGSLSLPLLAGLVAADAVASLLIVGAVFLCARPRRSPAQEDGKVYINMPGRGSTSRVKFSRSADAPAYQQGQNQLYNELNLGRREEYDVLDKRRGRDPEMGGKPQRRKNPQEGLYNELQKDKMAEAYSEIGMKGERRRGKGHDGLYQGLSTATKDTYDALHMQALPPRRAKRSGSGATNFSLLKQAGDVEENPGPMDWIWRILFLVGAATGAHSFEKQEVTQIPAALSVPEGENLVLNCSFTDSAIYNLQWFRQDPGKGLTSLLLIQSSQREQTSGRLNASLDKSSGRSTLYIAASQPGDSATYLCAVRETSGSRLTFGEGTQLTVNPDTRASTKGPSVFPLAPSSKSTSGGTAALGCLVKDYFPEPVTVSWNSGALTSGVHTFPAVLQSSGLYSLSSVVTVPSSSLGTQTYICNVNHKPSNTKVDKRVEPKSCGTTTPGERSSLPAFYPGTSGSCSGCGSLSLPLLAGLVAADAVASLLIVGAVFLCARPRRSPAQEDGKVYINMPGRGSSRRVKFSRSADAPAYQQGQNQLYNELNLGRREEYDVLDKRRGRDPEMGGKPQRRKNPQEGLYNELQKDKMAEAYSEIGMKGERRRGKGHDGLYQGLSTATKDTYDALHMQALPPRRAKRSGSGVKQTLNFDLLKLAGDVESNPGPGHMALPVTALLLPLALLLHAARPSQFRVSPLDRTWNLGETVELKCQVLLSNPTSGCSWLFQPRGAAASPTFLLYLSQNKPKAAEGLDTQRFSGKRLGDTFVLTLSDFRRENEGYYFCSALSNSIMYFSHFVPVFLPAKPTTTPAPRPPTPAPTIASQPLSLRPEACRPAAGGAVHTRGLDFACDIYIWAPLAGTCGVLLLSLVITLYCNHRNRRRVCKCPRPVVKSGDKPSLSARYV

SEQ ID NO: 11168 - protein, 1426 aa, synthetic construct
MALPVTALLLPLALLLHAARPEVQLVESGGGLVQAGGSLRLSCAASGRTFSMGWFRQAPGKEREFVAAITYSGGSPYYADSVKGRFTISRDNAKNTVYLQMNSLKPEDTAVYYCAANPTYGSDWNAENWGQGTQVTVSSGTGGGGSGGGGSGGGGSEFSRYLVKRTGEKVFLECVQDMDHENMFWYRQDPGLGLRLIYFSYDVKMKEKGDIPEGYSVSREKKERFSLILESASTNQTSMYLCASSFWGRSTDTQYFGPGTRLTVLEGQPKANPTVTLFPPSSEELQANKATLVCLISDFYPGAVTVAWKADGSPVKAGVETTKPSKQSNNKYAASSYLSLTPEQWKSHRSYSCQVTHEGSTVEKTVAPTECSGSTTPGERSSLPAFYPGTSGSCSGCGSLSLPLLAGLVAADAVASLLIVGAVFLCARPRRSPAQEDGKVYINMPGRGSTSRVKFSRSADAPAYQQGQNQLYNELNLGRREEYDVLDKRRGRDPEMGGKPQRRKNPQEGLYNELQKDKMAEAYSEIGMKGERRRGKGHDGLYQGLSTATKDTYDALHMQALPPRRAKRSGSGATNFSLLKQAGDVEENPGPMDWIWRILFLVGAATGAHSGPEVQLVESGGGLVQAGGSLRLSCAASGRTFTMGWFRQAPGKEREFVAAISLSPTLAYYADSVKGRFTISRDNAKNTVVLQMNSLKPEDTALYYCAADRKSVMSIRPDYWGQGTQVTVSSGSGGGGSGGGGSGGGGSFEKQEVTQIPAALSVPEGENLVLNCSFTDSAIYNLQWFRQDPGKGLTSLLLIQSSQREQTSGRLNASLDKSSGRSTLYIAASQPGDSATYLCAVRETSGSRLTFGEGTQLTVNPDTRASTKGPSVFPLAPSSKSTSGGTAALGCLVKDYFPEPVTVSWNSGALTSGVHTFPAVLQSSGLYSLSSVVTVPSSSLGTQTYICNVNHKPSNTKVDKRVEPKSCGTTTPGERSSLPAFYPGTSGSCSGCGSLSLPLLAGLVAADAVASLLIVGAVFLCARPRRSPAQEDGKVYINMPGRGSSRRVKFSRSADAPAYQQGQNQLYNELNLGRREEYDVLDKRRGRDPEMGGKPQRRKNPQEGLYNELQKDKMAEAYSEIGMKGERRRGKGHDGLYQGLSTATKDTYDALHMQALPPRRAKRSGSGVKQTLNFDLLKLAGDVESNPGPGHMALPVTALLLPLALLLHAARPSQFRVSPLDRTWNLGETVELKCQVLLSNPTSGCSWLFQPRGAAASPTFLLYLSQNKPKAAEGLDTQRFSGKRLGDTFVLTLSDFRRENEGYYFCSALSNSIMYFSHFVPVFLPAKPTTTPAPRPPTPAPTIASQPLSLRPEACRPAAGGAVHTRGLDFACDIYIWAPLAGTCGVLLLSLVITLYCNHRNRRRVCKCPRPVVKSGDKPSLSARYV

SEQ ID NO: 11169 - protein, 810 aa, synthetic construct
MALPVTALLLPLALLLHAARPEFSRYLVKRTGEKVFLECVQDMDHENMFWYRQDPGLGLRLIYFSYDVKMKEKGDIPEGYSVSREKKERFSLILESASTNQTSMYLCASSFWGRSTDTQYFGPGTRLTVLEDLKNVFPPEVAVFEPSEAEISHTQKATLVCLATGFYPDHVELSWWVNGKEVHSGVSTDPQPLKEQPALNDSRYCLSSRLRVSATFWQNPRNHFRCQVQFYGLSENDEWTQDRAKPVTQIVSAEAWGRADCGSQSFGLLDPKLCYLLDGILFIYGVILTALFLRVKFSRSADAPAYQQGQNQLYNELNLGRREEYDVLDKRRGRDPEMGGKPQRRKNPQEGLYNELQKDKMAEAYSEIGMKGERRRGKGHDGLYQGLSTATKDTYDALHMQALPPRRAKRSGSGATNFSLLKQAGDVEENPGPTSMDWIWRILFLVGAATGAHSFEKQEVTQIPAALSVPEGENLVLNCSFTDSAIYNLQWFRQDPGKGLTSLLLIQSSQREQTSGRLNASLDKSSGRSTLYIAASQPGDSATYLCAVRETSGSRLTFGEGTQLTVNPDTRIQNPDPAVYQLRDSKSSDKSVCLFTDFDSQTNVSQSKDSDVYITDKTVLDMRSMDFKSNSAVAWSNKSDFACANAFNNSIIPEDTFFPSPESSCGTQSFGLLDPKLCYLLDGILFIYGVILTALFLRVKFSRSADAPAYQQGQNQLYNELNLGRREEYDVLDKRRGRDPEMGGKPQRRKNPQEGLYNELQKDKMAEAYSEIGMKGERRRGKGHDGLYQGLSTATKDTYDALHMQALPPR

SEQ ID NO: 11170 - protein, 852 aa, synthetic construct
MALPVTALLLPLALLLHAARPEFSRYLVKRTGEKVFLECVQDMDHENMFWYRQDPGLGLRLIYFSYDVKMKEKGDIPEGYSVSREKKERFSLILESASTNQTSMYLCASSFWGRSTDTQYFGPGTRLTVLEDLKNVFPPEVAVFEPSEAEISHTQKATLVCLATGFYPDHVELSWWVNGKEVHSGVSTDPQPLKEQPALNDSRYCLSSRLRVSATFWQNPRNHFRCQVQFYGLSENDEWTQDRAKPVTQIVSAEAWGRADCGSQSFGLLDPKLCYLLDGILFIYGVILTALFLRVKFSRSADAPAYQQGQNQLYNELNLGRREEYDVLDKRRGRDPEMGGKPQRRKNPQEGLYNELQKDKMAEAYSEIGMKGERRRGKGHDGLYQGLSTATKDTYDALHMQALPPRRAKRSGSGATNFSLLKQAGDVEENPGPTSMDWIWRILFLVGAATGAHSFEKQEVTQIPAALSVPEGENLVLNCSFTDSAIYNLQWFRQDPGKGLTSLLLIQSSQREQTSGRLNASLDKSSGRSTLYIAASQPGDSATYLCAVRETSGSRLTFGEGTQLTVNPDTRIQNPDPAVYQLRDSKSSDKSVCLFTDFDSQTNVSQSKDSDVYITDKTVLDMRSMDFKSNSAVAWSNKSDFACANAFNNSIIPEDTFFPSPESSCGTQSFGLLDPKLCYLLDGILFIYGVILTALFLKRGRKKLLYIFKQPFMRPVQTTQEEDGCSCRFPEEEEGGCELRVKFSRSADAPAYQQGQNQLYNELNLGRREEYDVLDKRRGRDPEMGGKPQRRKNPQEGLYNELQKDKMAEAYSEIGMKGERRRGKGHDGLYQGLSTATKDTYDALHMQALPPR

SEQ ID NO: 11171 - protein, 851 aa, synthetic construct
MALPVTALLLPLALLLHAARPEFSRYLVKRTGEKVFLECVQDMDHENMFWYRQDPGLGLRLIYFSYDVKMKEKGDIPEGYSVSREKKERFSLILESASTNQTSMYLCASSFWGRSTDTQYFGPGTRLTVLEDLKNVFPPEVAVFEPSEAEISHTQKATLVCLATGFYPDHVELSWWVNGKEVHSGVSTDPQPLKEQPALNDSRYCLSSRLRVSATFWQNPRNHFRCQVQFYGLSENDEWTQDRAKPVTQIVSAEAWGRADCGSQSFGLLDPKLCYLLDGILFIYGVILTALFLRVKFSRSADAPAYQQGQNQLYNELNLGRREEYDVLDKRRGRDPEMGGKPQRRKNPQEGLYNELQKDKMAEAYSEIGMKGERRRGKGHDGLYQGLSTATKDTYDALHMQALPPRRAKRSGSGATNFSLLKQAGDVEENPGPTSMDWIWRILFLVGAATGAHSFEKQEVTQIPAALSVPEGENLVLNCSFTDSAIYNLQWFRQDPGKGLTSLLLIQSSQREQTSGRLNASLDKSSGRSTLYIAASQPGDSATYLCAVRETSGSRLTFGEGTQLTVNPDTRIQNPDPAVYQLRDSKSSDKSVCLFTDFDSQTNVSQSKDSDVYITDKTVLDMRSMDFKSNSAVAWSNKSDFACANAFNNSIIPEDTFFPSPESSCGTQSFGLLDPKLCYLLDGILFIYGVILTALFLRSKRSRLLHSDYMNMTPRRPGPTRKHYQPYAPPRDFAAYRSRVKFSRSADAPAYQQGQNQLYNELNLGRREEYDVLDKRRGRDPEMGGKPQRRKNPQEGLYNELQKDKMAEAYSEIGMKGERRRGKGHDGLYQGLSTATKDTYDALHMQALPPR

SEQ ID NO: 11172 - protein, 846 aa, synthetic construct
MALPVTALLLPLALLLHAARPEFSRYLVKRTGEKVFLECVQDMDHENMFWYRQDPGLGLRLIYFSYDVKMKEKGDIPEGYSVSREKKERFSLILESASTNQTSMYLCASSFWGRSTDTQYFGPGTRLTVLEDLKNVFPPEVAVFEPSEAEISHTQKATLVCLATGFYPDHVELSWWVNGKEVHSGVSTDPQPLKEQPALNDSRYCLSSRLRVSATFWQNPRNHFRCQVQFYGLSENDEWTQDRAKPVTQIVSAEAWGRADCGSQSFGLLDPKLCYLLDGILFIYGVILTALFLRVKFSRSADAPAYQQGQNQLYNELNLGRREEYDVLDKRRGRDPEMGGKPQRRKNPQEGLYNELQKDKMAEAYSEIGMKGERRRGKGHDGLYQGLSTATKDTYDALHMQALPPRRAKRSGSGATNFSLLKQAGDVEENPGPTSMDWIWRILFLVGAATGAHSFEKQEVTQIPAALSVPEGENLVLNCSFTDSAIYNLQWFRQDPGKGLTSLLLIQSSQREQTSGRLNASLDKSSGRSTLYIAASQPGDSATYLCAVRETSGSRLTFGEGTQLTVNPDTRIQNPDPAVYQLRDSKSSDKSVCLFTDFDSQTNVSQSKDSDVYITDKTVLDMRSMDFKSNSAVAWSNKSDFACANAFNNSIIPEDTFFPSPESSCGTQSFGLLDPKLCYLLDGILFIYGVILTALFLRDQRLPPDAHKPPGGGSFRTPIQEEQADAHSTLAKIRVKFSRSADAPAYQQGQNQLYNELNLGRREEYDVLDKRRGRDPEMGGKPQRRKNPQEGLYNELQKDKMAEAYSEIGMKGERRRGKGHDGLYQGLSTATKDTYDALHMQALPPR

SEQ ID NO: 11173 - protein, 930 aa, synthetic construct
MALPVTALLLPLALLLHAARPEFSRYLVKRTGEKVFLECVQDMDHENMFWYRQDPGLGLRLIYFSYDVKMKEKGDIPEGYSVSREKKERFSLILESASTNQTSMYLCASSFWGRSTDTQYFGPGTRLTVLEDLKNVFPPEVAVFEPSEAEISHTQKATLVCLATGFYPDHVELSWWVNGKEVHSGVSTDPQPLKEQPALNDSRYCLSSRLRVSATFWQNPRNHFRCQVQFYGLSENDEWTQDRAKPVTQIVSAEAWGRADCGSQSFGLLDPKLCYLLDGILFIYGVILTALFLRVKFSRSADAPAYQQGQNQLYNELNLGRREEYDVLDKRRGRDPEMGGKPQRRKNPQEGLYNELQKDKMAEAYSEIGMKGERRRGKGHDGLYQGLSTATKDTYDALHMQALPPRRAKRSGSGATNFSLLKQAGDVEENPGPTSMDWIWRILFLVGAATGAHSFEKQEVTQIPAALSVPEGENLVLNCSFTDSAIYNLQWFRQDPGKGLTSLLLIQSSQREQTSGRLNASLDKSSGRSTLYIAASQPGDSATYLCAVRETSGSRLTFGEGTQLTVNPDTRIQNPDPAVYQLRDSKSSDKSVCLFTDFDSQTNVSQSKDSDVYITDKTVLDMRSMDFKSNSAVAWSNKSDFACANAFNNSIIPEDTFFPSPESSCGTQSFGLLDPKLCYLLDGILFIYGVILTALFLWRRKRKEKQSETSPKEFLTIYEDVKDLKTRRNHEQEQTFPGGGSTIYSMIQSQSSAPTSQEPAYTLYSLIQPSRKSGSRKRNHSPSFNSTIYEVIGKSQPKAQNPARLSRKELENFDVYSRVKFSRSADAPAYQQGQNQLYNELNLGRREEYDVLDKRRGRDPEMGGKPQRRKNPQEGLYNELQKDKMAEAYSEIGMKGERRRGKGHDGLYQGLSTATKDTYDALHMQALPPR

SEQ ID NO: 11174 - protein, 893 aa, synthetic construct
MALPVTALLLPLALLLHAARPEFSRYLVKRTGEKVFLECVQDMDHENMFWYRQDPGLGLRLIYFSYDVKMKEKGDIPEGYSVSREKKERFSLILESASTNQTSMYLCASSFWGRSTDTQYFGPGTRLTVLEDLKNVFPPEVAVFEPSEAEISHTQKATLVCLATGFYPDHVELSWWVNGKEVHSGVSTDPQPLKEQPALNDSRYCLSSRLRVSATFWQNPRNHFRCQVQFYGLSENDEWTQDRAKPVTQIVSAEAWGRADCGSQSFGLLDPKLCYLLDGILFIYGVILTALFLRSKRSRLLHSDYMNMTPRRPGPTRKHYQPYAPPRDFAAYRSRVKFSRSADAPAYQQGQNQLYNELNLGRREEYDVLDKRRGRDPEMGGKPQRRKNPQEGLYNELQKDKMAEAYSEIGMKGERRRGKGHDGLYQGLSTATKDTYDALHMQALPPRRAKRSGSGATNFSLLKQAGDVEENPGPTSMDWIWRILFLVGAATGAHSFEKQEVTQIPAALSVPEGENLVLNCSFTDSAIYNLQWFRQDPGKGLTSLLLIQSSQREQTSGRLNASLDKSSGRSTLYIAASQPGDSATYLCAVRETSGSRLTFGEGTQLTVNPDTRIQNPDPAVYQLRDSKSSDKSVCLFTDFDSQTNVSQSKDSDVYITDKTVLDMRSMDFKSNSAVAWSNKSDFACANAFNNSIIPEDTFFPSPESSCGTQSFGLLDPKLCYLLDGILFIYGVILTALFLKRGRKKLLYIFKQPFMRPVQTTQEEDGCSCRFPEEEEGGCELRVKFSRSADAPAYQQGQNQLYNELNLGRREEYDVLDKRRGRDPEMGGKPQRRKNPQEGLYNELQKDKMAEAYSEIGMKGERRRGKGHDGLYQGLSTATKDTYDALHMQALPPR

SEQ ID NO: 11175 - protein, 892 aa, synthetic construct
MALPVTALLLPLALLLHAARPEFSRYLVKRTGEKVFLECVQDMDHENMFWYRQDPGLGLRLIYFSYDVKMKEKGDIPEGYSVSREKKERFSLILESASTNQTSMYLCASSFWGRSTDTQYFGPGTRLTVLEDLKNVFPPEVAVFEPSEAEISHTQKATLVCLATGFYPDHVELSWWVNGKEVHSGVSTDPQPLKEQPALNDSRYCLSSRLRVSATFWQNPRNHFRCQVQFYGLSENDEWTQDRAKPVTQIVSAEAWGRADCGSQSFGLLDPKLCYLLDGILFIYGVILTALFLRSKRSRLLHSDYMNMTPRRPGPTRKHYQPYAPPRDFAAYRSRVKFSRSADAPAYQQGQNQLYNELNLGRREEYDVLDKRRGRDPEMGGKPQRRKNPQEGLYNELQKDKMAEAYSEIGMKGERRRGKGHDGLYQGLSTATKDTYDALHMQALPPRRAKRSGSGATNFSLLKQAGDVEENPGPTSMDWIWRILFLVGAATGAHSFEKQEVTQIPAALSVPEGENLVLNCSFTDSAIYNLQWFRQDPGKGLTSLLLIQSSQREQTSGRLNASLDKSSGRSTLYIAASQPGDSATYLCAVRETSGSRLTFGEGTQLTVNPDTRIQNPDPAVYQLRDSKSSDKSVCLFTDFDSQTNVSQSKDSDVYITDKTVLDMRSMDFKSNSAVAWSNKSDFACANAFNNSIIPEDTFFPSPESSCGTQSFGLLDPKLCYLLDGILFIYGVILTALFLRSKRSRLLHSDYMNMTPRRPGPTRKHYQPYAPPRDFAAYRSRVKFSRSADAPAYQQGQNQLYNELNLGRREEYDVLDKRRGRDPEMGGKPQRRKNPQEGLYNELQKDKMAEAYSEIGMKGERRRGKGHDGLYQGLSTATKDTYDALHMQALPPR

SEQ ID NO: 11176 - protein, 893 aa, synthetic construct; identical to SEQ ID NO: 11174

SEQ ID NO: 11177 - protein, 810 aa, synthetic construct
MALPVTALLLPLALLLHAARPEFSRYLVKRTGEKVFLECVQDMDHENMFWYRQDPGLGLRLIYFSYDVKMKEKGDIPEGYSVSREKKERFSLILESASTNQTSMYLCASSFWGRSTDTQYFGPGTRLTVLEDLKNVFPPEVAVFEPSEAEISHTQKATLVCLATGFYPDHVELSWWVNGKEVHSGVSTDPQPLKEQPALNDSRYCLSSRLRVSATFWQNPRNHFRCQVQFYGLSENDEWTQDRAKPVTQIVSAEAWGRADCGSQSFGLLDPKLCYLLDGILFIYGVILTALFLRVKFSRSADAPAYQQGQNQLYNELNLGRREEYDVLDKRRGRDPEMGGKPQRRKNPQEGLFNELQKDKMAEAFSEIGMKGERRRGKGHDGLFQGLSTATKDTFDALHMQALPPRRAKRSGSGATNFSLLKQAGDVEENPGPTSMDWIWRILFLVGAATGAHSFEKQEVTQIPAALSVPEGENLVLNCSFTDSAIYNLQWFRQDPGKGLTSLLLIQSSQREQTSGRLNASLDKSSGRSTLYIAASQPGDSATYLCAVRETSGSRLTFGEGTQLTVNPDTRIQNPDPAVYQLRDSKSSDKSVCLFTDFDSQTNVSQSKDSDVYITDKTVLDMRSMDFKSNSAVAWSNKSDFACANAFNNSIIPEDTFFPSPESSCGTQSFGLLDPKLCYLLDGILFIYGVILTALFLRVKFSRSADAPAYQQGQNQLYNELNLGRREEYDVLDKRRGRDPEMGGKPQRRKNPQEGLYNELQKDKMAEAYSEIGMKGERRRGKGHDGLYQGLSTATKDTYDALHMQALPPR

SEQ ID NO: 11178 - protein, 810 aa, synthetic construct; identical to SEQ ID NO: 11177

SEQ ID NO: 11179 - protein, 852 aa, synthetic construct
MALPVTALLLPLALLLHAARPEFSRYLVKRTGEKVFLECVQDMDHENMFWYRQDPGLGLRLIYFSYDVKMKEKGDIPEGYSVSREKKERFSLILESASTNQTSMYLCASSFWGRSTDTQYFGPGTRLTVLEDLKNVFPPEVAVFEPSEAEISHTQKATLVCLATGFYPDHVELSWWVNGKEVHSGVSTDPQPLKEQPALNDSRYCLSSRLRVSATFWQNPRNHFRCQVQFYGLSENDEWTQDRAKPVTQIVSAEAWGRADCGSQSFGLLDPKLCYLLDGILFIYGVILTALFLRVKFSRSADAPAYQQGQNQLYNELNLGRREEYDVLDKRRGRDPEMGGKPQRRKNPQEGLFNELQKDKMAEAFSEIGMKGERRRGKGHDGLFQGLSTATKDTFDALHMQALPPRRAKRSGSGATNFSLLKQAGDVEENPGPTSMDWIWRILFLVGAATGAHSFEKQEVTQIPAALSVPEGENLVLNCSFTDSAIYNLQWFRQDPGKGLTSLLLIQSSQREQTSGRLNASLDKSSGRSTLYIAASQPGDSATYLCAVRETSGSRLTFGEGTQLTVNPDTRIQNPDPAVYQLRDSKSSDKSVCLFTDFDSQTNVSQSKDSDVYITDKTVLDMRSMDFKSNSAVAWSNKSDFACANAFNNSIIPEDTFFPSPESSCGTQSFGLLDPKLCYLLDGILFIYGVILTALFLKRGRKKLLYIFKQPFMRPVQTTQEEDGCSCRFPEEEEGGCELRVKFSRSADAPAYQQGQNQLYNELNLGRREEYDVLDKRRGRDPEMGGKPQRRKNPQEGLYNELQKDKMAEAYSEIGMKGERRRGKGHDGLYQGLSTATKDTYDALHMQALPPR

SEQ ID NO: 11180 - protein, 851 aa, synthetic construct
MALPVTALLLPLALLLHAARPEFSRYLVKRTGEKVFLECVQDMDHENMFWYRQDPGLGLRLIYFSYDVKMKEKGDIPEGYSVSREKKERFSLILESASTNQTSMYLCASSFWGRSTDTQYFGPGTRLTVLEDLKNVFPPEVAVFEPSEAEISHTQKATLVCLATGFYPDHVELSWWVNGKEVHSGVSTDPQPLKEQPALNDSRYCLSSRLRVSATFWQNPRNHFRCQVQFYGLSENDEWTQDRAKPVTQIVSAEAWGRADCGSQSFGLLDPKLCYLLDGILFIYGVILTALFLRVKFSRSADAPAYQQGQNQLYNELNLGRREEYDVLDKRRGRDPEMGGKPQRRKNPQEGLFNELQKDKMAEAFSEIGMKGERRRGKGHDGLFQGLSTATKDTFDALHMQALPPRRAKRSGSGATNFSLLKQAGDVEENPGPTSMDWIWRILFLVGAATGAHSFEKQEVTQIPAALSVPEGENLVLNCSFTDSAIYNLQWFRQDPGKGLTSLLLIQSSQREQTSGRLNASLDKSSGRSTLYIAASQPGDSATYLCAVRETSGSRLTFGEGTQLTVNPDTRIQNPDPAVYQLRDSKSSDKSVCLFTDFDSQTNVSQSKDSDVYITDKTVLDMRSMDFKSNSAVAWSNKSDFACANAFNNSIIPEDTFFPSPESSCGTQSFGLLDPKLCYLLDGILFIYGVILTALFLRSKRSRLLHSDYMNMTPRRPGPTRKHYQPYAPPRDFAAYRSRVKFSRSADAPAYQQGQNQLYNELNLGRREEYDVLDKRRGRDPEMGGKPQRRKNPQEGLYNELQKDKMAEAYSEIGMKGERRRGKGHDGLYQGLSTATKDTYDALHMQALPPR

SEQ ID NO: 11181 - protein, 846 aa, synthetic construct
MALPVTALLLPLALLLHAARPEFSRYLVKRTGEKVFLECVQDMDHENMFWYRQDPGLGLRLIYFSYDVKMKEKGDIPEGYSVSREKKERFSLILESASTNQTSMYLCASSFWGRSTDTQYFGPGTRLTVLEDLKNVFPPEVAVFEPSEAEISHTQKATLVCLATGFYPDHVELSWWVNGKEVHSGVSTDPQPLKEQPALNDSRYCLSSRLRVSATFWQNPRNHFRCQVQFYGLSENDEWTQDRAKPVTQIVSAEAWGRADCGSQSFGLLDPKLCYLLDGILFIYGVILTALFLRVKFSRSADAPAYQQGQNQLYNELNLGRREEYDVLDKRRGRDPEMGGKPQRRKNPQEGLFNELQKDKMAEAFSEIGMKGERRRGKGHDGLFQGLSTATKDTFDALHMQALPPRRAKRSGSGATNFSLLKQAGDVEENPGPTSMDWIWRILFLVGAATGAHSFEKQEVTQIPAALSVPEGENLVLNCSFTDSAIYNLQWFRQDPGKGLTSLLLIQSSQREQTSGRLNASLDKSSGRSTLYIAASQPGDSATYLCAVRETSGSRLTFGEGTQLTVNPDTRIQNPDPAVYQLRDSKSSDKSVCLFTDFDSQTNVSQSKDSDVYITDKTVLDMRSMDFKSNSAVAWSNKSDFACANAFNNSIIPEDTFFPSPESSCGTQSFGLLDPKLCYLLDGILFIYGVILTALFLRDQRLPPDAHKPPGGGSFRTPIQEEQADAHSTLAKIRVKFSRSADAPAYQQGQNQLYNELNLGRREEYDVLDKRRGRDPEMGGKPQRRKNPQEGLYNELQKDKMAEAYSEIGMKGERRRGKGHDGLYQGLSTATKDTYDALHMQALPPR

SEQ ID NO: 11182 - protein, 930 aa, synthetic construct
MALPVTALLLPLALLLHAARPEFSRYLVKRTGEKVFLECVQDMDHENMFWYRQDPGLGLRLIYFSYDVKMKEKGDIPEGYSVSREKKERFSLILESASTNQTSMYLCASSFWGRSTDTQYFGPGTRLTVLEDLKNVFPPEVAVFEPSEAEISHTQKATLVCLATGFYPDHVELSWWVNGKEVHSGVSTDPQPLKEQPALNDSRYCLSSRLRVSATFWQNPRNHFRCQVQFYGLSENDEWTQDRAKPVTQIVSAEAWGRADCGSQSFGLLDPKLCYLLDGILFIYGVILTALFLRVKFSRSADAPAYQQGQNQLYNELNLGRREEYDVLDKRRGRDPEMGGKPQRRKNPQEGLFNELQKDKMAEAFSEIGMKGERRRGKGHDGLFQGLSTATKDTFDALHMQALPPRRAKRSGSGATNFSLLKQAGDVEENPGPTSMDWIWRILFLVGAATGAHSFEKQEVTQIPAALSVPEGENLVLNCSFTDSAIYNLQWFRQDPGKGLTSLLLIQSSQREQTSGRLNASLDKSSGRSTLYIAASQPGDSATYLCAVRETSGSRLTFGEGTQLTVNPDTRIQNPDPAVYQLRDSKSSDKSVCLFTDFDSQTNVSQSKDSDVYITDKTVLDMRSMDFKSNSAVAWSNKSDFACANAFNNSIIPEDTFFPSPESSCGTQSFGLLDPKLCYLLDGILFIYGVILTALFLWRRKRKEKQSETSPKEFLTIYEDVKDLKTRRNHEQEQTFPGGGSTIYSMIQSQSSAPTSQEPAYTLYSLIQPSRKSGSRKRNHSPSFNSTIYEVIGKSQPKAQNPARLSRKELENFDVYSRVKFSRSADAPAYQQGQNQLYNELNLGRREEYDVLDKRRGRDPEMGGKPQRRKNPQEGLYNELQKDKMAEAYSEIGMKGERRRGKGHDGLYQGLSTATKDTYDALHMQALPPR

SEQ ID NO: 11183 - protein, 851 aa, synthetic construct; identical to SEQ ID NO: 11180

SEQ ID NO: 11184 - protein, 852 aa, synthetic construct; identical to SEQ ID NO: 11179

SEQ ID NO: 11185 - protein, 810 aa, synthetic construct
MALPVTALLLPLALLLHAARPEFSRYLVKRTGEKVFLECVQDMDHENMFWYRQDPGLGLRLIYFSYDVKMKEKGDIPEGYSVSREKKERFSLILESASTNQTSMYLCASSFWGRSTDTQYFGPGTRLTVLEDLKNVFPPEVAVFEPSEAEISHTQKATLVCLATGFYPDHVELSWWVNGKEVHSGVSTDPQPLKEQPALNDSRYCLSSRLRVSATFWQNPRNHFRCQVQFYGLSENDEWTQDRAKPVTQIVSAEAWGRADCGSQSFGLLDPKLCYLLDGILFIYGVILTALFLRVKFSRSADAPAYQQGQNQLYNELNLGRREEYDVLDKRRGRDPEMGGKPQRRKNPQEGLFNELQKDKMAEAFSEIGMKGERRRGKGHDGLFQGLSTATKDTFDALHMQALPPRRAKRSGSGATNFSLLKQAGDVEENPGPTSMDWIWRILFLVGAATGAHSFEKQEVTQIPAALSVPEGENLVLNCSFTDSAIYNLQWFRQDPGKGLTSLLLIQSSQREQTSGRLNASLDKSSGRSTLYIAASQPGDSATYLCAVRETSGSRLTFGEGTQLTVNPDTRIQNPDPAVYQLRDSKSSDKSVCLFTDFDSQTNVSQSKDSDVYITDKTVLDMRSMDFKSNSAVAWSNKSDFACANAFNNSIIPEDTFFPSPESSCGTQSFGLLDPKLSYLLDGILFIYGVILTALFLRVKFSRSADAPAYQQGQNQLYNELNLGRREEYDVLDKRRGRDPEMGGKPQRRKNPQEGLYNELQKDKMAEAYSEIGMKGERRRGKGHDGLYQGLSTATKDTYDALHMQALPPR

SEQ ID NO: 11186 - protein, 810 aa, synthetic construct; identical to SEQ ID NO: 11185

SEQ ID NO: 11187 - protein, 810 aa, synthetic construct
MALPVTALLLPLALLLHAARPEFSRYLVKRTGEKVFLECVQDMDHENMFWYRQDPGLGLRLIYFSYDVKMKEKGDIPEGYSVSREKKERFSLILESASTNQTSMYLCASSFWGRSTDTQYFGPGTRLTVLEDLKNVFPPEVAVFEPSEAEISHTQKATLVCLATGFYPDHVELSWWVNGKEVHSGVSTDPQPLKEQPALNDSRYCLSSRLRVSATFWQNPRNHFRCQVQFYGLSENDEWTQDRAKPVTQIVSAEAWGRADCGSQSFGLLDPKLSYLLDGILFIYGVILTALFLRVKFSRSADAPAYQQGQNQLYNELNLGRREEYDVLDKRRGRDPEMGGKPQRRKNPQEGLYNELQKDKMAEAYSEIGMKGERRRGKGHDGLYQGLSTATKDTYDALHMQALPPRRAKRSGSGATNFSLLKQAGDVEENPGPTSMDWIWRILFLVGAATGAHSFEKQEVTQIPAALSVPEGENLVLNCSFTDSAIYNLQWFRQDPGKGLTSLLLIQSSQREQTSGRLNASLDKSSGRSTLYIAASQPGDSATYLCAVRETSGSRLTFGEGTQLTVNPDTRIQNPDPAVYQLRDSKSSDKSVCLFTDFDSQTNVSQSKDSDVYITDKTVLDMRSMDFKSNSAVAWSNKSDFACANAFNNSIIPEDTFFPSPESSCGTQSFGLLDPKLSYLLDGILFIYGVILTALFLRVKFSRSADAPAYQQGQNQLYNELNLGRREEYDVLDKRRGRDPEMGGKPQRRKNPQEGLYNELQKDKMAEAYSEIGMKGERRRGKGHDGLYQGLSTATKDTYDALHMQALPPR

SEQ ID NO: 11188 - protein, 714 aa, synthetic construct
MALPVTALLLPLALLLHAARPEFSRYLVKRTGEKVFLECVQDMDHENMFWYRQDPGLGLRLIYFSYDVKMKEKGDIPEGYSVSREKKERFSLILESASTNQTSMYLCASSFWGRSTDTQYFGPGTRLTVLEDLKNVFPPEVAVFEPSEAEISHTQKATLVCLATGFYPDHVELSWWVNGKEVHSGVSTDPQPLKEQPALNDSRYCLSSRLRVSATFWQNPRNHFRCQVQFYGLSENDEWTQDRAKPVTQIVSAEAWGRADCGSTTPGERSSLPAFYPGTSGSCSGCGSLSLPLLAGLVAADAVASLLIVGAVFLCARPRRSPAQEDGKVYINMPGRGRAKRSGSGATNFSLLKQAGDVEENPGPTSMDWIWRILFLVGAATGAHSFEKQEVTQIPAALSVPEGENLVLNCSFTDSAIYNLQWFRQDPGKGLTSLLLIQSSQREQTSGRLNASLDKSSGRSTLYIAASQPGDSATYLCAVRETSGSRLTFGEGTQLTVNPDTRIQNPDPAVYQLRDSKSSDKSVCLFTDFDSQTNVSQSKDSDVYITDKTVLDMRSMDFKSNSAVAWSNKSDFACANAFNNSIIPEDTFFPSPESSCGTTTPGERSSLPAFYPGTSGSCSGCGSLSLPLLAGLVAADAVASLLIVGAVFKRGRKKLLYIFKQPFMRPVQTTQEEDGCSCRFPEEEEGGCELLCARPRRSPAQEDGKVYINMPGRG

SEQ ID NO: 11189 - protein, 713 aa, synthetic construct
MALPVTALLLPLALLLHAARPEFSRYLVKRTGEKVFLECVQDMDHENMFWYRQDPGLGLRLIYFSYDVKMKEKGDIPEGYSVSREKKERFSLILESASTNQTSMYLCASSFWGRSTDTQYFGPGTRLTVLEDLKNVFPPEVAVFEPSEAEISHTQKATLVCLATGFYPDHVELSWWVNGKEVHSGVSTDPQPLKEQPALNDSRYCLSSRLRVSATFWQNPRNHFRCQVQFYGLSENDEWTQDRAKPVTQIVSAEAWGRADCGSTTPGERSSLPAFYPGTSGSCSGCGSLSLPLLAGLVAADAVASLLIVGAVFLCARPRRSPAQEDGKVYINMPGRGRAKRSGSGATNFSLLKQAGDVEENPGPTSMDWIWRILFLVGAATGAHSFEKQEVTQIPAALSVPEGENLVLNCSFTDSAIYNLQWFRQDPGKGLTSLLLIQSSQREQTSGRLNASLDKSSGRSTLYIAASQPGDSATYLCAVRETSGSRLTFGEGTQLTVNPDTRIQNPDPAVYQLRDSKSSDKSVCLFTDFDSQTNVSQSKDSDVYITDKTVLDMRSMDFKSNSAVAWSNKSDFACANAFNNSIIPEDTFFPSPESSCGTTTPGERSSLPAFYPGTSGSCSGCGSLSLPLLAGLVAADAVASLLIVGAVFRSKRSRLLHSDYMNMTPRRPGPTRKHYQPYAPPRDFAAYRSLCARPRRSPAQEDGKVYINMPGRG

SEQ ID NO: 11190 - protein, 708 aa, synthetic construct
MALPVTALLLPLALLLHAARPEFSRYLVKRTGEKVFLECVQDMDHENMFWYRQDPGLGLRLIYFSYDVKMKEKGDIPEGYSVSREKKERFSLILESASTNQTSMYLCASSFWGRSTDTQYFGPGTRLTVLEDLKNVFPPEVAVFEPSEAEISHTQKATLVCLATGFYPDHVELSWWVNGKEVHSGVSTDPQPLKEQPALNDSRYCLSSRLRVSATFWQNPRNHFRCQVQFYGLSENDEWTQDRAKPVTQIVSAEAWGRADCGSTTPGERSSLPAFYPGTSGSCSGCGSLSLPLLAGLVAADAVASLLIVGAVFLCARPRRSPAQEDGKVYINMPGRGRAKRSGSGATNFSLLKQAGDVEENPGPTSMDWIWRILFLVGAATGAHSFEKQEVTQIPAALSVPEGENLVLNCSFTDSAIYNLQWFRQDPGKGLTSLLLIQSSQREQTSGRLNASLDKSSGRSTLYIAASQPGDSATYLCAVRETSGSRLTFGEGTQLTVNPDTRIQNPDPAVYQLRDSKSSDKSVCLFTDFDSQTNVSQSKDSDVYITDKTVLDMRSMDFKSNSAVAWSNKSDFACANAFNNSIIPEDTFFPSPESSCGTTTPGERSSLPAFYPGTSGSCSGCGSLSLPLLAGLVAADAVASLLIVGAVFRDQRLPPDAHKPPGGGSFRTPIQEEQADAHSTLAKILCARPRRSPAQEDGKVYINMPGRG

SEQ ID NO: 11191 - protein, 792 aa, synthetic construct
MALPVTALLLPLALLLHAARPEFSRYLVKRTGEKVFLECVQDMDHENMFWYRQDPGLGLRLIYFSYDVKMKEKGDIPEGYSVSREKKERFSLILESASTNQTSMYLCASSFWGRSTDTQYFGPGTRLTVLEDLKNVFPPEVAVFEPSEAEISHTQKATLVCLATGFYPDHVELSWWVNGKEVHSGVSTDPQPLKEQPALNDSRYCLSSRLRVSATFWQNPRNHFRCQVQFYGLSENDEWTQDRAKPVTQIVSAEAWGRADCGSTTPGERSSLPAFYPGTSGSCSGCGSLSLPLLAGLVAADAVASLLIVGAVFLCARPRRSPAQEDGKVYINMPGRGRAKRSGSGATNFSLLKQAGDVEENPGPTSMDWIWRILFLVGAATGAHSFEKQEVTQIPAALSVPEGENLVLNCSFTDSAIYNLQWFRQDPGKGLTSLLLIQSSQREQTSGRLNASLDKSSGRSTLYIAASQPGDSATYLCAVRETSGSRLTFGEGTQLTVNPDTRIQNPDPAVYQLRDSKSSDKSVCLFTDFDSQTNVSQSKDSDVYITDKTVLDMRSMDFKSNSAVAWSNKSDFACANAFNNSIIPEDTFFPSPESSCGTTTPGERSSLPAFYPGTSGSCSGCGSLSLPLLAGLVAADAVASLLIVGAVFWRRKRKEKQSETSPKEFLTIYEDVKDLKTRRNHEQEQTFPGGGSTIYSMIQSQSSAPTSQEPAYTLYSLIQPSRKSGSRKRNHSPSFNSTIYEVIGKSQPKAQNPARLSRKELENFDVYSLCARPRRSPAQEDGKVYINMPGRG

SEQ ID NO: 11192 - protein, 743 aa, synthetic construct
MALPVTALLLPLALLLHAARPEFSRYLVKRTGEKVFLECVQDMDHENMFWYRQDPGLGLRLIYFSYDVKMKEKGDIPEGYSVSREKKERFSLILESASTNQTSMYLCASSFWGRSTDTQYFGPGTRLTVLEDLKNVFPPEVAVFEPSEAEISHTQKATLVCLATGFYPDHVELSWWVNGKEVHSGVSTDPQPLKEQPALNDSRYCLSSRLRVSATFWQNPRNHFRCQVQFYGLSENDEWTQDRAKPVTQIVSAEAWGRADCGSLGEPQLCYILDAILFLYGIVLTLLYCKRGRKKLLYIFKQPFMRPVQTTQEEDGCSCRFPEEEEGGCELRLKIQVRKAAITSYEKSDGVYTGLSTRNQETYETLKHEKPPQRAKRSGSGATNFSLLKQAGDVEENPGPTSMDWIWRILFLVGAATGAHSFEKQEVTQIPAALSVPEGENLVLNCSFTDSAIYNLQWFRQDPGKGLTSLLLIQSSQREQTSGRLNASLDKSSGRSTLYIAASQPGDSATYLCAVRETSGSRLTFGEGTQLTVNPDTRIQNPDPAVYQLRDSKSSDKSVCLFTDFDSQTNVSQSKDSDVYITDKTVLDMRSMDFKSNSAVAWSNKSDFACANAFNNSIIPEDTFFPSPESSCGTLGEPQLCYILDAILFLYGIVLTLLYCRSKRSRLLHSDYMNMTPRRPGPTRKHYQPYAPPRDFAAYRSRLKIQVRKAAITSYEKSDGVYTGLSTRNQETYETLKHEKPPQ

SEQ ID NO: 11193 - protein, 738 aa, synthetic construct
MALPVTALLLPLALLLHAARPEFSRYLVKRTGEKVFLECVQDMDHENMFWYRQDPGLGLRLIYFSYDVKMKEKGDIPEGYSVSREKKERFSLILESASTNQTSMYLCASSFWGRSTDTQYFGPGTRLTVLEDLKNVFPPEVAVFEPSEAEISHTQKATLVCLATGFYPDHVELSWWVNGKEVHSGVSTDPQPLKEQPALNDSRYCLSSRLRVSATFWQNPRNHFRCQVQFYGLSENDEWTQDRAKPVTQIVSAEAWGRADCGSLGEPQLCYILDAILFLYGIVLTLLYCKRGRKKLLYIFKQPFMRPVQTTQEEDGCSCRFPEEEEGGCELRLKIQVRKAAITSYEKSDGVYTGLSTRNQETYETLKHEKPPQRAKRSGSGATNFSLLKQAGDVEENPGPTSMDWIWRILFLVGAATGAHSFEKQEVTQIPAALSVPEGENLVLNCSFTDSAIYNLQWFRQDPGKGLTSLLLIQSSQREQTSGRLNASLDKSSGRSTLYIAASQPGDSATYLCAVRETSGSRLTFGEGTQLTVNPDTRIQNPDPAVYQLRDSKSSDKSVCLFTDFDSQTNVSQSKDSDVYITDKTVLDMRSMDFKSNSAVAWSNKSDFACANAFNNSIIPEDTFFPSPESSCGTLGEPQLCYILDAILFLYGIVLTLLYCRDQRLPPDAHKPPGGGSFRTPIQEEQADAHSTLAKIRLKIQVRKAAITSYEKSDGVYTGLSTRNQETYETLKHEKPPQ

SEQ ID NO: 11194 - protein, 822 aa, synthetic construct
MALPVTALLLPLALLLHAARPEFSRYLVKRTGEKVFLECVQDMDHENMFWYRQDPGLGLRLIYFSYDVKMKEKGDIPEGYSVSREKKERFSLILESASTNQTSMYLCASSFWGRSTDTQYFGPGTRLTVLEDLKNVFPPEVAVFEPSEAEISHTQKATLVCLATGFYPDHVELSWWVNGKEVHSGVSTDPQPLKEQPALNDSRYCLSSRLRVSATFWQNPRNHFRCQVQFYGLSENDEWTQDRAKPVTQIVSAEAWGRADCGSLGEPQLCYILDAILFLYGIVLTLLYCKRGRKKLLYIFKQPFMRPVQTTQEEDGCSCRFPEEEEGGCELRLKIQVRKAAITSYEKSDGVYTGLSTRNQETYETLKHEKPPQRAKRSGSGATNFSLLKQAGDVEENPGPTSMDWIWRILFLVGAATGAHSFEKQEVTQIPAALSVPEGENLVLNCSFTDSAIYNLQWFRQDPGKGLTSLLLIQSSQREQTSGRLNASLDKSSGRSTLYIAASQPGDSATYLCAVRETSGSRLTFGEGTQLTVNPDTRIQNPDPAVYQLRDSKSSDKSVCLFTDFDSQTNVSQSKDSDVYITDKTVLDMRSMDFKSNSAVAWSNKSDFACANAFNNSIIPEDTFFPSPESSCGTLGEPQLCYILDAILFLYGIVLTLLYCWRRKRKEKQSETSPKEFLTIYEDVKDLKTRRNHEQEQTFPGGGSTIYSMIQSQSSAPTSQEPAYTLYSLIQPSRKSGSRKRNHSPSFNSTIYEVIGKSQPKAQNPARLSRKELENFDVYSRLKIQVRKAAITSYEKSDGVYTGLSTRNQETYETLKHEKPPQ

SEQ ID NO: 11195 - protein, 744 aa, synthetic construct
MALPVTALLLPLALLLHAARPEFSRYLVKRTGEKVFLECVQDMDHENMFWYRQDPGLGLRLIYFSYDVKMKEKGDIPEGYSVSREKKERFSLILESASTNQTSMYLCASSFWGRSTDTQYFGPGTRLTVLEDLKNVFPPEVAVFEPSEAEISHTQKATLVCLATGFYPDHVELSWWVNGKEVHSGVSTDPQPLKEQPALNDSRYCLSSRLRVSATFWQNPRNHFRCQVQFYGLSENDEWTQDRAKPVTQIVSAEAWGRADCGSLGEPQLCYILDAILFLYGIVLTLLYCKRGRKKLLYIFKQPFMRPVQTTQEEDGCSCRFPEEEEGGCELRLKIQVRKAAITSYEKSDGVYTGLSTRNQETYETLKHEKPPQRAKRSGSGATNFSLLKQAGDVEENPGPTSMDWIWRILFLVGAATGAHSFEKQEVTQIPAALSVPEGENLVLNCSFTDSAIYNLQWFRQDPGKGLTSLLLIQSSQREQTSGRLNASLDKSSGRSTLYIAASQPGDSATYLCAVRETSGSRLTFGEGTQLTVNPDTRIQNPDPAVYQLRDSKSSDKSVCLFTDFDSQTNVSQSKDSDVYITDKTVLDMRSMDFKSNSAVAWSNKSDFACANAFNNSIIPEDTFFPSPESSCGTLGEPQLCYILDAILFLYGIVLTLLYCKRGRKKLLYIFKQPFMRPVQTTQEEDGCSCRFPEEEEGGCELRLKIQVRKAAITSYEKSDGVYTGLSTRNQETYETLKHEKPPQ

SEQ ID NO: 11196 - protein, 743 aa, synthetic construct; identical to SEQ ID NO: 11192

SEQ ID NO: 11197 - protein, 742 aa, synthetic construct
MALPVTALLLPLALLLHAARPEFSRYLVKRTGEKVFLECVQDMDHENMFWYRQDPGLGLRLIYFSYDVKMKEKGDIPEGYSVSREKKERFSLILESASTNQTSMYLCASSFWGRSTDTQYFGPGTRLTVLEDLKNVFPPEVAVFEPSEAEISHTQKATLVCLATGFYPDHVELSWWVNGKEVHSGVSTDPQPLKEQPALNDSRYCLSSRLRVSATFWQNPRNHFRCQVQFYGLSENDEWTQDRAKPVTQIVSAEAWGRADCGSLGEPQLCYILDAILFLYGIVLTLLYCRSKRSRLLHSDYMNMTPRRPGPTRKHYQPYAPPRDFAAYRSRLKIQVRKAAITSYEKSDGVYTGLSTRNQETYETLKHEKPPQRAKRSGSGATNFSLLKQAGDVEENPGPTSMDWIWRILFLVGAATGAHSFEKQEVTQIPAALSVPEGENLVLNCSFTDSAIYNLQWFRQDPGKGLTSLLLIQSSQREQTSGRLNASLDKSSGRSTLYIAASQPGDSATYLCAVRETSGSRLTFGEGTQLTVNPDTRIQNPDPAVYQLRDSKSSDKSVCLFTDFDSQTNVSQSKDSDVYITDKTVLDMRSMDFKSNSAVAWSNKSDFACANAFNNSIIPEDTFFPSPESSCGTLGEPQLCYILDAILFLYGIVLTLLYCRSKRSRLLHSDYMNMTPRRPGPTRKHYQPYAPPRDFAAYRSRLKIQVRKAAITSYEKSDGVYTGLSTRNQETYETLKHEKPPQ

SEQ ID NO: 11198 - protein, 660 aa, synthetic construct
MALPVTALLLPLALLLHAARPEFSRYLVKRTGEKVFLECVQDMDHENMFWYRQDPGLGLRLIYFSYDVKMKEKGDIPEGYSVSREKKERFSLILESASTNQTSMYLCASSFWGRSTDTQYFGPGTRLTVLEDLKNVFPPEVAVFEPSEAEISHTQKATLVCLATGFYPDHVELSWWVNGKEVHSGVSTDPQPLKEQPALNDSRYCLSSRLRVSATFWQNPRNHFRCQVQFYGLSENDEWTQDRAKPVTQIVSAEAWGRADCGSLGEPQLSYILDAILFLYGIVLTLLYCRLKIQVRKAAITSYEKSDGVYTGLSTRNQETYETLKHEKPPQRAKRSGSGATNFSLLKQAGDVEENPGPTSMDWIWRILFLVGAATGAHSFEKQEVTQIPAALSVPEGENLVLNCSFTDSAIYNLQWFRQDPGKGLTSLLLIQSSQREQTSGRLNASLDKSSGRSTLYIAASQPGDSATYLCAVRETSGSRLTFGEGTQLTVNPDTRIQNPDPAVYQLRDSKSSDKSVCLFTDFDSQTNVSQSKDSDVYITDKTVLDMRSMDFKSNSAVAWSNKSDFACANAFNNSIIPEDTFFPSPESSCGTLGEPQLSYILDAILFLYGIVLTLLYCRLKIQVRKAAITSYEKSDGVYTGLSTRNQETYETLKHEKPPQ

SEQ ID NO: 11199 - protein, 696 aa, synthetic construct
MALPVTALLLPLALLLHAARPEFSRYLVKRTGEKVFLECVQDMDHENMFWYRQDPGLGLRLIYFSYDVKMKEKGDIPEGYSVSREKKERFSLILESASTNQTSMYLCASSFWGRSTDTQYFGPGTRLTVLEDLKNVFPPEVAVFEPSEAEISHTQKATLVCLATGFYPDHVELSWWVNGKEVHSGVSTDPQPLKEQPALNDSRYCLSSRLRVSATFWQNPRNHFRCQVQFYGLSENDEWTQDRAKPVTQIVSAEAWGRADCGSQAQSDCSCSTVSPGVLAGIVMGDLVLTVLIALAVYFLGRLVPRGRGAAEAATRKQRITETESPYQELQGQRSDVYSDLNTQRPYYKRAKRSGSGATNFSLLKQAGDVEENPGPTSMDWIWRILFLVGAATGAHSFEKQEVTQIPAALSVPEGENLVLNCSFTDSAIYNLQWFRQDPGKGLTSLLLIQSSQREQTSGRLNASLDKSSGRSTLYIAASQPGDSATYLCAVRETSGSRLTFGEGTQLTVNPDTRIQNPDPAVYQLRDSKSSDKSVCLFTDFDSQTNVSQSKDSDVYITDKTVLDMRSMDFKSNSAVAWSNKSDFACANAFNNSIIPEDTFFPSPESSCGTQAQSDCSSSTVSPGVLAGIVMGDLVLTVLIALAVYFLGRLVPRGRGAAEAATRKQRITETESPYQELQGQRSDVYSDLNTQRPYYK

SEQ ID NO: 11200 - protein, 738 aa, synthetic construct
MALPVTALLLPLALLLHAARPEFSRYLVKRTGEKVFLECVQDMDHENMFWYRQDPGLGLRLIYFSYDVKMKEKGDIPEGYSVSREKKERFSLILESASTNQTSMYLCASSFWGRSTDTQYFGPGTRLTVLEDLKNVFPPEVAVFEPSEAEISHTQKATLVCLATGFYPDHVELSWWVNGKEVHSGVSTDPQPLKEQPALNDSRYCLSSRLRVSATFWQNPRNHFRCQVQFYGLSENDEWTQDRAKPVTQIVSAEAWGRADCGSQAQSDCSCSTVSPGVLAGIVMGDLVLTVLIALAVYFLGRLVPRGRGAAEAATRKQRITETESPYQELQGQRSDVYSDLNTQRPYYKRAKRSGSGATNFSLLKQAGDVEENPGPTSMDWIWRILFLVGAATGAHSFEKQEVTQIPAALSVPEGENLVLNCSFTDSAIYNLQWFRQDPGKGLTSLLLIQSSQREQTSGRLNASLDKSSGRSTLYIAASQPGDSATYLCAVRETSGSRLTFGEGTQLTVNPDTRIQNPDPAVYQLRDSKSSDKSVCLFTDFDSQTNVSQSKDSDVYITDKTVLDMRSMDFKSNSAVAWSNKSDFACANAFNNSIIPEDTFFPSPESSCGTQAQSDCSCSTVSPGVLAGIVMGDLVLTVLIALAVYFLGRLVPRGRGAAEAATRKQRITETESPYQELQGQRSDVYSDLNTQKRGRKKLLYIFKQPFMRPVQTTQEEDGCSCRFPEEEEGGCELRPYYK

SEQ ID NO: 11201 - protein, 737 aa, synthetic construct
MALPVTALLLPLALLLHAARPEFSRYLVKRTGEKVFLECVQDMDHENMFWYRQDPGLGLRLIYFSYDVKMKEKGDIPEGYSVSREKKERFSLILESASTNQTSMYLCASSFWGRSTDTQYFGPGTRLTVLEDLKNVFPPEVAVFEPSEAEISHTQKATLVCLATGFYPDHVELSWWVNGKEVHSGVSTDPQPLKEQPALNDSRYCLSSRLRVSATFWQNPRNHFRCQVQFYGLSENDEWTQDRAKPVTQIVSAEAWGRADCGSQAQSDCSCSTVSPGVLAGIVMGDLVLTVLIALAVYFLGRLVPRGRGAAEAATRKQRITETESPYQELQGQRSDVYSDLNTQRPYYKRAKRSGSGATNFSLLKQAGDVEENPGPTSMDWIWRILFLVGAATGAHSFEKQEVTQIPAALSVPEGENLVLNCSFTDSAIYNLQWFRQDPGKGLTSLLLIQSSQREQTSGRLNASLDKSSGRSTLYIAASQPGDSATYLCAVRETSGSRLTFGEGTQLTVNPDTRIQNPDPAVYQLRDSKSSDKSVCLFTDFDSQTNVSQSKDSDVYITDKTVLDMRSMDFKSNSAVAWSNKSDFACANAFNNSIIPEDTFFPSPESSCGTQAQSDCSCSTVSPGVLAGIVMGDLVLTVLIALAVYFLGRLVPRGRGAAEAATRKQRITETESPYQELQGQRSDVYSDLNTQRSKRSRLLHSDYMNMTPRRPGPTRKHYQPYAPPRDFAAYRSRPYYK

SEQ ID NO: 11202 - protein, 732 aa, synthetic construct
MALPVTALLLPLALLLHAARPEFSRYLVKRTGEKVFLECVQDMDHENMFWYRQDPGLGLRLIYFSYDVKMKEKGDIPEGYSVSREKKERFSLILESASTNQTSMYLCASSFWGRSTDTQYFGPGTRLTVLEDLKNVFPPEVAVFEPSEAEISHTQKATLVCLATGFYPDHVELSWWVNGKEVHSGVSTDPQPLKEQPALNDSRYCLSSRLRVSATFWQNPRNHFRCQVQFYGLSENDEWTQDRAKPVTQIVSAEAWGRADCGSQAQSDCSCSTVSPGVLAGIVMGDLVLTVLIALAVYFLGRLVPRGRGAAEAATRKQRITETESPYQELQGQRSDVYSDLNTQRPYYKRAKRSGSGATNFSLLKQAGDVEENPGPTSMDWIWRILFLVGAATGAHSFEKQEVTQIPAALSVPEGENLVLNCSFTDSAIYNLQWFRQDPGKGLTSLLLIQSSQREQTSGRLNASLDKSSGRSTLYIAASQPGDSATYLCAVRETSGSRLTFGEGTQLTVNPDTRIQNPDPAVYQLRDSKSSDKSVCLFTDFDSQTNVSQSKDSDVYITDKTVLDMRSMDFKSNSAVAWSNKSDFACANAFNNSIIPEDTFFPSPESSCGTQAQSDCSCSTVSPGVLAGIVMGDLVLTVLIALAVYFLGRLVPRGRGAAEAATRKQRITETESPYQELQGQRSDVYSDLNTQRDQRLPPDAHKPPGGGSFRTPIQEEQADAHSTLAKIRPYYK

SEQ ID NO: 11203 - protein, 816 aa, synthetic construct
MALPVTALLLPLALLLHAARPEFSRYLVKRTGEKVFLECVQDMDHENMFWYRQDPGLGLRLIYFSYDVKMKEKGDIPEGYSVSREKKERFSLILESASTNQTSMYLCASSFWGRSTDTQYFGPGTRLTVLEDLKNVFPPEVAVFEPSEAEISHTQKATLVCLATGFYPDHVELSWWVNGKEVHSGVSTDPQPLKEQPALNDSRYCLSSRLRVSATFWQNPRNHFRCQVQFYGLSENDEWTQDRAKPVTQIVSAEAWGRADCGSQAQSDCSCSTVSPGVLAGIVMGDLVLTVLIALAVYFLGRLVPRGRGAAEAATRKQRITETESPYQELQGQRSDVYSDLNTQRPYYKRAKRSGSGATNFSLLKQAGDVEENPGPTSMDWIWRILFLVGAATGAHSFEKQEVTQIPAALSVPEGENLVLNCSFTDSAIYNLQWFRQDPGKGLTSLLLIQSSQREQTSGRLNASLDKSSGRSTLYIAASQPGDSATYLCAVRETSGSRLTFGEGTQLTVNPDTRIQNPDPAVYQLRDSKSSDKSVCLFTDFDSQTNVSQSKDSDVYITDKTVLDMRSMDFKSNSAVAWSNKSDFACANAFNNSIIPEDTFFPSPESSCGTQAQSDCSCSTVSPGVLAGIVMGDLVLTVLIALAVYFLGRLVPRGRGAAEAATRKQRITETESPYQELQGQRSDVYSDLNTQWRRKRKEKQSETSPKEFLTIYEDVKDLKTRRNHEQEQTFPGGGSTIYSMIQSQSSAPTSQEPAYTLYSLIQPSRKSGSRKRNHSPSFNSTIYEVIGKSQPKAQNPARLSRKELENFDVYSRPYYK

SEQ ID NO: 11204 - protein, 908 aa, synthetic construct
MALPVTALLLPLALLLHAARPEFSRYLVKRTGEKVFLECVQDMDHENMFWYRQDPGLGLRLIYFSYDVKMKEKGDIPEGYSVSREKKERFSLILESASTNQTSMYLCASSFWGRSTDTQYFGPGTRLTVLEDLKNVFPPEVAVFEPSEAEISHTQKATLVCLATGFYPDHVELSWWVNGKEVHSGVSTDPQPLKEQPALNDSRYCLSSRLRVSATFWQNPRNHFRCQVQFYGLSENDEWTQDRAKPVTQIVSAEAWGRADCGSQAQSDCSCSTVSPGVLAGIVMGDLVLTVLIALAVYFLGRLVPRGRGAAEAATRKQRITETESPYQELQGQRSDVYSDLNTQRVKFSRSADAPAYQQGQNQLYNELNLGRREEYDVLDKRRGRDPEMGGKPQRRKNPQEGLYNELQKDKMAEAYSEIGMKGERRRGKGHDGLYQGLSTATKDTYDALHMQALPPRRAKRSGSGATNFSLLKQAGDVEENPGPTSMDWIWRILFLVGAATGAHSFEKQEVTQIPAALSVPEGENLVLNCSFTDSAIYNLQWFRQDPGKGLTSLLLIQSSQREQTSGRLNASLDKSSGRSTLYIAASQPGDSATYLCAVRETSGSRLTFGEGTQLTVNPDTRIQNPDPAVYQLRDSKSSDKSVCLFTDFDSQTNVSQSKDSDVYITDKTVLDMRSMDFKSNSAVAWSNKSDFACANAFNNSIIPEDTFFPSPESSCGTTTPGERSSLPAFYPGTSGSCSGCGSLSLPLLAGLVAADAVASLLIVGAVFLCARPRRSPAQEDGKVYINMPGRGSSRRVKFSRSADAPAYQQGQNQLYNELNLGRREEYDVLDKRRGRDPEMGGKPQRRKNPQEGLYNELQKDKMAEAYSEIGMKGERRRGKGHDGLYQGLSTATKDTYDALHMQALPPR

SEQ ID NO: 11205 - protein, 834 aa, synthetic construct
MALPVTALLLPLALLLHAARPEFSRYLVKRTGEKVFLECVQDMDHENMFWYRQDPGLGLRLIYFSYDVKMKEKGDIPEGYSVSREKKERFSLILESASTNQTSMYLCASSFWGRSTDTQYFGPGTRLTVLEDLKNVFPPEVAVFEPSEAEISHTQKATLVCLATGFYPDHVELSWWVNGKEVHSGVSTDPQPLKEQPALNDSRYCLSSRLRVSATFWQNPRNHFRCQVQFYGLSENDEWTQDRAKPVTQIVSAEAWGRADCGSQAQSDCSCSTVSPGVLAGIVMGDLVLTVLIALAVYFLGRLVPRGRGAAEAATRKQRITETESPYQELQGQRSDVYSDLNTQRVKFSRSADAPAYQQGQNQLYNELNLGRREEYDVLDKRRGRDPEMGGKPQRRKNPQEGLYNELQKDKMAEAYSEIGMKGERRRGKGHDGLYQGLSTATKDTYDALHMQALPPRRAKRSGSGATNFSLLKQAGDVEENPGPTSMDWIWRILFLVGAATGAHSFEKQEVTQIPAALSVPEGENLVLNCSFTDSAIYNLQWFRQDPGKGLTSLLLIQSSQREQTSGRLNASLDKSSGRSTLYIAASQPGDSATYLCAVRETSGSRLTFGEGTQLTVNPDTRIQNPDPAVYQLRDSKSSDKSVCLFTDFDSQTNVSQSKDSDVYITDKTVLDMRSMDFKSNSAVAWSNKSDFACANAFNNSIIPEDTFFPSPESSCGTTTPGERSSLPAFYPGTSGSCSGCGSLSLPLLAGLVAADAVASLLIVGAVFKRGRKKLLYIFKQPFMRPVQTTQEEDGCSCRFPEEEEGGCELLCARPRRSPAQEDGKVYINMPGRG

SEQ ID NO: 11206 - protein, 833 aa, synthetic construct
MALPVTALLLPLALLLHAARPEFSRYLVKRTGEKVFLECVQDMDHENMFWYRQDPGLGLRLIYFSYDVKMKEKGDIPEGYSVSREKKERFSLILESASTNQTSMYLCASSFWGRSTDTQYFGPGTRLTVLEDLKNVFPPEVAVFEPSEAEISHTQKATLVCLATGFYPDHVELSWWVNGKEVHSGVSTDPQPLKEQPALNDSRYCLSSRLRVSATFWQNPRNHFRCQVQFYGLSENDEWTQDRAKPVTQIVSAEAWGRADCGSQAQSDCSCSTVSPGVLAGIVMGDLVLTVLIALAVYFLGRLVPRGRGAAEAATRKQRITETESPYQELQGQRSDVYSDLNTQRVKFSRSADAPAYQQGQNQLYNELNLGRREEYDVLDKRRGRDPEMGGKPQRRKNPQEGLYNELQKDKMAEAYSEIGMKGERRRGKGHDGLYQGLSTATKDTYDALHMQALPPRRAKRSGSGATNFSLLKQAGDVEENPGPTSMDWIWRILFLVGAATGAHSFEKQEVTQIPAALSVPEGENLVLNCSFTDSAIYNLQWFRQDPGKGLTSLLLIQSSQREQTSGRLNASLDKSSGRSTLYIAASQPGDSATYLCAVRETSGSRLTFGEGTQLTVNPDTRIQNPDPAVYQLRDSKSSDKSVCLFTDFDSQTNVSQSKDSDVYITDKTVLDMRSMDFKSNSAVAWSNKSDFACANAFNNSIIPEDTFFPSPESSCGTTTPGERSSLPAFYPGTSGSCSGCGSLSLPLLAGLVAADAVASLLIVGAVFRSKRSRLLHSDYMNMTPRRPGPTRKHYQPYAPPRDFAAYRSLCARPRRSPAQEDGKVYINMPGRG

SEQ ID NO: 11207 - protein, 1079 aa, synthetic construct
MALPVTALLLPLALLLHAARPEFSRYLVKRTGEKVFLECVQDMDHENMFWYRQDPGLGLRLIYFSYDVKMKEKGDIPEGYSVSREKKERFSLILESASTNQTSMYLCASSFWGRSTDTQYFGPGTRLTVLEDLKNVFPPEVAVFEPSEAEISHTQKATLVCLATGFYPDHVELSWWVNGKEVHSGVSTDPQPLKEQPALNDSRYCLSSRLRVSATFWQNPRNHFRCQVQFYGLSENDEWTQDRAKPVTQIVSAEAWGRADCGSQSFGLLDPKLCYLLDGILFIYGVILTALFLRVKFSRSADAPAYQQGQNQLYNELNLGRREEYDVLDKRRGRDPEMGGKPQRRKNPQEGLYNELQKDKMAEAYSEIGMKGERRRGKGHDGLYQGLSTATKDTYDALHMQALPPRRAKRSGSGATNFSLLKQAGDVEENPGPTSMDWIWRILFLVGAATGAHSFEKQEVTQIPAALSVPEGENLVLNCSFTDSAIYNLQWFRQDPGKGLTSLLLIQSSQREQTSGRLNASLDKSSGRSTLYIAASQPGDSATYLCAVRETSGSRLTFGEGTQLTVNPDTRIQNPDPAVYQLRDSKSSDKSVCLFTDFDSQTNVSQSKDSDVYITDKTVLDMRSMDFKSNSAVAWSNKSDFACANAFNNSIIPEDTFFPSPESSCGTQSFGLLDPKLCYLLDGILFIYGVILTALFLRVKFSRSADAPAYQQGQNQLYNELNLGRREEYDVLDKRRGRDPEMGGKPQRRKNPQEGLYNELQKDKMAEAYSEIGMKGERRRGKGHDGLYQGLSTATKDTYDALHMQALPPRRAKRSGSGVKQTLNFDLLKLAGDVESNPGPSRGHMALPVTALLLPLALLLHAARPSQFRVSPLDRTWNLGETVELKCQVLLSNPTSGCSWLFQPRGAAASPTFLLYLSQNKPKAAEGLDTQRFSGKRLGDTFVLTLSDFRRENEGYYFCSALSNSIMYFSHFVPVFLPAKPTTTPAPRPPTPAPTIASQPLSLRPEACRPAAGGAVHTRGLDFACDIYIWAPLAGTCGVLLLSLVITLYCNHRNRRRVCKCPRPVVKSGDKPSLSARYV

SEQ ID NO: 11208 - protein, 819 aa, synthetic construct
MALPVTALLLPLALLLHAARPEFSRYLVKRTGEKVFLECVQDMDHENMFWYRQDPGLGLRLIYFSYDVKMKEKGDIPEGYSVSREKKERFSLILESASTNQTSMYLCASSFWGRSTDTQYFGPGTRLTVLEDLKNVFPPEVAVFEPSEAEISHTQKATLVCLATGFYPDHVELSWWVNGKEVHSGVSTDPQPLKEQPALNDSRYCLSSRLRVSATFWQNPRNHFRCQVQFYGLSENDEWTQDRAKPVTQIVSAEAWGRADCGSQSFGLLDPKLCYLLDGILFIYGVILTALFLRVKFSRSADAPAYQQGQNQLYNELNLGRREEYDVLDKRRGRDPEMGGKPQRRKNPQEGLYNELQKDKMAEAYSEIGMKGERRRGKGHDGLYQGLSTATKDTYDALHMQALPPRRAKRSGSGATNFSLLKQAGDVEENPGPTSMDWIWRILFLVGAATGAHSFEKQEVTQIPAALSVPEGENLVLNCSFTDSAIYNLQWFRQDPGKGLTSLLLIQSSQREQTSGRLNASLDKSSGRSTLYIAASQPGDSATYLCAVRETSGSRLTFGEGTQLTVNPDTRASTKGPSVFPLAPSSKSTSGGTAALGCLVKDYFPEPVTVSWNSGALTSGVHTFPAVLQSSGLYSLSSVVTVPSSSLGTQTYICNVNHKPSNTKVDKRVEPKSCGTQSFGLLDPKLSYLLDGILFIYGVILTALFLRVKFSRSADAPAYQQGQNQLYNELNLGRREEYDVLDKRRGRDPEMGGKPQRRKNPQEGLYNELQKDKMAEAYSEIGMKGERRRGKGHDGLYQGLSTATKDTYDALHMQALPPR

SEQ ID NO: 11209 - protein, 810 aa, synthetic construct
MALPVTALLLPLALLLHAARPEFSRYLVKRTGEKVFLECVQDMDHENMFWYRQDPGLGLRLIYFSYDVKMKEKGDIPEGYSVSREKKERFSLILESASTNQTSMYLCASSFWGRSTDTQYFGPGTRLTVLEDLKNVFPPEVAVFEPSEAEISHTQKATLVCLATGFYPDHVELSWWVNGKEVHSGVSTDPQPLKEQPALNDSRYCLSSRLRVSATFWQNPRNHFRCQVQFYGLSENDEWTQDRAKPVTQIVSAEAWGRADCGSQSFGLLDPKLCYLLDGILFIYGVILTALFLRVKFSRSADAPAYQQGQNQLYNELNLGRREEYDVLDKRRGRDPEMGGKPQRRKNPQEGLYNELQKDKMAEAYSEIGMKGERRRGKGHDGLYQGLSTATKDTYDALHMQALPPRRAKRSGSGATNFSLLKQAGDVEENPGPTSMDWIWRILFLVGAATGAHSFEKQEVTQIPAALSVPEGENLVLNCSFTDSAIYNLQWFRQDPGKGLTSLLLIQSSQREQTSGRLNASLDKSSGRSTLYIAASQPGDSATYLCAVRETSGSRLTFGEGTQLTVNPDTRIQNPDPAVYQLRDSKSSDKSVCLFTDFDSQTNVSQSKDSDVYITDKTVLDMRSMDFKSNSAVAWSNKSDFACANAFNNSIIPEDTFFPSPESSCGTQSFGLLDPKLSYLLDGILFIYGVILTALFLRVKFSRSADAPAYQQGQNQLYNELNLGRREEYDVLDKRRGRDPEMGGKPQRRKNPQEGLYNELQKDKMAEAYSEIGMKGERRRGKGHDGLYQGLSTATKDTYDALHMQALPPR

SEQ ID NO: 11210 - protein, 980 aa, synthetic construct
MALPVTALLLPLALLLHAARPEFSRYLVKRTGEKVFLECVQDMDHENMFWYRQDPGLGLRLIYFSYDVKMKEKGDIPEGYSVSREKKERFSLILESASTNQTSMYLCASSFWGRSTDTQYFGPGTRLTVLEGQPKANPTVTLFPPSSEELQANKATLVCLISDFYPGAVTVAWKADGSPVKAGVETTKPSKQSNNKYAASSYLSLTPEQWKSHRSYSCQVTHEGSTVEKTVAPTECSGSLGEPQLCYILDAILFLYGIVLTLLYCRLKIQVRKAAITSYEKSDGVYTGLSTRNQETYETLKHEKPPQRAKRSGSGATNFSLLKQAGDVEENPGPTSMDWIWRILFLVGAATGAHSFEKQEVTQIPAALSVPEGENLVLNCSFTDSAIYNLQWFRQDPGKGLTSLLLIQSSQREQTSGRLNASLDKSSGRSTLYIAASQPGDSATYLCAVRETSGSRLTFGEGTQLTVNPDTRIQNPDPAVYQLRDSKSSDKSVCLFTDFDSQTNVSQSKDSDVYITDKTVLDMRSMDFKSNSAVAWSNKSDFACANAFNNSIIPEDTFFPSPESSCGTQSFGLLDPKLCYLLDGILFIYGVILTALFLRVKFSRSADAPAYQQGQNQLYNELNLGRREEYDVLDKRRGRDPEMGGKPQRRKNPQEGLYNELQKDKMAEAYSEIGMKGERRRGKGHDGLYQGLSTATKDTYDALHMQALPPRRAKRSGSGVKQTLNFDLLKLAGDVESNPGPSRGHMALPVTALLLPLALLLHAARPSQFRVSPLDRTWNLGETVELKCQVLLSNPTSGCSWLFQPRGAAASPTFLLYLSQNKPKAAEGLDTQRFSGKRLGDTFVLTLSDFRRENEGYYFCSALSNSIMYFSHFVPVFLPAKPTTTPAPRPPTPAPTIASQPLSLRPEACRPAAGGAVHTRGLDFACDIYIWAPLAGTCGVLLLSLVITLYCNHRNRRRVCKCPRPVVKSGDKPSLSARYV

SEQ ID NO: 11211 - protein, 744 aa, synthetic construct
MALPVTALLLPLALLLHAARPEFSRYLVKRTGEKVFLECVQDMDHENMFWYRQDPGLGLRLIYFSYDVKMKEKGDIPEGYSVSREKKERFSLILESASTNQTSMYLCASSFWGRSTDTQYFGPGTRLTVLEDLKNVFPPEVAVFEPSEAEISHTQKATLVCLATGFYPDHVELSWWVNGKEVHSGVSTDPQPLKEQPALNDSRYCLSSRLRVSATFWQNPRNHFRCQVQFYGLSENDEWTQDRAKPVTQIVSAEAWGRADCGSQSFGLLDPKLCYLLDGILFIYGVILTALFLRVKFSRSADAPAYQQGQNQLYNELNLGRREEYDVLDKRRGRDPEMGGKPQRRKNPQEGLYNELQKDKMAEAYSEIGMKGERRRGKGHDGLYQGLSTATKDTYDALHMQALPPRRAKRSGSGATNFSLLKQAGDVEENPGPTSMDWIWRILFLVGAATGAHSFEKQEVTQIPAALSVPEGENLVLNCSFTDSAIYNLQWFRQDPGKGLTSLLLIQSSQREQTSGRLNASLDKSSGRSTLYIAASQPGDSATYLCAVRETSGSRLTFGEGTQLTVNPDTRASTKGPSVFPLAPSSKSTSGGTAALGCLVKDYFPEPVTVSWNSGALTSGVHTFPAVLQSSGLYSLSSVVTVPSSSLGTQTYICNVNHKPSNTKVDKRVEPKSCGTLGEPQLCYILDAILFLYGIVLTLLYCRLKIQVRKAAITSYEKSDGVYTGLSTRNQETYETLKHEKPPQ

SEQ ID NO: 11212 - protein, 744 aa, synthetic construct; identical to SEQ ID NO: 11211

SEQ ID NO: 11213 - protein, 735 aa, synthetic construct
MALPVTALLLPLALLLHAARPEFSRYLVKRTGEKVFLECVQDMDHENMFWYRQDPGLGLRLIYFSYDVKMKEKGDIPEGYSVSREKKERFSLILESASTNQTSMYLCASSFWGRSTDTQYFGPGTRLTVLEDLKNVFPPEVAVFEPSEAEISHTQKATLVCLATGFYPDHVELSWWVNGKEVHSGVSTDPQPLKEQPALNDSRYCLSSRLRVSATFWQNPRNHFRCQVQFYGLSENDEWTQDRAKPVTQIVSAEAWGRADCGSQSFGLLDPKLCYLLDGILFIYGVILTALFLRVKFSRSADAPAYQQGQNQLYNELNLGRREEYDVLDKRRGRDPEMGGKPQRRKNPQEGLYNELQKDKMAEAYSEIGMKGERRRGKGHDGLYQGLSTATKDTYDALHMQALPPRRAKRSGSGATNFSLLKQAGDVEENPGPTSMDWIWRILFLVGAATGAHSFEKQEVTQIPAALSVPEGENLVLNCSFTDSAIYNLQWFRQDPGKGLTSLLLIQSSQREQTSGRLNASLDKSSGRSTLYIAASQPGDSATYLCAVRETSGSRLTFGEGTQLTVNPDTRIQNPDPAVYQLRDSKSSDKSVCLFTDFDSQTNVSQSKDSDVYITDKTVLDMRSMDFKSNSAVAWSNKSDFACANAFNNSIIPEDTFFPSPESSCGTLGEPQLCYILDAILFLYGIVLTLLYCRLKIQVRKAAITSYEKSDGVYTGLSTRNQETYETLKHEKPPQ

SEQ ID NO: 11214 - protein, 984 aa, synthetic construct
MALPVTALLLPLALLLHAARPEFSRYLVKRTGEKVFLECVQDMDHENMFWYRQDPGLGLRLIYFSYDVKMKEKGDIPEGYSVSREKKERFSLILESASTNQTSMYLCASSFWGRSTDTQYFGPGTRLTVLEGQPKANPTVTLFPPSSEELQANKATLVCLISDFYPGAVTVAWKADGSPVKAGVETTKPSKQSNNKYAASSYLSLTPEQWKSHRSYSCQVTHEGSTVEKTVAPTECSTTPGERSSLPAFYPGTSGSCSGCGSLSLPLLAGLVAADAVASLLIVGAVFLCARPRRSPAQEDGKVYINMPGRGRAKRSGSGATNFSLLKQAGDVEENPGPTSMDWIWRILFLVGAATGAHSFEKQEVTQIPAALSVPEGENLVLNCSFTDSAIYNLQWFRQDPGKGLTSLLLIQSSQREQTSGRLNASLDKSSGRSTLYIAASQPGDSATYLCAVRETSGSRLTFGEGTQLTVNPDTRIQNPDPAVYQLRDSKSSDKSVCLFTDFDSQTNVSQSKDSDVYITDKTVLDMRSMDFKSNSAVAWSNKSDFACANAFNNSIIPEDTFFPSPESSCGTQSFGLLDPKLCYLLDGILFIYGVILTALFLRVKFSRSADAPAYQQGQNQLYNELNLGRREEYDVLDKRRGRDPEMGGKPQRRKNPQEGLYNELQKDKMAEAYSEIGMKGERRRGKGHDGLYQGLSTATKDTYDALHMQALPPRRAKRSGSGVKQTLNFDLLKLAGDVESNPGPSRGHMALPVTALLLPLALLLHAARPSQFRVSPLDRTWNLGETVELKCQVLLSNPTSGCSWLFQPRGAAASPTFLLYLSQNKPKAAEGLDTQRFSGKRLGDTFVLTLSDFRRENEGYYFCSALSNSIMYFSHFVPVFLPAKPTTTPAPRPPTPAPTIASQPLSLRPEACRPAAGGAVHTRGLDFACDIYIWAPLAGTCGVLLLSLVITLYCNHRNRRRVCKCPRPVVKSGDKPSLSARYV

SEQ ID NO: 11215 - protein, 1017 aa, synthetic construct
MALPVTALLLPLALLLHAARPEFSRYLVKRTGEKVFLECVQDMDHENMFWYRQDPGLGLRLIYFSYDVKMKEKGDIPEGYSVSREKKERFSLILESASTNQTSMYLCASSFWGRSTDTQYFGPGTRLTVLEDLKNVFPPEVAVFEPSEAEISHTQKATLVCLATGFYPDHVELSWWVNGKEVHSGVSTDPQPLKEQPALNDSRYCLSSRLRVSATFWQNPRNHFRCQVQFYGLSENDEWTQDRAKPVTQIVSAEAWGRADCGSQSFGLLDPKLCYLLDGILFIYGVILTALFLRVKFSRSADAPAYQQGQNQLYNELNLGRREEYDVLDKRRGRDPEMGGKPQRRKNPQEGLYNELQKDKMAEAYSEIGMKGERRRGKGHDGLYQGLSTATKDTYDALHMQALPPRRAKRSGSGATNFSLLKQAGDVEENPGPTSMDWIWRILFLVGAATGAHSFEKQEVTQIPAALSVPEGENLVLNCSFTDSAIYNLQWFRQDPGKGLTSLLLIQSSQREQTSGRLNASLDKSSGRSTLYIAASQPGDSATYLCAVRETSGSRLTFGEGTQLTVNPDTRASTKGPSVFPLAPSSKSTSGGTAALGCLVKDYFPEPVTVSWNSGALTSGVHTFPAVLQSSGLYSLSSVVTVPSSSLGTQTYICNVNHKPSNTKVDKRVEPKSCTTPGERSSLPAFYPGTSGSCSGCGSLSLPLLAGLVAADAVASLLIVGAVFLCARPRRSPAQEDGKVYINMPGRGRAKRSGSGVKQTLNFDLLKLAGDVESNPGPSRGHMALPVTALLLPLALLLHAARPSQFRVSPLDRTWNLGETVELKCQVLLSNPTSGCSWLFQPRGAAASPTFLLYLSQNKPKAAEGLDTQRFSGKRLGDTFVLTLSDFRRENEGYYFCSALSNSIMYFSHFVPVFLPAKPTTTPAPRPPTPAPTIASQPLSLRPEACRPAAGGAVHTRGLDFACDIYIWAPLAGTCGVLLLSLVITLYCNHRNRRRVCKCPRPVVKSGDKPSLSARYV

SEQ ID NO: 11216 - protein, 929 aa, synthetic construct
MALPVTALLLPLALLLHAARPSRYLVKRTGEKVFLECVQDMDHENMFWYRQDPGLGLRLIYFSYDVKMKEKGDIPEGYSVSREKKERFSLILESASTNQTSMYLCASSFWGRSTDTQYFGPGTRLTVLELWVSQPPEIRTLEGSSAFLPCSFNASQGRLAIGSVTWFRDEVVPGKEVRNGTPEFRGRLAPLASSRFLHDHQAELHIRDVRGHDASIYVCRVEVLGLGVGTGNGTRLVVEKEHPQLGAGTVLLLRAGFYAVSFLSVAVGSTVYYQGKCLTWKGPRRQLPAVVPAPLPPPCGSSAHLLPPVPGGRAKRSGSGATNFSLLKQAGDVEENPGPTSMDWIWRILFLVGAATGAHSFEKQEVTQIPAALSVPEGENLVLNCSFTDSAIYNLQWFRQDPGKGLTSLLLIQSSQREQTSGRLNASLDKSSGRSTLYIAASQPGDSATYLCAVRETSGSRLTFGEGTQLTVNPDTRLWVSQPPEIRTLEGSSAFLPCSFNASQGRLAIGSVTWFRDEVVPGKEVRNGTPEFRGRLAPLASSRFLHDHQAELHIRDVRGHDASIYVCRVEVLGLGVGTGNGTRLVVEKEHPQLGAGTVLLLRAGFYAVSFLSVAVGSTVYYQGKCLTWKGPRRQLPAVVPAPLPPPCGSSAHLLPPVPGGRAKRSGSGVKQTLNFDLLKLAGDVESNPGPSRGHMALPVTALLLPLALLLHAARPSQFRVSPLDRTWNLGETVELKCQVLLSNPTSGCSWLFQPRGAAASPTFLLYLSQNKPKAAEGLDTQRFSGKRLGDTFVLTLSDFRRENEGYYFCSALSNSIMYFSHFVPVFLPAKPTTTPAPRPPTPAPTIASQPLSLRPEACRPAAGGAVHTRGLDFACDIYIWAPLAGTCGVLLLSLVITLYCNHRNRRRVCKCPRPVVKSGDKPSLSARYV

SEQ ID NO: 11217 - protein, 1064 aa, synthetic construct
MALPVTALLLPLALLLHAARPEFSRYLVKRTGEKVFLECVQDMDHENMFWYRQDPGLGLRLIYFSYDVKMKEKGDIPEGYSVSREKKERFSLILESASTNQTSMYLCASSFWGRSTDTQYFGPGTRLTVLEGQPKANPTVTLFPPSSEELQANKATLVCLISDFYPGAVTVAWKADGSPVKAGVETTKPSKQSNNKYAASSYLSLTPEQWKSHRSYSCQVTHEGSTVEKTVAPTECSGSQSFGLLDPKLCYLLDGILFIYGVILTALFLRVKFSRSADAPAYQQGQNQLYNELNLGRREEYDVLDKRRGRDPEMGGKPQRRKNPQEGLYNELQKDKMAEAYSEIGMKGERRRGKGHDGLYQGLSTATKDTYDALHMQALPPRRAKRSGSGATNFSLLKQAGDVEENPGPTSMDWIWRILFLVGAATGAHSFEKQEVTQIPAALSVPEGENLVLNCSFTDSAIYNLQWFRQDPGKGLTSLLLIQSSQREQTSGRLNASLDKSSGRSTLYIAASQPGDSATYLCAVRETSGSRLTFGEGTQLTVNPDTRASTKGPSVFPLAPSSKSTSGGTAALGCLVKDYFPEPVTVSWNSGALTSGVHTFPAVLQSSGLYSLSSVVTVPSSSLGTQTYICNVNHKPSNTKVDKRVEPKSCGTQSFGLLDPKLCYLLDGILFIYGVILTALFLRVKFSRSADAPAYQQGQNQLYNELNLGRREEYDVLDKRRGRDPEMGGKPQRRKNPQEGLYNELQKDKMAEAYSEIGMKGERRRGKGHDGLYQGLSTATKDTYDALHMQALPPRRAKRSGSGVKQTLNFDLLKLAGDVESNPGPSRGHMALPVTALLLPLALLLHAARPSQFRVSPLDRTWNLGETVELKCQVLLSNPTSGCSWLFQPRGAAASPTFLLYLSQNKPKAAEGLDTQRFSGKRLGDTFVLTLSDFRRENEGYYFCSALSNSIMYFSHFVPVFLPAKPTTTPAPRPPTPAPTIASQPLSLRPEACRPAAGGAVHTRGLDFACDIYIWAPLAGTCGVLLLSLVITLYCNHRNRRRVCKCPRPVVKSGDKPSLSARYV

SEQ ID NO: 11218 - protein, 1082 aa, synthetic construct
MALPVTALLLPLALLLHAARPEFSRYLVKRTGEKVFLECVQDMDHENMFWYRQDPGLGLRLIYFSYDVKMKEKGDIPEGYSVSREKKERFSLILESASTNQTSMYLCASSFWGRSTDTQYFGPGTRLTVLEGQPKANPTVTLFPPSSEELQANKATLVCLISDFYPGAVTVAWKADGSPVKAGVETTKPSKQSNNKYAASSYLSLTPEQWKSHRSYSCQVTHEGSTVEKTVAPTECSGSQSFGLLDPKLCYLLDGILFIYGVILTALFLRVKFSRSADAPAYQQGQNQLYNELNLGRREEYDVLDKRRGRDPEMGGKPQRRKNPQEGLYNELQKDKMAEAYSEIGMKGERRRGKGHDGLYQGLSTATKDTYDALHMQALPPRRAKRSGSGATNFSLLKQAGDVEENPGPTSMDWIWRILFLVGAATGAHSFEKQEVTQIPAALSVPEGENLVLNCSFTDSAIYNLQWFRQDPGKGLTSLLLIQSSQREQTSGRLNASLDKSSGRSTLYIAASQPGDSATYLCAVRETSGSRLTFGEGTQLTVNPDTRASPTSPKVFPLSLCSTQPDGNVVIACLVQGFFPQEPLSVTWSESGQGVTARNFPPSQDASGDLYTTSSQLTLPATQCLAGKSVTCHVKHYTNPSQDVTVPCPVPSTPPTPSPSTPPTPSPSGTQSFGLLDPKLCYLLDGILFIYGVILTALFLRVKFSRSADAPAYQQGQNQLYNELNLGRREEYDVLDKRRGRDPEMGGKPQRRKNPQEGLYNELQKDKMAEAYSEIGMKGERRRGKGHDGLYQGLSTATKDTYDALHMQALPPRRAKRSGSGVKQTLNFDLLKLAGDVESNPGPSRGHMALPVTALLLPLALLLHAARPSQFRVSPLDRTWNLGETVELKCQVLLSNPTSGCSWLFQPRGAAASPTFLLYLSQNKPKAAEGLDTQRFSGKRLGDTFVLTLSDFRRENEGYYFCSALSNSIMYFSHFVPVFLPAKPTTTPAPRPPTPAPTIASQPLSLRPEACRPAAGGAVHTRGLDFACDIYIWAPLAGTCGVLLLSLVITLYCNHRNRRRVCKCPRPVVKSGDKPSLSARYV

SEQ ID NO: 11219 - protein, 1063 aa, synthetic construct
MALPVTALLLPLALLLHAARPEFSRYLVKRTGEKVFLECVQDMDHENMFWYRQDPGLGLRLIYFSYDVKMKEKGDIPEGYSVSREKKERFSLILESASTNQTSMYLCASSFWGRSTDTQYFGPGTRLTVLEGQPKANPTVTLFPPSSEELQANKATLVCLISDFYPGAVTVAWKADGSPVKAGVETTKPSKQSNNKYAASSYLSLTPEQWKSHRSYSCQVTHEGSTVEKTVAPTECSGSQSFGLLDPKLCYLLDGILFIYGVILTALFLRVKFSRSADAPAYQQGQNQLYNELNLGRREEYDVLDKRRGRDPEMGGKPQRRKNPQEGLYNELQKDKMAEAYSEIGMKGERRRGKGHDGLYQGLSTATKDTYDALHMQALPPRRAKRSGSGATNFSLLKQAGDVEENPGPTSMDWIWRILFLVGAATGAHSFEKQEVTQIPAALSVPEGENLVLNCSFTDSAIYNLQWFRQDPGKGLTSLLLIQSSQREQTSGRLNASLDKSSGRSTLYIAASQPGDSATYLCAVRETSGSRLTFGEGTQLTVNPDTRASTKGPSVFPLAPCSRSTSESTAALGCLVKDYFPEPVTVSWNSGALTSGVHTFPAVLQSSGLYSLSSVVTVPSSNFGTQTYTCNVDHKPSNTKVDKTVERKCGTQSFGLLDPKLCYLLDGILFIYGVILTALFLRVKFSRSADAPAYQQGQNQLYNELNLGRREEYDVLDKRRGRDPEMGGKPQRRKNPQEGLYNELQKDKMAEAYSEIGMKGERRRGKGHDGLYQGLSTATKDTYDALHMQALPPRRAKRSGSGVKQTLNFDLLKLAGDVESNPGPSRGHMALPVTALLLPLALLLHAARPSQFRVSPLDRTWNLGETVELKCQVLLSNPTSGCSWLFQPRGAAASPTFLLYLSQNKPKAAEGLDTQRFSGKRLGDTFVLTLSDFRRENEGYYFCSALSNSIMYFSHFVPVFLPAKPTTTPAPRPPTPAPTIASQPLSLRPEACRPAAGGAVHTRGLDFACDIYIWAPLAGTCGVLLLSLVITLYCNHRNRRRVCKCPRPVVKSGDKPSLSARYV

SEQ ID NO: 11220 - protein, 1118 aa, synthetic construct
MALPVTALLLPLALLLHAARPSRYLVKRTGEKVFLECVQDMDHENMFWYRQDPGLGLRLIYFSYDVKMKEKGDIPEGYSVSREKKERFSLILESASTNQTSMYLCASSFWGRSTDTQYFGPGTRLTVLEGQPKANPTVTLFPPSSEELQANKATLVCLISDFYPGAVTVAWKADGSPVKAGVETTKPSKQSNNKYAASSYLSLTPEQWKSHRSYSCQVTHEGSTVEKTVAPTECSGSQSFGLLDPKLCYLLDGILFIYGVILTALFLRVKFSRSADAPAYQQGQNQLYNELNLGRREEYDVLDKRRGRDPEMGGKPQRRKNPQEGLYNELQKDKMAEAYSEIGMKGERRRGKGHDGLYQGLSTATKDTYDALHMQALPPRRAKRSGSGATNFSLLKQAGDVEENPGPTSMDWIWRILFLVGAATGAHSFEKQEVTQIPAALSVPEGENLVLNCSFTDSAIYNLQWFRQDPGKGLTSLLLIQSSQREQTSGRLNASLDKSSGRSTLYIAASQPGDSATYLCAVRETSGSRLTFGEGTQLTVNPDTRAPTKAPDVFPIISGCRHPKDNSPVVLACLITGYHPTSVTVTWYMGTQSQPQRTFPEIQRRDSYYMTSSQLSTPLQQWRQGEYKCVVQHTASKSKKEIFRWPESPKAQASSVPTAQPQAEGSLAKATTAPATTRNTGRGGEEKKKEKEKEEQEERETKTPGTQSFGLLDPKLCYLLDGILFIYGVILTALFLRVKFSRSADAPAYQQGQNQLYNELNLGRREEYDVLDKRRGRDPEMGGKPQRRKNPQEGLYNELQKDKMAEAYSEIGMKGERRRGKGHDGLYQGLSTATKDTYDALHMQALPPRRAKRSGSGVKQTLNFDLLKLAGDVESNPGPSRGHMALPVTALLLPLALLLHAARPSQFRVSPLDRTWNLGETVELKCQVLLSNPTSGCSWLFQPRGAAASPTFLLYLSQNKPKAAEGLDTQRFSGKRLGDTFVLTLSDFRRENEGYYFCSALSNSIMYFSHFVPVFLPAKPTTTPAPRPPTPAPTIASQPLSLRPEACRPAAGGAVHTRGLDFACDIYIWAPLAGTCGVLLLSLVITLYCNHRNRRRVCKCPRPVVKSGDKPSLSARYV

SEQ ID NO: 11221 - protein, 1060 aa, synthetic construct
MALPVTALLLPLALLLHAARPSRYLVKRTGEKVFLECVQDMDHENMFWYRQDPGLGLRLIYFSYDVKMKEKGDIPEGYSVSREKKERFSLILESASTNQTSMYLCASSFWGRSTDTQYFGPGTRLTVLEGQPKANPTVTLFPPSSEELQANKATLVCLISDFYPGAVTVAWKADGSPVKAGVETTKPSKQSNNKYAASSYLSLTPEQWKSHRSYSCQVTHEGSTVEKTVAPTECSGSQSFGLLDPKLCYLLDGILFIYGVILTALFLRVKFSRSADAPAYQQGQNQLYNELNLGRREEYDVLDKRRGRDPEMGGKPQRRKNPQEGLYNELQKDKMAEAYSEIGMKGERRRGKGHDGLYQGLSTATKDTYDALHMQALPPRRAKRSGSGATNFSLLKQAGDVEENPGPTSMDWIWRILFLVGAATGAHSFEKQEVTQIPAALSVPEGENLVLNCSFTDSAIYNLQWFRQDPGKGLTSLLLIQSSQREQTSGRLNASLDKSSGRSTLYIAASQPGDSATYLCAVRETSGSRLTFGEGTQLTVNPDTRASTKGPSVFPLAPCSRSTSESTAALGCLVKDYFPEPVTVSWNSGALTSGVHTFPAVLQSSGLYSLSSVVTVPSSNFGTQTYTCNVDHKPSNTKVDKTVERKGTQSFGLLDPKLCYLLDGILFIYGVILTALFLRVKFSRSADAPAYQQGQNQLYNELNLGRREEYDVLDKRRGRDPEMGGKPQRRKNPQEGLYNELQKDKMAEAYSEIGMKGERRRGKGHDGLYQGLSTATKDTYDALHMQALPPRRAKRSGSGVKQTLNFDLLKLAGDVESNPGPSRGHMALPVTALLLPLALLLHAARPSQFRVSPLDRTWNLGETVELKCQVLLSNPTSGCSWLFQPRGAAASPTFLLYLSQNKPKAAEGLDTQRFSGKRLGDTFVLTLSDFRRENEGYYFCSALSNSIMYFSHFVPVFLPAKPTTTPAPRPPTPAPTIASQPLSLRPEACRPAAGGAVHTRGLDFACDIYIWAPLAGTCGVLLLSLVITLYCNHRNRRRVCKCPRPVVKSGDKPSLSARYV

SEQ ID NO: 11222 - protein, 1067 aa, synthetic construct
MALPVTALLLPLALLLHAARPSRYLVKRTGEKVFLECVQDMDHENMFWYRQDPGLGLRLIYFSYDVKMKEKGDIPEGYSVSREKKERFSLILESASTNQTSMYLCASSFWGRSTDTQYFGPGTRLTVLEGQPKANPTVTLFPPSSEELQANKATLVCLISDFYPGAVTVAWKADGSPVKAGVETTKPSKQSNNKYAASSYLSLTPEQWKSHRSYSCQVTHEGSTVEKTVAPTECSGSQSFGLLDPKLCYLLDGILFIYGVILTALFLRVKFSRSADAPAYQQGQNQLYNELNLGRREEYDVLDKRRGRDPEMGGKPQRRKNPQEGLYNELQKDKMAEAYSEIGMKGERRRGKGHDGLYQGLSTATKDTYDALHMQALPPRRAKRSGSGATNFSLLKQAGDVEENPGPTSMDWIWRILFLVGAATGAHSFEKQEVTQIPAALSVPEGENLVLNCSFTDSAIYNLQWFRQDPGKGLTSLLLIQSSQREQTSGRLNASLDKSSGRSTLYIAASQPGDSATYLCAVRETSGSRLTFGEGTQLTVNPDTRASPTSPKVFPLSLDSTPQDGNVVVACLVQGFFPQEPLSVTWSESGQNVTARNFPPSQDASGDLYTTSSQLTLPATQCPDGKSVTCHVKHYTNPSQDVTVPCPVPPPPPGTQSFGLLDPKLCYLLDGILFIYGVILTALFLRVKFSRSADAPAYQQGQNQLYNELNLGRREEYDVLDKRRGRDPEMGGKPQRRKNPQEGLYNELQKDKMAEAYSEIGMKGERRRGKGHDGLYQGLSTATKDTYDALHMQALPPRRAKRSGSGVKQTLNFDLLKLAGDVESNPGPSRGHMALPVTALLLPLALLLHAARPSQFRVSPLDRTWNLGETVELKCQVLLSNPTSGCSWLFQPRGAAASPTFLLYLSQNKPKAAEGLDTQRFSGKRLGDTFVLTLSDFRRENEGYYFCSALSNSIMYFSHFVPVFLPAKPTTTPAPRPPTPAPTIASQPLSLRPEACRPAAGGAVHTRGLDFACDIYIWAPLAGTCGVLLLSLVITLYCNHRNRRRVCKCPRPVVKSGDKPSLSARYV

SEQ ID NO: 11223 - protein, 1062 aa, synthetic construct
MALPVTALLLPLALLLHAARPSRYLVKRTGEKVFLECVQDMDHENMFWYRQDPGLGLRLIYFSYDVKMKEKGDIPEGYSVSREKKERFSLILESASTNQTSMYLCASSFWGRSTDTQYFGPGTRLTVLEGQPKANPTVTLFPPSSEELQANKATLVCLISDFYPGAVTVAWKADGSPVKAGVETTKPSKQSNNKYAASSYLSLTPEQWKSHRSYSCQVTHEGSTVEKTVAPTECSGSQSFGLLDPKLCYLLDGILFIYGVILTALFLRVKFSRSADAPAYQQGQNQLYNELNLGRREEYDVLDKRRGRDPEMGGKPQRRKNPQEGLYNELQKDKMAEAYSEIGMKGERRRGKGHDGLYQGLSTATKDTYDALHMQALPPRRAKRSGSGATNFSLLKQAGDVEENPGPTSMDWIWRILFLVGAATGAHSFEKQEVTQIPAALSVPEGENLVLNCSFTDSAIYNLQWFRQDPGKGLTSLLLIQSSQREQTSGRLNASLDKSSGRSTLYIAASQPGDSATYLCAVRETSGSRLTFGEGTQLTVNPDTRASTQSPSVFPLTRCCKNIPSNATSVTLGCLATGYFPEPVMVTWDTGSLNGTTMTLPATTLTLSGHYATISLLTVSGAWAKQMFTCRVAHTPSSTDWVDNKTFSGTQSFGLLDPKLCYLLDGILFIYGVILTALFLRVKFSRSADAPAYQQGQNQLYNELNLGRREEYDVLDKRRGRDPEMGGKPQRRKNPQEGLYNELQKDKMAEAYSEIGMKGERRRGKGHDGLYQGLSTATKDTYDALHMQALPPRRAKRSGSGVKQTLNFDLLKLAGDVESNPGPSRGHMALPVTALLLPLALLLHAARPSQFRVSPLDRTWNLGETVELKCQVLLSNPTSGCSWLFQPRGAAASPTFLLYLSQNKPKAAEGLDTQRFSGKRLGDTFVLTLSDFRRENEGYYFCSALSNSIMYFSHFVPVFLPAKPTTTPAPRPPTPAPTIASQPLSLRPEACRPAAGGAVHTRGLDFACDIYIWAPLAGTCGVLLLSLVITLYCNHRNRRRVCKCPRPVVKSGDKPSLSARYV

SEQ ID NO: 11224 - protein, 1062 aa, synthetic construct
MALPVTALLLPLALLLHAARPSRYLVKRTGEKVFLECVQDMDHENMFWYRQDPGLGLRLIYFSYDVKMKEKGDIPEGYSVSREKKERFSLILESASTNQTSMYLCASSFWGRSTDTQYFGPGTRLTVLEGQPKANPTVTLFPPSSEELQANKATLVCLISDFYPGAVTVAWKADGSPVKAGVETTKPSKQSNNKYAASSYLSLTPEQWKSHRSYSCQVTHEGSTVEKTVAPTECSGSQSFGLLDPKLCYLLDGILFIYGVILTALFLRVKFSRSADAPAYQQGQNQLYNELNLGRREEYDVLDKRRGRDPEMGGKPQRRKNPQEGLYNELQKDKMAEAYSEIGMKGERRRGKGHDGLYQGLSTATKDTYDALHMQALPPRRAKRSGSGATNFSLLKQAGDVEENPGPTSMDWIWRILFLVGAATGAHSFEKQEVTQIPAALSVPEGENLVLNCSFTDSAIYNLQWFRQDPGKGLTSLLLIQSSQREQTSGRLNASLDKSSGRSTLYIAASQPGDSATYLCAVRETSGSRLTFGEGTQLTVNPDTRASTKGPSVFPLAPCSRSTSESTAALGCLVKDYFPEPVTVSWNSGALTSGVHTFPAVLQSSGLYSLSSVVTVPSSSLGTKTYTCNVDHKPSNTKVDKRVESKYGGTQSFGLLDPKLCYLLDGILFIYGVILTALFLRVKFSRSADAPAYQQGQNQLYNELNLGRREEYDVLDKRRGRDPEMGGKPQRRKNPQEGLYNELQKDKMAEAYSEIGMKGERRRGKGHDGLYQGLSTATKDTYDALHMQALPPRRAKRSGSGVKQTLNFDLLKLAGDVESNPGPSRGHMALPVTALLLPLALLLHAARPSQFRVSPLDRTWNLGETVELKCQVLLSNPTSGCSWLFQPRGAAASPTFLLYLSQNKPKAAEGLDTQRFSGKRLGDTFVLTLSDFRRENEGYYFCSALSNSIMYFSHFVPVFLPAKPTTTPAPRPPTPAPTIASQPLSLRPEACRPAAGGAVHTRGLDFACDIYIWAPLAGTCGVLLLSLVITLYCNHRNRRRVCKCPRPVVKSGDKPSLSARYV

SEQ ID NO: 11225 - protein, 1062 aa, synthetic construct
MALPVTALLLPLALLLHAARPSRYLVKRTGEKVFLECVQDMDHENMFWYRQDPGLGLRLIYFSYDVKMKEKGDIPEGYSVSREKKERFSLILESASTNQTSMYLCASSFWGRSTDTQYFGPGTRLTVLEGQPKANPTVTLFPPSSEELQANKATLVCLISDFYPGAVTVAWKADGSPVKAGVETTKPSKQSNNKYAASSYLSLTPEQWKSHRSYSCQVTHEGSTVEKTVAPTECSGSQSFGLLDPKLCYLLDGILFIYGVILTALFLRVKFSRSADAPAYQQGQNQLYNELNLGRREEYDVLDKRRGRDPEMGGKPQRRKNPQEGLYNELQKDKMAEAYSEIGMKGERRRGKGHDGLYQGLSTATKDTYDALHMQALPPRRAKRSGSGATNFSLLKQAGDVEENPGPTSMDWIWRILFLVGAATGAHSFEKQEVTQIPAALSVPEGENLVLNCSFTDSAIYNLQWFRQDPGKGLTSLLLIQSSQREQTSGRLNASLDKSSGRSTLYIAASQPGDSATYLCAVRETSGSRLTFGEGTQLTVNPDTRASTKGPSVFPLAPCSRSTSESTAALGCLVKDYFPEPVTVSWNSGALTSGVHTFPAVLQSSGLYSLSSVVTVPSSNFGTQTYTCNVDHKPSNTKVDKTVERKCCGTQSFGLLDPKLCYLLDGILFIYGVILTALFLRVKFSRSADAPAYQQGQNQLYNELNLGRREEYDVLDKRRGRDPEMGGKPQRRKNPQEGLYNELQKDKMAEAYSEIGMKGERRRGKGHDGLYQGLSTATKDTYDALHMQALPPRRAKRSGSGVKQTLNFDLLKLAGDVESNPGPSRGHMALPVTALLLPLALLLHAARPSQFRVSPLDRTWNLGETVELKCQVLLSNPTSGCSWLFQPRGAAASPTFLLYLSQNKPKAAEGLDTQRFSGKRLGDTFVLTLSDFRRENEGYYFCSALSNSIMYFSHFVPVFLPAKPTTTPAPRPPTPAPTIASQPLSLRPEACRPAAGGAVHTRGLDFACDIYIWAPLAGTCGVLLLSLVITLYCNHRNRRRVCKCPRPVVKSGDKPSLSARYV

SEQ ID NO: 11226 - protein, 1077 aa, synthetic construct
MALPVTALLLPLALLLHAARPSRYLVKRTGEKVFLECVQDMDHENMFWYRQDPGLGLRLIYFSYDVKMKEKGDIPEGYSVSREKKERFSLILESASTNQTSMYLCASSFWGRSTDTQYFGPGTRLTVLEDLKNVFPPEVAVFEPSEAEISHTQKATLVCLATGFYPDHVELSWWVNGKEVHSGVSTDPQPLKEQPALNDSRYCLSSRLRVSATFWQNPRNHFRCQVQFYGLSENDEWTQDRAKPVTQIVSAEAWGRADCGSQSFGLLDPKLCYLLDGILFIYGVILTALFLRVKFSRSADAPAYQQGQNQLYNELNLGRREEYDVLDKRRGRDPEMGGKPQRRKNPQEGLYNELQKDKMAEAYSEIGMKGERRRGKGHDGLYQGLSTATKDTYDALHMQALPPRRAKRSGSGATNFSLLKQAGDVEENPGPTSMDWIWRILFLVGAATGAHSFEKQEVTQIPAALSVPEGENLVLNCSFTDSAIYNLQWFRQDPGKGLTSLLLIQSSQREQTSGRLNASLDKSSGRSTLYIAASQPGDSATYLCAVRETSGSRLTFGEGTQLTVNPDTRIQNPDPAVYQLRDSKSSDKSVCLFTDFDSQTNVSQSKDSDVYITDKTVLDMRSMDFKSNSAVAWSNKSDFACANAFNNSIIPEDTFFPSPESSCGTQSFGLLDPKLCYLLDGILFIYGVILTALFLRVKFSRSADAPAYQQGQNQLYNELNLGRREEYDVLDKRRGRDPEMGGKPQRRKNPQEGLYNELQKDKMAEAYSEIGMKGERRRGKGHDGLYQGLSTATKDTYDALHMQALPPRRAKRSGSGVKQTLNFDLLKLAGDVESNPGPSRGHMALPVTALLLPLALLLHAARPSQFRVSPLDRTWNLGETVELKCQVLLSNPTSGCSWLFQPRGAAASPTFLLYLSQNKPKAAEGLDTQRFSGKRLGDTFVLTLSDFRRENEGYYFCSALSNSIMYFSHFVPVFLPAKPTTTPAPRPPTPAPTIASQPLSLRPEACRPAAGGAVHTRGLDFACDIYIWAPLAGTCGVLLLSLVITLYCNHRNRRRVCKCPRPVVKSGDKPSLSARYV

SEQ ID NO: 11227 - protein, 1077 aa, synthetic construct
MALPVTALLLPLALLLHAARPSRYLVKRTGEKVFLECVQDMDHENMFWYRQDPGLGLRLIYFSYDVKMKEKGDIPEGYSVSREKKERFSLILESASTNQTSMYLCASSFWGRSTDTQYFGPGTRLTVLEDLKNVFPPEVAVFEPSKAEIAHTQKATLVCLATGFYPDHVELSWWVNGKEVHSGVCTDPQPLKEQPALNDSRYCLSSRLRVSATFWQNPRNHFRCQVQFYGLSENDEWTQDRAKPVTQIVSAEAWGRADCGSQSFGLLDPKLCYLLDGILFIYGVILTALFLRVKFSRSADAPAYQQGQNQLYNELNLGRREEYDVLDKRRGRDPEMGGKPQRRKNPQEGLYNELQKDKMAEAYSEIGMKGERRRGKGHDGLYQGLSTATKDTYDALHMQALPPRRAKRSGSGATNFSLLKQAGDVEENPGPTSMDWIWRILFLVGAATGAHSFEKQEVTQIPAALSVPEGENLVLNCSFTDSAIYNLQWFRQDPGKGLTSLLLIQSSQREQTSGRLNASLDKSSGRSTLYIAASQPGDSATYLCAVRETSGSRLTFGEGTQLTVNPDTRIQNPDPAVYQLRDSKSSDKSVCLFTDFDSQTNVSQSKDSDVYITDKCVLDMRSMDFKSNSAVAWSNKSDFACANAFNNSIIPEDTFFPSSDVPCGTQSFGLLDPKLCYLLDGILFIYGVILTALFLRVKFSRSADAPAYQQGQNQLYNELNLGRREEYDVLDKRRGRDPEMGGKPQRRKNPQEGLYNELQKDKMAEAYSEIGMKGERRRGKGHDGLYQGLSTATKDTYDALHMQALPPRRAKRSGSGVKQTLNFDLLKLAGDVESNPGPSRGHMALPVTALLLPLALLLHAARPSQFRVSPLDRTWNLGETVELKCQVLLSNPTSGCSWLFQPRGAAASPTFLLYLSQNKPKAAEGLDTQRFSGKRLGDTFVLTLSDFRRENEGYYFCSALSNSIMYFSHFVPVFLPAKPTTTPAPRPPTPAPTIASQPLSLRPEACRPAAGGAVHTRGLDFACDIYIWAPLAGTCGVLLLSLVITLYCNHRNRRRVCKCPRPVVKSGDKPSLSARYV

SEQ ID NO: 11228 - protein, 808 aa, synthetic construct
MALPVTALLLPLALLLHAARPSRYLVKRTGEKVFLECVQDMDHENMFWYRQDPGLGLRLIYFSYDVKMKEKGDIPEGYSVSREKKERFSLILESASTNQTSMYLCASSFWGRSTDTQYFGPGTRLTVLEDLKNVFPPEVAVFEPSEAEISHTQKATLVCLATGFYPDHVELSWWVNGKEVHSGVCTDPQPLKEQPALNDSRYCLSSRLRVSATFWQNPRNHFRCQVQFYGLSENDEWTQDRAKPVTQIVSAEAWGRADCGSQSFGLLDPKLCYLLDGILFIYGVILTALFLRVKFSRSADAPAYQQGQNQLYNELNLGRREEYDVLDKRRGRDPEMGGKPQRRKNPQEGLYNELQKDKMAEAYSEIGMKGERRRGKGHDGLYQGLSTATKDTYDALHMQALPPRRAKRSGSGATNFSLLKQAGDVEENPGPTSMDWIWRILFLVGAATGAHSFEKQEVTQIPAALSVPEGENLVLNCSFTDSAIYNLQWFRQDPGKGLTSLLLIQSSQREQTSGRLNASLDKSSGRSTLYIAASQPGDSATYLCAVRETSGSRLTFGEGTQLTVNPDTRIQNPDPAVYQLRDSKSSDKSVCLFTDFDSQTNVSQSKDSDVYITDKCVLDMRSMDFKSNSAVAWSNKSDFACANAFNNSIIPEDTFFPSPESSCGTQSFGLLDPKLCYLLDGILFIYGVILTALFLRVKFSRSADAPAYQQGQNQLYNELNLGRREEYDVLDKRRGRDPEMGGKPQRRKNPQEGLYNELQKDKMAEAYSEIGMKGERRRGKGHDGLYQGLSTATKDTYDALHMQALPPR

SEQ ID NO: 11229 - protein, 849 aa, synthetic construct
MALPVTALLLPLALLLHAARPSRYLVKRTGEKVFLECVQDMDHENMFWYRQDPGLGLRLIYFSYDVKMKEKGDIPEGYSVSREKKERFSLILESASTNQTSMYLCASSFWGRSTDTQYFGPGTRLTVLEQSFGLLDPKLCYLLDGILFIYGVILTALFLRVKFSRSADAPAYQQGQNQLYNELNLGRREEYDVLDKRRGRDPEMGGKPQRRKNPQEGLYNELQKDKMAEAYSEIGMKGERRRGKGHDGLYQGLSTATKDTYDALHMQALPPRRAKRSGSGATNFSLLKQAGDVEENPGPTSMDWIWRILFLVGAATGAHSFEKQEVTQIPAALSVPEGENLVLNCSFTDSAIYNLQWFRQDPGKGLTSLLLIQSSQREQTSGRLNASLDKSSGRSTLYIAASQPGDSATYLCAVRETSGSRLTFGEGTQLTVNPDTRQSFGLLDPKLCYLLDGILFIYGVILTALFLRVKFSRSADAPAYQQGQNQLYNELNLGRREEYDVLDKRRGRDPEMGGKPQRRKNPQEGLYNELQKDKMAEAYSEIGMKGERRRGKGHDGLYQGLSTATKDTYDALHMQALPPRRAKRSGSGVKQTLNFDLLKLAGDVESNPGPSRGHMALPVTALLLPLALLLHAARPSQFRVSPLDRTWNLGETVELKCQVLLSNPTSGCSWLFQPRGAAASPTFLLYLSQNKPKAAEGLDTQRFSGKRLGDTFVLTLSDFRRENEGYYFCSALSNSIMYFSHFVPVFLPAKPTTTPAPRPPTPAPTIASQPLSLRPEACRPAAGGAVHTRGLDFACDIYIWAPLAGTCGVLLLSLVITLYCNHRNRRRVCKCPRPVVKSGDKPSLSARYV

SEQ ID NO: 11230 - protein, 849 aa, synthetic construct
MALPVTALLLPLALLLHAARPSRYLVKRTGEKVFLECVQDMDHENMFWYRQDPGLGLRLIYFSYDVKMKEKGDIPEGYSVSREKKERFSLILESASTNQTSMYLCASSFWGRSTDTQYFGPGTRLTVLEDLKNVFPPEVAVFEPSEAEISHTQKATLVCLATGFYPDHVELSWWVNGKEVHSGVCTDPQPLKEQPALNDSRYCLSSRLRVSATFWQNPRNHFRCQVQFYGLSENDEWTQDRAKPVTQIVSAEAWGRADCGSQSFGLLDPKLCYLLDGILFIYGVILTALFLRSKRSRLLHSDYMNMTPRRPGPTRKHYQPYAPPRDFAAYRSRVKFSRSADAPAYQQGQNQLYNELNLGRREEYDVLDKRRGRDPEMGGKPQRRKNPQEGLYNELQKDKMAEAYSEIGMKGERRRGKGHDGLYQGLSTATKDTYDALHMQALPPRRAKRSGSGATNFSLLKQAGDVEENPGPTSMDWIWRILFLVGAATGAHSFEKQEVTQIPAALSVPEGENLVLNCSFTDSAIYNLQWFRQDPGKGLTSLLLIQSSQREQTSGRLNASLDKSSGRSTLYIAASQPGDSATYLCAVRETSGSRLTFGEGTQLTVNPDTRIQNPDPAVYQLRDSKSSDKSVCLFTDFDSQTNVSQSKDSDVYITDKCVLDMRSMDFKSNSAVAWSNKSDFACANAFNNSIIPEDTFFPSPESSCGTQSFGLLDPKLCYLLDGILFIYGVILTALFLRVKFSRSADAPAYQQGQNQLYNELNLGRREEYDVLDKRRGRDPEMGGKPQRRKNPQEGLYNELQKDKMAEAYSEIGMKGERRRGKGHDGLYQGLSTATKDTYDALHMQALPPR

SEQ ID NO: 11231 - protein, 890 aa, synthetic construct
MALPVTALLLPLALLLHAARPSRYLVKRTGEKVFLECVQDMDHENMFWYRQDPGLGLRLIYFSYDVKMKEKGDIPEGYSVSREKKERFSLILESASTNQTSMYLCASSFWGRSTDTQYFGPGTRLTVLEDLKNVFPPEVAVFEPSEAEISHTQKATLVCLATGFYPDHVELSWWVNGKEVHSGVCTDPQPLKEQPALNDSRYCLSSRLRVSATFWQNPRNHFRCQVQFYGLSENDEWTQDRAKPVTQIVSAEAWGRADCGSQSFGLLDPKLCYLLDGILFIYGVILTALFLRSKRSRLLHSDYMNMTPRRPGPTRKHYQPYAPPRDFAAYRSRVKFSRSADAPAYQQGQNQLYNELNLGRREEYDVLDKRRGRDPEMGGKPQRRKNPQEGLYNELQKDKMAEAYSEIGMKGERRRGKGHDGLYQGLSTATKDTYDALHMQALPPRRAKRSGSGATNFSLLKQAGDVEENPGPTSMDWIWRILFLVGAATGAHSFEKQEVTQIPAALSVPEGENLVLNCSFTDSAIYNLQWFRQDPGKGLTSLLLIQSSQREQTSGRLNASLDKSSGRSTLYIAASQPGDSATYLCAVRETSGSRLTFGEGTQLTVNPDTRIQNPDPAVYQLRDSKSSDKSVCLFTDFDSQTNVSQSKDSDVYITDKCVLDMRSMDFKSNSAVAWSNKSDFACANAFNNSIIPEDTFFPSPESSCGTQSFGLLDPKLCYLLDGILFIYGVILTALFLRSKRSRLLHSDYMNMTPRRPGPTRKHYQPYAPPRDFAAYRSRVKFSRSADAPAYQQGQNQLYNELNLGRREEYDVLDKRRGRDPEMGGKPQRRKNPQEGLYNELQKDKMAEAYSEIGMKGERRRGKGHDGLYQGLSTATKDTYDALHMQALPPR

SEQ ID NO: 11232 - protein, 808 aa, synthetic construct
MALPVTALLLPLALLLHAARPSRYLVKRTGEKVFLECVQDMDHENMFWYRQDPGLGLRLIYFSYDVKMKEKGDIPEGYSVSREKKERFSLILESASTNQTSMYLCASSFWGRSTDTQYFGPGTRLTVLEDLKNVFPPEVAVFEPSEAEISHTQKATLVCLATGFYPDHVELSWWVNGKEVHSGVSTDPQPLKEQPALNDSRYCLSSRLRVSATFWQNPRNHFRCQVQFYGLSENDEWTQDRAKPVTQIVSAEAWGRADCGSQSFGLLDPKLCYLLDGILFIYGVILTALFLRVKFSRSADAPAYQQGQNQLYNELNLGRREEYDVLDKRRGRDPEMGGKPQRRKNPQEGLYNELQKDKMAEAYSEIGMKGERRRGKGHDGLYQGLSTATKDTYDALHMQALPPRRAKRSGSGATNFSLLKQAGDVEENPGPTSMDWIWRILFLVGAATGAHSFEKQEVTQIPAALSVPEGENLVLNCSFTDSAIYNLQWFRQDPGKGLTSLLLIQSSQREQTSGRLNASLDKSSGRSTLYIAASQPGDSATYLCAVRETSGSRLTFGEGTQLTVNPDTRIQNPDPAVYQLRDSKSSDKSVCLFTDFDSQTNVSQSKDSDVYITDKTVLDMRSMDFKSNSAVAWSNKSDFACANAFNNSIIPEDTFFPSPESSCGTQSFGLLDPKLCYLLDGILFIYGVILTALFLRVKFSRSADAPAYQQGQNQLYNELNLGRREEYDVLDKRRGRDPEMGGKPQRRKNPQEGLYNELQKDKMAEAYSEIGMKGERRRGKGHDGLYQGLSTATKDTYDALHMQALPPR

SEQ ID NO: 11233 - protein, 1052 aa, synthetic construct
MALPVTALLLPLALLLHAARPSRYLVKRTGEKVFLECVQDMDHENMFWYRQDPGLGLRLIYFSYDVKMKEKGDIPEGYSVSREKKERFSLILESASTNQTSMYLCASSFWGRSTDTQYFGPGTRLTVLEDKQLDADVSPKPTIFLPSIAETKLQKAGTYLCLLEKFFPDVIKIHWQEKKSNTILGSQEGNTMKTNDTYMKFSWLTVPEKSLDKEHRCIVRHENNKNGVDQEIIFPPIKTDVITGSQSFGLLDPKLCYLLDGILFIYGVILTALFLRVKFSRSADAPAYQQGQNQLYNELNLGRREEYDVLDKRRGRDPEMGGKPQRRKNPQEGLYNELQKDKMAEAYSEIGMKGERRRGKGHDGLYQGLSTATKDTYDALHMQALPPRRAKRSGSGATNFSLLKQAGDVEENPGPTSMDWIWRILFLVGAATGAHSFEKQEVTQIPAALSVPEGENLVLNCSFTDSAIYNLQWFRQDPGKGLTSLLLIQSSQREQTSGRLNASLDKSSGRSTLYIAASQPGDSATYLCAVRETSGSRLTFGEGTQLTVNPDTRSQPHTKPSVFVMKNGTNVACLVKEFYPKDIRINLVSSKKITEFDPAIVISPSGKYNAVKLGKYEDSNSVTCSVQHDNKTVHSTDFGTQSFGLLDPKLCYLLDGILFIYGVILTALFLRVKFSRSADAPAYQQGQNQLYNELNLGRREEYDVLDKRRGRDPEMGGKPQRRKNPQEGLYNELQKDKMAEAYSEIGMKGERRRGKGHDGLYQGLSTATKDTYDALHMQALPPRRAKRSGSGVKQTLNFDLLKLAGDVESNPGPSRGHMALPVTALLLPLALLLHAARPSQFRVSPLDRTWNLGETVELKCQVLLSNPTSGCSWLFQPRGAAASPTFLLYLSQNKPKAAEGLDTQRFSGKRLGDTFVLTLSDFRRENEGYYFCSALSNSIMYFSHFVPVFLPAKPTTTPAPRPPTPAPTIASQPLSLRPEACRPAAGGAVHTRGLDFACDIYIWAPLAGTCGVLLLSLVITLYCNHRNRRRVCKCPRPVVKSGDKPSLSARYV

SEQ ID NO: 11234 - protein, 920 aa, synthetic construct
MALPVTALLLPLALLLHAARPSRYLVKRTGEKVFLECVQDMDHENMFWYRQDPGLGLRLIYFSYDVKMKEKGDIPEGYSVSREKKERFSLILESASTNQTSMYLCASSFWGRSTDTQYFGPGTRLTVLEGQPKANPTVTLFPPSSEELQANKATLVCLISDFYPGAVTVAWKADGSPVKAGVETTKPSKQSNNKYAASSYLSLTPEQWKSHRSYSCQVTHEGSTVEKTVAPTECSTTPGERSSLPAFYPGTSGSCSGCGSLSLPLLAGLVAADAVASLLIVGAVFLCARPRRSPAQEDGKVYINMPGRGRAKRSGSGATNFSLLKQAGDVEENPGPTSMDWIWRILFLVGAATGAHSFEKQEVTQIPAALSVPEGENLVLNCSFTDSAIYNLQWFRQDPGKGLTSLLLIQSSQREQTSGRLNASLDKSSGRSTLYIAASQPGDSATYLCAVRETSGSRLTFGEGTQLTVNPDTRASTKGPSVFPLAPSSKSTSGGTAALGCLVKDYFPEPVTVSWNSGALTSGVHTFPAVLQSSGLYSLSSVVTVPSSSLGTQTYICNVNHKPSNTKVDKRVEPKSCTTPGERSSLPAFYPGTSGSCSGCGSLSLPLLAGLVAADAVASLLIVGAVFLCARPRRSPAQEDGKVYINMPGRGRAKRSGSGVKQTLNFDLLKLAGDVESNPGPSRGHMALPVTALLLPLALLLHAARPSQFRVSPLDRTWNLGETVELKCQVLLSNPTSGCSWLFQPRGAAASPTFLLYLSQNKPKAAEGLDTQRFSGKRLGDTFVLTLSDFRRENEGYYFCSALSNSIMYFSHFVPVFLPAKPTTTPAPRPPTPAPTIASQPLSLRPEACRPAAGGAVHTRGLDFACDIYIWAPLAGTCGVLLLSLVITLYCNHRNRRRVCKCPRPVVKSGDKPSLSARYV

SEQ ID NO: 11235 - protein, 749 aa, synthetic construct
MALPVTALLLPLALLLHAARPSRYLVKRTGEKVFLECVQDMDHENMFWYRQDPGLGLRLIYFSYDVKMKEKGDIPEGYSVSREKKERFSLILESASTNQTSMYLCASSFWGRSTDTQYFGPGTRLTVLEGDIENTSLAPEDPTFPADTWGTYLLTTETGLQKDHALWDHTAQNLLRMGLAFLVLVALVWFLVEDWLSRKRTRERASRASTWEGRRRLNTQTLRAKRSGSGATNFSLLKQAGDVEENPGPTSMDWIWRILFLVGAATGAHSFEKQEVTQIPAALSVPEGENLVLNCSFTDSAIYNLQWFRQDPGKGLTSLLLIQSSQREQTSGRLNASLDKSSGRSTLYIAASQPGDSATYLCAVRETSGSRLTFGEGTQLTVNPDTRGDIENTSLAPEDPTFPADTWGTYLLTTETGLQKDHALWDHTAQNLLRMGLAFLVLVALVWFLVEDWLSRKRTRERASRASTWEGRRRLNTQTLRAKRSGSGVKQTLNFDLLKLAGDVESNPGPSRGHMALPVTALLLPLALLLHAARPSQFRVSPLDRTWNLGETVELKCQVLLSNPTSGCSWLFQPRGAAASPTFLLYLSQNKPKAAEGLDTQRFSGKRLGDTFVLTLSDFRRENEGYYFCSALSNSIMYFSHFVPVFLPAKPTTTPAPRPPTPAPTIASQPLSLRPEACRPAAGGAVHTRGLDFACDIYIWAPLAGTCGVLLLSLVITLYCNHRNRRRVCKCPRPVVKSGDKPSLSARYV

SEQ ID NO: 11236 - protein, 693 aa, synthetic construct
MALPVTALLLPLALLLHAARPSRYLVKRTGEKVFLECVQDMDHENMFWYRQDPGLGLRLIYFSYDVKMKEKGDIPEGYSVSREKKERFSLILESASTNQTSMYLCASSFWGRSTDTQYFGPGTRLTVLEITQGLAVSTISSFFPPGYQVSFCLVMVLLFAVDTGLYFSVKTNIRSSTRDWKDHKFKWRKDPQDKRAKRSGSGATNFSLLKQAGDVEENPGPTSMDWIWRILFLVGAATGAHSFEKQEVTQIPAALSVPEGENLVLNCSFTDSAIYNLQWFRQDPGKGLTSLLLIQSSQREQTSGRLNASLDKSSGRSTLYIAASQPGDSATYLCAVRETSGSRLTFGEGTQLTVNPDTRITQGLAVSTISSFFPPGYQVSFCLVMVLLFAVDTGLYFSVKTNIRSSTRDWKDHKFKWRKDPQDKRAKRSGSGVKQTLNFDLLKLAGDVESNPGPSRGHMALPVTALLLPLALLLHAARPSQFRVSPLDRTWNLGETVELKCQVLLSNPTSGCSWLFQPRGAAASPTFLLYLSQNKPKAAEGLDTQRFSGKRLGDTFVLTLSDFRRENEGYYFCSALSNSIMYFSHFVPVFLPAKPTTTPAPRPPTPAPTIASQPLSLRPEACRPAAGGAVHTRGLDFACDIYIWAPLAGTCGVLLLSLVITLYCNHRNRRRVCKCPRPVVKSGDKPSLSARYV

SEQ ID NO: 11237 - protein, 792 aa, synthetic construct
MALPVTALLLPLALLLHAARPGVTQSPTHLIKTRGQQVTLRCSPKSGHDTVSWYQQALGQGPQFIFQYYEEEERQRGNFPDRFSGHQFPNYSSELNVNALLLGDSALYLCASSLGWRGGRYNEQFFGPGTRLTVGQPKANPTVTLFPPSSEELQANKATLVCLISDFYPGAVTVAWKADGSPVKAGVETTKPSKQSNNKYAASSYLSLTPEQWKSHRSYSCQVTHEGSTVEKTVAPTECSGSQSFGLLDPKLCYLLDGILFIYGVILTALFLRVKFSRSADAPAYQQGQNQLYNELNLGRREEYDVLDKRRGRDPEMGGKPQRRKNPQEGLYNELQKDKMAEAYSEIGMKGERRRGKGHDGLYQGLSTATKDTYDALHMQALPPRRAKRSGSGATNFSLLKQAGDVEENPGPTSMDWIWRILFLVGAATGAHSFEQNIDQPTEMTATEGAIVQINCTYQTSGFNGLFWYQQHAGEAPTFLSYNVLDGLEEKGRFSSFLSRSKGYSYLLLKELQMKDSASYLCASVDGNNRLAFGKGNQVVVIPNASTKGPSVFPLAPSSKSTSGGTAALGCLVKDYFPEPVTVSWNSGALTSGVHTFPAVLQSSGLYSLSSVVTVPSSSLGTQTYICNVNHKPSNTKVDKRVEPKSCGTQSFGLLDPKLCYLLDGILFIYGVILTALFLRVKFSRSADAPAYQQGQNQLYNELNLGRREEYDVLDKRRGRDPEMGGKPQRRKNPQEGLYNELQKDKMAEAYSEIGMKGERRRGKGHDGLYQGLSTATKDTYDALHMQALPPR

SEQ ID NO: 11238 - protein, 558 aa, synthetic construct
MALPVTALLLPLALLLHAARPGVTQSPTHLIKTRGQQVTLRCSPKSGHDTVSWYQQALGQGPQFIFQYYEEEERQRGNFPDRFSGHQFPNYSSELNVNALLLGDSALYLCASSLGWRGGRYNEQFFGPGTRLTVLEQSFGLLDPKLCYLLDGILFIYGVILTALFLRVKFSRSADAPAYQQGQNQLYNELNLGRREEYDVLDKRRGRDPEMGGKPQRRKNPQEGLYNELQKDKMAEAYSEIGMKGERRRGKGHDGLYQGLSTATKDTYDALHMQALPPRRAKRSGSGATNFSLLKQAGDVEENPGPTSMDWIWRILFLVGAATGAHSFEQNIDQPTEMTATEGAIVQINCTYQTSGFNGLFWYQQHAGEAPTFLSYNVLDGLEEKGRFSSFLSRSKGYSYLLLKELQMKDSASYLCASVDGNNRLAFGKGNQVVVIPNTRQSFGLLDPKLCYLLDGILFIYGVILTALFLRVKFSRSADAPAYQQGQNQLYNELNLGRREEYDVLDKRRGRDPEMGGKPQRRKNPQEGLYNELQKDKMAEAYSEIGMKGERRRGKGHD

SEQ ID NO: 11239 - protein, 942 aa, synthetic construct
MALPVTALLLPLALLLHAARPGVTQSPTHLIKTRGQQVTLRCSPKSGHDTVSWYQQALGQGPQFIFQYYEEEERQRGNFPDRFSGHQFPNYSSELNVNALLLGDSALYLCASSLGWRGGRYNEQFFGPGTRLTVLETTPGERSSLPAFYPGTSGSCSGCGSLSLPLLAGLVAADAVASLLIVGAVFLCARPRRSPAQEDGKVYINMPGRGSTSRVKFSRSADAPAYQQGQNQLYNELNLGRREEYDVLDKRRGRDPEMGGKPQRRKNPQEGLYNELQKDKMAEAYSEIGMKGERRRGKGHDGLYQGLSTATKDTYDALHMQALPPRRAKRSGSGATNFSLLKQAGDVEENPGPMDWIWRILFLVGAATGAHSFEQNIDQPTEMTATEGAIVQINCTYQTSGFNGLFWYQQHAGEAPTFLSYNVLDGLEEKGRFSSFLSRSKGYSYLLLKELQMKDSASYLCASVDGNNRLAFGKGNQVVVIPNTRTTPGERSSLPAFYPGTSGSCSGCGSLSLPLLAGLVAADAVASLLIVGAVFLCARPRRSPAQEDGKVYINMPGRGSSRRVKFSRSADAPAYQQGQNQLYNELNLGRREEYDVLDKRRGRDPEMGGKPQRRKNPQEGLYNELQKDKMAEAYSEIGMKGERRRGKGHDGLYQGLSTATKDTYDALHMQALPPRRAKRSGSGVKQTLNFDLLKLAGDVESNPGPGHMALPVTALLLPLALLLHAARPSQFRVSPLDRTWNLGETVELKCQVLLSNPTSGCSWLFQPRGAAASPTFLLYLSQNKPKAAEGLDTQRFSGKRLGDTFVLTLSDFRRENEGYYFCSALSNSIMYFSHFVPVFLPAKPTTTPAPRPPTPAPTIASQPLSLRPEACRPAAGGAVHTRGLDFACDIYIWAPLAGTCGVLLLSLVITLYCNHRNRRRVCKCPRPVVKSGDKPSLSARYV

SEQ ID NO: 11240 - protein, 942 aa, synthetic construct; identical to SEQ ID NO: 11239

SEQ ID NO: 11241 - protein, 1108 aa, synthetic construct
MALPVTALLLPLALLLHAARPGVTQSPTHLIKTRGQQVTLRCSPKSGHDTVSWYQQALGQGPQFIFQYYEEEERQRGNFPDRFSGHQFPNYSSELNVNALLLGDSALYLCASSLGWRGGRYNEQFFGPGTRLTVLEGQPKANPTVTLFPPSSEELQANKATLVCLISDFYPGAVTVAWKADGSPVKAGVETTKPSKQSNNKYAASSYLSLTPEQWKSHRSYSCQVTHEGSTVEKTVAPTECSGSTTPGERSSLPAFYPGTSGSCSGCGSLSLPLLAGLVAADAVASLLIVGAVFLCARPRRSPAQEDGKVYINMPGRGSTSRVKFSRSADAPAYQQGQNQLYNELNLGRREEYDVLDKRRGRDPEMGGKPQRRKNPQEGLYNELQKDKMAEAYSEIGMKGERRRGKGHDGLYQGLSTATKDTYDALHMQALPPRRAKRSGSGATNFSLLKQAGDVEENPGPMDWIWRILFLVGAATGAHSFEQNIDQPTEMTATEGAIVQINCTYQTSGFNGLFWYQQHAGEAPTFLSYNVLDGLEEKGRFSSFLSRSKGYSYLLLKELQMKDSASYLCASVDGNNRLAFGKGNQVVVIPNTRASTKGPSVFPLAPSSKSTSGGTAALGCLVKDYFPEPVTVSWNSGALTSGVHTFPAVLQSSGLYSLSSVVTVPSSSLGTQTYICNVNHKPSNTKVDKRVEPKSCGTTTPGERSSLPAFYPGTSGSCSGCGSLSLPLLAGLVAADAVASLLIVGAVFLCARPRRSPAQEDGKVYINMPGRGSSRRVKFSRSADAPAYQQGQNQLYNELNLGRREEYDVLDKRRGRDPEMGGKPQRRKNPQEGLYNELQKDKMAEAYSEIGMKGERRRGKGHDGLYQGLSTATKDTYDALHMQALPPRRAKRSGSGVKQTLNFDLLKLAGDVESNPGPGHMATYEVLCEVARKLGTDDREVVLFLLNVFIPQPTLAQLIGALRALKEEGRLTFPLLAECLFRAGRRDLLRDLLHLDPRFLERHLAGTMSYFSPYQLTVLHVDGELCARDIRSLIFLSKDTIGSRSTPQTFLHWVYCMENLDLLGPTDVDALMSMLRSLSRVDLQRQVQTLMGLHLSGPSHSQHYRHTP

SEQ ID NO: 11242 - protein, 1161 aa, synthetic construct
MALPVTALLLPLALLLHAARPGVTQSPTHLIKTRGQQVTLRCSPKSGHDTVSWYQQALGQGPQFIFQYYEEEERQRGNFPDRFSGHQFPNYSSELNVNALLLGDSALYLCASSLGWRGGRYNEQFFGPGTRLTVLEGQPKANPTVTLFPPSSEELQANKATLVCLISDFYPGAVTVAWKADGSPVKAGVETTKPSKQSNNKYAASSYLSLTPEQWKSHRSYSCQVTHEGSTVEKTVAPTECSGSTTPGERSSLPAFYPGTSGSCSGCGSLSLPLLAGLVAADAVASLLIVGAVFLCARPRRSPAQEDGKVYINMPGRGSTSRVKFSRSADAPAYQQGQNQLYNELNLGRREEYDVLDKRRGRDPEMGGKPQRRKNPQEGLYNELQKDKMAEAYSEIGMKGERRRGKGHDGLYQGLSTATKDTYDALHMQALPPRRAKRSGSGATNFSLLKQAGDVEENPGPMDWIWRILFLVGAATGAHSFEQNIDQPTEMTATEGAIVQINCTYQTSGFNGLFWYQQHAGEAPTFLSYNVLDGLEEKGRFSSFLSRSKGYSYLLLKELQMKDSASYLCASVDGNNRLAFGKGNQVVVIPNTRASTKGPSVFPLAPSSKSTSGGTAALGCLVKDYFPEPVTVSWNSGALTSGVHTFPAVLQSSGLYSLSSVVTVPSSSLGTQTYICNVNHKPSNTKVDKRVEPKSCGTTTPGERSSLPAFYPGTSGSCSGCGSLSLPLLAGLVAADAVASLLIVGAVFLCARPRRSPAQEDGKVYINMPGRGSSRRVKFSRSADAPAYQQGQNQLYNELNLGRREEYDVLDKRRGRDPEMGGKPQRRKNPQEGLYNELQKDKMAEAYSEIGMKGERRRGKGHDGLYQGLSTATKDTYDALHMQALPPRRAKRSGSGVKQTLNFDLLKLAGDVESNPGPGHMSDSKEVPSLPFLRHLLEELDSHEDSLLLFLCHDAAPGCTTVTQALCSLSQQRKLTLAALVEMLYVLQRMDLLKSRFGLSKEGAEQLLGTSFLTRYRKLMVCVGEELDSSELRALRLFACNLNPSLSTALSESSRFVELVLALENVGLVSPSSVSVLADMLRTLRRLDLCQQLVEYEQQEQARYRYCYAASPSLPVRTLRRGHGASEHEQLCMPVQESSDSPELLRTPVQESSSDSPEQTT

SEQ ID NO: 11243 - protein, 1155 aa, synthetic construct
MALPVTALLLPLALLLHAARPGVTQSPTHLIKTRGQQVTLRCSPKSGHDTVSWYQQALGQGPQFIFQYYEEEERQRGNFPDRFSGHQFPNYSSELNVNALLLGDSALYLCASSLGWRGGRYNEQFFGPGTRLTVLEGQPKANPTVTLFPPSSEELQANKATLVCLISDFYPGAVTVAWKADGSPVKAGVETTKPSKQSNNKYAASSYLSLTPEQWKSHRSYSCQVTHEGSTVEKTVAPTECSGSTTPGERSSLPAFYPGTSGSCSGCGSLSLPLLAGLVAADAVASLLIVGAVFLCARPRRSPAQEDGKVYINMPGRGSTSRVKFSRSADAPAYQQGQNQLYNELNLGRREEYDVLDKRRGRDPEMGGKPQRRKNPQEGLYNELQKDKMAEAYSEIGMKGERRRGKGHDGLYQGLSTATKDTYDALHMQALPPRRAKRSGSGATNFSLLKQAGDVEENPGPMDWIWRILFLVGAATGAHSFEQNIDQPTEMTATEGAIVQINCTYQTSGFNGLFWYQQHAGEAPTFLSYNVLDGLEEKGRFSSFLSRSKGYSYLLLKELQMKDSASYLCASVDGNNRLAFGKGNQVVVIPNTRASTKGPSVFPLAPSSKSTSGGTAALGCLVKDYFPEPVTVSWNSGALTSGVHTFPAVLQSSGLYSLSSVVTVPSSSLGTQTYICNVNHKPSNTKVDKRVEPKSCGTTTPGERSSLPAFYPGTSGSCSGCGSLSLPLLAGLVAADAVASLLIVGAVFLCARPRRSPAQEDGKVYINMPGRGSSRRVKFSRSADAPAYQQGQNQLYNELNLGRREEYDVLDKRRGRDPEMGGKPQRRKNPQEGLYNELQKDKMAEAYSEIGMKGERRRGKGHDGLYQGLSTATKDTYDALHMQALPPRRAKRSGSGVKQTLNFDLLKLAGDVESNPGPGHMALPVTALLLPLALLLHAARPSQFRVSPLDRTWNLGETVELKCQVLLSNPTSGCSWLFQPRGAAASPTFLLYLSQNKPKAAEGLDTQRFSGKRLGDTFVLTLSDFRRENEGYYFCSALSNSIMYFSHFVPVFLPAKPTTTPAPRPPTPAPTIASQPLSLRPEACRPAAGGAVHTRGLDFACDIYIWAPLAGTCGVLLLSLVITLYCNHRNRRRVCKCPRPVVKSGDKPSLSARYV

SEQ ID NO: 11244 - protein, 1292 aa, synthetic construct
MALPVTALLLPLALLLHAARPEVQLVESGGGLVQAGGSLRLSCAASGRTFSMGWFRQAPGKEREFVAAITYSGGSPYYADSVKGRFTISRDNAKNTVYLQMNSLKPEDTAVYYCAANPTYGSDWNAENWGQGTQVTVSSGTGGGGSGGGGSGGGGSEFGVTQSPTHLIKTRGQQVTLRCSPKSGHDTVSWYQQALGQGPQFIFQYYEEEERQRGNFPDRFSGHQFPNYSSELNVNALLLGDSALYLCASSLGWRGGRYNEQFFGPGTRLTVLEGQPKANPTVTLFPPSSEELQANKATLVCLISDFYPGAVTVAWKADGSPVKAGVETTKPSKQSNNKYAASSYLSLTPEQWKSHRSYSCQVTHEGSTVEKTVAPTECSGSTTPGERSSLPAFYPGTSGSCSGCGSLSLPLLAGLVAADAVASLLIVGAVFLCARPRRSPAQEDGKVYINMPGRGSTSRVKFSRSADAPAYQQGQNQLYNELNLGRREEYDVLDKRRGRDPEMGGKPQRRKNPQEGLYNELQKDKMAEAYSEIGMKGERRRGKGHDGLYQGLSTATKDTYDALHMQALPPRRAKRSGSGATNFSLLKQAGDVEENPGPMDWIWRILFLVGAATGAHSFEQNIDQPTEMTATEGAIVQINCTYQTSGFNGLFWYQQHAGEAPTFLSYNVLDGLEEKGRFSSFLSRSKGYSYLLLKELQMKDSASYLCASVDGNNRLAFGKGNQVVVIPNTRASTKGPSVFPLAPSSKSTSGGTAALGCLVKDYFPEPVTVSWNSGALTSGVHTFPAVLQSSGLYSLSSVVTVPSSSLGTQTYICNVNHKPSNTKVDKRVEPKSCGTTTPGERSSLPAFYPGTSGSCSGCGSLSLPLLAGLVAADAVASLLIVGAVFLCARPRRSPAQEDGKVYINMPGRGSSRRVKFSRSADAPAYQQGQNQLYNELNLGRREEYDVLDKRRGRDPEMGGKPQRRKNPQEGLYNELQKDKMAEAYSEIGMKGERRRGKGHDGLYQGLSTATKDTYDALHMQALPPRRAKRSGSGVKQTLNFDLLKLAGDVESNPGPGHMALPVTALLLPLALLLHAARPSQFRVSPLDRTWNLGETVELKCQVLLSNPTSGCSWLFQPRGAAASPTFLLYLSQNKPKAAEGLDTQRFSGKRLGDTFVLTLSDFRRENEGYYFCSALSNSIMYFSHFVPVFLPAKPTTTPAPRPPTPAPTIASQPLSLRPEACRPAAGGAVHTRGLDFACDIYIWAPLAGTCGVLLLSLVITLYCNHRNRRRVCKCPRPVVKSGDKPSLSARYV

SEQ ID NO: 11245 - protein, 1429 aa, synthetic construct
MALPVTALLLPLALLLHAARPEVQLVESGGGLVQAGGSLRLSCAASGRTFSMGWFRQAPGKEREFVAAITYSGGSPYYADSVKGRFTISRDNAKNTVYLQMNSLKPEDTAVYYCAANPTYGSDWNAENWGQGTQVTVSSGTGGGGSGGGGSGGGGSEFGVTQSPTHLIKTRGQQVTLRCSPKSGHDTVSWYQQALGQGPQFIFQYYEEEERQRGNFPDRFSGHQFPNYSSELNVNALLLGDSALYLCASSLGWRGGRYNEQFFGPGTRLTVLEGQPKANPTVTLFPPSSEELQANKATLVCLISDFYPGAVTVAWKADGSPVKAGVETTKPSKQSNNKYAASSYLSLTPEQWKSHRSYSCQVTHEGSTVEKTVAPTECSGSTTPGERSSLPAFYPGTSGSCSGCGSLSLPLLAGLVAADAVASLLIVGAVFLCARPRRSPAQEDGKVYINMPGRGSTSRVKFSRSADAPAYQQGQNQLYNELNLGRREEYDVLDKRRGRDPEMGGKPQRRKNPQEGLYNELQKDKMAEAYSEIGMKGERRRGKGHDGLYQGLSTATKDTYDALHMQALPPRRAKRSGSGATNFSLLKQAGDVEENPGPMDWIWRILFLVGAATGAHSGPEVQLVESGGGLVQAGGSLRLSCAASGRTFTMGWFRQAPGKEREFVAAISLSPTLAYYADSVKGRFTISRDNAKNTVVLQMNSLKPEDTALYYCAADRKSVMSIRPDYWGQGTQVTVSSGSGGGGSGGGGSGGGGSFEQNIDQPTEMTATEGAIVQINCTYQTSGFNGLFWYQQHAGEAPTFLSYNVLDGLEEKGRFSSFLSRSKGYSYLLLKELQMKDSASYLCASVDGNNRLAFGKGNQVVVIPNTRASTKGPSVFPLAPSSKSTSGGTAALGCLVKDYFPEPVTVSWNSGALTSGVHTFPAVLQSSGLYSLSSVVTVPSSSLGTQTYICNVNHKPSNTKVDKRVEPKSCGTTTPGERSSLPAFYPGTSGSCSGCGSLSLPLLAGLVAADAVASLLIVGAVFLCARPRRSPAQEDGKVYINMPGRGSSRRVKFSRSADAPAYQQGQNQLYNELNLGRREEYDVLDKRRGRDPEMGGKPQRRKNPQEGLYNELQKDKMAEAYSEIGMKGERRRGKGHDGLYQGLSTATKDTYDALHMQALPPRRAKRSGSGVKQTLNFDLLKLAGDVESNPGPGHMALPVTALLLPLALLLHAARPSQFRVSPLDRTWNLGETVELKCQVLLSNPTSGCSWLFQPRGAAASPTFLLYLSQNKPKAAEGLDTQRFSGKRLGDTFVLTLSDFRRENEGYYFCSALSNSIMYFSHFVPVFLPAKPTTTPAPRPPTPAPTIASQPLSLRPEACRPAAGGAVHTRGLDFACDIYIWAPLAGTCGVLLLSLVITLYCNHRNRRRVCKCPRPVVKSGDKPSLSARYV

SEQ ID NO: 11246 - protein, 813 aa, synthetic construct
MALPVTALLLPLALLLHAARPEFGVTQSPTHLIKTRGQQVTLRCSPKSGHDTVSWYQQALGQGPQFIFQYYEEEERQRGNFPDRFSGHQFPNYSSELNVNALLLGDSALYLCASSLGWRGGRYNEQFFGPGTRLTVLEDLKNVFPPEVAVFEPSEAEISHTQKATLVCLATGFYPDHVELSWWVNGKEVHSGVSTDPQPLKEQPALNDSRYCLSSRLRVSATFWQNPRNHFRCQVQFYGLSENDEWTQDRAKPVTQIVSAEAWGRADCGSQSFGLLDPKLCYLLDGILFIYGVILTALFLRVKFSRSADAPAYQQGQNQLYNELNLGRREEYDVLDKRRGRDPEMGGKPQRRKNPQEGLYNELQKDKMAEAYSEIGMKGERRRGKGHDGLYQGLSTATKDTYDALHMQALPPRRAKRSGSGATNFSLLKQAGDVEENPGPTSMDWIWRILFLVGAATGAHSFEQNIDQPTEMTATEGAIVQINCTYQTSGFNGLFWYQQHAGEAPTFLSYNVLDGLEEKGRFSSFLSRSKGYSYLLLKELQMKDSASYLCASVDGNNRLAFGKGNQVVVIPNTRIQNPDPAVYQLRDSKSSDKSVCLFTDFDSQTNVSQSKDSDVYITDKTVLDMRSMDFKSNSAVAWSNKSDFACANAFNNSIIPEDTFFPSPESSCGTQSFGLLDPKLCYLLDGILFIYGVILTALFLRVKFSRSADAPAYQQGQNQLYNELNLGRREEYDVLDKRRGRDPEMGGKPQRRKNPQEGLYNELQKDKMAEAYSEIGMKGERRRGKGHDGLYQGLSTATKDTYDALHMQALPPR

SEQ ID NO: 11247 - protein, 855 aa, synthetic construct
MALPVTALLLPLALLLHAARPEFGVTQSPTHLIKTRGQQVTLRCSPKSGHDTVSWYQQALGQGPQFIFQYYEEEERQRGNFPDRFSGHQFPNYSSELNVNALLLGDSALYLCASSLGWRGGRYNEQFFGPGTRLTVLEDLKNVFPPEVAVFEPSEAEISHTQKATLVCLATGFYPDHVELSWWVNGKEVHSGVSTDPQPLKEQPALNDSRYCLSSRLRVSATFWQNPRNHFRCQVQFYGLSENDEWTQDRAKPVTQIVSAEAWGRADCGSQSFGLLDPKLCYLLDGILFIYGVILTALFLRVKFSRSADAPAYQQGQNQLYNELNLGRREEYDVLDKRRGRDPEMGGKPQRRKNPQEGLYNELQKDKMAEAYSEIGMKGERRRGKGHDGLYQGLSTATKDTYDALHMQALPPRRAKRSGSGATNFSLLKQAGDVEENPGPTSMDWIWRILFLVGAATGAHSFEQNIDQPTEMTATEGAIVQINCTYQTSGFNGLFWYQQHAGEAPTFLSYNVLDGLEEKGRFSSFLSRSKGYSYLLLKELQMKDSASYLCASVDGNNRLAFGKGNQVVVIPNTRIQNPDPAVYQLRDSKSSDKSVCLFTDFDSQTNVSQSKDSDVYITDKTVLDMRSMDFKSNSAVAWSNKSDFACANAFNNSIIPEDTFFPSPESSCGTQSFGLLDPKLCYLLDGILFIYGVILTALFLKRGRKKLLYIFKQPFMRPVQTTQEEDGCSCRFPEEEEGGCELRVKFSRSADAPAYQQGQNQLYNELNLGRREEYDVLDKRRGRDPEMGGKPQRRKNPQEGLYNELQKDKMAEAYSEIGMKGERRRGKGHDGLYQGLSTATKDTYDALHMQALPPR

SEQ ID NO: 11248 - protein, 854 aa, synthetic construct
MALPVTALLLPLALLLHAARPEFGVTQSPTHLIKTRGQQVTLRCSPKSGHDTVSWYQQALGQGPQFIFQYYEEEERQRGNFPDRFSGHQFPNYSSELNVNALLLGDSALYLCASSLGWRGGRYNEQFFGPGTRLTVLEDLKNVFPPEVAVFEPSEAEISHTQKATLVCLATGFYPDHVELSWWVNGKEVHSGVSTDPQPLKEQPALNDSRYCLSSRLRVSATFWQNPRNHFRCQVQFYGLSENDEWTQDRAKPVTQIVSAEAWGRADCGSQSFGLLDPKLCYLLDGILFIYGVILTALFLRVKFSRSADAPAYQQGQNQLYNELNLGRREEYDVLDKRRGRDPEMGGKPQRRKNPQEGLYNELQKDKMAEAYSEIGMKGERRRGKGHDGLYQGLSTATKDTYDALHMQALPPRRAKRSGSGATNFSLLKQAGDVEENPGPTSMDWIWRILFLVGAATGAHSFEQNIDQPTEMTATEGAIVQINCTYQTSGFNGLFWYQQHAGEAPTFLSYNVLDGLEEKGRFSSFLSRSKGYSYLLLKELQMKDSASYLCASVDGNNRLAFGKGNQVVVIPNTRIQNPDPAVYQLRDSKSSDKSVCLFTDFDSQTNVSQSKDSDVYITDKTVLDMRSMDFKSNSAVAWSNKSDFACANAFNNSIIPEDTFFPSPESSCGTQSFGLLDPKLCYLLDGILFIYGVILTALFLRSKRSRLLHSDYMNMTPRRPGPTRKHYQPYAPPRDFAAYRSRVKFSRSADAPAYQQGQNQLYNELNLGRREEYDVLDKRRGRDPEMGGKPQRRKNPQEGLYNELQKDKMAEAYSEIGMKGERRRGKGHDGLYQGLSTATKDTYDALHMQALPPR

SEQ ID NO: 11249 - protein, 849 aa, synthetic construct
MALPVTALLLPLALLLHAARPEFGVTQSPTHLIKTRGQQVTLRCSPKSGHDTVSWYQQALGQGPQFIFQYYEEEERQRGNFPDRFSGHQFPNYSSELNVNALLLGDSALYLCASSLGWRGGRYNEQFFGPGTRLTVLEDLKNVFPPEVAVFEPSEAEISHTQKATLVCLATGFYPDHVELSWWVNGKEVHSGVSTDPQPLKEQPALNDSRYCLSSRLRVSATFWQNPRNHFRCQVQFYGLSENDEWTQDRAKPVTQIVSAEAWGRADCGSQSFGLLDPKLCYLLDGILFIYGVILTALFLRVKFSRSADAPAYQQGQNQLYNELNLGRREEYDVLDKRRGRDPEMGGKPQRRKNPQEGLYNELQKDKMAEAYSEIGMKGERRRGKGHDGLYQGLSTATKDTYDALHMQALPPRRAKRSGSGATNFSLLKQAGDVEENPGPTSMDWIWRILFLVGAATGAHSFEQNIDQPTEMTATEGAIVQINCTYQTSGFNGLFWYQQHAGEAPTFLSYNVLDGLEEKGRFSSFLSRSKGYSYLLLKELQMKDSASYLCASVDGNNRLAFGKGNQVVVIPNTRIQNPDPAVYQLRDSKSSDKSVCLFTDFDSQTNVSQSKDSDVYITDKTVLDMRSMDFKSNSAVAWSNKSDFACANAFNNSIIPEDTFFPSPESSCGTQSFGLLDPKLCYLLDGILFIYGVILTALFLRDQRLPPDAHKPPGGGSFRTPIQEEQADAHSTLAKIRVKFSRSADAPAYQQGQNQLYNELNLGRREEYDVLDKRRGRDPEMGGKPQRRKNPQEGLYNELQKDKMAEAYSEIGMKGERRRGKGHDGLYQGLSTATKDTYDALHMQALPPR

SEQ ID NO: 11250 - protein, 933 aa, synthetic construct
MALPVTALLLPLALLLHAARPEFGVTQSPTHLIKTRGQQVTLRCSPKSGHDTVSWYQQALGQGPQFIFQYYEEEERQRGNFPDRFSGHQFPNYSSELNVNALLLGDSALYLCASSLGWRGGRYNEQFFGPGTRLTVLEDLKNVFPPEVAVFEPSEAEISHTQKATLVCLATGFYPDHVELSWWVNGKEVHSGVSTDPQPLKEQPALNDSRYCLSSRLRVSATFWQNPRNHFRCQVQFYGLSENDEWTQDRAKPVTQIVSAEAWGRADCGSQSFGLLDPKLCYLLDGILFIYGVILTALFLRVKFSRSADAPAYQQGQNQLYNELNLGRREEYDVLDKRRGRDPEMGGKPQRRKNPQEGLYNELQKDKMAEAYSEIGMKGERRRGKGHDGLYQGLSTATKDTYDALHMQALPPRRAKRSGSGATNFSLLKQAGDVEENPGPTSMDWIWRILFLVGAATGAHSFEQNIDQPTEMTATEGAIVQINCTYQTSGFNGLFWYQQHAGEAPTFLSYNVLDGLEEKGRFSSFLSRSKGYSYLLLKELQMKDSASYLCASVDGNNRLAFGKGNQVVVIPNTRIQNPDPAVYQLRDSKSSDKSVCLFTDFDSQTNVSQSKDSDVYITDKTVLDMRSMDFKSNSAVAWSNKSDFACANAFNNSIIPEDTFFPSPESSCGTQSFGLLDPKLCYLLDGILFIYGVILTALFLWRRKRKEKQSETSPKEFLTIYEDVKDLKTRRNHEQEQTFPGGGSTIYSMIQSQSSAPTSQEPAYTLYSLIQPSRKSGSRKRNHSPSFNSTIYEVIGKSQPKAQNPARLSRKELENFDVYSRVKFSRSADAPAYQQGQNQLYNELNLGRREEYDVLDKRRGRDPEMGGKPQRRKNPQEGLYNELQKDKMAEAYSEIGMKGERRRGKGHDGLYQGLSTATKDTYDALHMQALPPR

SEQ ID NO: 11251 - protein, 896 aa, synthetic construct
MALPVTALLLPLALLLHAARPEFGVTQSPTHLIKTRGQQVTLRCSPKSGHDTVSWYQQALGQGPQFIFQYYEEEERQRGNFPDRFSGHQFPNYSSELNVNALLLGDSALYLCASSLGWRGGRYNEQFFGPGTRLTVLEDLKNVFPPEVAVFEPSEAEISHTQKATLVCLATGFYPDHVELSWWVNGKEVHSGVSTDPQPLKEQPALNDSRYCLSSRLRVSATFWQNPRNHFRCQVQFYGLSENDEWTQDRAKPVTQIVSAEAWGRADCGSQSFGLLDPKLCYLLDGILFIYGVILTALFLRSKRSRLLHSDYMNMTPRRPGPTRKHYQPYAPPRDFAAYRSRVKFSRSADAPAYQQGQNQLYNELNLGRREEYDVLDKRRGRDPEMGGKPQRRKNPQEGLYNELQKDKMAEAYSEIGMKGERRRGKGHDGLYQGLSTATKDTYDALHMQALPPRRAKRSGSGATNFSLLKQAGDVEENPGPTSMDWIWRILFLVGAATGAHSFEQNIDQPTEMTATEGAIVQINCTYQTSGFNGLFWYQQHAGEAPTFLSYNVLDGLEEKGRFSSFLSRSKGYSYLLLKELQMKDSASYLCASVDGNNRLAFGKGNQVVVIPNTRIQNPDPAVYQLRDSKSSDKSVCLFTDFDSQTNVSQSKDSDVYITDKTVLDMRSMDFKSNSAVAWSNKSDFACANAFNNSIIPEDTFFPSPESSCGTQSFGLLDPKLCYLLDGILFIYGVILTALFLKRGRKKLLYIFKQPFMRPVQTTQEEDGCSCRFPEEEEGGCELRVKFSRSADAPAYQQGQNQLYNELNLGRREEYDVLDKRRGRDPEMGGKPQRRKNPQEGLYNELQKDKMAEAYSEIGMKGERRRGKGHDGLYQGLSTATKDTYDALHMQALPPR

SEQ ID NO: 11252 - protein, 895 aa, synthetic construct
MALPVTALLLPLALLLHAARPEFGVTQSPTHLIKTRGQQVTLRCSPKSGHDTVSWYQQALGQGPQFIFQYYEEEERQRGNFPDRFSGHQFPNYSSELNVNALLLGDSALYLCASSLGWRGGRYNEQFFGPGTRLTVLEDLKNVFPPEVAVFEPSEAEISHTQKATLVCLATGFYPDHVELSWWVNGKEVHSGVSTDPQPLKEQPALNDSRYCLSSRLRVSATFWQNPRNHFRCQVQFYGLSENDEWTQDRAKPVTQIVSAEAWGRADCGSQSFGLLDPKLCYLLDGILFIYGVILTALFLRSKRSRLLHSDYMNMTPRRPGPTRKHYQPYAPPRDFAAYRSRVKFSRSADAPAYQQGQNQLYNELNLGRREEYDVLDKRRGRDPEMGGKPQRRKNPQEGLYNELQKDKMAEAYSEIGMKGERRRGKGHDGLYQGLSTATKDTYDALHMQALPPRRAKRSGSGATNFSLLKQAGDVEENPGPTSMDWIWRILFLVGAATGAHSFEQNIDQPTEMTATEGAIVQINCTYQTSGFNGLFWYQQHAGEAPTFLSYNVLDGLEEKGRFSSFLSRSKGYSYLLLKELQMKDSASYLCASVDGNNRLAFGKGNQVVVIPNTRIQNPDPAVYQLRDSKSSDKSVCLFTDFDSQTNVSQSKDSDVYITDKTVLDMRSMDFKSNSAVAWSNKSDFACANAFNNSIIPEDTFFPSPESSCGTQSFGLLDPKLCYLLDGILFIYGVILTALFLRSKRSRLLHSDYMNMTPRRPGPTRKHYQPYAPPRDFAAYRSRVKFSRSADAPAYQQGQNQLYNELNLGRREEYDVLDKRRGRDPEMGGKPQRRKNPQEGLYNELQKDKMAEAYSEIGMKGERRRGKGHDGLYQGLSTATKDTYDALHMQALPPR

SEQ ID NO: 11253 - protein, 896 aa, synthetic construct; identical to SEQ ID NO: 11251

SEQ ID NO: 11254 - protein, 813 aa, synthetic construct
MALPVTALLLPLALLLHAARPEFGVTQSPTHLIKTRGQQVTLRCSPKSGHDTVSWYQQALGQGPQFIFQYYEEEERQRGNFPDRFSGHQFPNYSSELNVNALLLGDSALYLCASSLGWRGGRYNEQFFGPGTRLTVLEDLKNVFPPEVAVFEPSEAEISHTQKATLVCLATGFYPDHVELSWWVNGKEVHSGVSTDPQPLKEQPALNDSRYCLSSRLRVSATFWQNPRNHFRCQVQFYGLSENDEWTQDRAKPVTQIVSAEAWGRADCGSQSFGLLDPKLCYLLDGILFIYGVILTALFLRVKFSRSADAPAYQQGQNQLYNELNLGRREEYDVLDKRRGRDPEMGGKPQRRKNPQEGLFNELQKDKMAEAFSEIGMKGERRRGKGHDGLFQGLSTATKDTFDALHMQALPPRRAKRSGSGATNFSLLKQAGDVEENPGPTSMDWIWRILFLVGAATGAHSFEQNIDQPTEMTATEGAIVQINCTYQTSGFNGLFWYQQHAGEAPTFLSYNVLDGLEEKGRFSSFLSRSKGYSYLLLKELQMKDSASYLCASVDGNNRLAFGKGNQVVVIPNTRIQNPDPAVYQLRDSKSSDKSVCLFTDFDSQTNVSQSKDSDVYITDKTVLDMRSMDFKSNSAVAWSNKSDFACANAFNNSIIPEDTFFPSPESSCGTQSFGLLDPKLCYLLDGILFIYGVILTALFLRVKFSRSADAPAYQQGQNQLYNELNLGRREEYDVLDKRRGRDPEMGGKPQRRKNPQEGLYNELQKDKMAEAYSEIGMKGERRRGKGHDGLYQGLSTATKDTYDALHMQALPPR

SEQ ID NO: 11255 - protein, 813 aa, synthetic construct; identical to SEQ ID NO: 11254

SEQ ID NO: 11256 - protein, 855 aa, synthetic construct
MALPVTALLLPLALLLHAARPEFGVTQSPTHLIKTRGQQVTLRCSPKSGHDTVSWYQQALGQGPQFIFQYYEEEERQRGNFPDRFSGHQFPNYSSELNVNALLLGDSALYLCASSLGWRGGRYNEQFFGPGTRLTVLEDLKNVFPPEVAVFEPSEAEISHTQKATLVCLATGFYPDHVELSWWVNGKEVHSGVSTDPQPLKEQPALNDSRYCLSSRLRVSATFWQNPRNHFRCQVQFYGLSENDEWTQDRAKPVTQIVSAEAWGRADCGSQSFGLLDPKLCYLLDGILFIYGVILTALFLRVKFSRSADAPAYQQGQNQLYNELNLGRREEYDVLDKRRGRDPEMGGKPQRRKNPQEGLFNELQKDKMAEAFSEIGMKGERRRGKGHDGLFQGLSTATKDTFDALHMQALPPRRAKRSGSGATNFSLLKQAGDVEENPGPTSMDWIWRILFLVGAATGAHSFEQNIDQPTEMTATEGAIVQINCTYQTSGFNGLFWYQQHAGEAPTFLSYNVLDGLEEKGRFSSFLSRSKGYSYLLLKELQMKDSASYLCASVDGNNRLAFGKGNQVVVIPNTRIQNPDPAVYQLRDSKSSDKSVCLFTDFDSQTNVSQSKDSDVYITDKTVLDMRSMDFKSNSAVAWSNKSDFACANAFNNSIIPEDTFFPSPESSCGTQSFGLLDPKLCYLLDGILFIYGVILTALFLKRGRKKLLYIFKQPFMRPVQTTQEEDGCSCRFPEEEEGGCELRVKFSRSADAPAYQQGQNQLYNELNLGRREEYDVLDKRRGRDPEMGGKPQRRKNPQEGLYNELQKDKMAEAYSEIGMKGERRRGKGHDGLYQGLSTATKDTYDALHMQALPPR

SEQ ID NO: 11257 - protein, 854 aa, synthetic construct
MALPVTALLLPLALLLHAARPEFGVTQSPTHLIKTRGQQVTLRCSPKSGHDTVSWYQQALGQGPQFIFQYYEEEERQRGNFPDRFSGHQFPNYSSELNVNALLLGDSALYLCASSLGWRGGRYNEQFFGPGTRLTVLEDLKNVFPPEVAVFEPSEAEISHTQKATLVCLATGFYPDHVELSWWVNGKEVHSGVSTDPQPLKEQPALNDSRYCLSSRLRVSATFWQNPRNHFRCQVQFYGLSENDEWTQDRAKPVTQIVSAEAWGRADCGSQSFGLLDPKLCYLLDGILFIYGVILTALFLRVKFSRSADAPAYQQGQNQLYNELNLGRREEYDVLDKRRGRDPEMGGKPQRRKNPQEGLFNELQKDKMAEAFSEIGMKGERRRGKGHDGLFQGLSTATKDTFDALHMQALPPRRAKRSGSGATNFSLLKQAGDVEENPGPTSMDWIWRILFLVGAATGAHSFEQNIDQPTEMTATEGAIVQINCTYQTSGFNGLFWYQQHAGEAPTFLSYNVLDGLEEKGRFSSFLSRSKGYSYLLLKELQMKDSASYLCASVDGNNRLAFGKGNQVVVIPNTRIQNPDPAVYQLRDSKSSDKSVCLFTDFDSQTNVSQSKDSDVYITDKTVLDMRSMDFKSNSAVAWSNKSDFACANAFNNSIIPEDTFFPSPESSCGTQSFGLLDPKLCYLLDGILFIYGVILTALFLRSKRSRLLHSDYMNMTPRRPGPTRKHYQPYAPPRDFAAYRSRVKFSRSADAPAYQQGQNQLYNELNLGRREEYDVLDKRRGRDPEMGGKPQRRKNPQEGLYNELQKDKMAEAYSEIGMKGERRRGKGHDGLYQGLSTATKDTYDALHMQALPPR

SEQ ID NO: 11258 - protein, 849 aa, synthetic construct
MALPVTALLLPLALLLHAARPEFGVTQSPTHLIKTRGQQVTLRCSPKSGHDTVSWYQQALGQGPQFIFQYYEEEERQRGNFPDRFSGHQFPNYSSELNVNALLLGDSALYLCASSLGWRGGRYNEQFFGPGTRLTVLEDLKNVFPPEVAVFEPSEAEISHTQKATLVCLATGFYPDHVELSWWVNGKEVHSGVSTDPQPLKEQPALNDSRYCLSSRLRVSATFWQNPRNHFRCQVQFYGLSENDEWTQDRAKPVTQIVSAEAWGRADCGSQSFGLLDPKLCYLLDGILFIYGVILTALFLRVKFSRSADAPAYQQGQNQLYNELNLGRREEYDVLDKRRGRDPEMGGKPQRRKNPQEGLFNELQKDKMAEAFSEIGMKGERRRGKGHDGLFQGLSTATKDTFDALHMQALPPRRAKRSGSGATNFSLLKQAGDVEENPGPTSMDWIWRILFLVGAATGAHSFEQNIDQPTEMTATEGAIVQINCTYQTSGFNGLFWYQQHAGEAPTFLSYNVLDGLEEKGRFSSFLSRSKGYSYLLLKELQMKDSASYLCASVDGNNRLAFGKGNQVVVIPNTRIQNPDPAVYQLRDSKSSDKSVCLFTDFDSQTNVSQSKDSDVYITDKTVLDMRSMDFKSNSAVAWSNKSDFACANAFNNSIIPEDTFFPSPESSCGTQSFGLLDPKLCYLLDGILFIYGVILTALFLRDQRLPPDAHKPPGGGSFRTPIQEEQADAHSTLAKIRVKFSRSADAPAYQQGQNQLYNELNLGRREEYDVLDKRRGRDPEMGGKPQRRKNPQEGLYNELQKDKMAEAYSEIGMKGERRRGKGHDGLYQGLSTATKDTYDALHMQALPPR

SEQ ID NO: 11259 - protein, 933 aa, synthetic construct
MALPVTALLLPLALLLHAARPEFGVTQSPTHLIKTRGQQVTLRCSPKSGHDTVSWYQQALGQGPQFIFQYYEEEERQRGNFPDRFSGHQFPNYSSELNVNALLLGDSALYLCASSLGWRGGRYNEQFFGPGTRLTVLEDLKNVFPPEVAVFEPSEAEISHTQKATLVCLATGFYPDHVELSWWVNGKEVHSGVSTDPQPLKEQPALNDSRYCLSSRLRVSATFWQNPRNHFRCQVQFYGLSENDEWTQDRAKPVTQIVSAEAWGRADCGSQSFGLLDPKLCYLLDGILFIYGVILTALFLRVKFSRSADAPAYQQGQNQLYNELNLGRREEYDVLDKRRGRDPEMGGKPQRRKNPQEGLFNELQKDKMAEAFSEIGMKGERRRGKGHDGLFQGLSTATKDTFDALHMQALPPRRAKRSGSGATNFSLLKQAGDVEENPGPTSMDWIWRILFLVGAATGAHSFEQNIDQPTEMTATEGAIVQINCTYQTSGFNGLFWYQQHAGEAPTFLSYNVLDGLEEKGRFSSFLSRSKGYSYLLLKELQMKDSASYLCASVDGNNRLAFGKGNQVVVIPNTRIQNPDPAVYQLRDSKSSDKSVCLFTDFDSQTNVSQSKDSDVYITDKTVLDMRSMDFKSNSAVAWSNKSDFACANAFNNSIIPEDTFFPSPESSCGTQSFGLLDPKLCYLLDGILFIYGVILTALFLWRRKRKEKQSETSPKEFLTIYEDVKDLKTRRNHEQEQTFPGGGSTIYSMIQSQSSAPTSQEPAYTLYSLIQPSRKSGSRKRNHSPSFNSTIYEVIGKSQPKAQNPARLSRKELENFDVYSRVKFSRSADAPAYQQGQNQLYNELNLGRREEYDVLDKRRGRDPEMGGKPQRRKNPQEGLYNELQKDKMAEAYSEIGMKGERRRGKGHDGLYQGLSTATKDTYDALHMQALPPR

SEQ ID NO: 11260 - protein, 854 aa, synthetic construct; identical to SEQ ID NO: 11257

SEQ ID NO: 11261 - protein, 855 aa, synthetic construct; identical to SEQ ID NO: 11256

SEQ ID NO: 11262 - protein, 813 aa, synthetic construct
MALPVTALLLPLALLLHAARPEFGVTQSPTHLIKTRGQQVTLRCSPKSGHDTVSWYQQALGQGPQFIFQYYEEEERQRGNFPDRFSGHQFPNYSSELNVNALLLGDSALYLCASSLGWRGGRYNEQFFGPGTRLTVLEDLKNVFPPEVAVFEPSEAEISHTQKATLVCLATGFYPDHVELSWWVNGKEVHSGVSTDPQPLKEQPALNDSRYCLSSRLRVSATFWQNPRNHFRCQVQFYGLSENDEWTQDRAKPVTQIVSAEAWGRADCGSQSFGLLDPKLCYLLDGILFIYGVILTALFLRVKFSRSADAPAYQQGQNQLYNELNLGRREEYDVLDKRRGRDPEMGGKPQRRKNPQEGLFNELQKDKMAEAFSEIGMKGERRRGKGHDGLFQGLSTATKDTFDALHMQALPPRRAKRSGSGATNFSLLKQAGDVEENPGPTSMDWIWRILFLVGAATGAHSFEQNIDQPTEMTATEGAIVQINCTYQTSGFNGLFWYQQHAGEAPTFLSYNVLDGLEEKGRFSSFLSRSKGYSYLLLKELQMKDSASYLCASVDGNNRLAFGKGNQVVVIPNTRIQNPDPAVYQLRDSKSSDKSVCLFTDFDSQTNVSQSKDSDVYITDKTVLDMRSMDFKSNSAVAWSNKSDFACANAFNNSIIPEDTFFPSPESSCGTQSFGLLDPKLSYLLDGILFIYGVILTALFLRVKFSRSADAPAYQQGQNQLYNELNLGRREEYDVLDKRRGRDPEMGGKPQRRKNPQEGLYNELQKDKMAEAYSEIGMKGERRRGKGHDGLYQGLSTATKDTYDALHMQALPPR

SEQ ID NO: 11263 - protein, 813 aa, synthetic construct; identical to SEQ ID NO: 11262

SEQ ID NO: 11264 - protein, 813 aa, synthetic construct
MALPVTALLLPLALLLHAARPEFGVTQSPTHLIKTRGQQVTLRCSPKSGHDTVSWYQQALGQGPQFIFQYYEEEERQRGNFPDRFSGHQFPNYSSELNVNALLLGDSALYLCASSLGWRGGRYNEQFFGPGTRLTVLEDLKNVFPPEVAVFEPSEAEISHTQKATLVCLATGFYPDHVELSWWVNGKEVHSGVSTDPQPLKEQPALNDSRYCLSSRLRVSATFWQNPRNHFRCQVQFYGLSENDEWTQDRAKPVTQIVSAEAWGRADCGSQSFGLLDPKLSYLLDGILFIYGVILTALFLRVKFSRSADAPAYQQGQNQLYNELNLGRREEYDVLDKRRGRDPEMGGKPQRRKNPQEGLYNELQKDKMAEAYSEIGMKGERRRGKGHDGLYQGLSTATKDTYDALHMQALPPRRAKRSGSGATNFSLLKQAGDVEENPGPTSMDWIWRILFLVGAATGAHSFEQNIDQPTEMTATEGAIVQINCTYQTSGFNGLFWYQQHAGEAPTFLSYNVLDGLEEKGRFSSFLSRSKGYSYLLLKELQMKDSASYLCASVDGNNRLAFGKGNQVVVIPNTRIQNPDPAVYQLRDSKSSDKSVCLFTDFDSQTNVSQSKDSDVYITDKTVLDMRSMDFKSNSAVAWSNKSDFACANAFNNSIIPEDTFFPSPESSCGTQSFGLLDPKLSYLLDGILFIYGVILTALFLRVKFSRSADAPAYQQGQNQLYNELNLGRREEYDVLDKRRGRDPEMGGKPQRRKNPQEGLYNELQKDKMAEAYSEIGMKGERRRGKGHDGLYQGLSTATKDTYDALHMQALPPR

SEQ ID NO: 11265 - protein, 717 aa, synthetic construct
MALPVTALLLPLALLLHAARPEFGVTQSPTHLIKTRGQQVTLRCSPKSGHDTVSWYQQALGQGPQFIFQYYEEEERQRGNFPDRFSGHQFPNYSSELNVNALLLGDSALYLCASSLGWRGGRYNEQFFGPGTRLTVLEDLKNVFPPEVAVFEPSEAEISHTQKATLVCLATGFYPDHVELSWWVNGKEVHSGVSTDPQPLKEQPALNDSRYCLSSRLRVSATFWQNPRNHFRCQVQFYGLSENDEWTQDRAKPVTQIVSAEAWGRADCGSTTPGERSSLPAFYPGTSGSCSGCGSLSLPLLAGLVAADAVASLLIVGAVFLCARPRRSPAQEDGKVYINMPGRGRAKRSGSGATNFSLLKQAGDVEENPGPTSMDWIWRILFLVGAATGAHSFEQNIDQPTEMTATEGAIVQINCTYQTSGFNGLFWYQQHAGEAPTFLSYNVLDGLEEKGRFSSFLSRSKGYSYLLLKELQMKDSASYLCASVDGNNRLAFGKGNQVVVIPNTRIQNPDPAVYQLRDSKSSDKSVCLFTDFDSQTNVSQSKDSDVYITDKTVLDMRSMDFKSNSAVAWSNKSDFACANAFNNSIIPEDTFFPSPESSCGTTTPGERSSLPAFYPGTSGSCSGCGSLSLPLLAGLVAADAVASLLIVGAVFKRGRKKLLYIFKQPFMRPVQTTQEEDGCSCRFPEEEEGGCELLCARPRRSPAQEDGKVYINMPGRG

SEQ ID NO: 11266 - protein, 716 aa, synthetic construct
MALPVTALLLPLALLLHAARPEFGVTQSPTHLIKTRGQQVTLRCSPKSGHDTVSWYQQALGQGPQFIFQYYEEEERQRGNFPDRFSGHQFPNYSSELNVNALLLGDSALYLCASSLGWRGGRYNEQFFGPGTRLTVLEDLKNVFPPEVAVFEPSEAEISHTQKATLVCLATGFYPDHVELSWWVNGKEVHSGVSTDPQPLKEQPALNDSRYCLSSRLRVSATFWQNPRNHFRCQVQFYGLSENDEWTQDRAKPVTQIVSAEAWGRADCGSTTPGERSSLPAFYPGTSGSCSGCGSLSLPLLAGLVAADAVASLLIVGAVFLCARPRRSPAQEDGKVYINMPGRGRAKRSGSGATNFSLLKQAGDVEENPGPTSMDWIWRILFLVGAATGAHSFEQNIDQPTEMTATEGAIVQINCTYQTSGFNGLFWYQQHAGEAPTFLSYNVLDGLEEKGRFSSFLSRSKGYSYLLLKELQMKDSASYLCASVDGNNRLAFGKGNQVVVIPNTRIQNPDPAVYQLRDSKSSDKSVCLFTDFDSQTNVSQSKDSDVYITDKTVLDMRSMDFKSNSAVAWSNKSDFACANAFNNSIIPEDTFFPSPESSCGTTTPGERSSLPAFYPGTSGSCSGCGSLSLPLLAGLVAADAVASLLIVGAVFRSKRSRLLHSDYMNMTPRRPGPTRKHYQPYAPPRDFAAYRSLCARPRRSPAQEDGKVYINMPGRG

SEQ ID NO: 11267 - protein, 711 aa, synthetic construct
MALPVTALLLPLALLLHAARPEFGVTQSPTHLIKTRGQQVTLRCSPKSGHDTVSWYQQALGQGPQFIFQYYEEEERQRGNFPDRFSGHQFPNYSSELNVNALLLGDSALYLCASSLGWRGGRYNEQFFGPGTRLTVLEDLKNVFPPEVAVFEPSEAEISHTQKATLVCLATGFYPDHVELSWWVNGKEVHSGVSTDPQPLKEQPALNDSRYCLSSRLRVSATFWQNPRNHFRCQVQFYGLSENDEWTQDRAKPVTQIVSAEAWGRADCGSTTPGERSSLPAFYPGTSGSCSGCGSLSLPLLAGLVAADAVASLLIVGAVFLCARPRRSPAQEDGKVYINMPGRGRAKRSGSGATNFSLLKQAGDVEENPGPTSMDWIWRILFLVGAATGAHSFEQNIDQPTEMTATEGAIVQINCTYQTSGFNGLFWYQQHAGEAPTFLSYNVLDGLEEKGRFSSFLSRSKGYSYLLLKELQMKDSASYLCASVDGNNRLAFGKGNQVVVIPNTRIQNPDPAVYQLRDSKSSDKSVCLFTDFDSQTNVSQSKDSDVYITDKTVLDMRSMDFKSNSAVAWSNKSDFACANAFNNSIIPEDTFFPSPESSCGTTTPGERSSLPAFYPGTSGSCSGCGSLSLPLLAGLVAADAVASLLIVGAVFRDQRLPPDAHKPPGGGSFRTPIQEEQADAHSTLAKILCARPRRSPAQEDGKVYINMPGRG

SEQ ID NO: 11268 - protein, 795 aa, synthetic construct
MALPVTALLLPLALLLHAARPEFGVTQSPTHLIKTRGQQVTLRCSPKSGHDTVSWYQQALGQGPQFIFQYYEEEERQRGNFPDRFSGHQFPNYSSELNVNALLLGDSALYLCASSLGWRGGRYNEQFFGPGTRLTVLEDLKNVFPPEVAVFEPSEAEISHTQKATLVCLATGFYPDHVELSWWVNGKEVHSGVSTDPQPLKEQPALNDSRYCLSSRLRVSATFWQNPRNHFRCQVQFYGLSENDEWTQDRAKPVTQIVSAEAWGRADCGSTTPGERSSLPAFYPGTSGSCSGCGSLSLPLLAGLVAADAVASLLIVGAVFLCARPRRSPAQEDGKVYINMPGRGRAKRSGSGATNFSLLKQAGDVEENPGPTSMDWIWRILFLVGAATGAHSFEQNIDQPTEMTATEGAIVQINCTYQTSGFNGLFWYQQHAGEAPTFLSYNVLDGLEEKGRFSSFLSRSKGYSYLLLKELQMKDSASYLCASVDGNNRLAFGKGNQVVVIPNTRIQNPDPAVYQLRDSKSSDKSVCLFTDFDSQTNVSQSKDSDVYITDKTVLDMRSMDFKSNSAVAWSNKSDFACANAFNNSIIPEDTFFPSPESSCGTTTPGERSSLPAFYPGTSGSCSGCGSLSLPLLAGLVAADAVASLLIVGAVFWRRKRKEKQSETSPKEFLTIYEDVKDLKTRRNHEQEQTFPGGGSTIYSMIQSQSSAPTSQEPAYTLYSLIQPSRKSGSRKRNHSPSFNSTIYEVIGKSQPKAQNPARLSRKELENFDVYSLCARPRRSPAQEDGKVYINMPGRG

SEQ ID NO: 11269 - protein, 746 aa, synthetic construct
MALPVTALLLPLALLLHAARPEFGVTQSPTHLIKTRGQQVTLRCSPKSGHDTVSWYQQALGQGPQFIFQYYEEEERQRGNFPDRFSGHQFPNYSSELNVNALLLGDSALYLCASSLGWRGGRYNEQFFGPGTRLTVLEDLKNVFPPEVAVFEPSEAEISHTQKATLVCLATGFYPDHVELSWWVNGKEVHSGVSTDPQPLKEQPALNDSRYCLSSRLRVSATFWQNPRNHFRCQVQFYGLSENDEWTQDRAKPVTQIVSAEAWGRADCGSLGEPQLCYILDAILFLYGIVLTLLYCKRGRKKLLYIFKQPFMRPVQTTQEEDGCSCRFPEEEEGGCELRLKIQVRKAAITSYEKSDGVYTGLSTRNQETYETLKHEKPPQRAKRSGSGATNFSLLKQAGDVEENPGPTSMDWIWRILFLVGAATGAHSFEQNIDQPTEMTATEGAIVQINCTYQTSGFNGLFWYQQHAGEAPTFLSYNVLDGLEEKGRFSSFLSRSKGYSYLLLKELQMKDSASYLCASVDGNNRLAFGKGNQVVVIPNTRIQNPDPAVYQLRDSKSSDKSVCLFTDFDSQTNVSQSKDSDVYITDKTVLDMRSMDFKSNSAVAWSNKSDFACANAFNNSIIPEDTFFPSPESSCGTLGEPQLCYILDAILFLYGIVLTLLYCRSKRSRLLHSDYMNMTPRRPGPTRKHYQPYAPPRDFAAYRSRLKIQVRKAAITSYEKSDGVYTGLSTRNQETYETLKHEKPPQ

SEQ ID NO: 11270 - protein, 741 aa, synthetic construct
MALPVTALLLPLALLLHAARPEFGVTQSPTHLIKTRGQQVTLRCSPKSGHDTVSWYQQALGQGPQFIFQYYEEEERQRGNFPDRFSGHQFPNYSSELNVNALLLGDSALYLCASSLGWRGGRYNEQFFGPGTRLTVLEDLKNVFPPEVAVFEPSEAEISHTQKATLVCLATGFYPDHVELSWWVNGKEVHSGVSTDPQPLKEQPALNDSRYCLSSRLRVSATFWQNPRNHFRCQVQFYGLSENDEWTQDRAKPVTQIVSAEAWGRADCGSLGEPQLCYILDAILFLYGIVLTLLYCKRGRKKLLYIFKQPFMRPVQTTQEEDGCSCRFPEEEEGGCELRLKIQVRKAAITSYEKSDGVYTGLSTRNQETYETLKHEKPPQRAKRSGSGATNFSLLKQAGDVEENPGPTSMDWIWRILFLVGAATGAHSFEQNIDQPTEMTATEGAIVQINCTYQTSGFNGLFWYQQHAGEAPTFLSYNVLDGLEEKGRFSSFLSRSKGYSYLLLKELQMKDSASYLCASVDGNNRLAFGKGNQVVVIPNTRIQNPDPAVYQLRDSKSSDKSVCLFTDFDSQTNVSQSKDSDVYITDKTVLDMRSMDFKSNSAVAWSNKSDFACANAFNNSIIPEDTFFPSPESSCGTLGEPQLCYILDAILFLYGIVLTLLYCRDQRLPPDAHKPPGGGSFRTPIQEEQADAHSTLAKIRLKIQVRKAAITSYEKSDGVYTGLSTRNQETYETLKHEKPPQ

SEQ ID NO: 11271 - protein, 825 aa, synthetic construct
MALPVTALLLPLALLLHAARPEFGVTQSPTHLIKTRGQQVTLRCSPKSGHDTVSWYQQALGQGPQFIFQYYEEEERQRGNFPDRFSGHQFPNYSSELNVNALLLGDSALYLCASSLGWRGGRYNEQFFGPGTRLTVLEDLKNVFPPEVAVFEPSEAEISHTQKATLVCLATGFYPDHVELSWWVNGKEVHSGVSTDPQPLKEQPALNDSRYCLSSRLRVSATFWQNPRNHFRCQVQFYGLSENDEWTQDRAKPVTQIVSAEAWGRADCGSLGEPQLCYILDAILFLYGIVLTLLYCKRGRKKLLYIFKQPFMRPVQTTQEEDGCSCRFPEEEEGGCELRLKIQVRKAAITSYEKSDGVYTGLSTRNQETYETLKHEKPPQRAKRSGSGATNFSLLKQAGDVEENPGPTSMDWIWRILFLVGAATGAHSFEQNIDQPTEMTATEGAIVQINCTYQTSGFNGLFWYQQHAGEAPTFLSYNVLDGLEEKGRFSSFLSRSKGYSYLLLKELQMKDSASYLCASVDGNNRLAFGKGNQVVVIPNTRIQNPDPAVYQLRDSKSSDKSVCLFTDFDSQTNVSQSKDSDVYITDKTVLDMRSMDFKSNSAVAWSNKSDFACANAFNNSIIPEDTFFPSPESSCGTLGEPQLCYILDAILFLYGIVLTLLYCWRRKRKEKQSETSPKEFLTIYEDVKDLKTRRNHEQEQTFPGGGSTIYSMIQSQSSAPTSQEPAYTLYSLIQPSRKSGSRKRNHSPSFNSTIYEVIGKSQPKAQNPARLSRKELENFDVYSRLKIQVRKAAITSYEKSDGVYTGLSTRNQETYETLKHEKPPQ

SEQ ID NO: 11272 - protein, 747 aa, synthetic construct
MALPVTALLLPLALLLHAARPEFGVTQSPTHLIKTRGQQVTLRCSPKSGHDTVSWYQQALGQGPQFIFQYYEEEERQRGNFPDRFSGHQFPNYSSELNVNALLLGDSALYLCASSLGWRGGRYNEQFFGPGTRLTVLEDLKNVFPPEVAVFEPSEAEISHTQKATLVCLATGFYPDHVELSWWVNGKEVHSGVSTDPQPLKEQPALNDSRYCLSSRLRVSATFWQNPRNHFRCQVQFYGLSENDEWTQDRAKPVTQIVSAEAWGRADCGSLGEPQLCYILDAILFLYGIVLTLLYCKRGRKKLLYIFKQPFMRPVQTTQEEDGCSCRFPEEEEGGCELRLKIQVRKAAITSYEKSDGVYTGLSTRNQETYETLKHEKPPQRAKRSGSGATNFSLLKQAGDVEENPGPTSMDWIWRILFLVGAATGAHSFEQNIDQPTEMTATEGAIVQINCTYQTSGFNGLFWYQQHAGEAPTFLSYNVLDGLEEKGRFSSFLSRSKGYSYLLLKELQMKDSASYLCASVDGNNRLAFGKGNQVVVIPNTRIQNPDPAVYQLRDSKSSDKSVCLFTDFDSQTNVSQSKDSDVYITDKTVLDMRSMDFKSNSAVAWSNKSDFACANAFNNSIIPEDTFFPSPESSCGTLGEPQLCYILDAILFLYGIVLTLLYCKRGRKKLLYIFKQPFMRPVQTTQEEDGCSCRFPEEEEGGCELRLKIQVRKAAITSYEKSDGVYTGLSTRNQETYETLKHEKPPQ

SEQ ID NO: 11273 - protein, 746 aa, synthetic construct; identical to SEQ ID NO: 11269

SEQ ID NO: 11274 - protein, 745 aa, synthetic construct
MALPVTALLLPLALLLHAARPEFGVTQSPTHLIKTRGQQVTLRCSPKSGHDTVSWYQQALGQGPQFIFQYYEEEERQRGNFPDRFSGHQFPNYSSELNVNALLLGDSALYLCASSLGWRGGRYNEQFFGPGTRLTVLEDLKNVFPPEVAVFEPSEAEISHTQKATLVCLATGFYPDHVELSWWVNGKEVHSGVSTDPQPLKEQPALNDSRYCLSSRLRVSATFWQNPRNHFRCQVQFYGLSENDEWTQDRAKPVTQIVSAEAWGRADCGSLGEPQLCYILDAILFLYGIVLTLLYCRSKRSRLLHSDYMNMTPRRPGPTRKHYQPYAPPRDFAAYRSRLKIQVRKAAITSYEKSDGVYTGLSTRNQETYETLKHEKPPQRAKRSGSGATNFSLLKQAGDVEENPGPTSMDWIWRILFLVGAATGAHSFEQNIDQPTEMTATEGAIVQINCTYQTSGFNGLFWYQQHAGEAPTFLSYNVLDGLEEKGRFSSFLSRSKGYSYLLLKELQMKDSASYLCASVDGNNRLAFGKGNQVVVIPNTRIQNPDPAVYQLRDSKSSDKSVCLFTDFDSQTNVSQSKDSDVYITDKTVLDMRSMDFKSNSAVAWSNKSDFACANAFNNSIIPEDTFFPSPESSCGTLGEPQLCYILDAILFLYGIVLTLLYCRSKRSRLLHSDYMNMTPRRPGPTRKHYQPYAPPRDFAAYRSRLKIQVRKAAITSYEKSDGVYTGLSTRNQETYETLKHEKPPQ

SEQ ID NO: 11275 - protein, 663 aa, synthetic construct
MALPVTALLLPLALLLHAARPEFGVTQSPTHLIKTRGQQVTLRCSPKSGHDTVSWYQQALGQGPQFIFQYYEEEERQRGNFPDRFSGHQFPNYSSELNVNALLLGDSALYLCASSLGWRGGRYNEQFFGPGTRLTVLEDLKNVFPPEVAVFEPSEAEISHTQKATLVCLATGFYPDHVELSWWVNGKEVHSGVSTDPQPLKEQPALNDSRYCLSSRLRVSATFWQNPRNHFRCQVQFYGLSENDEWTQDRAKPVTQIVSAEAWGRADCGSLGEPQLSYILDAILFLYGIVLTLLYCRLKIQVRKAAITSYEKSDGVYTGLSTRNQETYETLKHEKPPQRAKRSGSGATNFSLLKQAGDVEENPGPTSMDWIWRILFLVGAATGAHSFEQNIDQPTEMTATEGAIVQINCTYQTSGFNGLFWYQQHAGEAPTFLSYNVLDGLEEKGRFSSFLSRSKGYSYLLLKELQMKDSASYLCASVDGNNRLAFGKGNQVVVIPNTRIQNPDPAVYQLRDSKSSDKSVCLFTDFDSQTNVSQSKDSDVYITDKTVLDMRSMDFKSNSAVAWSNKSDFACANAFNNSIIPEDTFFPSPESSCGTLGEPQLSYILDAILFLYGIVLTLLYCRLKIQVRKAAITSYEKSDGVYTGLSTRNQETYETLKHEKPPQ

SEQ ID NO: 11276 - protein, 699 aa, synthetic construct
MALPVTALLLPLALLLHAARPEFGVTQSPTHLIKTRGQQVTLRCSPKSGHDTVSWYQQALGQGPQFIFQYYEEEERQRGNFPDRFSGHQFPNYSSELNVNALLLGDSALYLCASSLGWRGGRYNEQFFGPGTRLTVLEDLKNVFPPEVAVFEPSEAEISHTQKATLVCLATGFYPDHVELSWWVNGKEVHSGVSTDPQPLKEQPALNDSRYCLSSRLRVSATFWQNPRNHFRCQVQFYGLSENDEWTQDRAKPVTQIVSAEAWGRADCGSQAQSDCSCSTVSPGVLAGIVMGDLVLTVLIALAVYFLGRLVPRGRGAAEAATRKQRITETESPYQELQGQRSDVYSDLNTQRPYYKRAKRSGSGATNFSLLKQAGDVEENPGPTSMDWIWRILFLVGAATGAHSFEQNIDQPTEMTATEGAIVQINCTYQTSGFNGLFWYQQHAGEAPTFLSYNVLDGLEEKGRFSSFLSRSKGYSYLLLKELQMKDSASYLCASVDGNNRLAFGKGNQVVVIPNTRIQNPDPAVYQLRDSKSSDKSVCLFTDFDSQTNVSQSKDSDVYITDKTVLDMRSMDFKSNSAVAWSNKSDFACANAFNNSIIPEDTFFPSPESSCGTQAQSDCSSSTVSPGVLAGIVMGDLVLTVLIALAVYFLGRLVPRGRGAAEAATRKQRITETESPYQELQGQRSDVYSDLNTQRPYYK

SEQ ID NO: 11277 - protein, 741 aa, synthetic construct
MALPVTALLLPLALLLHAARPEFGVTQSPTHLIKTRGQQVTLRCSPKSGHDTVSWYQQALGQGPQFIFQYYEEEERQRGNFPDRFSGHQFPNYSSELNVNALLLGDSALYLCASSLGWRGGRYNEQFFGPGTRLTVLEDLKNVFPPEVAVFEPSEAEISHTQKATLVCLATGFYPDHVELSWWVNGKEVHSGVSTDPQPLKEQPALNDSRYCLSSRLRVSATFWQNPRNHFRCQVQFYGLSENDEWTQDRAKPVTQIVSAEAWGRADCGSQAQSDCSCSTVSPGVLAGIVMGDLVLTVLIALAVYFLGRLVPRGRGAAEAATRKQRITETESPYQELQGQRSDVYSDLNTQRPYYKRAKRSGSGATNFSLLKQAGDVEENPGPTSMDWIWRILFLVGAATGAHSFEQNIDQPTEMTATEGAIVQINCTYQTSGFNGLFWYQQHAGEAPTFLSYNVLDGLEEKGRFSSFLSRSKGYSYLLLKELQMKDSASYLCASVDGNNRLAFGKGNQVVVIPNTRIQNPDPAVYQLRDSKSSDKSVCLFTDFDSQTNVSQSKDSDVYITDKTVLDMRSMDFKSNSAVAWSNKSDFACANAFNNSIIPEDTFFPSPESSCGTQAQSDCSCSTVSPGVLAGIVMGDLVLTVLIALAVYFLGRLVPRGRGAAEAATRKQRITETESPYQELQGQRSDVYSDLNTQKRGRKKLLYIFKQPFMRPVQTTQEEDGCSCRFPEEEEGGCELRPYYK

SEQ ID NO: 11278 - protein, 740 aa, synthetic construct
MALPVTALLLPLALLLHAARPEFGVTQSPTHLIKTRGQQVTLRCSPKSGHDTVSWYQQALGQGPQFIFQYYEEEERQRGNFPDRFSGHQFPNYSSELNVNALLLGDSALYLCASSLGWRGGRYNEQFFGPGTRLTVLEDLKNVFPPEVAVFEPSEAEISHTQKATLVCLATGFYPDHVELSWWVNGKEVHSGVSTDPQPLKEQPALNDSRYCLSSRLRVSATFWQNPRNHFRCQVQFYGLSENDEWTQDRAKPVTQIVSAEAWGRADCGSQAQSDCSCSTVSPGVLAGIVMGDLVLTVLIALAVYFLGRLVPRGRGAAEAATRKQRITETESPYQELQGQRSDVYSDLNTQRPYYKRAKRSGSGATNFSLLKQAGDVEENPGPTSMDWIWRILFLVGAATGAHSFEQNIDQPTEMTATEGAIVQINCTYQTSGFNGLFWYQQHAGEAPTFLSYNVLDGLEEKGRFSSFLSRSKGYSYLLLKELQMKDSASYLCASVDGNNRLAFGKGNQVVVIPNTRIQNPDPAVYQLRDSKSSDKSVCLFTDFDSQTNVSQSKDSDVYITDKTVLDMRSMDFKSNSAVAWSNKSDFACANAFNNSIIPEDTFFPSPESSCGTQAQSDCSCSTVSPGVLAGIVMGDLVLTVLIALAVYFLGRLVPRGRGAAEAATRKQRITETESPYQELQGQRSDVYSDLNTQRSKRSRLLHSDYMNMTPRRPGPTRKHYQPYAPPRDFAAYRSRPYYK

SEQ ID NO: 11279 - protein, 735 aa, synthetic construct
MALPVTALLLPLALLLHAARPEFGVTQSPTHLIKTRGQQVTLRCSPKSGHDTVSWYQQALGQGPQFIFQYYEEEERQRGNFPDRFSGHQFPNYSSELNVNALLLGDSALYLCASSLGWRGGRYNEQFFGPGTRLTVLEDLKNVFPPEVAVFEPSEAEISHTQKATLVCLATGFYPDHVELSWWVNGKEVHSGVSTDPQPLKEQPALNDSRYCLSSRLRVSATFWQNPRNHFRCQVQFYGLSENDEWTQDRAKPVTQIVSAEAWGRADCGSQAQSDCSCSTVSPGVLAGIVMGDLVLTVLIALAVYFLGRLVPRGRGAAEAATRKQRITETESPYQELQGQRSDVYSDLNTQRPYYKRAKRSGSGATNFSLLKQAGDVEENPGPTSMDWIWRILFLVGAATGAHSFEQNIDQPTEMTATEGAIVQINCTYQTSGFNGLFWYQQHAGEAPTFLSYNVLDGLEEKGRFSSFLSRSKGYSYLLLKELQMKDSASYLCASVDGNNRLAFGKGNQVVVIPNTRIQNPDPAVYQLRDSKSSDKSVCLFTDFDSQTNVSQSKDSDVYITDKTVLDMRSMDFKSNSAVAWSNKSDFACANAFNNSIIPEDTFFPSPESSCGTQAQSDCSCSTVSPGVLAGIVMGDLVLTVLIALAVYFLGRLVPRGRGAAEAATRKQRITETESPYQELQGQRSDVYSDLNTQRDQRLPPDAHKPPGGGSFRTPIQEEQADAHSTLAKIRPYYK

SEQ ID NO: 11280 - protein, 819 aa, synthetic construct
MALPVTALLLPLALLLHAARPEFGVTQSPTHLIKTRGQQVTLRCSPKSGHDTVSWYQQALGQGPQFIFQYYEEEERQRGNFPDRFSGHQFPNYSSELNVNALLLGDSALYLCASSLGWRGGRYNEQFFGPGTRLTVLEDLKNVFPPEVAVFEPSEAEISHTQKATLVCLATGFYPDHVELSWWVNGKEVHSGVSTDPQPLKEQPALNDSRYCLSSRLRVSATFWQNPRNHFRCQVQFYGLSENDEWTQDRAKPVTQIVSAEAWGRADCGSQAQSDCSCSTVSPGVLAGIVMGDLVLTVLIALAVYFLGRLVPRGRGAAEAATRKQRITETESPYQELQGQRSDVYSDLNTQRPYYKRAKRSGSGATNFSLLKQAGDVEENPGPTSMDWIWRILFLVGAATGAHSFEQNIDQPTEMTATEGAIVQINCTYQTSGFNGLFWYQQHAGEAPTFLSYNVLDGLEEKGRFSSFLSRSKGYSYLLLKELQMKDSASYLCASVDGNNRLAFGKGNQVVVIPNTRIQNPDPAVYQLRDSKSSDKSVCLFTDFDSQTNVSQSKDSDVYITDKTVLDMRSMDFKSNSAVAWSNKSDFACANAFNNSIIPEDTFFPSPESSCGTQAQSDCSCSTVSPGVLAGIVMGDLVLTVLIALAVYFLGRLVPRGRGAAEAATRKQRITETESPYQELQGQRSDVYSDLNTQWRRKRKEKQSETSPKEFLTIYEDVKDLKTRRNHEQEQTFPGGGSTIYSMIQSQSSAPTSQEPAYTLYSLIQPSRKSGSRKRNHSPSFNSTIYEVIGKSQPKAQNPARLSRKELENFDVYSRPYYK

SEQ ID NO: 11281 - protein, 911 aa, synthetic construct
MALPVTALLLPLALLLHAARPEFGVTQSPTHLIKTRGQQVTLRCSPKSGHDTVSWYQQALGQGPQFIFQYYEEEERQRGNFPDRFSGHQFPNYSSELNVNALLLGDSALYLCASSLGWRGGRYNEQFFGPGTRLTVLEDLKNVFPPEVAVFEPSEAEISHTQKATLVCLATGFYPDHVELSWWVNGKEVHSGVSTDPQPLKEQPALNDSRYCLSSRLRVSATFWQNPRNHFRCQVQFYGLSENDEWTQDRAKPVTQIVSAEAWGRADCGSQAQSDCSCSTVSPGVLAGIVMGDLVLTVLIALAVYFLGRLVPRGRGAAEAATRKQRITETESPYQELQGQRSDVYSDLNTQRVKFSRSADAPAYQQGQNQLYNELNLGRREEYDVLDKRRGRDPEMGGKPQRRKNPQEGLYNELQKDKMAEAYSEIGMKGERRRGKGHDGLYQGLSTATKDTYDALHMQALPPRRAKRSGSGATNFSLLKQAGDVEENPGPTSMDWIWRILFLVGAATGAHSFEQNIDQPTEMTATEGAIVQINCTYQTSGFNGLFWYQQHAGEAPTFLSYNVLDGLEEKGRFSSFLSRSKGYSYLLLKELQMKDSASYLCASVDGNNRLAFGKGNQVVVIPNTRIQNPDPAVYQLRDSKSSDKSVCLFTDFDSQTNVSQSKDSDVYITDKTVLDMRSMDFKSNSAVAWSNKSDFACANAFNNSIIPEDTFFPSPESSCGTTTPGERSSLPAFYPGTSGSCSGCGSLSLPLLAGLVAADAVASLLIVGAVFLCARPRRSPAQEDGKVYINMPGRGSSRRVKFSRSADAPAYQQGQNQLYNELNLGRREEYDVLDKRRGRDPEMGGKPQRRKNPQEGLYNELQKDKMAEAYSEIGMKGERRRGKGHDGLYQGLSTATKDTYDALHMQALPPR

SEQ ID NO: 11282 - protein, 837 aa, synthetic construct
MALPVTALLLPLALLLHAARPEFGVTQSPTHLIKTRGQQVTLRCSPKSGHDTVSWYQQALGQGPQFIFQYYEEEERQRGNFPDRFSGHQFPNYSSELNVNALLLGDSALYLCASSLGWRGGRYNEQFFGPGTRLTVLEDLKNVFPPEVAVFEPSEAEISHTQKATLVCLATGFYPDHVELSWWVNGKEVHSGVSTDPQPLKEQPALNDSRYCLSSRLRVSATFWQNPRNHFRCQVQFYGLSENDEWTQDRAKPVTQIVSAEAWGRADCGSQAQSDCSCSTVSPGVLAGIVMGDLVLTVLIALAVYFLGRLVPRGRGAAEAATRKQRITETESPYQELQGQRSDVYSDLNTQRVKFSRSADAPAYQQGQNQLYNELNLGRREEYDVLDKRRGRDPEMGGKPQRRKNPQEGLYNELQKDKMAEAYSEIGMKGERRRGKGHDGLYQGLSTATKDTYDALHMQALPPRRAKRSGSGATNFSLLKQAGDVEENPGPTSMDWIWRILFLVGAATGAHSFEQNIDQPTEMTATEGAIVQINCTYQTSGFNGLFWYQQHAGEAPTFLSYNVLDGLEEKGRFSSFLSRSKGYSYLLLKELQMKDSASYLCASVDGNNRLAFGKGNQVVVIPNTRIQNPDPAVYQLRDSKSSDKSVCLFTDFDSQTNVSQSKDSDVYITDKTVLDMRSMDFKSNSAVAWSNKSDFACANAFNNSIIPEDTFFPSPESSCGTTTPGERSSLPAFYPGTSGSCSGCGSLSLPLLAGLVAADAVASLLIVGAVFKRGRKKLLYIFKQPFMRPVQTTQEEDGCSCRFPEEEEGGCELLCARPRRSPAQEDGKVYINMPGRG

SEQ ID NO: 11283 - protein, 836 aa, synthetic construct
MALPVTALLLPLALLLHAARPEFGVTQSPTHLIKTRGQQVTLRCSPKSGHDTVSWYQQALGQGPQFIFQYYEEEERQRGNFPDRFSGHQFPNYSSELNVNALLLGDSALYLCASSLGWRGGRYNEQFFGPGTRLTVLEDLKNVFPPEVAVFEPSEAEISHTQKATLVCLATGFYPDHVELSWWVNGKEVHSGVSTDPQPLKEQPALNDSRYCLSSRLRVSATFWQNPRNHFRCQVQFYGLSENDEWTQDRAKPVTQIVSAEAWGRADCGSQAQSDCSCSTVSPGVLAGIVMGDLVLTVLIALAVYFLGRLVPRGRGAAEAATRKQRITETESPYQELQGQRSDVYSDLNTQRVKFSRSADAPAYQQGQNQLYNELNLGRREEYDVLDKRRGRDPEMGGKPQRRKNPQEGLYNELQKDKMAEAYSEIGMKGERRRGKGHDGLYQGLSTATKDTYDALHMQALPPRRAKRSGSGATNFSLLKQAGDVEENPGPTSMDWIWRILFLVGAATGAHSFEQNIDQPTEMTATEGAIVQINCTYQTSGFNGLFWYQQHAGEAPTFLSYNVLDGLEEKGRFSSFLSRSKGYSYLLLKELQMKDSASYLCASVDGNNRLAFGKGNQVVVIPNTRIQNPDPAVYQLRDSKSSDKSVCLFTDFDSQTNVSQSKDSDVYITDKTVLDMRSMDFKSNSAVAWSNKSDFACANAFNNSIIPEDTFFPSPESSCGTTTPGERSSLPAFYPGTSGSCSGCGSLSLPLLAGLVAADAVASLLIVGAVFRSKRSRLLHSDYMNMTPRRPGPTRKHYQPYAPPRDFAAYRSLCARPRRSPAQEDGKVYINMPGRG

SEQ ID NO: 11284 - protein, 1082 aa, synthetic construct
MALPVTALLLPLALLLHAARPEFGVTQSPTHLIKTRGQQVTLRCSPKSGHDTVSWYQQALGQGPQFIFQYYEEEERQRGNFPDRFSGHQFPNYSSELNVNALLLGDSALYLCASSLGWRGGRYNEQFFGPGTRLTVLEDLKNVFPPEVAVFEPSEAEISHTQKATLVCLATGFYPDHVELSWWVNGKEVHSGVSTDPQPLKEQPALNDSRYCLSSRLRVSATFWQNPRNHFRCQVQFYGLSENDEWTQDRAKPVTQIVSAEAWGRADCGSQSFGLLDPKLCYLLDGILFIYGVILTALFLRVKFSRSADAPAYQQGQNQLYNELNLGRREEYDVLDKRRGRDPEMGGKPQRRKNPQEGLYNELQKDKMAEAYSEIGMKGERRRGKGHDGLYQGLSTATKDTYDALHMQALPPRRAKRSGSGATNFSLLKQAGDVEENPGPTSMDWIWRILFLVGAATGAHSFEQNIDQPTEMTATEGAIVQINCTYQTSGFNGLFWYQQHAGEAPTFLSYNVLDGLEEKGRFSSFLSRSKGYSYLLLKELQMKDSASYLCASVDGNNRLAFGKGNQVVVIPNTRIQNPDPAVYQLRDSKSSDKSVCLFTDFDSQTNVSQSKDSDVYITDKTVLDMRSMDFKSNSAVAWSNKSDFACANAFNNSIIPEDTFFPSPESSCGTQSFGLLDPKLCYLLDGILFIYGVILTALFLRVKFSRSADAPAYQQGQNQLYNELNLGRREEYDVLDKRRGRDPEMGGKPQRRKNPQEGLYNELQKDKMAEAYSEIGMKGERRRGKGHDGLYQGLSTATKDTYDALHMQALPPRRAKRSGSGVKQTLNFDLLKLAGDVESNPGPSRGHMALPVTALLLPLALLLHAARPSQFRVSPLDRTWNLGETVELKCQVLLSNPTSGCSWLFQPRGAAASPTFLLYLSQNKPKAAEGLDTQRFSGKRLGDTFVLTLSDFRRENEGYYFCSALSNSIMYFSHFVPVFLPAKPTTTPAPRPPTPAPTIASQPLSLRPEACRPAAGGAVHTRGLDFACDIYIWAPLAGTCGVLLLSLVITLYCNHRNRRRVCKCPRPVVKSGDKPSLSARYV

SEQ ID NO: 11285 - protein, 822 aa, synthetic construct
MALPVTALLLPLALLLHAARPEFGVTQSPTHLIKTRGQQVTLRCSPKSGHDTVSWYQQALGQGPQFIFQYYEEEERQRGNFPDRFSGHQFPNYSSELNVNALLLGDSALYLCASSLGWRGGRYNEQFFGPGTRLTVLEDLKNVFPPEVAVFEPSEAEISHTQKATLVCLATGFYPDHVELSWWVNGKEVHSGVSTDPQPLKEQPALNDSRYCLSSRLRVSATFWQNPRNHFRCQVQFYGLSENDEWTQDRAKPVTQIVSAEAWGRADCGSQSFGLLDPKLCYLLDGILFIYGVILTALFLRVKFSRSADAPAYQQGQNQLYNELNLGRREEYDVLDKRRGRDPEMGGKPQRRKNPQEGLYNELQKDKMAEAYSEIGMKGERRRGKGHDGLYQGLSTATKDTYDALHMQALPPRRAKRSGSGATNFSLLKQAGDVEENPGPTSMDWIWRILFLVGAATGAHSFEQNIDQPTEMTATEGAIVQINCTYQTSGFNGLFWYQQHAGEAPTFLSYNVLDGLEEKGRFSSFLSRSKGYSYLLLKELQMKDSASYLCASVDGNNRLAFGKGNQVVVIPNTRASTKGPSVFPLAPSSKSTSGGTAALGCLVKDYFPEPVTVSWNSGALTSGVHTFPAVLQSSGLYSLSSVVTVPSSSLGTQTYICNVNHKPSNTKVDKRVEPKSCGTQSFGLLDPKLSYLLDGILFIYGVILTALFLRVKFSRSADAPAYQQGQNQLYNELNLGRREEYDVLDKRRGRDPEMGGKPQRRKNPQEGLYNELQKDKMAEAYSEIGMKGERRRGKGHDGLYQGLSTATKDTYDALHMQALPPR

SEQ ID NO: 11286 - protein, 813 aa, synthetic construct
MALPVTALLLPLALLLHAARPEFGVTQSPTHLIKTRGQQVTLRCSPKSGHDTVSWYQQALGQGPQFIFQYYEEEERQRGNFPDRFSGHQFPNYSSELNVNALLLGDSALYLCASSLGWRGGRYNEQFFGPGTRLTVLEDLKNVFPPEVAVFEPSEAEISHTQKATLVCLATGFYPDHVELSWWVNGKEVHSGVSTDPQPLKEQPALNDSRYCLSSRLRVSATFWQNPRNHFRCQVQFYGLSENDEWTQDRAKPVTQIVSAEAWGRADCGSQSFGLLDPKLCYLLDGILFIYGVILTALFLRVKFSRSADAPAYQQGQNQLYNELNLGRREEYDVLDKRRGRDPEMGGKPQRRKNPQEGLYNELQKDKMAEAYSEIGMKGERRRGKGHDGLYQGLSTATKDTYDALHMQALPPRRAKRSGSGATNFSLLKQAGDVEENPGPTSMDWIWRILFLVGAATGAHSFEQNIDQPTEMTATEGAIVQINCTYQTSGFNGLFWYQQHAGEAPTFLSYNVLDGLEEKGRFSSFLSRSKGYSYLLLKELQMKDSASYLCASVDGNNRLAFGKGNQVVVIPNTRIQNPDPAVYQLRDSKSSDKSVCLFTDFDSQTNVSQSKDSDVYITDKTVLDMRSMDFKSNSAVAWSNKSDFACANAFNNSIIPEDTFFPSPESSCGTQSFGLLDPKLSYLLDGILFIYGVILTALFLRVKFSRSADAPAYQQGQNQLYNELNLGRREEYDVLDKRRGRDPEMGGKPQRRKNPQEGLYNELQKDKMAEAYSEIGMKGERRRGKGHDGLYQGLSTATKDTYDALHMQALPPR

SEQ ID NO: 11287 - protein, 983 aa, synthetic construct
MALPVTALLLPLALLLHAARPEFGVTQSPTHLIKTRGQQVTLRCSPKSGHDTVSWYQQALGQGPQFIFQYYEEEERQRGNFPDRFSGHQFPNYSSELNVNALLLGDSALYLCASSLGWRGGRYNEQFFGPGTRLTVLEGQPKANPTVTLFPPSSEELQANKATLVCLISDFYPGAVTVAWKADGSPVKAGVETTKPSKQSNNKYAASSYLSLTPEQWKSHRSYSCQVTHEGSTVEKTVAPTECSGSLGEPQLCYILDAILFLYGIVLTLLYCRLKIQVRKAAITSYEKSDGVYTGLSTRNQETYETLKHEKPPQRAKRSGSGATNFSLLKQAGDVEENPGPTSMDWIWRILFLVGAATGAHSFEQNIDQPTEMTATEGAIVQINCTYQTSGFNGLFWYQQHAGEAPTFLSYNVLDGLEEKGRFSSFLSRSKGYSYLLLKELQMKDSASYLCASVDGNNRLAFGKGNQVVVIPNTRIQNPDPAVYQLRDSKSSDKSVCLFTDFDSQTNVSQSKDSDVYITDKTVLDMRSMDFKSNSAVAWSNKSDFACANAFNNSIIPEDTFFPSPESSCGTQSFGLLDPKLCYLLDGILFIYGVILTALFLRVKFSRSADAPAYQQGQNQLYNELNLGRREEYDVLDKRRGRDPEMGGKPQRRKNPQEGLYNELQKDKMAEAYSEIGMKGERRRGKGHDGLYQGLSTATKDTYDALHMQALPPRRAKRSGSGVKQTLNFDLLKLAGDVESNPGPSRGHMALPVTALLLPLALLLHAARPSQFRVSPLDRTWNLGETVELKCQVLLSNPTSGCSWLFQPRGAAASPTFLLYLSQNKPKAAEGLDTQRFSGKRLGDTFVLTLSDFRRENEGYYFCSALSNSIMYFSHFVPVFLPAKPTTTPAPRPPTPAPTIASQPLSLRPEACRPAAGGAVHTRGLDFACDIYIWAPLAGTCGVLLLSLVITLYCNHRNRRRVCKCPRPVVKSGDKPSLSARYV

SEQ ID NO: 11288 - protein, 747 aa, synthetic construct
MALPVTALLLPLALLLHAARPEFGVTQSPTHLIKTRGQQVTLRCSPKSGHDTVSWYQQALGQGPQFIFQYYEEEERQRGNFPDRFSGHQFPNYSSELNVNALLLGDSALYLCASSLGWRGGRYNEQFFGPGTRLTVLEDLKNVFPPEVAVFEPSEAEISHTQKATLVCLATGFYPDHVELSWWVNGKEVHSGVSTDPQPLKEQPALNDSRYCLSSRLRVSATFWQNPRNHFRCQVQFYGLSENDEWTQDRAKPVTQIVSAEAWGRADCGSQSFGLLDPKLCYLLDGILFIYGVILTALFLRVKFSRSADAPAYQQGQNQLYNELNLGRREEYDVLDKRRGRDPEMGGKPQRRKNPQEGLYNELQKDKMAEAYSEIGMKGERRRGKGHDGLYQGLSTATKDTYDALHMQALPPRRAKRSGSGATNFSLLKQAGDVEENPGPTSMDWIWRILFLVGAATGAHSFEQNIDQPTEMTATEGAIVQINCTYQTSGFNGLFWYQQHAGEAPTFLSYNVLDGLEEKGRFSSFLSRSKGYSYLLLKELQMKDSASYLCASVDGNNRLAFGKGNQVVVIPNTRASTKGPSVFPLAPSSKSTSGGTAALGCLVKDYFPEPVTVSWNSGALTSGVHTFPAVLQSSGLYSLSSVVTVPSSSLGTQTYICNVNHKPSNTKVDKRVEPKSCGTLGEPQLCYILDAILFLYGIVLTLLYCRLKIQVRKAAITSYEKSDGVYTGLSTRNQETYETLKHEKPPQ

SEQ ID NO: 11289 - protein, 747 aa, synthetic construct; identical to SEQ ID NO: 11288

SEQ ID NO: 11290 - protein, 738 aa, synthetic construct
MALPVTALLLPLALLLHAARPEFGVTQSPTHLIKTRGQQVTLRCSPKSGHDTVSWYQQALGQGPQFIFQYYEEEERQRGNFPDRFSGHQFPNYSSELNVNALLLGDSALYLCASSLGWRGGRYNEQFFGPGTRLTVLEDLKNVFPPEVAVFEPSEAEISHTQKATLVCLATGFYPDHVELSWWVNGKEVHSGVSTDPQPLKEQPALNDSRYCLSSRLRVSATFWQNPRNHFRCQVQFYGLSENDEWTQDRAKPVTQIVSAEAWGRADCGSQSFGLLDPKLCYLLDGILFIYGVILTALFLRVKFSRSADAPAYQQGQNQLYNELNLGRREEYDVLDKRRGRDPEMGGKPQRRKNPQEGLYNELQKDKMAEAYSEIGMKGERRRGKGHDGLYQGLSTATKDTYDALHMQALPPRRAKRSGSGATNFSLLKQAGDVEENPGPTSMDWIWRILFLVGAATGAHSFEQNIDQPTEMTATEGAIVQINCTYQTSGFNGLFWYQQHAGEAPTFLSYNVLDGLEEKGRFSSFLSRSKGYSYLLLKELQMKDSASYLCASVDGNNRLAFGKGNQVVVIPNTRIQNPDPAVYQLRDSKSSDKSVCLFTDFDSQTNVSQSKDSDVYITDKTVLDMRSMDFKSNSAVAWSNKSDFACANAFNNSIIPEDTFFPSPESSCGTLGEPQLCYILDAILFLYGIVLTLLYCRLKIQVRKAAITSYEKSDGVYTGLSTRNQETYETLKHEKPPQ

SEQ ID NO: 11291 - protein, 987 aa, synthetic construct
MALPVTALLLPLALLLHAARPEFGVTQSPTHLIKTRGQQVTLRCSPKSGHDTVSWYQQALGQGPQFIFQYYEEEERQRGNFPDRFSGHQFPNYSSELNVNALLLGDSALYLCASSLGWRGGRYNEQFFGPGTRLTVLEGQPKANPTVTLFPPSSEELQANKATLVCLISDFYPGAVTVAWKADGSPVKAGVETTKPSKQSNNKYAASSYLSLTPEQWKSHRSYSCQVTHEGSTVEKTVAPTECSTTPGERSSLPAFYPGTSGSCSGCGSLSLPLLAGLVAADAVASLLIVGAVFLCARPRRSPAQEDGKVYINMPGRGRAKRSGSGATNFSLLKQAGDVEENPGPTSMDWIWRILFLVGAATGAHSFEQNIDQPTEMTATEGAIVQINCTYQTSGFNGLFWYQQHAGEAPTFLSYNVLDGLEEKGRFSSFLSRSKGYSYLLLKELQMKDSASYLCASVDGNNRLAFGKGNQVVVIPNTRIQNPDPAVYQLRDSKSSDKSVCLFTDFDSQTNVSQSKDSDVYITDKTVLDMRSMDFKSNSAVAWSNKSDFACANAFNNSIIPEDTFFPSPESSCGTQSFGLLDPKLCYLLDGILFIYGVILTALFLRVKFSRSADAPAYQQGQNQLYNELNLGRREEYDVLDKRRGRDPEMGGKPQRRKNPQEGLYNELQKDKMAEAYSEIGMKGERRRGKGHDGLYQGLSTATKDTYDALHMQALPPRRAKRSGSGVKQTLNFDLLKLAGDVESNPGPSRGHMALPVTALLLPLALLLHAARPSQFRVSPLDRTWNLGETVELKCQVLLSNPTSGCSWLFQPRGAAASPTFLLYLSQNKPKAAEGLDTQRFSGKRLGDTFVLTLSDFRRENEGYYFCSALSNSIMYFSHFVPVFLPAKPTTTPAPRPPTPAPTIASQPLSLRPEACRPAAGGAVHTRGLDFACDIYIWAPLAGTCGVLLLSLVITLYCNHRNRRRVCKCPRPVVKSGDKPSLSARYV

SEQ ID NO: 11292 - protein, 1020 aa, synthetic construct
MALPVTALLLPLALLLHAARPEFGVTQSPTHLIKTRGQQVTLRCSPKSGHDTVSWYQQALGQGPQFIFQYYEEEERQRGNFPDRFSGHQFPNYSSELNVNALLLGDSALYLCASSLGWRGGRYNEQFFGPGTRLTVLEDLKNVFPPEVAVFEPSEAEISHTQKATLVCLATGFYPDHVELSWWVNGKEVHSGVSTDPQPLKEQPALNDSRYCLSSRLRVSATFWQNPRNHFRCQVQFYGLSENDEWTQDRAKPVTQIVSAEAWGRADCGSQSFGLLDPKLCYLLDGILFIYGVILTALFLRVKFSRSADAPAYQQGQNQLYNELNLGRREEYDVLDKRRGRDPEMGGKPQRRKNPQEGLYNELQKDKMAEAYSEIGMKGERRRGKGHDGLYQGLSTATKDTYDALHMQALPPRRAKRSGSGATNFSLLKQAGDVEENPGPTSMDWIWRILFLVGAATGAHSFEQNIDQPTEMTATEGAIVQINCTYQTSGFNGLFWYQQHAGEAPTFLSYNVLDGLEEKGRFSSFLSRSKGYSYLLLKELQMKDSASYLCASVDGNNRLAFGKGNQVVVIPNTRASTKGPSVFPLAPSSKSTSGGTAALGCLVKDYFPEPVTVSWNSGALTSGVHTFPAVLQSSGLYSLSSVVTVPSSSLGTQTYICNVNHKPSNTKVDKRVEPKSCTTPGERSSLPAFYPGTSGSCSGCGSLSLPLLAGLVAADAVASLLIVGAVFLCARPRRSPAQEDGKVYINMPGRGRAKRSGSGVKQTLNFDLLKLAGDVESNPGPSRGHMALPVTALLLPLALLLHAARPSQFRVSPLDRTWNLGETVELKCQVLLSNPTSGCSWLFQPRGAAASPTFLLYLSQNKPKAAEGLDTQRFSGKRLGDTFVLTLSDFRRENEGYYFCSALSNSIMYFSHFVPVFLPAKPTTTPAPRPPTPAPTIASQPLSLRPEACRPAAGGAVHTRGLDFACDIYIWAPLAGTCGVLLLSLVITLYCNHRNRRRVCKCPRPVVKSGDKPSLSARYV

SEQ ID NO: 11293 - protein, 932 aa, synthetic construct
MALPVTALLLPLALLLHAARPGVTQSPTHLIKTRGQQVTLRCSPKSGHDTVSWYQQALGQGPQFIFQYYEEEERQRGNFPDRFSGHQFPNYSSELNVNALLLGDSALYLCASSLGWRGGRYNEQFFGPGTRLTVLELWVSQPPEIRTLEGSSAFLPCSFNASQGRLAIGSVTWFRDEVVPGKEVRNGTPEFRGRLAPLASSRFLHDHQAELHIRDVRGHDASIYVCRVEVLGLGVGTGNGTRLVVEKEHPQLGAGTVLLLRAGFYAVSFLSVAVGSTVYYQGKCLTWKGPRRQLPAVVPAPLPPPCGSSAHLLPPVPGGRAKRSGSGATNFSLLKQAGDVEENPGPTSMDWIWRILFLVGAATGAHSFEQNIDQPTEMTATEGAIVQINCTYQTSGFNGLFWYQQHAGEAPTFLSYNVLDGLEEKGRFSSFLSRSKGYSYLLLKELQMKDSASYLCASVDGNNRLAFGKGNQVVVIPNTRLWVSQPPEIRTLEGSSAFLPCSFNASQGRLAIGSVTWFRDEVVPGKEVRNGTPEFRGRLAPLASSRFLHDHQAELHIRDVRGHDASIYVCRVEVLGLGVGTGNGTRLVVEKEHPQLGAGTVLLLRAGFYAVSFLSVAVGSTVYYQGKCLTWKGPRRQLPAVVPAPLPPPCGSSAHLLPPVPGGRAKRSGSGVKQTLNFDLLKLAGDVESNPGPSRGHMALPVTALLLPLALLLHAARPSQFRVSPLDRTWNLGETVELKCQVLLSNPTSGCSWLFQPRGAAASPTFLLYLSQNKPKAAEGLDTQRFSGKRLGDTFVLTLSDFRRENEGYYFCSALSNSIMYFSHFVPVFLPAKPTTTPAPRPPTPAPTIASQPLSLRPEACRPAAGGAVHTRGLDFACDIYIWAPLAGTCGVLLLSLVITLYCNHRNRRRVCKCPRPVVKSGDKPSLSARYV

SEQ ID NO: 11294 - protein, 1067 aa, synthetic construct
MALPVTALLLPLALLLHAARPEFGVTQSPTHLIKTRGQQVTLRCSPKSGHDTVSWYQQALGQGPQFIFQYYEEEERQRGNFPDRFSGHQFPNYSSELNVNALLLGDSALYLCASSLGWRGGRYNEQFFGPGTRLTVLEGQPKANPTVTLFPPSSEELQANKATLVCLISDFYPGAVTVAWKADGSPVKAGVETTKPSKQSNNKYAASSYLSLTPEQWKSHRSYSCQVTHEGSTVEKTVAPTECSGSQSFGLLDPKLCYLLDGILFIYGVILTALFLRVKFSRSADAPAYQQGQNQLYNELNLGRREEYDVLDKRRGRDPEMGGKPQRRKNPQEGLYNELQKDKMAEAYSEIGMKGERRRGKGHDGLYQGLSTATKDTYDALHMQALPPRRAKRSGSGATNFSLLKQAGDVEENPGPTSMDWIWRILFLVGAATGAHSFEQNIDQPTEMTATEGAIVQINCTYQTSGFNGLFWYQQHAGEAPTFLSYNVLDGLEEKGRFSSFLSRSKGYSYLLLKELQMKDSASYLCASVDGNNRLAFGKGNQVVVIPNTRASTKGPSVFPLAPSSKSTSGGTAALGCLVKDYFPEPVTVSWNSGALTSGVHTFPAVLQSSGLYSLSSVVTVPSSSLGTQTYICNVNHKPSNTKVDKRVEPKSCGTQSFGLLDPKLCYLLDGILFIYGVILTALFLRVKFSRSADAPAYQQGQNQLYNELNLGRREEYDVLDKRRGRDPEMGGKPQRRKNPQEGLYNELQKDKMAEAYSEIGMKGERRRGKGHDGLYQGLSTATKDTYDALHMQALPPRRAKRSGSGVKQTLNFDLLKLAGDVESNPGPSRGHMALPVTALLLPLALLLHAARPSQFRVSPLDRTWNLGETVELKCQVLLSNPTSGCSWLFQPRGAAASPTFLLYLSQNKPKAAEGLDTQRFSGKRLGDTFVLTLSDFRRENEGYYFCSALSNSIMYFSHFVPVFLPAKPTTTPAPRPPTPAPTIASQPLSLRPEACRPAAGGAVHTRGLDFACDIYIWAPLAGTCGVLLLSLVITLYCNHRNRRRVCKCPRPVVKSGDKPSLSARYV

SEQ ID NO: 11295 - protein, 1085 aa, synthetic construct
MALPVTALLLPLALLLHAARPEFGVTQSPTHLIKTRGQQVTLRCSPKSGHDTVSWYQQALGQGPQFIFQYYEEEERQRGNFPDRFSGHQFPNYSSELNVNALLLGDSALYLCASSLGWRGGRYNEQFFGPGTRLTVLEGQPKANPTVTLFPPSSEELQANKATLVCLISDFYPGAVTVAWKADGSPVKAGVETTKPSKQSNNKYAASSYLSLTPEQWKSHRSYSCQVTHEGSTVEKTVAPTECSGSQSFGLLDPKLCYLLDGILFIYGVILTALFLRVKFSRSADAPAYQQGQNQLYNELNLGRREEYDVLDKRRGRDPEMGGKPQRRKNPQEGLYNELQKDKMAEAYSEIGMKGERRRGKGHDGLYQGLSTATKDTYDALHMQALPPRRAKRSGSGATNFSLLKQAGDVEENPGPTSMDWIWRILFLVGAATGAHSFEQNIDQPTEMTATEGAIVQINCTYQTSGFNGLFWYQQHAGEAPTFLSYNVLDGLEEKGRFSSFLSRSKGYSYLLLKELQMKDSASYLCASVDGNNRLAFGKGNQVVVIPNTRASPTSPKVFPLSLCSTQPDGNVVIACLVQGFFPQEPLSVTWSESGQGVTARNFPPSQDASGDLYTTSSQLTLPATQCLAGKSVTCHVKHYTNPSQDVTVPCPVPSTPPTPSPSTPPTPSPSGTQSFGLLDPKLCYLLDGILFIYGVILTALFLRVKFSRSADAPAYQQGQNQLYNELNLGRREEYDVLDKRRGRDPEMGGKPQRRKNPQEGLYNELQKDKMAEAYSEIGMKGERRRGKGHDGLYQGLSTATKDTYDALHMQALPPRRAKRSGSGVKQTLNFDLLKLAGDVESNPGPSRGHMALPVTALLLPLALLLHAARPSQFRVSPLDRTWNLGETVELKCQVLLSNPTSGCSWLFQPRGAAASPTFLLYLSQNKPKAAEGLDTQRFSGKRLGDTFVLTLSDFRRENEGYYFCSALSNSIMYFSHFVPVFLPAKPTTTPAPRPPTPAPTIASQPLSLRPEACRPAAGGAVHTRGLDFACDIYIWAPLAGTCGVLLLSLVITLYCNHRNRRRVCKCPRPVVKSGDKPSLSARYV

SEQ ID NO: 11296 - protein, 1066 aa, synthetic construct
MALPVTALLLPLALLLHAARPEFGVTQSPTHLIKTRGQQVTLRCSPKSGHDTVSWYQQALGQGPQFIFQYYEEEERQRGNFPDRFSGHQFPNYSSELNVNALLLGDSALYLCASSLGWRGGRYNEQFFGPGTRLTVLEGQPKANPTVTLFPPSSEELQANKATLVCLISDFYPGAVTVAWKADGSPVKAGVETTKPSKQSNNKYAASSYLSLTPEQWKSHRSYSCQVTHEGSTVEKTVAPTECSGSQSFGLLDPKLCYLLDGILFIYGVILTALFLRVKFSRSADAPAYQQGQNQLYNELNLGRREEYDVLDKRRGRDPEMGGKPQRRKNPQEGLYNELQKDKMAEAYSEIGMKGERRRGKGHDGLYQGLSTATKDTYDALHMQALPPRRAKRSGSGATNFSLLKQAGDVEENPGPTSMDWIWRILFLVGAATGAHSFEQNIDQPTEMTATEGAIVQINCTYQTSGFNGLFWYQQHAGEAPTFLSYNVLDGLEEKGRFSSFLSRSKGYSYLLLKELQMKDSASYLCASVDGNNRLAFGKGNQVVVIPNTRASTKGPSVFPLAPCSRSTSESTAALGCLVKDYFPEPVTVSWNSGALTSGVHTFPAVLQSSGLYSLSSVVTVPSSNFGTQTYTCNVDHKPSNTKVDKTVERKCGTQSFGLLDPKLCYLLDGILFIYGVILTALFLRVKFSRSADAPAYQQGQNQLYNELNLGRREEYDVLDKRRGRDPEMGGKPQRRKNPQEGLYNELQKDKMAEAYSEIGMKGERRRGKGHDGLYQGLSTATKDTYDALHMQALPPRRAKRSGSGVKQTLNFDLLKLAGDVESNPGPSRGHMALPVTALLLPLALLLHAARPSQFRVSPLDRTWNLGETVELKCQVLLSNPTSGCSWLFQPRGAAASPTFLLYLSQNKPKAAEGLDTQRFSGKRLGDTFVLTLSDFRRENEGYYFCSALSNSIMYFSHFVPVFLPAKPTTTPAPRPPTPAPTIASQPLSLRPEACRPAAGGAVHTRGLDFACDIYIWAPLAGTCGVLLLSLVITLYCNHRNRRRVCKCPRPVVKSGDKPSLSARYV

SEQ ID NO: 11297 - protein, 1121 aa, synthetic construct
MALPVTALLLPLALLLHAARPGVTQSPTHLIKTRGQQVTLRCSPKSGHDTVSWYQQALGQGPQFIFQYYEEEERQRGNFPDRFSGHQFPNYSSELNVNALLLGDSALYLCASSLGWRGGRYNEQFFGPGTRLTVLEGQPKANPTVTLFPPSSEELQANKATLVCLISDFYPGAVTVAWKADGSPVKAGVETTKPSKQSNNKYAASSYLSLTPEQWKSHRSYSCQVTHEGSTVEKTVAPTECSGSQSFGLLDPKLCYLLDGILFIYGVILTALFLRVKFSRSADAPAYQQGQNQLYNELNLGRREEYDVLDKRRGRDPEMGGKPQRRKNPQEGLYNELQKDKMAEAYSEIGMKGERRRGKGHDGLYQGLSTATKDTYDALHMQALPPRRAKRSGSGATNFSLLKQAGDVEENPGPTSMDWIWRILFLVGAATGAHSFEQNIDQPTEMTATEGAIVQINCTYQTSGFNGLFWYQQHAGEAPTFLSYNVLDGLEEKGRFSSFLSRSKGYSYLLLKELQMKDSASYLCASVDGNNRLAFGKGNQVVVIPNTRAPTKAPDVFPIISGCRHPKDNSPVVLACLITGYHPTSVTVTWYMGTQSQPQRTFPEIQRRDSYYMTSSQLSTPLQQWRQGEYKCVVQHTASKSKKEIFRWPESPKAQASSVPTAQPQAEGSLAKATTAPATTRNTGRGGEEKKKEKEKEEQEERETKTPGTQSFGLLDPKLCYLLDGILFIYGVILTALFLRVKFSRSADAPAYQQGQNQLYNELNLGRREEYDVLDKRRGRDPEMGGKPQRRKNPQEGLYNELQKDKMAEAYSEIGMKGERRRGKGHDGLYQGLSTATKDTYDALHMQALPPRRAKRSGSGVKQTLNFDLLKLAGDVESNPGPSRGHMALPVTALLLPLALLLHAARPSQFRVSPLDRTWNLGETVELKCQVLLSNPTSGCSWLFQPRGAAASPTFLLYLSQNKPKAAEGLDTQRFSGKRLGDTFVLTLSDFRRENEGYYFCSALSNSIMYFSHFVPVFLPAKPTTTPAPRPPTPAPTIASQPLSLRPEACRPAAGGAVHTRGLDFACDIYIWAPLAGTCGVLLLSLVITLYCNHRNRRRVCKCPRPVVKSGDKPSLSARYV

SEQ ID NO: 11298 - protein, 1063 aa, synthetic construct
MALPVTALLLPLALLLHAARPGVTQSPTHLIKTRGQQVTLRCSPKSGHDTVSWYQQALGQGPQFIFQYYEEEERQRGNFPDRFSGHQFPNYSSELNVNALLLGDSALYLCASSLGWRGGRYNEQFFGPGTRLTVLEGQPKANPTVTLFPPSSEELQANKATLVCLISDFYPGAVTVAWKADGSPVKAGVETTKPSKQSNNKYAASSYLSLTPEQWKSHRSYSCQVTHEGSTVEKTVAPTECSGSQSFGLLDPKLCYLLDGILFIYGVILTALFLRVKFSRSADAPAYQQGQNQLYNELNLGRREEYDVLDKRRGRDPEMGGKPQRRKNPQEGLYNELQKDKMAEAYSEIGMKGERRRGKGHDGLYQGLSTATKDTYDALHMQALPPRRAKRSGSGATNFSLLKQAGDVEENPGPTSMDWIWRILFLVGAATGAHSFEQNIDQPTEMTATEGAIVQINCTYQTSGFNGLFWYQQHAGEAPTFLSYNVLDGLEEKGRFSSFLSRSKGYSYLLLKELQMKDSASYLCASVDGNNRLAFGKGNQVVVIPNTRASTKGPSVFPLAPCSRSTSESTAALGCLVKDYFPEPVTVSWNSGALTSGVHTFPAVLQSSGLYSLSSVVTVPSSNFGTQTYTCNVDHKPSNTKVDKTVERKGTQSFGLLDPKLCYLLDGILFIYGVILTALFLRVKFSRSADAPAYQQGQNQLYNELNLGRREEYDVLDKRRGRDPEMGGKPQRRKNPQEGLYNELQKDKMAEAYSEIGMKGERRRGKGHDGLYQGLSTATKDTYDALHMQALPPRRAKRSGSGVKQTLNFDLLKLAGDVESNPGPSRGHMALPVTALLLPLALLLHAARPSQFRVSPLDRTWNLGETVELKCQVLLSNPTSGCSWLFQPRGAAASPTFLLYLSQNKPKAAEGLDTQRFSGKRLGDTFVLTLSDFRRENEGYYFCSALSNSIMYFSHFVPVFLPAKPTTTPAPRPPTPAPTIASQPLSLRPEACRPAAGGAVHTRGLDFACDIYIWAPLAGTCGVLLLSLVITLYCNHRNRRRVCKCPRPVVKSGDKPSLSARYV

SEQ ID NO: 11299 - protein, 1070 aa, synthetic construct
MALPVTALLLPLALLLHAARPGVTQSPTHLIKTRGQQVTLRCSPKSGHDTVSWYQQALGQGPQFIFQYYEEEERQRGNFPDRFSGHQFPNYSSELNVNALLLGDSALYLCASSLGWRGGRYNEQFFGPGTRLTVLEGQPKANPTVTLFPPSSEELQANKATLVCLISDFYPGAVTVAWKADGSPVKAGVETTKPSKQSNNKYAASSYLSLTPEQWKSHRSYSCQVTHEGSTVEKTVAPTECSGSQSFGLLDPKLCYLLDGILFIYGVILTALFLRVKFSRSADAPAYQQGQNQLYNELNLGRREEYDVLDKRRGRDPEMGGKPQRRKNPQEGLYNELQKDKMAEAYSEIGMKGERRRGKGHDGLYQGLSTATKDTYDALHMQALPPRRAKRSGSGATNFSLLKQAGDVEENPGPTSMDWIWRILFLVGAATGAHSFEQNIDQPTEMTATEGAIVQINCTYQTSGFNGLFWYQQHAGEAPTFLSYNVLDGLEEKGRFSSFLSRSKGYSYLLLKELQMKDSASYLCASVDGNNRLAFGKGNQVVVIPNTRASPTSPKVFPLSLDSTPQDGNVVVACLVQGFFPQEPLSVTWSESGQNVTARNFPPSQDASGDLYTTSSQLTLPATQCPDGKSVTCHVKHYTNPSQDVTVPCPVPPPPPGTQSFGLLDPKLCYLLDGILFIYGVILTALFLRVKFSRSADAPAYQQGQNQLYNELNLGRREEYDVLDKRRGRDPEMGGKPQRRKNPQEGLYNELQKDKMAEAYSEIGMKGERRRGKGHDGLYQGLSTATKDTYDALHMQALPPRRAKRSGSGVKQTLNFDLLKLAGDVESNPGPSRGHMALPVTALLLPLALLLHAARPSQFRVSPLDRTWNLGETVELKCQVLLSNPTSGCSWLFQPRGAAASPTFLLYLSQNKPKAAEGLDTQRFSGKRLGDTFVLTLSDFRRENEGYYFCSALSNSIMYFSHFVPVFLPAKPTTTPAPRPPTPAPTIASQPLSLRPEACRPAAGGAVHTRGLDFACDIYIWAPLAGTCGVLLLSLVITLYCNHRNRRRVCKCPRPVVKSGDKPSLSARYV

SEQ ID NO: 11300 - protein, 1065 aa, synthetic construct
MALPVTALLLPLALLLHAARPGVTQSPTHLIKTRGQQVTLRCSPKSGHDTVSWYQQALGQGPQFIFQYYEEEERQRGNFPDRFSGHQFPNYSSELNVNALLLGDSALYLCASSLGWRGGRYNEQFFGPGTRLTVLEGQPKANPTVTLFPPSSEELQANKATLVCLISDFYPGAVTVAWKADGSPVKAGVETTKPSKQSNNKYAASSYLSLTPEQWKSHRSYSCQVTHEGSTVEKTVAPTECSGSQSFGLLDPKLCYLLDGILFIYGVILTALFLRVKFSRSADAPAYQQGQNQLYNELNLGRREEYDVLDKRRGRDPEMGGKPQRRKNPQEGLYNELQKDKMAEAYSEIGMKGERRRGKGHDGLYQGLSTATKDTYDALHMQALPPRRAKRSGSGATNFSLLKQAGDVEENPGPTSMDWIWRILFLVGAATGAHSFEQNIDQPTEMTATEGAIVQINCTYQTSGFNGLFWYQQHAGEAPTFLSYNVLDGLEEKGRFSSFLSRSKGYSYLLLKELQMKDSASYLCASVDGNNRLAFGKGNQVVVIPNTRASTQSPSVFPLTRCCKNIPSNATSVTLGCLATGYFPEPVMVTWDTGSLNGTTMTLPATTLTLSGHYATISLLTVSGAWAKQMFTCRVAHTPSSTDWVDNKTFSGTQSFGLLDPKLCYLLDGILFIYGVILTALFLRVKFSRSADAPAYQQGQNQLYNELNLGRREEYDVLDKRRGRDPEMGGKPQRRKNPQEGLYNELQKDKMAEAYSEIGMKGERRRGKGHDGLYQGLSTATKDTYDALHMQALPPRRAKRSGSGVKQTLNFDLLKLAGDVESNPGPSRGHMALPVTALLLPLALLLHAARPSQFRVSPLDRTWNLGETVELKCQVLLSNPTSGCSWLFQPRGAAASPTFLLYLSQNKPKAAEGLDTQRFSGKRLGDTFVLTLSDFRRENEGYYFCSALSNSIMYFSHFVPVFLPAKPTTTPAPRPPTPAPTIASQPLSLRPEACRPAAGGAVHTRGLDFACDIYIWAPLAGTCGVLLLSLVITLYCNHRNRRRVCKCPRPVVKSGDKPSLSARYV

SEQ ID NO: 11301 - protein, 1065 aa, synthetic construct
MALPVTALLLPLALLLHAARPGVTQSPTHLIKTRGQQVTLRCSPKSGHDTVSWYQQALGQGPQFIFQYYEEEERQRGNFPDRFSGHQFPNYSSELNVNALLLGDSALYLCASSLGWRGGRYNEQFFGPGTRLTVLEGQPKANPTVTLFPPSSEELQANKATLVCLISDFYPGAVTVAWKADGSPVKAGVETTKPSKQSNNKYAASSYLSLTPEQWKSHRSYSCQVTHEGSTVEKTVAPTECSGSQSFGLLDPKLCYLLDGILFIYGVILTALFLRVKFSRSADAPAYQQGQNQLYNELNLGRREEYDVLDKRRGRDPEMGGKPQRRKNPQEGLYNELQKDKMAEAYSEIGMKGERRRGKGHDGLYQGLSTATKDTYDALHMQALPPRRAKRSGSGATNFSLLKQAGDVEENPGPTSMDWIWRILFLVGAATGAHSFEQNIDQPTEMTATEGAIVQINCTYQTSGFNGLFWYQQHAGEAPTFLSYNVLDGLEEKGRFSSFLSRSKGYSYLLLKELQMKDSASYLCASVDGNNRLAFGKGNQVVVIPNTRASTKGPSVFPLAPCSRSTSESTAALGCLVKDYFPEPVTVSWNSGALTSGVHTFPAVLQSSGLYSLSSVVTVPSSSLGTKTYTCNVDHKPSNTKVDKRVESKYGGTQSFGLLDPKLCYLLDGILFIYGVILTALFLRVKFSRSADAPAYQQGQNQLYNELNLGRREEYDVLDKRRGRDPEMGGKPQRRKNPQEGLYNELQKDKMAEAYSEIGMKGERRRGKGHDGLYQGLSTATKDTYDALHMQALPPRRAKRSGSGVKQTLNFDLLKLAGDVESNPGPSRGHMALPVTALLLPLALLLHAARPSQFRVSPLDRTWNLGETVELKCQVLLSNPTSGCSWLFQPRGAAASPTFLLYLSQNKPKAAEGLDTQRFSGKRLGDTFVLTLSDFRRENEGYYFCSALSNSIMYFSHFVPVFLPAKPTTTPAPRPPTPAPTIASQPLSLRPEACRPAAGGAVHTRGLDFACDIYIWAPLAGTCGVLLLSLVITLYCNHRNRRRVCKCPRPVVKSGDKPSLSARYV

SEQ ID NO: 11302 - protein, 1065 aa, synthetic construct
MALPVTALLLPLALLLHAARPGVTQSPTHLIKTRGQQVTLRCSPKSGHDTVSWYQQALGQGPQFIFQYYEEEERQRGNFPDRFSGHQFPNYSSELNVNALLLGDSALYLCASSLGWRGGRYNEQFFGPGTRLTVLEGQPKANPTVTLFPPSSEELQANKATLVCLISDFYPGAVTVAWKADGSPVKAGVETTKPSKQSNNKYAASSYLSLTPEQWKSHRSYSCQVTHEGSTVEKTVAPTECSGSQSFGLLDPKLCYLLDGILFIYGVILTALFLRVKFSRSADAPAYQQGQNQLYNELNLGRREEYDVLDKRRGRDPEMGGKPQRRKNPQEGLYNELQKDKMAEAYSEIGMKGERRRGKGHDGLYQGLSTATKDTYDALHMQALPPRRAKRSGSGATNFSLLKQAGDVEENPGPTSMDWIWRILFLVGAATGAHSFEQNIDQPTEMTATEGAIVQINCTYQTSGFNGLFWYQQHAGEAPTFLSYNVLDGLEEKGRFSSFLSRSKGYSYLLLKELQMKDSASYLCASVDGNNRLAFGKGNQVVVIPNTRASTKGPSVFPLAPCSRSTSESTAALGCLVKDYFPEPVTVSWNSGALTSGVHTFPAVLQSSGLYSLSSVVTVPSSNFGTQTYTCNVDHKPSNTKVDKTVERKCCGTQSFGLLDPKLCYLLDGILFIYGVILTALFLRVKFSRSADAPAYQQGQNQLYNELNLGRREEYDVLDKRRGRDPEMGGKPQRRKNPQEGLYNELQKDKMAEAYSEIGMKGERRRGKGHDGLYQGLSTATKDTYDALHMQALPPRRAKRSGSGVKQTLNFDLLKLAGDVESNPGPSRGHMALPVTALLLPLALLLHAARPSQFRVSPLDRTWNLGETVELKCQVLLSNPTSGCSWLFQPRGAAASPTFLLYLSQNKPKAAEGLDTQRFSGKRLGDTFVLTLSDFRRENEGYYFCSALSNSIMYFSHFVPVFLPAKPTTTPAPRPPTPAPTIASQPLSLRPEACRPAAGGAVHTRGLDFACDIYIWAPLAGTCGVLLLSLVITLYCNHRNRRRVCKCPRPVVKSGDKPSLSARYV

SEQ ID NO: 11303 - protein, 1080 aa, synthetic construct
MALPVTALLLPLALLLHAARPGVTQSPTHLIKTRGQQVTLRCSPKSGHDTVSWYQQALGQGPQFIFQYYEEEERQRGNFPDRFSGHQFPNYSSELNVNALLLGDSALYLCASSLGWRGGRYNEQFFGPGTRLTVLEDLKNVFPPEVAVFEPSEAEISHTQKATLVCLATGFYPDHVELSWWVNGKEVHSGVSTDPQPLKEQPALNDSRYCLSSRLRVSATFWQNPRNHFRCQVQFYGLSENDEWTQDRAKPVTQIVSAEAWGRADCGSQSFGLLDPKLCYLLDGILFIYGVILTALFLRVKFSRSADAPAYQQGQNQLYNELNLGRREEYDVLDKRRGRDPEMGGKPQRRKNPQEGLYNELQKDKMAEAYSEIGMKGERRRGKGHDGLYQGLSTATKDTYDALHMQALPPRRAKRSGSGATNFSLLKQAGDVEENPGPTSMDWIWRILFLVGAATGAHSFEQNIDQPTEMTATEGAIVQINCTYQTSGFNGLFWYQQHAGEAPTFLSYNVLDGLEEKGRFSSFLSRSKGYSYLLLKELQMKDSASYLCASVDGNNRLAFGKGNQVVVIPNTRIQNPDPAVYQLRDSKSSDKSVCLFTDFDSQTNVSQSKDSDVYITDKTVLDMRSMDFKSNSAVAWSNKSDFACANAFNNSIIPEDTFFPSPESSCGTQSFGLLDPKLCYLLDGILFIYGVILTALFLRVKFSRSADAPAYQQGQNQLYNELNLGRREEYDVLDKRRGRDPEMGGKPQRRKNPQEGLYNELQKDKMAEAYSEIGMKGERRRGKGHDGLYQGLSTATKDTYDALHMQALPPRRAKRSGSGVKQTLNFDLLKLAGDVESNPGPSRGHMALPVTALLLPLALLLHAARPSQFRVSPLDRTWNLGETVELKCQVLLSNPTSGCSWLFQPRGAAASPTFLLYLSQNKPKAAEGLDTQRFSGKRLGDTFVLTLSDFRRENEGYYFCSALSNSIMYFSHFVPVFLPAKPTTTPAPRPPTPAPTIASQPLSLRPEACRPAAGGAVHTRGLDFACDIYIWAPLAGTCGVLLLSLVITLYCNHRNRRRVCKCPRPVVKSGDKPSLSARYV

SEQ ID NO: 11304 - protein, 1080 aa, synthetic construct
MALPVTALLLPLALLLHAARPGVTQSPTHLIKTRGQQVTLRCSPKSGHDTVSWYQQALGQGPQFIFQYYEEEERQRGNFPDRFSGHQFPNYSSELNVNALLLGDSALYLCASSLGWRGGRYNEQFFGPGTRLTVLEDLKNVFPPEVAVFEPSKAEIAHTQKATLVCLATGFYPDHVELSWWVNGKEVHSGVCTDPQPLKEQPALNDSRYCLSSRLRVSATFWQNPRNHFRCQVQFYGLSENDEWTQDRAKPVTQIVSAEAWGRADCGSQSFGLLDPKLCYLLDGILFIYGVILTALFLRVKFSRSADAPAYQQGQNQLYNELNLGRREEYDVLDKRRGRDPEMGGKPQRRKNPQEGLYNELQKDKMAEAYSEIGMKGERRRGKGHDGLYQGLSTATKDTYDALHMQALPPRRAKRSGSGATNFSLLKQAGDVEENPGPTSMDWIWRILFLVGAATGAHSFEQNIDQPTEMTATEGAIVQINCTYQTSGFNGLFWYQQHAGEAPTFLSYNVLDGLEEKGRFSSFLSRSKGYSYLLLKELQMKDSASYLCASVDGNNRLAFGKGNQVVVIPNTRIQNPDPAVYQLRDSKSSDKSVCLFTDFDSQTNVSQSKDSDVYITDKCVLDMRSMDFKSNSAVAWSNKSDFACANAFNNSIIPEDTFFPSSDVPCGTQSFGLLDPKLCYLLDGILFIYGVILTALFLRVKFSRSADAPAYQQGQNQLYNELNLGRREEYDVLDKRRGRDPEMGGKPQRRKNPQEGLYNELQKDKMAEAYSEIGMKGERRRGKGHDGLYQGLSTATKDTYDALHMQALPPRRAKRSGSGVKQTLNFDLLKLAGDVESNPGPSRGHMALPVTALLLPLALLLHAARPSQFRVSPLDRTWNLGETVELKCQVLLSNPTSGCSWLFQPRGAAASPTFLLYLSQNKPKAAEGLDTQRFSGKRLGDTFVLTLSDFRRENEGYYFCSALSNSIMYFSHFVPVFLPAKPTTTPAPRPPTPAPTIASQPLSLRPEACRPAAGGAVHTRGLDFACDIYIWAPLAGTCGVLLLSLVITLYCNHRNRRRVCKCPRPVVKSGDKPSLSARYV

SEQ ID NO: 11305 - protein, 811 aa, synthetic construct
MALPVTALLLPLALLLHAARPGVTQSPTHLIKTRGQQVTLRCSPKSGHDTVSWYQQALGQGPQFIFQYYEEEERQRGNFPDRFSGHQFPNYSSELNVNALLLGDSALYLCASSLGWRGGRYNEQFFGPGTRLTVLEDLKNVFPPEVAVFEPSEAEISHTQKATLVCLATGFYPDHVELSWWVNGKEVHSGVCTDPQPLKEQPALNDSRYCLSSRLRVSATFWQNPRNHFRCQVQFYGLSENDEWTQDRAKPVTQIVSAEAWGRADCGSQSFGLLDPKLCYLLDGILFIYGVILTALFLRVKFSRSADAPAYQQGQNQLYNELNLGRREEYDVLDKRRGRDPEMGGKPQRRKNPQEGLYNELQKDKMAEAYSEIGMKGERRRGKGHDGLYQGLSTATKDTYDALHMQALPPRRAKRSGSGATNFSLLKQAGDVEENPGPTSMDWIWRILFLVGAATGAHSFEQNIDQPTEMTATEGAIVQINCTYQTSGFNGLFWYQQHAGEAPTFLSYNVLDGLEEKGRFSSFLSRSKGYSYLLLKELQMKDSASYLCASVDGNNRLAFGKGNQVVVIPNTRIQNPDPAVYQLRDSKSSDKSVCLFTDFDSQTNVSQSKDSDVYITDKCVLDMRSMDFKSNSAVAWSNKSDFACANAFNNSIIPEDTFFPSPESSCGTQSFGLLDPKLCYLLDGILFIYGVILTALFLRVKFSRSADAPAYQQGQNQLYNELNLGRREEYDVLDKRRGRDPEMGGKPQRRKNPQEGLYNELQKDKMAEAYSEIGMKGERRRGKGHDGLYQGLSTATKDTYDALHMQALPPR

SEQ ID NO: 11306 - protein, 852 aa, synthetic construct
MALPVTALLLPLALLLHAARPGVTQSPTHLIKTRGQQVTLRCSPKSGHDTVSWYQQALGQGPQFIFQYYEEEERQRGNFPDRFSGHQFPNYSSELNVNALLLGDSALYLCASSLGWRGGRYNEQFFGPGTRLTVLEQSFGLLDPKLCYLLDGILFIYGVILTALFLRVKFSRSADAPAYQQGQNQLYNELNLGRREEYDVLDKRRGRDPEMGGKPQRRKNPQEGLYNELQKDKMAEAYSEIGMKGERRRGKGHDGLYQGLSTATKDTYDALHMQALPPRRAKRSGSGATNFSLLKQAGDVEENPGPTSMDWIWRILFLVGAATGAHSFEQNIDQPTEMTATEGAIVQINCTYQTSGFNGLFWYQQHAGEAPTFLSYNVLDGLEEKGRFSSFLSRSKGYSYLLLKELQMKDSASYLCASVDGNNRLAFGKGNQVVVIPNTRQSFGLLDPKLCYLLDGILFIYGVILTALFLRVKFSRSADAPAYQQGQNQLYNELNLGRREEYDVLDKRRGRDPEMGGKPQRRKNPQEGLYNELQKDKMAEAYSEIGMKGERRRGKGHDGLYQGLSTATKDTYDALHMQALPPRRAKRSGSGVKQTLNFDLLKLAGDVESNPGPSRGHMALPVTALLLPLALLLHAARPSQFRVSPLDRTWNLGETVELKCQVLLSNPTSGCSWLFQPRGAAASPTFLLYLSQNKPKAAEGLDTQRFSGKRLGDTFVLTLSDFRRENEGYYFCSALSNSIMYFSHFVPVFLPAKPTTTPAPRPPTPAPTIASQPLSLRPEACRPAAGGAVHTRGLDFACDIYIWAPLAGTCGVLLLSLVITLYCNHRNRRRVCKCPRPVVKSGDKPSLSARYV

SEQ ID NO: 11307 - protein, 852 aa, synthetic construct
MALPVTALLLPLALLLHAARPGVTQSPTHLIKTRGQQVTLRCSPKSGHDTVSWYQQALGQGPQFIFQYYEEEERQRGNFPDRFSGHQFPNYSSELNVNALLLGDSALYLCASSLGWRGGRYNEQFFGPGTRLTVLEDLKNVFPPEVAVFEPSEAEISHTQKATLVCLATGFYPDHVELSWWVNGKEVHSGVCTDPQPLKEQPALNDSRYCLSSRLRVSATFWQNPRNHFRCQVQFYGLSENDEWTQDRAKPVTQIVSAEAWGRADCGSQSFGLLDPKLCYLLDGILFIYGVILTALFLRSKRSRLLHSDYMNMTPRRPGPTRKHYQPYAPPRDFAAYRSRVKFSRSADAPAYQQGQNQLYNELNLGRREEYDVLDKRRGRDPEMGGKPQRRKNPQEGLYNELQKDKMAEAYSEIGMKGERRRGKGHDGLYQGLSTATKDTYDALHMQALPPRRAKRSGSGATNFSLLKQAGDVEENPGPTSMDWIWRILFLVGAATGAHSFEQNIDQPTEMTATEGAIVQINCTYQTSGFNGLFWYQQHAGEAPTFLSYNVLDGLEEKGRFSSFLSRSKGYSYLLLKELQMKDSASYLCASVDGNNRLAFGKGNQVVVIPNTRIQNPDPAVYQLRDSKSSDKSVCLFTDFDSQTNVSQSKDSDVYITDKCVLDMRSMDFKSNSAVAWSNKSDFACANAFNNSIIPEDTFFPSPESSCGTQSFGLLDPKLCYLLDGILFIYGVILTALFLRVKFSRSADAPAYQQGQNQLYNELNLGRREEYDVLDKRRGRDPEMGGKPQRRKNPQEGLYNELQKDKMAEAYSEIGMKGERRRGKGHDGLYQGLSTATKDTYDALHMQALPPR

SEQ ID NO: 11308 - protein, 893 aa, synthetic construct
MALPVTALLLPLALLLHAARPGVTQSPTHLIKTRGQQVTLRCSPKSGHDTVSWYQQALGQGPQFIFQYYEEEERQRGNFPDRFSGHQFPNYSSELNVNALLLGDSALYLCASSLGWRGGRYNEQFFGPGTRLTVLEDLKNVFPPEVAVFEPSEAEISHTQKATLVCLATGFYPDHVELSWWVNGKEVHSGVCTDPQPLKEQPALNDSRYCLSSRLRVSATFWQNPRNHFRCQVQFYGLSENDEWTQDRAKPVTQIVSAEAWGRADCGSQSFGLLDPKLCYLLDGILFIYGVILTALFLRSKRSRLLHSDYMNMTPRRPGPTRKHYQPYAPPRDFAAYRSRVKFSRSADAPAYQQGQNQLYNELNLGRREEYDVLDKRRGRDPEMGGKPQRRKNPQEGLYNELQKDKMAEAYSEIGMKGERRRGKGHDGLYQGLSTATKDTYDALHMQALPPRRAKRSGSGATNFSLLKQAGDVEENPGPTSMDWIWRILFLVGAATGAHSFEQNIDQPTEMTATEGAIVQINCTYQTSGFNGLFWYQQHAGEAPTFLSYNVLDGLEEKGRFSSFLSRSKGYSYLLLKELQMKDSASYLCASVDGNNRLAFGKGNQVVVIPNTRIQNPDPAVYQLRDSKSSDKSVCLFTDFDSQTNVSQSKDSDVYITDKCVLDMRSMDFKSNSAVAWSNKSDFACANAFNNSIIPEDTFFPSPESSCGTQSFGLLDPKLCYLLDGILFIYGVILTALFLRSKRSRLLHSDYMNMTPRRPGPTRKHYQPYAPPRDFAAYRSRVKFSRSADAPAYQQGQNQLYNELNLGRREEYDVLDKRRGRDPEMGGKPQRRKNPQEGLYNELQKDKMAEAYSEIGMKGERRRGKGHDGLYQGLSTATKDTYDALHMQALPPR

SEQ ID NO: 11309 - protein, 811 aa, synthetic construct
MALPVTALLLPLALLLHAARPGVTQSPTHLIKTRGQQVTLRCSPKSGHDTVSWYQQALGQGPQFIFQYYEEEERQRGNFPDRFSGHQFPNYSSELNVNALLLGDSALYLCASSLGWRGGRYNEQFFGPGTRLTVLEDLKNVFPPEVAVFEPSEAEISHTQKATLVCLATGFYPDHVELSWWVNGKEVHSGVSTDPQPLKEQPALNDSRYCLSSRLRVSATFWQNPRNHFRCQVQFYGLSENDEWTQDRAKPVTQIVSAEAWGRADCGSQSFGLLDPKLCYLLDGILFIYGVILTALFLRVKFSRSADAPAYQQGQNQLYNELNLGRREEYDVLDKRRGRDPEMGGKPQRRKNPQEGLYNELQKDKMAEAYSEIGMKGERRRGKGHDGLYQGLSTATKDTYDALHMQALPPRRAKRSGSGATNFSLLKQAGDVEENPGPTSMDWIWRILFLVGAATGAHSFEQNIDQPTEMTATEGAIVQINCTYQTSGFNGLFWYQQHAGEAPTFLSYNVLDGLEEKGRFSSFLSRSKGYSYLLLKELQMKDSASYLCASVDGNNRLAFGKGNQVVVIPNTRIQNPDPAVYQLRDSKSSDKSVCLFTDFDSQTNVSQSKDSDVYITDKTVLDMRSMDFKSNSAVAWSNKSDFACANAFNNSIIPEDTFFPSPESSCGTQSFGLLDPKLCYLLDGILFIYGVILTALFLRVKFSRSADAPAYQQGQNQLYNELNLGRREEYDVLDKRRGRDPEMGGKPQRRKNPQEGLYNELQKDKMAEAYSEIGMKGERRRGKGHDGLYQGLSTATKDTYDALHMQALPPR

SEQ ID NO: 11310 - protein, 1055 aa, synthetic construct
MALPVTALLLPLALLLHAARPGVTQSPTHLIKTRGQQVTLRCSPKSGHDTVSWYQQALGQGPQFIFQYYEEEERQRGNFPDRFSGHQFPNYSSELNVNALLLGDSALYLCASSLGWRGGRYNEQFFGPGTRLTVLEDKQLDADVSPKPTIFLPSIAETKLQKAGTYLCLLEKFFPDVIKIHWQEKKSNTILGSQEGNTMKTNDTYMKFSWLTVPEKSLDKEHRCIVRHENNKNGVDQEIIFPPIKTDVITGSQSFGLLDPKLCYLLDGILFIYGVILTALFLRVKFSRSADAPAYQQGQNQLYNELNLGRREEYDVLDKRRGRDPEMGGKPQRRKNPQEGLYNELQKDKMAEAYSEIGMKGERRRGKGHDGLYQGLSTATKDTYDALHMQALPPRRAKRSGSGATNFSLLKQAGDVEENPGPTSMDWIWRILFLVGAATGAHSFEQNIDQPTEMTATEGAIVQINCTYQTSGFNGLFWYQQHAGEAPTFLSYNVLDGLEEKGRFSSFLSRSKGYSYLLLKELQMKDSASYLCASVDGNNRLAFGKGNQVVVIPNTRSQPHTKPSVFVMKNGTNVACLVKEFYPKDIRINLVSSKKITEFDPAIVISPSGKYNAVKLGKYEDSNSVTCSVQHDNKTVHSTDFGTQSFGLLDPKLCYLLDGILFIYGVILTALFLRVKFSRSADAPAYQQGQNQLYNELNLGRREEYDVLDKRRGRDPEMGGKPQRRKNPQEGLYNELQKDKMAEAYSEIGMKGERRRGKGHDGLYQGLSTATKDTYDALHMQALPPRRAKRSGSGVKQTLNFDLLKLAGDVESNPGPSRGHMALPVTALLLPLALLLHAARPSQFRVSPLDRTWNLGETVELKCQVLLSNPTSGCSWLFQPRGAAASPTFLLYLSQNKPKAAEGLDTQRFSGKRLGDTFVLTLSDFRRENEGYYFCSALSNSIMYFSHFVPVFLPAKPTTTPAPRPPTPAPTIASQPLSLRPEACRPAAGGAVHTRGLDFACDIYIWAPLAGTCGVLLLSLVITLYCNHRNRRRVCKCPRPVVKSGDKPSLSARYV

SEQ ID NO: 11311 - protein, 923 aa, synthetic construct
MALPVTALLLPLALLLHAARPGVTQSPTHLIKTRGQQVTLRCSPKSGHDTVSWYQQALGQGPQFIFQYYEEEERQRGNFPDRFSGHQFPNYSSELNVNALLLGDSALYLCASSLGWRGGRYNEQFFGPGTRLTVLEGQPKANPTVTLFPPSSEELQANKATLVCLISDFYPGAVTVAWKADGSPVKAGVETTKPSKQSNNKYAASSYLSLTPEQWKSHRSYSCQVTHEGSTVEKTVAPTECSTTPGERSSLPAFYPGTSGSCSGCGSLSLPLLAGLVAADAVASLLIVGAVFLCARPRRSPAQEDGKVYINMPGRGRAKRSGSGATNFSLLKQAGDVEENPGPTSMDWIWRILFLVGAATGAHSFEQNIDQPTEMTATEGAIVQINCTYQTSGFNGLFWYQQHAGEAPTFLSYNVLDGLEEKGRFSSFLSRSKGYSYLLLKELQMKDSASYLCASVDGNNRLAFGKGNQVVVIPNTRASTKGPSVFPLAPSSKSTSGGTAALGCLVKDYFPEPVTVSWNSGALTSGVHTFPAVLQSSGLYSLSSVVTVPSSSLGTQTYICNVNHKPSNTKVDKRVEPKSCTTPGERSSLPAFYPGTSGSCSGCGSLSLPLLAGLVAADAVASLLIVGAVFLCARPRRSPAQEDGKVYINMPGRGRAKRSGSGVKQTLNFDLLKLAGDVESNPGPSRGHMALPVTALLLPLALLLHAARPSQFRVSPLDRTWNLGETVELKCQVLLSNPTSGCSWLFQPRGAAASPTFLLYLSQNKPKAAEGLDTQRFSGKRLGDTFVLTLSDFRRENEGYYFCSALSNSIMYFSHFVPVFLPAKPTTTPAPRPPTPAPTIASQPLSLRPEACRPAAGGAVHTRGLDFACDIYIWAPLAGTCGVLLLSLVITLYCNHRNRRRVCKCPRPVVKSGDKPSLSARYV

SEQ ID NO: 11312 - protein, 752 aa, synthetic construct
MALPVTALLLPLALLLHAARPGVTQSPTHLIKTRGQQVTLRCSPKSGHDTVSWYQQALGQGPQFIFQYYEEEERQRGNFPDRFSGHQFPNYSSELNVNALLLGDSALYLCASSLGWRGGRYNEQFFGPGTRLTVLEGDIENTSLAPEDPTFPADTWGTYLLTTETGLQKDHALWDHTAQNLLRMGLAFLVLVALVWFLVEDWLSRKRTRERASRASTWEGRRRLNTQTLRAKRSGSGATNFSLLKQAGDVEENPGPTSMDWIWRILFLVGAATGAHSFEQNIDQPTEMTATEGAIVQINCTYQTSGFNGLFWYQQHAGEAPTFLSYNVLDGLEEKGRFSSFLSRSKGYSYLLLKELQMKDSASYLCASVDGNNRLAFGKGNQVVVIPNTRGDIENTSLAPEDPTFPADTWGTYLLTTETGLQKDHALWDHTAQNLLRMGLAFLVLVALVWFLVEDWLSRKRTRERASRASTWEGRRRLNTQTLRAKRSGSGVKQTLNFDLLKLAGDVESNPGPSRGHMALPVTALLLPLALLLHAARPSQFRVSPLDRTWNLGETVELKCQVLLSNPTSGCSWLFQPRGAAASPTFLLYLSQNKPKAAEGLDTQRFSGKRLGDTFVLTLSDFRRENEGYYFCSALSNSIMYFSHFVPVFLPAKPTTTPAPRPPTPAPTIASQPLSLRPEACRPAAGGAVHTRGLDFACDIYIWAPLAGTCGVLLLSLVITLYCNHRNRRRVCKCPRPVVKSGDKPSLSARYV

SEQ ID NO: 11313 - protein, 696 aa, synthetic construct
MALPVTALLLPLALLLHAARPGVTQSPTHLIKTRGQQVTLRCSPKSGHDTVSWYQQALGQGPQFIFQYYEEEERQRGNFPDRFSGHQFPNYSSELNVNALLLGDSALYLCASSLGWRGGRYNEQFFGPGTRLTVLEITQGLAVSTISSFFPPGYQVSFCLVMVLLFAVDTGLYFSVKTNIRSSTRDWKDHKFKWRKDPQDKRAKRSGSGATNFSLLKQAGDVEENPGPTSMDWIWRILFLVGAATGAHSFEQNIDQPTEMTATEGAIVQINCTYQTSGFNGLFWYQQHAGEAPTFLSYNVLDGLEEKGRFSSFLSRSKGYSYLLLKELQMKDSASYLCASVDGNNRLAFGKGNQVVVIPNTRITQGLAVSTISSFFPPGYQVSFCLVMVLLFAVDTGLYFSVKTNIRSSTRDWKDHKFKWRKDPQDKRAKRSGSGVKQTLNFDLLKLAGDVESNPGPSRGHMALPVTALLLPLALLLHAARPSQFRVSPLDRTWNLGETVELKCQVLLSNPTSGCSWLFQPRGAAASPTFLLYLSQNKPKAAEGLDTQRFSGKRLGDTFVLTLSDFRRENEGYYFCSALSNSIMYFSHFVPVFLPAKPTTTPAPRPPTPAPTIASQPLSLRPEACRPAAGGAVHTRGLDFACDIYIWAPLAGTCGVLLLSLVITLYCNHRNRRRVCKCPRPVVKSGDKPSLSARYV

SEQ ID NO: 11314 - protein, 789 aa, synthetic construct; identical to SEQ ID NO: 11160

SEQ ID NO: 11315 - protein, 555 aa, synthetic construct; identical to SEQ ID NO: 11161

SEQ ID NO: 11316 - protein, 939 aa, synthetic construct; identical to SEQ ID NO: 11162

SEQ ID NO: 11317 - protein, 939 aa, synthetic construct; identical to SEQ ID NO: 11162

SEQ ID NO: 11318 - protein, 1105 aa, synthetic construct; identical to SEQ ID NO: 11164

SEQ ID NO: 11319 - protein, 1158 aa, synthetic construct; identical to SEQ ID NO: 11165

SEQ ID NO: 11320 - protein, 1152 aa, synthetic construct; identical to SEQ ID NO: 11166

SEQ ID NO: 11321 - protein, 1289 aa, synthetic construct; identical to SEQ ID NO: 11167

SEQ ID NO: 11322 - protein, 1426 aa, synthetic construct; identical to SEQ ID NO: 11168

SEQ ID NO: 11323 - protein, 810 aa, synthetic construct; identical to SEQ ID NO: 11169

SEQ ID NO: 11324 - protein, 852 aa, synthetic construct; identical to SEQ ID NO: 11170

SEQ ID NO: 11325 - protein, 851 aa, synthetic construct; identical to SEQ ID NO: 11171

SEQ ID NO: 11326 - protein, 846 aa, synthetic construct; identical to SEQ ID NO: 11172

SEQ ID NO: 11327 - protein, 930 aa, synthetic construct; identical to SEQ ID NO: 11173

SEQ ID NO: 11328 - protein, 893 aa, synthetic construct; identical to SEQ ID NO: 11174

SEQ ID NO: 11329 - protein, 892 aa, synthetic construct; identical to SEQ ID NO: 11175

SEQ ID NO: 11330 - protein, 893 aa, synthetic construct; identical to SEQ ID NO: 11174

SEQ ID NO: 11331 - protein, 810 aa, synthetic construct; identical to SEQ ID NO: 11177

SEQ ID NO: 11332 - protein, 810 aa, synthetic construct; identical to SEQ ID NO: 11177

SEQ ID NO: 11333 - protein, 852 aa, synthetic construct; identical to SEQ ID NO: 11179

SEQ ID NO: 11334 - protein, 851 aa, synthetic construct; identical to SEQ ID NO: 11180

SEQ ID NO: 11335 - protein, 846 aa, synthetic construct; identical to SEQ ID NO: 11181

SEQ ID NO: 11336 - protein, 930 aa, synthetic construct; identical to SEQ ID NO: 11182

SEQ ID NO: 11337 - protein, 851 aa, synthetic construct; identical to SEQ ID NO: 11180

SEQ ID NO: 11338 - protein, 852 aa, synthetic construct; identical to SEQ ID NO: 11179

SEQ ID NO: 11339 - protein, 810 aa, synthetic construct; identical to SEQ ID NO: 11185

SEQ ID NO: 11340 - protein, 810 aa, synthetic construct; identical to SEQ ID NO: 11185

SEQ ID NO: 11341 - protein, 810 aa, synthetic construct; identical to SEQ ID NO: 11187

SEQ ID NO: 11342 - protein, 714 aa, synthetic construct; identical to SEQ ID NO: 11188

SEQ ID NO: 11343 - protein, 713 aa, synthetic construct; identical to SEQ ID NO: 11189

SEQ ID NO: 11344 - protein, 708 aa, synthetic construct; identical to SEQ ID NO: 11190

SEQ ID NO: 11345 - protein, 792 aa, synthetic construct; identical to SEQ ID NO: 11191

SEQ ID NO: 11346 - protein, 743 aa, synthetic construct; identical to SEQ ID NO: 11192

SEQ ID NO: 11347 - protein, 738 aa, synthetic construct; identical to SEQ ID NO: 11193

SEQ ID NO: 11348 - protein, 822 aa, synthetic construct; identical to SEQ ID NO: 11194

SEQ ID NO: 11349 - protein, 744 aa, synthetic construct; identical to SEQ ID NO: 11195

SEQ ID NO: 11350 - protein, 743 aa, synthetic construct; identical to SEQ ID NO: 11192

SEQ ID NO: 11351 - protein, 742 aa, synthetic construct; identical to SEQ ID NO: 11197

SEQ ID NO: 11352 - protein, 660 aa, synthetic construct; identical to SEQ ID NO: 11198

SEQ ID NO: 11353 - protein, 696 aa, synthetic construct; identical to SEQ ID NO: 11199

SEQ ID NO: 11354 - protein, 738 aa, synthetic construct; identical to SEQ ID NO: 11200

SEQ ID NO: 11355 - protein, 737 aa, synthetic construct; identical to SEQ ID NO: 11201

SEQ ID NO: 11356 - protein, 732 aa, synthetic construct; identical to SEQ ID NO: 11202

SEQ ID NO: 11357 - protein, 816 aa, synthetic construct; identical to SEQ ID NO: 11203

SEQ ID NO: 11358 - protein, 908 aa, synthetic construct; identical to SEQ ID NO: 11204

SEQ ID NO: 11359 - protein, 834 aa, synthetic construct; identical to SEQ ID NO: 11205

SEQ ID NO: 11360 - protein, 833 aa, synthetic construct; identical to SEQ ID NO: 11206

SEQ ID NO: 11361 - protein, 1079 aa, synthetic construct; identical to SEQ ID NO: 11207

SEQ ID NO: 11362 - protein, 819 aa, synthetic construct; identical to SEQ ID NO: 11208

SEQ ID NO: 11363 - protein, 810 aa, synthetic construct; identical to SEQ ID NO: 11209

SEQ ID NO: 11364 - protein, 980 aa, synthetic construct; identical to SEQ ID NO: 11210

SEQ ID NO: 11365 - protein, 744 aa, synthetic construct; identical to SEQ ID NO: 11211

SEQ ID NO: 11366 - protein, 744 aa, synthetic construct; identical to SEQ ID NO: 11211

SEQ ID NO: 11367 - protein, 735 aa, synthetic construct; identical to SEQ ID NO: 11213

SEQ ID NO: 11368 - protein, 984 aa, synthetic construct; identical to SEQ ID NO: 11214

SEQ ID NO: 11369 - protein, 1017 aa, synthetic construct; identical to SEQ ID NO: 11215

SEQ ID NO: 11370 - protein, 929 aa, synthetic construct; identical to SEQ ID NO: 11216

SEQ ID NO: 11371 - protein, 1064 aa, synthetic construct; identical to SEQ ID NO: 11217

SEQ ID NO: 11372 - protein, 1082 aa, synthetic construct; identical to SEQ ID NO: 11218

SEQ ID NO: 11373 - protein, 1063 aa, synthetic construct; identical to SEQ ID NO: 11219

SEQ ID NO: 11374 - protein, 1118 aa, synthetic construct; identical to SEQ ID NO: 11220

SEQ ID NO: 11375 - protein, 1060 aa, synthetic construct; identical to SEQ ID NO: 11221

SEQ ID NO: 11376 - protein, 1067 aa, synthetic construct; identical to SEQ ID NO: 11222

SEQ ID NO: 11377 - protein, 1062 aa, synthetic construct; identical to SEQ ID NO: 11223

SEQ ID NO: 11378 - protein, 1062 aa, synthetic construct; identical to SEQ ID NO: 11224

SEQ ID NO: 11379 - protein, 1062 aa, synthetic construct; identical to SEQ ID NO: 11225

SEQ ID NO: 11380 - protein, 1077 aa, synthetic construct; identical to SEQ ID NO: 11226

SEQ ID NO: 11381 - protein, 1077 aa, synthetic construct; identical to SEQ ID NO: 11227

SEQ ID NO: 11382 - protein, 808 aa, synthetic construct; identical to SEQ ID NO: 11228

SEQ ID NO: 11383 - protein, 849 aa, synthetic construct; identical to SEQ ID NO: 11229

SEQ ID NO: 11384 - protein, 849 aa, synthetic construct; identical to SEQ ID NO: 11230

SEQ ID NO: 11385 - protein, 890 aa, synthetic construct; identical to SEQ ID NO: 11231

SEQ ID NO: 11386 - protein, 808 aa, synthetic construct; identical to SEQ ID NO: 11232

SEQ ID NO: 11387 - protein, 1052 aa, synthetic construct; identical to SEQ ID NO: 11233

SEQ ID NO: 11388 - protein, 920 aa, synthetic construct; identical to SEQ ID NO: 11234

SEQ ID NO: 11389 - protein, 749 aa, synthetic construct; identical to SEQ ID NO: 11235

SEQ ID NO: 11390 - protein, 693 aa, synthetic construct; identical to SEQ ID NO: 11236

SEQ ID NO: 11391 - protein, 793 aa, synthetic construct; identical to SEQ ID NO: 11083

SEQ ID NO: 11392 - protein, 559 aa, synthetic construct; identical to SEQ ID NO: 11084

SEQ ID NO: 11393 - protein, 943 aa, synthetic construct; identical to SEQ ID NO: 11085

SEQ ID NO: 11394 - protein, 943 aa, synthetic construct; identical to SEQ ID NO: 11085

SEQ ID NO: 11395 - protein, 1109 aa, synthetic construct; identical to SEQ ID NO: 11087

SEQ ID NO: 11396 - protein, 1162 aa, synthetic construct; identical to SEQ ID NO: 11088

SEQ ID NO: 11397 - protein, 1156 aa, synthetic construct; identical to SEQ ID NO: 11089

SEQ ID NO: 11398 - protein, 1293 aa, synthetic construct; identical to SEQ ID NO: 11090

SEQ ID NO: 11399 - protein, 1430 aa, synthetic construct; identical to SEQ ID NO: 11091

SEQ ID NO: 11400 - protein, 814 aa, synthetic construct; identical to SEQ ID NO: 11092

SEQ ID NO: 11401 - protein, 856 aa, synthetic construct; identical to SEQ ID NO: 11093

SEQ ID NO: 11402 - protein, 855 aa, synthetic construct; identical to SEQ ID NO: 11094

SEQ ID NO: 11403 - protein, 850 aa, synthetic construct; identical to SEQ ID NO: 11095

SEQ ID NO: 11404 - protein, 934 aa, synthetic construct; identical to SEQ ID NO: 11096

SEQ ID NO: 11405 - protein, 897 aa, synthetic construct; identical to SEQ ID NO: 11097

SEQ ID NO: 11406 - protein, 896 aa, synthetic construct; identical to SEQ ID NO: 11098

SEQ ID NO: 11407 - protein, 897 aa, synthetic construct; identical to SEQ ID NO: 11097

SEQ ID NO: 11408 - protein, 814 aa, synthetic construct; identical to SEQ ID NO: 11100

SEQ ID NO: 11409 - protein, 814 aa, synthetic construct; identical to SEQ ID NO: 11100

SEQ ID NO: 11410 - protein, 856 aa, synthetic construct; identical to SEQ ID NO: 11102

SEQ ID NO: 11411 - protein, 855 aa, synthetic construct; identical to SEQ ID NO: 11103

SEQ ID NO: 11412 - protein, 850 aa, synthetic construct; identical to SEQ ID NO: 11104

SEQ ID NO: 11413 - protein, 934 aa, synthetic construct; identical to SEQ ID NO: 11105

SEQ ID NO: 11414 - protein, 855 aa, synthetic construct; identical to SEQ ID NO: 11103

SEQ ID NO: 11415 - protein, 856 aa, synthetic construct; identical to SEQ ID NO: 11102

SEQ ID NO: 11416 - protein, 814 aa, synthetic construct; identical to SEQ ID NO: 11108

SEQ ID NO: 11417 - protein, 814 aa, synthetic construct; identical to SEQ ID NO: 11108

SEQ ID NO: 11418 - protein, 814 aa, synthetic construct; identical to SEQ ID NO: 11110

SEQ ID NO: 11419 - protein, 718 aa, synthetic construct; identical to SEQ ID NO: 11111

SEQ ID NO: 11420 - protein, 717 aa, synthetic construct; identical to SEQ ID NO: 11112

SEQ ID NO: 11421 - protein, 712 aa, synthetic construct; identical to SEQ ID NO: 11113

SEQ ID NO: 11422 - protein, 796 aa, synthetic construct; identical to SEQ ID NO: 11114

SEQ ID NO: 11423 - protein, 747 aa, synthetic construct; identical to SEQ ID NO: 11115

SEQ ID NO: 11424 - protein, 742 aa, synthetic construct; identical to SEQ ID NO: 11116

SEQ ID NO: 11425 - protein, 826 aa, synthetic construct; identical to SEQ ID NO: 11117

SEQ ID NO: 11426 - protein, 748 aa, synthetic construct; identical to SEQ ID NO: 11118

SEQ ID NO: 11427 - protein, 747 aa, synthetic construct; identical to SEQ ID NO: 11115

SEQ ID NO: 11428 - protein, 746 aa, synthetic construct; identical to SEQ ID NO: 11120

SEQ ID NO: 11429 - protein, 664 aa, synthetic construct; identical to SEQ ID NO: 11121

SEQ ID NO: 11430 - protein, 700 aa, synthetic construct; identical to SEQ ID NO: 11122

SEQ ID NO: 11431 - protein, 742 aa, synthetic construct; identical to SEQ ID NO: 11123

SEQ ID NO: 11432 - protein, 741 aa, synthetic construct; identical to SEQ ID NO: 11124

SEQ ID NO: 11433 - protein, 736 aa, synthetic construct; identical to SEQ ID NO: 11125

SEQ ID NO: 11434 - protein, 820 aa, synthetic construct; identical to SEQ ID NO: 11126

SEQ ID NO: 11435 - protein, 912 aa, synthetic construct; identical to SEQ ID NO: 11127

SEQ ID NO: 11436 - protein, 838 aa, synthetic construct; identical to SEQ ID NO: 11128

SEQ ID NO: 11437 - protein, 837 aa, synthetic construct; identical to SEQ ID NO: 11129

SEQ ID NO: 11438 - protein, 1083 aa, synthetic construct; identical to SEQ ID NO: 11130

SEQ ID NO: 11439 - protein, 823 aa, synthetic construct; identical to SEQ ID NO: 11131

SEQ ID NO: 11440 - protein, 814 aa, synthetic construct; identical to SEQ ID NO: 11132

SEQ ID NO: 11441 - protein, 984 aa, synthetic construct; identical to SEQ ID NO: 11133

SEQ ID NO: 11442 - protein, 748 aa, synthetic construct; identical to SEQ ID NO: 11134

SEQ ID NO: 11443 - protein, 748 aa, synthetic construct; identical to SEQ ID NO: 11134

SEQ ID NO: 11444 - protein, 739 aa, synthetic construct; identical to SEQ ID NO: 11136

SEQ ID NO: 11445 - protein, 988 aa, synthetic construct; identical to SEQ ID NO: 11137

SEQ ID NO: 11446 - protein, 1021 aa, synthetic construct; identical to SEQ ID NO: 11138

SEQ ID NO: 11447 - protein, 933 aa, synthetic construct; identical to SEQ ID NO: 11139

SEQ ID NO: 11448 - protein, 1068 aa, synthetic construct; identical to SEQ ID NO: 11140

SEQ ID NO: 11449 - protein, 1086 aa, synthetic construct; identical to SEQ ID NO: 11141

SEQ ID NO: 11450 - protein, 1067 aa, synthetic construct; identical to SEQ ID NO: 11142

SEQ ID NO: 11451 - protein, 1122 aa, synthetic construct; identical to SEQ ID NO: 11143

SEQ ID NO: 11452 - protein, 1064 aa, synthetic construct; identical to SEQ ID NO: 11144

SEQ ID NO: 11453 - protein, 1071 aa, synthetic construct; identical to SEQ ID NO: 11145

SEQ ID NO: 11454 - protein, 1066 aa, synthetic construct; identical to SEQ ID NO: 11146

SEQ ID NO: 11455 - protein, 1066 aa, synthetic construct; identical to SEQ ID NO: 11147

SEQ ID NO: 11456 - protein, 1066 aa, synthetic construct; identical to SEQ ID NO: 11148

SEQ ID NO: 11457 - protein, 1081 aa, synthetic construct; identical to SEQ ID NO: 11149

SEQ ID NO: 11458 - protein, 1081 aa, synthetic construct; identical to SEQ ID NO: 11150

SEQ ID NO: 11459 - protein, 812 aa, synthetic construct; identical to SEQ ID NO: 11151

SEQ ID NO: 11460 - protein, 853 aa, synthetic construct; identical to SEQ ID NO: 11152

SEQ ID NO: 11461 - protein, 853 aa, synthetic construct; identical to SEQ ID NO: 11153

SEQ ID NO: 11462 - protein, 894 aa, synthetic construct; identical to SEQ ID NO: 11154

SEQ ID NO: 11463 - protein, 812 aa, synthetic construct; identical to SEQ ID NO: 11155

SEQ ID NO: 11464 - protein, 1056 aa, synthetic construct; identical to SEQ ID NO: 11156

SEQ ID NO: 11465 - protein, 924 aa, synthetic construct; identical to SEQ ID NO: 11157

SEQ ID NO: 11466 - protein, 753 aa, synthetic construct; identical to SEQ ID NO: 11158

SEQ ID NO: 11467 - protein, 697 aa, synthetic construct; identical to SEQ ID NO: 11159

SEQ ID NO: 11468 - protein, 795 aa, synthetic construct; identical to SEQ ID NO: 11006

SEQ ID NO: 11469 - protein, 561 aa, synthetic construct; identical to SEQ ID NO: 11007

SEQ ID NO: 11470 - protein, 945 aa, synthetic construct; identical to SEQ ID NO: 11008

SEQ ID NO: 11471 - protein, 945 aa, synthetic construct; identical to SEQ ID NO: 11008

SEQ ID NO: 11472 - protein, 1111 aa, synthetic construct; identical to SEQ ID NO: 11010

SEQ ID NO: 11473 - protein, 1164 aa, synthetic construct; identical to SEQ ID NO: 11011

SEQ ID NO: 11474 - protein, 1158 aa, synthetic construct; identical to SEQ ID NO: 11012

SEQ ID NO: 11475 - protein, 1295 aa, synthetic construct; identical to SEQ ID NO: 11013

SEQ ID NO: 11476 - protein, 1432 aa, synthetic construct; identical to SEQ ID NO: 11014

SEQ ID NO: 11477 - protein, 816 aa, synthetic construct; identical to SEQ ID NO: 11015

SEQ ID NO: 11478 - protein, 858 aa, synthetic construct; identical to SEQ ID NO: 11016

SEQ ID NO: 11479 - protein, 857 aa, synthetic construct; identical to SEQ ID NO: 11017

SEQ ID NO: 11480 - protein, 852 aa, synthetic construct; identical to SEQ ID NO: 11018

SEQ ID NO: 11481 - protein, 936 aa, synthetic construct; identical to SEQ ID NO: 11019

SEQ ID NO: 11482 - protein, 899 aa, synthetic construct; identical to SEQ ID NO: 11020

SEQ ID NO: 11483 - protein, 898 aa, synthetic construct; identical to SEQ ID NO: 11021

SEQ ID NO: 11484 - protein, 899 aa, synthetic construct; identical to SEQ ID NO: 11020

SEQ ID NO: 11485 - protein, 816 aa, synthetic construct; identical to SEQ ID NO: 11023

SEQ ID NO: 11486 - protein, 816 aa, synthetic construct; identical to SEQ ID NO: 11023

SEQ ID NO: 11487 - protein, 858 aa, synthetic construct; identical to SEQ ID NO: 11025

SEQ ID NO: 11488 - protein, 857 aa, synthetic construct; identical to SEQ ID NO: 11026

SEQ ID NO: 11489 - protein, 852 aa, synthetic construct; identical to SEQ ID NO: 11027

SEQ ID NO: 11490 - protein, 936 aa, synthetic construct; identical to SEQ ID NO: 11028

SEQ ID NO: 11491 - protein, 857 aa, synthetic construct; identical to SEQ ID NO: 11026

SEQ ID NO: 11492 - protein, 858 aa, synthetic construct; identical to SEQ ID NO: 11025

SEQ ID NO: 11493 - protein, 816 aa, synthetic construct; identical to SEQ ID NO: 11031

SEQ ID NO: 11494 - protein, 816 aa, synthetic construct; identical to SEQ ID NO: 11031

SEQ ID NO: 11495 - protein, 816 aa, synthetic construct; identical to SEQ ID NO: 11033

SEQ ID NO: 11496 - protein, 720 aa, synthetic construct; identical to SEQ ID NO: 11034

SEQ ID NO: 11497 - protein, 719 aa, synthetic construct; identical to SEQ ID NO: 11035

SEQ ID NO: 11498 - protein, 714 aa, synthetic construct; identical to SEQ ID NO: 11036

SEQ ID NO: 11499 - protein, 798 aa, synthetic construct; identical to SEQ ID NO: 11037

SEQ ID NO: 11500 - protein, 749 aa, synthetic construct; identical to SEQ ID NO: 11038

SEQ ID NO: 11501 - protein, 744 aa, synthetic construct; identical to SEQ ID NO: 11039

SEQ ID NO: 11502 - protein, 828 aa, synthetic construct; identical to SEQ ID NO: 11040

SEQ ID NO: 11503 - protein, 750 aa, synthetic construct; identical to SEQ ID NO: 11041

SEQ ID NO: 11504 - protein, 749 aa, synthetic construct; identical to SEQ ID NO: 11038

SEQ ID NO: 11505 - protein, 748 aa, synthetic construct; identical to SEQ ID NO: 11043

SEQ ID NO: 11506 - protein, 666 aa, synthetic construct; identical to SEQ ID NO: 11044

SEQ ID NO: 11507 - protein, 702 aa, synthetic construct; identical to SEQ ID NO: 11045

SEQ ID NO: 11508 - protein, 744 aa, synthetic construct; identical to SEQ ID NO: 11046

SEQ ID NO: 11509 - protein, 743 aa, synthetic construct; identical to SEQ ID NO: 11047

SEQ ID NO: 11510 - protein, 738 aa, synthetic construct; identical to SEQ ID NO: 11048

SEQ ID NO: 11511 - protein, 822 aa, synthetic construct; identical to SEQ ID NO: 11049

SEQ ID NO: 11512 - protein, 914 aa, synthetic construct; identical to SEQ ID NO: 11050

SEQ ID NO: 11513 - protein, 840 aa, synthetic construct; identical to SEQ ID NO: 11051

SEQ ID NO: 11514 - protein, 839 aa, synthetic construct; identical to SEQ ID NO: 11052

SEQ ID NO: 11515 - protein, 1085 aa, synthetic construct; identical to SEQ ID NO: 11053

SEQ ID NO: 11516 - protein, 825 aa, synthetic construct; identical to SEQ ID NO: 11054

SEQ ID NO: 11517 - protein, 816 aa, synthetic construct; identical to SEQ ID NO: 11055

SEQ ID NO: 11518 - protein, 986 aa, synthetic construct; identical to SEQ ID NO: 11056

SEQ ID NO: 11519 - protein, 750 aa, synthetic construct; identical to SEQ ID NO: 11057

SEQ ID NO: 11520 - protein, 750 aa, synthetic construct; identical to SEQ ID NO: 11057

SEQ ID NO: 11521 - protein, 741 aa, synthetic construct; identical to SEQ ID NO: 11059

SEQ ID NO: 11522 - protein, 990 aa, synthetic construct; identical to SEQ ID NO: 11060

SEQ ID NO: 11523 - protein, 1023 aa, synthetic construct; identical to SEQ ID NO: 11061

SEQ ID NO: 11524 - protein, 935 aa, synthetic construct; identical to SEQ ID NO: 11062

SEQ ID NO: 11525 - protein, 1070 aa, synthetic construct; identical to SEQ ID NO: 11063

SEQ ID NO: 11526 - protein, 1088 aa, synthetic construct; identical to SEQ ID NO: 11064

SEQ ID NO: 11527 - protein, 1069 aa, synthetic construct; identical to SEQ ID NO: 11065

SEQ ID NO: 11528 - protein, 1124 aa, synthetic construct; identical to SEQ ID NO: 11066

SEQ ID NO: 11529 - protein, 1066 aa, synthetic construct; identical to SEQ ID NO: 11067

SEQ ID NO: 11530 - protein, 1073 aa, synthetic construct; identical to SEQ ID NO: 11068

SEQ ID NO: 11531 - protein, 1068 aa, synthetic construct; identical to SEQ ID NO: 11069

SEQ ID NO: 11532 - protein, 1068 aa, synthetic construct; identical to SEQ ID NO: 11070

SEQ ID NO: 11533 - protein, 1068 aa, synthetic construct; identical to SEQ ID NO: 11071

SEQ ID NO: 11534 - protein, 1083 aa, synthetic construct; identical to SEQ ID NO: 11072

SEQ ID NO: 11535 - protein, 1083 aa, synthetic construct; identical to SEQ ID NO: 11073

SEQ ID NO: 11536 - protein, 814 aa, synthetic construct; identical to SEQ ID NO: 11074

SEQ ID NO: 11537 - protein, 855 aa, synthetic construct; identical to SEQ ID NO: 11075

SEQ ID NO: 11538 - protein, 855 aa, synthetic construct; identical to SEQ ID NO: 11076

SEQ ID NO: 11539 - protein, 896 aa, synthetic construct; identical to SEQ ID NO: 11077

SEQ ID NO: 11540 - protein, 814 aa, synthetic construct; identical to SEQ ID NO: 11078

SEQ ID NO: 11541 - protein, 1058 aa, synthetic construct; identical to SEQ ID NO: 11079

SEQ ID NO: 11542 - protein, 926 aa, synthetic construct; identical to SEQ ID NO: 11080

SEQ ID NO: 11543 - protein, 755 aa, synthetic construct; identical to SEQ ID NO: 11081

SEQ ID NO: 11544 - protein, 699 aa, synthetic construct; identical to SEQ ID NO: 11082

SEQ ID NO: 11545 - protein, 1060 aa, synthetic construct
MALPVTALLLPLALLLHAARPEFNAGVTQTPKFQVLKTGQSMTLQCAQDMNHEYMSWYRQDPGMGLRLIHYSVAIQTTDQGEVPNGYNVSRSTIEDFPLRLLSAAPSQTSVYFCASSYLGNTGELFFGEGSRLTVLEDLKNVFPPEVAVFEPSEAEISHTQKATLVCLATGFYPDHVELSWWVNGKEVHSGVSTDPQPLKEQPALNDSRYCLSSRLRVSATFWQNPRNHFRCQVQFYGLSENDEWTQDRAKPVTQIVSAEAWGRADCGSQSFGLLDPKLCYLLDGILFIYGVILTALFLRVKFSRSADAPAYQQGQNQLYNELNLGRREEYDVLDKRRGRDPEMGGKPQRRKNPQEGLYNELQKDKMAEAYSEIGMKGERRRGKGHDGLYQGLSTATKDTYDALHMQALPPRRAKRSGSGATNFSLLKQAGDVEENPGPTSMDWIWRILFLVGAATGAHSFEQEVTQIPAALSVPEGENLVLNCSFTDSAIYNLQWFRQDPGKGLTSLLLIQSSQREQTSGRLNASLDKSSGRSTLYIAASQPGDSATYLCAVRPTSGGSYIPTFGRGTSLIVHPYTRIQNPDPAVYQLRDSKSSDKSVCLFTDFDSQTNVSQSKDSDVYITDKTVLDMRSMDFKSNSAVAWSNKSDFACANAFNNSIIPEDTFFPSPESSCGTQSFGLLDPKLCYLLDGILFIYGVILTALFLRVKFSRSADAPAYQQGQNQLYNELNLGRREEYDVLDKRRGRDPEMGGKPQRRKNPQEGLYNELQKDKMAEAYSEIGMKGERRRGKGHDGLYQGLSTATKDTYDALHMQALPPRRAKRSGSGVKQTLNFDLLKLAGDVESNPGPSSTMRPRLWLLLAAQLTVLHGNSVLQQTPAYIKVQTNKMVMLSCEAKISLSNMRIYWLRQRQAPSSDSHHEFLALWDSAKGTIHGEEVEQEKIAVFRDASRFILNLTSVKPEDSGIYFCMIVGSPELTFGKGTQLSVVDFLPTTAQPTKKSTLKKRVCRLPRPETQKGPLCSPITLGLLVAGVLVLLVSLGVAIHLCCRRRRARLRFMKQFYK

SEQ ID NO: 11546 - protein, 7 aa, synthetic construct
GGGGGGG

SEQ ID NO: 11547 - protein, 7 aa, synthetic construct
GGGGGGG

SEQ ID NO: 11548 - protein, 7 aa, synthetic construct
GGGGGGG

SEQ ID NO: 11549 - protein, 7 aa, synthetic construct
GGGGGGG

SEQ ID NO: 11550 - protein, 7 aa, synthetic construct
GGGGGGG

SEQ ID NO: 11551 - protein, 1030 aa, synthetic construct
MALPVTALLLPLALLLHAARPDIQMTQSPSSLSASVGDRVTITCKASDHINNWLAWYQQKPGQAPKLLIYGATTLETGVPSRFSGSGSGTDYTLTISSLQPEDFATYYCQQSWNTPWTFGQGTKLEIKRGQPKANPTVTLFPPSSEELQANKATLVCLISDFYPGAVTVAWKADGSPVKAGVETTKPSKQSNNKYAASSYLSLTPEQWKSHRSYSCQVTHEGSTVEKTVAPTECSGSQSFGLLDPKLCYLLDGILFIYGVILTALFLRVKFSRSADAPAYQQGQNQLYNELNLGRREEYDVLDKRRGRDPEMGGKPRRKNPQEGLYNELQKDKMAEAYSEIGMKGERRRGKGHDGLYQGLSTATKDTYDALHMQALPPRRAKRSGSGATNFSLLKQAGDVEENPGPTSMDWIWRILFLVGAATGAHSFEQVQLQQPGAELVKPGASVKMSCKASGYAFSSYWINWMKQKPGQGLEWIGQIYPGDGDTNYNGKFKGRATLTADTSSSTAYMQLSSLTSEDSAVYFCARSITTVVGCAMDYWGQGTSVTVSSASTKGPSVFPLAPSSKSTSGGTAALGCLVKDYFPEPVTVSWNSGALTSGVHTFPAVLQSSGLYSLSSVVTVPSSSLGTQTYICNVNHKPSNTKVDKRVEPKSCGTQSFGLLDPKLCYLLDGILFIYGVILTALFLRVKFSRSADAPAYQQGQNQLYNELNLGRREEYDVLDKRRGRDPEMGGKPRRKNPQEGLYNELQKDKMAEAYSEIGMKGERRRGKGHDGLYQGLSTATKDTYDALHMQALPPRRAKRSGSGVKQTLNFDLLKLAGDVESNPGPSRGHMTEYKPTVRLATRDDVPRAVRTLAAAFADYPATRHTVDPDRHIERVTELQELFLTRVGLDIGKVWVADDGAAVAVWTTPESVEAGAVFAEIGPRMAELSGSRLAAQQQMEGLLAPHRPKEPAWFLATVGVSPDHQGKGLGSAVVLPGVEAAERAGVPAFLETSAPRNLPFYERLGFTVTADVEVPEGPRTWCMTRKPGA

SEQ ID NO: 11552 - protein, 816 aa, synthetic construct
MALPVTALLLPLALLLHAARPDIQMTQSPSSLSASVGDRVTITCKASDHINNWLAWYQQKPGQAPKLLIYGATTLETGVPSRFSGSGSGTDYTLTISSLQPEDFATYYCQQSWNTPWTFGQGTKLEIKRLEDLKNVFPPEVAVFEPSEAEISHTQKATLVCLATGFYPDHVELSWWVNGKEVHSGVSTDPQPLKEQPALNDSRYCLSSRLRVSATFWQNPRNHFRCQVQFYGLSENDEWTQDRAKPVTQIVSAEAWGRADCGSQSFGLLDPKLCYLLDGILFIYGVILTALFLRVKFSRSADAPAYQQGQNQLYNELNLGRREEYDVLDKRRGRDPEMGGKPRRKNPQEGLYNELQKDKMAEAYSEIGMKGERRRGKGHDGLYQGLSTATKDTYDALHMQALPPRRAKRSGSGATNFSLLKQAGDVEENPGPTSMDWIWRILFLVGAATGAHSFEQVQLQQPGAELVKPGASVKMSCKASGYAFSSYWINWMKQKPGQGLEWIGQIYPGDGDTNYNGKFKGRATLTADTSSSTAYMQLSSLTSEDSAVYFCARSITTVVGCAMDYWGQGTSVTVSSTRIQNPDPAVYQLRDSKSSDKSVCLFTDFDSQTNVSQSKDSDVYITDKTVLDMRSMDFKSNSAVAWSNKSDFACANAFNNSIIPEDTFFPSPESSCGTQSFGLLDPKLCYLLDGILFIYGVILTALFLRVKFSRSADAPAYQQGQNQLYNELNLGRREEYDVLDKRRGRDPEMGGKPRRKNPQEGLYNELQKDKMAEAYSEIGMKGERRRGKGHDGLYQGLSTATKDTYDALHMQALPPR

SEQ ID NO: 11553 - protein, 816 aa, synthetic construct
MALPVTALLLPLALLLHAARPDIQMTQSPSSLSASVGDRVTITCKASDHINNWLAWYQQKPGQAPKLLIYGATTLETGVPSRFSGSGSGTDYTLTISSLQPEDFATYYCQQSWNTPWTFGQGTKLEIKRLEDLKNVFPPEVAVFEPSKAEIAHTQKATLVCLATGFYPDHVELSWWVNGKEVHSGVCTDPQPLKEQPALNDSRYCLSSRLRVSATFWQNPRNHFRCQVQFYGLSENDEWTQDRAKPVTQIVSAEAWGRADCGSQSFGLLDPKLCYLLDGILFIYGVILTALFLRVKFSRSADAPAYQQGQNQLYNELNLGRREEYDVLDKRRGRDPEMGGKPRRKNPQEGLYNELQKDKMAEAYSEIGMKGERRRGKGHDGLYQGLSTATKDTYDALHMQALPPRRAKRSGSGATNFSLLKQAGDVEENPGPTSMDWIWRILFLVGAATGAHSFEQVQLQQPGAELVKPGASVKMSCKASGYAFSSYWINWMKQKPGQGLEWIGQIYPGDGDTNYNGKFKGRATLTADTSSSTAYMQLSSLTSEDSAVYFCARSITTVVGCAMDYWGQGTSVTVSSTRIQNPDPAVYQLRDSKSSDKSVCLFTDFDSQTNVSQSKDSDVYITDKCVLDMRSMDFKSNSAVAWSNKSDFACANAFNNSIIPEDTFFPSSDVPCGTQSFGLLDPKLCYLLDGILFIYGVILTALFLRVKFSRSADAPAYQQGQNQLYNELNLGRREEYDVLDKRRGRDPEMGGKPRRKNPQEGLYNELQKDKMAEAYSEIGMKGERRRGKGHDGLYQGLSTATKDTYDALHMQALPPR

SEQ ID NO: 11554 - protein, 887 aa, synthetic construct
MALPVTALLLPLALLLHAARPDIQMTQSPSSLSASVGDRVTITCKASDHINNWLAWYQQKPGQAPKLLIYGATTLETGVPSRFSGSGSGTDYTLTISSLQPEDFATYYCQQSWNTPWTFGQGTKLEIKRLEGKPIPNPLLGLDSTGSGEDLKNVFPPEVAVFEPSEAEISHTQKATLVCLATGFYPDHVELSWWVNGKEVHSGVSTDPQPLKEQPALNDSRYCLSSRLRVSATFWQNPRNHFRCQVQFYGLSENDEWTQDRAKPVTQIVSAEAWGRADCGSQSFGLLDPKLCYLLDGILFIYGVILTALFLRVKFSRSADAPAYQQGQNQLYNELNLGRREEYDVLDKRRGRDPEMGGKPRRKNPQEGLYNELQKDKMAEAYSEIGMKGERRRGKGHDGLYQGLSTATKDTYDALHMQALPPRRAKRSGSGATNFSLLKQAGDVEENPGPTSMDWIWRILFLVGAATGAHSFEQVQLQQPGAELVKPGASVKMSCKASGYAFSSYWINWMKQKPGQGLEWIGQIYPGDGDTNYNGKFKGRATLTADTSSSTAYMQLSSLTSEDSAVYFCARSITTVVGCAMDYWGQGTSVTVSSTREQKLISEEDGSGIQNPDPAVYQLRDSKSSDKSVCLFTDFDSQTNVSQSKDSDVYITDKTVLDMRSMDFKSNSAVAWSNKSDFACANAFNNSIIPEDTFFPSPESSCGTQSFGLLDPKLCYLLDGILFIYGVILTALFLRSKRSRLLHSDYMNMTPRRPGPTRKHYQPYAPPRDFAAYRSRVKFSRSADAPAYQQGQNQLYNELNLGRREEYDVLDKRRGRDPEMGGKPRRKNPQEGLYNELQKDKMAEAYSEIGMKGERRRGKGHDGLYQGLSTATKDTYDALHMQALPPR

SEQ ID NO: 11555 - protein, 928 aa, synthetic construct
MALPVTALLLPLALLLHAARPDIQMTQSPSSLSASVGDRVTITCKASDHINNWLAWYQQKPGQAPKLLIYGATTLETGVPSRFSGSGSGTDYTLTISSLQPEDFATYYCQQSWNTPWTFGQGTKLEIKRLEGKPIPNPLLGLDSTGSGEDLKNVFPPEVAVFEPSEAEISHTQKATLVCLATGFYPDHVELSWWVNGKEVHSGVSTDPQPLKEQPALNDSRYCLSSRLRVSATFWQNPRNHFRCQVQFYGLSENDEWTQDRAKPVTQIVSAEAWGRADCGSQSFGLLDPKLCYLLDGILFIYGVILTALFLRSKRSRLLHSDYMNMTPRRPGPTRKHYQPYAPPRDFAAYRSRVKFSRSADAPAYQQGQNQLYNELNLGRREEYDVLDKRRGRDPEMGGKPRRKNPQEGLYNELQKDKMAEAYSEIGMKGERRRGKGHDGLYQGLSTATKDTYDALHMQALPPRRAKRSGSGATNFSLLKQAGDVEENPGPTSMDWIWRILFLVGAATGAHSFEQVQLQQPGAELVKPGASVKMSCKASGYAFSSYWINWMKQKPGQGLEWIGQIYPGDGDTNYNGKFKGRATLTADTSSSTAYMQLSSLTSEDSAVYFCARSITTVVGCAMDYWGQGTSVTVSSTREQKLISEEDGSGIQNPDPAVYQLRDSKSSDKSVCLFTDFDSQTNVSQSKDSDVYITDKTVLDMRSMDFKSNSAVAWSNKSDFACANAFNNSIIPEDTFFPSPESSCGTQSFGLLDPKLCYLLDGILFIYGVILTALFLRSKRSRLLHSDYMNMTPRRPGPTRKHYQPYAPPRDFAAYRSRVKFSRSADAPAYQQGQNQLYNELNLGRREEYDVLDKRRGRDPEMGGKPRRKNPQEGLYNELQKDKMAEAYSEIGMKGERRRGKGHDGLYQGLSTATKDTYDALHMQALPPR

SEQ ID NO: 11556 - protein, 889 aa, synthetic construct
MALPVTALLLPLALLLHAARPDIQMTQSPSSLSASVGDRVTITCKASDHINNWLAWYQQKPGQAPKLLIYGATTLETGVPSRFSGSGSGTDYTLTISSLQPEDFATYYCQQSWNTPWTFGQGTKLEIKRLEGKPIPNPLLGLDSTGSGEDLKNVFPPEVAVFEPSEAEISHTQKATLVCLATGFYPDHVELSWWVNGKEVHSGVSTDPQPLKEQPALNDSRYCLSSRLRVSATFWQNPRNHFRCQVQFYGLSENDEWTQDRAKPVTQIVSAEAWGRADCGSQSFGLLDPKLCYLLDGILFIYGVILTALFLRVKFSRSADAPAYQQGQNQLYNELNLGRREEYDVLDKRRGRDPEMGGKPRRKNPQEGLYNELQKDKMAEAYSEIGMKGERRRGKGHDGLYQGLSTATKDTYDALHMQALPPRRAKRSGSGATNFSLLKQAGDVEENPGPTSMDWIWRILFLVGAATGAHSFEQVQLQQPGAELVKPGASVKMSCKASGYAFSSYWINWMKQKPGQGLEWIGQIYPGDGDTNYNGKFKGRATLTADTSSSTAYMQLSSLTSEDSAVYFCARSITTVVGCAMDYWGQGTSVTVSSTREQKLISEEDLGSGIQNPDPAVYQLRDSKSSDKSVCLFTDFDSQTNVSQSKDSDVYITDKTVLDMRSMDFKSNSAVAWSNKSDFACANAFNNSIIPEDTFFPSPESSCGTQSFGLLDPKLCYLLDGILFIYGVILTALFLKRGRKKLLYIFKQPFMRPVQTTQEEDGCSCRFPEEEEGGCELRVKFSRSADAPAYQQGQNQLYNELNLGRREEYDVLDKRRGRDPEMGGKPRRKNPQEGLYNELQKDKMAEAYSEIGMKGERRRGKGHDGLYQGLSTATKDTYDALHMQALPPR

SEQ ID NO: 11557 - protein, 931 aa, synthetic construct
MALPVTALLLPLALLLHAARPDIQMTQSPSSLSASVGDRVTITCKASDHINNWLAWYQQKPGQAPKLLIYGATTLETGVPSRFSGSGSGTDYTLTISSLQPEDFATYYCQQSWNTPWTFGQGTKLEIKRLEGKPIPNPLLGLDSTGSGEDLKNVFPPEVAVFEPSEAEISHTQKATLVCLATGFYPDHVELSWWVNGKEVHSGVSTDPQPLKEQPALNDSRYCLSSRLRVSATFWQNPRNHFRCQVQFYGLSENDEWTQDRAKPVTQIVSAEAWGRADCGSQSFGLLDPKLCYLLDGILFIYGVILTALFLKRGRKKLLYIFKQPFMRPVQTTQEEDGCSCRFPEEEEGGCELRVKFSRSADAPAYQQGQNQLYNELNLGRREEYDVLDKRRGRDPEMGGKPRRKNPQEGLYNELQKDKMAEAYSEIGMKGERRRGKGHDGLYQGLSTATKDTYDALHMQALPPRRAKRSGSGATNFSLLKQAGDVEENPGPTSMDWIWRILFLVGAATGAHSFEQVQLQQPGAELVKPGASVKMSCKASGYAFSSYWINWMKQKPGQGLEWIGQIYPGDGDTNYNGKFKGRATLTADTSSSTAYMQLSSLTSEDSAVYFCARSITTVVGCAMDYWGQGTSVTVSSTREQKLISEEDLGSGIQNPDPAVYQLRDSKSSDKSVCLFTDFDSQTNVSQSKDSDVYITDKTVLDMRSMDFKSNSAVAWSNKSDFACANAFNNSIIPEDTFFPSPESSCGTQSFGLLDPKLCYLLDGILFIYGVILTALFLKRGRKKLLYIFKQPFMRPVQTTQEEDGCSCRFPEEEEGGCELRVKFSRSADAPAYQQGQNQLYNELNLGRREEYDVLDKRRGRDPEMGGKPRRKNPQEGLYNELQKDKMAEAYSEIGMKGERRRGKGHDGLYQGLSTATKDTYDALHMQALPPR

SEQ ID NO: 11558 - protein, 821 aa, synthetic construct
MALPVTALLLPLALLLHAARPDIQMTQSPSSLSASVGDRVTITCKASDHINNWLAWYQQKPGQAPKLLIYGATTLETGVPSRFSGSGSGTDYTLTISSLQPEDFATYYCQQSWNTPWTFGQGTKLEIKRLEQSFGLLDPKLCYLLDGILFIYGVILTALFLRVKFSRSADAPAYQQGQNQLYNELNLGRREEYDVLDKRRGRDPEMGGKPRRKNPQEGLYNELQKDKMAEAYSEIGMKGERRRGKGHDGLYQGLSTATKDTYDALHMQALPPRRAKRSGSGATNFSLLKQAGDVEENPGPTSMDWIWRILFLVGAATGAHSFEQVQLQQPGAELVKPGASVKMSCKASGYAFSSYWINWMKQKPGQGLEWIGQIYPGDGDTNYNGKFKGRATLTADTSSSTAYMQLSSLTSEDSAVYFCARSITTVVGCAMDYWGQGTSVTVSSTRQSFGLLDPKLCYLLDGILFIYGVILTALFLRVKFSRSADAPAYQQGQNQLYNELNLGRREEYDVLDKRRGRDPEMGGKPRRKNPQEGLYNELQKDKMAEAYSEIGMKGERRRGKGHDGLYQGLSTATKDTYDALHMQALPPRRAKRSGSGVKQTLNFDLLKLAGDVESNPGPSRGHMTEYKPTVRLATRDDVPRAVRTLAAAFADYPATRHTVDPDRHIERVTELQELFLTRVGLDIGKVWVADDGAAVAVWTTPESVEAGAVFAEIGPRMAELSGSRLAAQQQMEGLLAPHRPKEPAWFLATVGVSPDHQGKGLGSAVVLPGVEAAERAGVPAFLETSAPRNLPFYERLGFTVTADVEVPEGPRTWCMTRKPGA

SEQ ID NO: 11559 - protein, 982 aa, synthetic construct
MALPVTALLLPLALLLHAARPDIQMTQSPSSLSASVGDRVTITCKASDHINNWLAWYQQKPGQAPKLLIYGATTLETGVPSRFSGSGSGTDYTLTISSLQPEDFATYYCQQSWNTPWTFGQGTKLEIKRLEGQPKANPTVTLFPPSSEELQANKATLVCLISDFYPGAVTVAWKADGSPVKAGVETTKPSKQSNNKYAASSYLSLTPEQWKSHRSYSCQVTHEGSTVEKTVAPTECSGSQSFGLLDPKLCYLLDGILFIYGVILTALFLRVKFSRSADAPAYQQGQNQLYNELNLGRREEYDVLDKRRGRDPEMGGKPRRKNPQEGLYNELQKDKMAEAYSEIGMKGERRRGKGHDGLYQGLSTATKDTYDALHMQALPPRRAKRSGSGATNFSLLKQAGDVEENPGPTSMDWIWRILFLVGAATGAHSFEQVQLQQPGAELVKPGASVKMSCKASGYAFSSYWINWMKQKPGQGLEWIGQIYPGDGDTNYNGKFKGRATLTADTSSSTAYMQLSSLTSEDSAVYFCARSITTVVGCAMDYWGQGTSVTVSSTRASTKGPSVFPLAPSSKSTSGGTAALGCLVKDYFPEPVTVSWNSGALTSGVHTFPAVLQSSGLYSLSSVVTVPSSSLGTQTYICNVNHKPSNTKVDKRVEPKSCGTGDIENTSLAPEDPTFPADTWGTYLLTTETGLQKDHALWDHTAQNLLRMGLAFLVLVALVWFLVEDWLSRKRTRERASRASTWEGRRRLNTQTLRAKRSGSGATNFSLLKQAGDVEENPGPSRGHMTEYKPTVRLATRDDVPRAVRTLAAAFADYPATRHTVDPDRHIERVTELQELFLTRVGLDIGKVWVADDGAAVAVWTTPESVEAGAVFAEIGPRMAELSGSRLAAQQQMEGLLAPHRPKEPAWFLATVGVSPDHQGKGLGSAVVLPGVEAAERAGVPAFLETSAPRNLPFYERLGFTVTADVEVPEGPRTWCMTRKPGA

SEQ ID NO: 11560 - protein, 1048 aa, synthetic construct
MALPVTALLLPLALLLHAARPDIQMTQSPSSLSASVGDRVTITCKASDHINNWLAWYQQKPGQAPKLLIYGATTLETGVPSRFSGSGSGTDYTLTISSLQPEDFATYYCQQSWNTPWTFGQGTKLEIKRLEGQPKANPTVTLFPPSSEELQANKATLVCLISDFYPGAVTVAWKADGSPVKAGVETTKPSKQSNNKYAASSYLSLTPEQWKSHRSYSCQVTHEGSTVEKTVAPTECSGSQSFGLLDPKLCYLLDGILFIYGVILTALFLRVKFSRSADAPAYQQGQNQLYNELNLGRREEYDVLDKRRGRDPEMGGKPRRKNPQEGLYNELQKDKMAEAYSEIGMKGERRRGKGHDGLYQGLSTATKDTYDALHMQALPPRRAKRSGSGATNFSLLKQAGDVEENPGPTSMDWIWRILFLVGAATGAHSFEQVQLQQPGAELVKPGASVKMSCKASGYAFSSYWINWMKQKPGQGLEWIGQIYPGDGDTNYNGKFKGRATLTADTSSSTAYMQLSSLTSEDSAVYFCARSITTVVGCAMDYWGQGTSVTVSSTRASTKGPSVFPLAPSSKSTSGGTAALGCLVKDYFPEPVTVSWNSGALTSGVHTFPAVLQSSGLYSLSSVVTVPSSSLGTQTYICNVNHKPSNTKVDKRVEPKSCGTKSVRFYLVVSPASASTQTSWTPRDLVSSQTQTQSCVPPTAGARQAPESPSTIPVPSQPQNSTLRPGPAAPIALVPVFCGLLVAKSLVLSALLVWWGDIWWKTMMELRSLDTQKATCHLQQVTDLPWTSVSSPVEREILYHTVARTKISDDDDEHTLRAKRSGSGVKQTLNFDLLKLAGDVESNPGPSRGHMTEYKPTVRLATRDDVPRAVRTLAAAFADYPATRHTVDPDRHIERVTELQELFLTRVGLDIGKVWVADDGAAVAVWTTPESVEAGAVFAEIGPRMAELSGSRLAAQQQMEGLLAPHRPKEPAWFLATVGVSPDHQGKGLGSAVVLPGVEAAERAGVPAFLETSAPRNLPFYERLGFTVTADVEVPEGPRTWCMTRKPGA

SEQ ID NO: 11561 - protein, 968 aa, synthetic construct
MALPVTALLLPLALLLHAARPDIQMTQSPSSLSASVGDRVTITCKASDHINNWLAWYQQKPGQAPKLLIYGATTLETGVPSRFSGSGSGTDYTLTISSLQPEDFATYYCQQSWNTPWTFGQGTKLEIKRLEGQPKANPTVTLFPPSSEELQANKATLVCLISDFYPGAVTVAWKADGSPVKAGVETTKPSKQSNNKYAASSYLSLTPEQWKSHRSYSCQVTHEGSTVEKTVAPTECSGSQSFGLLDPKLCYLLDGILFIYGVILTALFLRVKFSRSADAPAYQQGQNQLYNELNLGRREEYDVLDKRRGRDPEMGGKPRRKNPQEGLYNELQKDKMAEAYSEIGMKGERRRGKGHDGLYQGLSTATKDTYDALHMQALPPRRAKRSGSGATNFSLLKQAGDVEENPGPTSMDWIWRILFLVGAATGAHSFEQVQLQQPGAELVKPGASVKMSCKASGYAFSSYWINWMKQKPGQGLEWIGQIYPGDGDTNYNGKFKGRATLTADTSSSTAYMQLSSLTSEDSAVYFCARSITTVVGCAMDYWGQGTSVTVSSTRASTKGPSVFPLAPSSKSTSGGTAALGCLVKDYFPEPVTVSWNSGALTSGVHTFPAVLQSSGLYSLSSVVTVPSSSLGTQTYICNVNHKPSNTKVDKRVEPKSCGTVVEKEHPQLGAGTVLLLRAGFYAVSFLSVAVGSTVYYQGKCLTWKGPRRQLPAVVPAPLPPPCGSSAHLLPPVPGGRAKRSGSGVKQTLNFDLLKLAGDVESNPGPSRGHMTEYKPTVRLATRDDVPRAVRTLAAAFADYPATRHTVDPDRHIERVTELQELFLTRVGLDIGKVWVADDGAAVAVWTTPESVEAGAVFAEIGPRMAELSGSRLAAQQQMEGLLAPHRPKEPAWFLATVGVSPDHQGKGLGSAVVLPGVEAAERAGVPAFLETSAPRNLPFYERLGFTVTADVEVPEGPRTWCMTRKPGA

SEQ ID NO: 11562 - protein, 997 aa, synthetic construct
MALPVTALLLPLALLLHAARPDIQMTQSPSSLSASVGDRVTITCKASDHINNWLAWYQQKPGQAPKLLIYGATTLETGVPSRFSGSGSGTDYTLTISSLQPEDFATYYCQQSWNTPWTFGQGTKLEIKRLEDLKNVFPPEVAVFEPSEAEISHTQKATLVCLATGFYPDHVELSWWVNGKEVHSGVSTDPQPLKEQPALNDSRYCLSSRLRVSATFWQNPRNHFRCQVQFYGLSENDEWTQDRAKPVTQIVSAEAWGRADCGSQSFGLLDPKLCYLLDGILFIYGVILTALFLRVKFSRSADAPAYQQGQNQLYNELNLGRREEYDVLDKRRGRDPEMGGKPRRKNPQEGLYNELQKDKMAEAYSEIGMKGERRRGKGHDGLYQGLSTATKDTYDALHMQALPPRRAKRSGSGATNFSLLKQAGDVEENPGPTSMDWIWRILFLVGAATGAHSFEQVQLQQPGAELVKPGASVKMSCKASGYAFSSYWINWMKQKPGQGLEWIGQIYPGDGDTNYNGKFKGRATLTADTSSSTAYMQLSSLTSEDSAVYFCARSITTVVGCAMDYWGQGTSVTVSSTRIQNPDPAVYQLRDSKSSDKSVCLFTDFDSQTNVSQSKDSDVYITDKTVLDMRSMDFKSNSAVAWSNKSDFACANAFNNSIIPEDTFFPSPESSCGTGDIENTSLAPEDPTFPADTWGTYLLTTETGLQKDHALWDHTAQNLLRMGLAFLVLVALVWFLVEDWLSRKRTRERASRASTWEGRRRLNTQTLRAKRSGSGATNFSLLKQAGDVEENPGPSRGHMTEYKPTVRLATRDDVPRAVRTLAAAFADYPATRHTVDPDRHIERVTELQELFLTRVGLDIGKVWVADDGAAVAVWTTPESVEAGAVFAEIGPRMAELSGSRLAAQQQMEGLLAPHRPKEPAWFLATVGVSPDHQGKGLGSAVVLPGVEAAERAGVPAFLETSAPRNLPFYERLGFTVTADVEVPEGPRTWCMTRKPGA

SEQ ID NO: 11563 - protein, 1063 aa, synthetic construct
MALPVTALLLPLALLLHAARPDIQMTQSPSSLSASVGDRVTITCKASDHINNWLAWYQQKPGQAPKLLIYGATTLETGVPSRFSGSGSGTDYTLTISSLQPEDFATYYCQQSWNTPWTFGQGTKLEIKRLEDLKNVFPPEVAVFEPSEAEISHTQKATLVCLATGFYPDHVELSWWVNGKEVHSGVSTDPQPLKEQPALNDSRYCLSSRLRVSATFWQNPRNHFRCQVQFYGLSENDEWTQDRAKPVTQIVSAEAWGRADCGSQSFGLLDPKLCYLLDGILFIYGVILTALFLRVKFSRSADAPAYQQGQNQLYNELNLGRREEYDVLDKRRGRDPEMGGKPRRKNPQEGLYNELQKDKMAEAYSEIGMKGERRRGKGHDGLYQGLSTATKDTYDALHMQALPPRRAKRSGSGATNFSLLKQAGDVEENPGPTSMDWIWRILFLVGAATGAHSFEQVQLQQPGAELVKPGASVKMSCKASGYAFSSYWINWMKQKPGQGLEWIGQIYPGDGDTNYNGKFKGRATLTADTSSSTAYMQLSSLTSEDSAVYFCARSITTVVGCAMDYWGQGTSVTVSSTRIQNPDPAVYQLRDSKSSDKSVCLFTDFDSQTNVSQSKDSDVYITDKTVLDMRSMDFKSNSAVAWSNKSDFACANAFNNSIIPEDTFFPSPESSCGTKSVRFYLVVSPASASTQTSWTPRDLVSSQTQTQSCVPPTAGARQAPESPSTIPVPSQPQNSTLRPGPAAPIALVPVFCGLLVAKSLVLSALLVWWGDIWWKTMMELRSLDTQKATCHLQQVTDLPWTSVSSPVEREILYHTVARTKISDDDDEHTLRAKRSGSGVKQTLNFDLLKLAGDVESNPGPSRGHMTEYKPTVRLATRDDVPRAVRTLAAAFADYPATRHTVDPDRHIERVTELQELFLTRVGLDIGKVWVADDGAAVAVWTTPESVEAGAVFAEIGPRMAELSGSRLAAQQQMEGLLAPHRPKEPAWFLATVGVSPDHQGKGLGSAVVLPGVEAAERAGVPAFLETSAPRNLPFYERLGFTVTADVEVPEGPRTWCMTRKPGA

SEQ ID NO: 11564 - protein, 983 aa, synthetic construct
MALPVTALLLPLALLLHAARPDIQMTQSPSSLSASVGDRVTITCKASDHINNWLAWYQQKPGQAPKLLIYGATTLETGVPSRFSGSGSGTDYTLTISSLQPEDFATYYCQQSWNTPWTFGQGTKLEIKRLEDLKNVFPPEVAVFEPSEAEISHTQKATLVCLATGFYPDHVELSWWVNGKEVHSGVSTDPQPLKEQPALNDSRYCLSSRLRVSATFWQNPRNHFRCQVQFYGLSENDEWTQDRAKPVTQIVSAEAWGRADCGSQSFGLLDPKLCYLLDGILFIYGVILTALFLRVKFSRSADAPAYQQGQNQLYNELNLGRREEYDVLDKRRGRDPEMGGKPRRKNPQEGLYNELQKDKMAEAYSEIGMKGERRRGKGHDGLYQGLSTATKDTYDALHMQALPPRRAKRSGSGATNFSLLKQAGDVEENPGPTSMDWIWRILFLVGAATGAHSFEQVQLQQPGAELVKPGASVKMSCKASGYAFSSYWINWMKQKPGQGLEWIGQIYPGDGDTNYNGKFKGRATLTADTSSSTAYMQLSSLTSEDSAVYFCARSITTVVGCAMDYWGQGTSVTVSSTRIQNPDPAVYQLRDSKSSDKSVCLFTDFDSQTNVSQSKDSDVYITDKTVLDMRSMDFKSNSAVAWSNKSDFACANAFNNSIIPEDTFFPSPESSCGTVVEKEHPQLGAGTVLLLRAGFYAVSFLSVAVGSTVYYQGKCLTWKGPRRQLPAVVPAPLPPPCGSSAHLLPPVPGGRAKRSGSGVKQTLNFDLLKLAGDVESNPGPSRGHMTEYKPTVRLATRDDVPRAVRTLAAAFADYPATRHTVDPDRHIERVTELQELFLTRVGLDIGKVWVADDGAAVAVWTTPESVEAGAVFAEIGPRMAELSGSRLAAQQQMEGLLAPHRPKEPAWFLATVGVSPDHQGKGLGSAVVLPGVEAAERAGVPAFLETSAPRNLPFYERLGFTVTADVEVPEGPRTWCMTRKPGA

SEQ ID NO: 11565 - protein, 954 aa, synthetic construct
MALPVTALLLPLALLLHAARPDIQMTQSPSSLSASVGDRVTITCKASDHINNWLAWYQQKPGQAPKLLIYGATTLETGVPSRFSGSGSGTDYTLTISSLQPEDFATYYCQQSWNTPWTFGQGTKLEIKRLEGQPKANPTVTLFPPSSEELQANKATLVCLISDFYPGAVTVAWKADGSPVKAGVETTKPSKQSNNKYAASSYLSLTPEQWKSHRSYSCQVTHEGSTVEKTVAPTECSGSQSFGLLDPKLCYLLDGILFIYGVILTALFLRVKFSRSADAPAYQQGQNQLYNELNLGRREEYDVLDKRRGRDPEMGGKPRRKNPQEGLYNELQKDKMAEAYSEIGMKGERRRGKGHDGLYQGLSTATKDTYDALHMQALPPRRAKRSGSGATNFSLLKQAGDVEENPGPTSMDWIWRILFLVGAATGAHSFEQVQLQQPGAELVKPGASVKMSCKASGYAFSSYWINWMKQKPGQGLEWIGQIYPGDGDTNYNGKFKGRATLTADTSSSTAYMQLSSLTSEDSAVYFCARSITTVVGCAMDYWGQGTSVTVSSTRASTKGPSVFPLAPSSKSTSGGTAALGCLVKDYFPEPVTVSWNSGALTSGVHTFPAVLQSSGLYSLSSVVTVPSSSLGTQTYICNVNHKPSNTKVDKRVEPKSCGTITQGLAVSTISSFFPPGYQVSFCLVMVLLFAVDTGLYFSVKTNIRSSTRDWKDHKFKWRKDPQDKRAKRSGSGATNFSLLKQAGDVEENPGPSRGHMTEYKPTVRLATRDDVPRAVRTLAAAFADYPATRHTVDPDRHIERVTELQELFLTRVGLDIGKVWVADDGAAVAVWTTPESVEAGAVFAEIGPRMAELSGSRLAAQQQMEGLLAPHRPKEPAWFLATVGVSPDHQGKGLGSAVVLPGVEAAERAGVPAFLETSAPRNLPFYERLGFTVTADVEVPEGPRTWCMTRKPGA

SEQ ID NO: 11566 - protein, 969 aa, synthetic construct
MALPVTALLLPLALLLHAARPDIQMTQSPSSLSASVGDRVTITCKASDHINNWLAWYQQKPGQAPKLLIYGATTLETGVPSRFSGSGSGTDYTLTISSLQPEDFATYYCQQSWNTPWTFGQGTKLEIKRLEDLKNVFPPEVAVFEPSEAEISHTQKATLVCLATGFYPDHVELSWWVNGKEVHSGVSTDPQPLKEQPALNDSRYCLSSRLRVSATFWQNPRNHFRCQVQFYGLSENDEWTQDRAKPVTQIVSAEAWGRADCGSQSFGLLDPKLCYLLDGILFIYGVILTALFLRVKFSRSADAPAYQQGQNQLYNELNLGRREEYDVLDKRRGRDPEMGGKPRRKNPQEGLYNELQKDKMAEAYSEIGMKGERRRGKGHDGLYQGLSTATKDTYDALHMQALPPRRAKRSGSGATNFSLLKQAGDVEENPGPTSMDWIWRILFLVGAATGAHSFEQVQLQQPGAELVKPGASVKMSCKASGYAFSSYWINWMKQKPGQGLEWIGQIYPGDGDTNYNGKFKGRATLTADTSSSTAYMQLSSLTSEDSAVYFCARSITTVVGCAMDYWGQGTSVTVSSTRIQNPDPAVYQLRDSKSSDKSVCLFTDFDSQTNVSQSKDSDVYITDKTVLDMRSMDFKSNSAVAWSNKSDFACANAFNNSIIPEDTFFPSPESSCGTITQGLAVSTISSFFPPGYQVSFCLVMVLLFAVDTGLYFSVKTNIRSSTRDWKDHKFKWRKDPQDKRAKRSGSGATNFSLLKQAGDVEENPGPSRGHMTEYKPTVRLATRDDVPRAVRTLAAAFADYPATRHTVDPDRHIERVTELQELFLTRVGLDIGKVWVADDGAAVAVWTTPESVEAGAVFAEIGPRMAELSGSRLAAQQQMEGLLAPHRPKEPAWFLATVGVSPDHQGKGLGSAVVLPGVEAAERAGVPAFLETSAPRNLPFYERLGFTVTADVEVPEGPRTWCMTRKPGA

SEQ ID NO: 11567 - protein, 794 aa, synthetic construct
MALPVTALLLPLALLLHAARPNAGVTQTPKFQVLKTGQSMTLQCAQDMNHEYMSWYRQDPGMGLRLIHYSVAIQTTDQGEVPNGYNVSRSTIEDFPLRLLSAAPSQTSVYFCASSYLGNTGELFFGEGSRLTVGQPKANPTVTLFPPSSEELQANKATLVCLISDFYPGAVTVAWKADGSPVKAGVETTKPSKQSNNKYAASSYLSLTPEQWKSHRSYSCQVTHEGSTVEKTVAPTECSGSQSFGLLDPKLCYLLDGILFIYGVILTALFLRVKFSRSADAPAYQQGQNQLYNELNLGRREEYDVLDKRRGRDPEMGGKPRRKNPQEGLYNELQKDKMAEAYSEIGMKGERRRGKGHDGLYQGLSTATKDTYDALHMQALPPRRAKRSGSGATNFSLLKQAGDVEENPGPTSMDWIWRILFLVGAATGAHSFEQEVTQIPAALSVPEGENLVLNCSFTDSAIYNLQWFRQDPGKGLTSLLLIQSSQREQTSGRLNASLDKSSGRSTLYIAASQPGDSATYLCAVRPTSGGSYIPTFGRGTSLIVHPYASTKGPSVFPLAPSSKSTSGGTAALGCLVKDYFPEPVTVSWNSGALTSGVHTFPAVLQSSGLYSLSSVVTVPSSSLGTQTYICNVNHKPSNTKVDKRVEPKSCGTQSFGLLDPKLCYLLDGILFIYGVILTALFLRVKFSRSADAPAYQQGQNQLYNELNLGRREEYDVLDKRRGRDPEMGGKPRRKNPQEGLYNELQKDKMAEAYSEIGMKGERRRGKGHDGLYQGLSTATKDTYDALHMQALPPR

SEQ ID NO: 11568 - protein, 560 aa, synthetic construct
MALPVTALLLPLALLLHAARPNAGVTQTPKFQVLKTGQSMTLQCAQDMNHEYMSWYRQDPGMGLRLIHYSVAIQTTDQGEVPNGYNVSRSTIEDFPLRLLSAAPSQTSVYFCASSYLGNTGELFFGEGSRLTVLEQSFGLLDPKLCYLLDGILFIYGVILTALFLRVKFSRSADAPAYQQGQNQLYNELNLGRREEYDVLDKRRGRDPEMGGKPRRKNPQEGLYNELQKDKMAEAYSEIGMKGERRRGKGHDGLYQGLSTATKDTYDALHMQALPPRRAKRSGSGATNFSLLKQAGDVEENPGPTSMDWIWRILFLVGAATGAHSFEQEVTQIPAALSVPEGENLVLNCSFTDSAIYNLQWFRQDPGKGLTSLLLIQSSQREQTSGRLNASLDKSSGRSTLYIAASQPGDSATYLCAVRPTSGGSYIPTFGRGTSLIVHPYTRQSFGLLDPKLCYLLDGILFIYGVILTALFLRVKFSRSADAPAYQQGQNQLYNELNLGRREEYDVLDKRRGRDPEMGGKPRRKNPQEGLYNELQKDKMAEAYSEIGMKGERRRGKGHD

SEQ ID NO: 11569 - protein, 944 aa, synthetic construct
MALPVTALLLPLALLLHAARPNAGVTQTPKFQVLKTGQSMTLQCAQDMNHEYMSWYRQDPGMGLRLIHYSVAIQTTDQGEVPNGYNVSRSTIEDFPLRLLSAAPSQTSVYFCASSYLGNTGELFFGEGSRLTVLETTPGERSSLPAFYPGTSGSCSGCGSLSLPLLAGLVAADAVASLLIVGAVFLCARPRRSPAQEDGKVYINMPGRGSTSRVKFSRSADAPAYQQGQNQLYNELNLGRREEYDVLDKRRGRDPEMGGKPRRKNPQEGLYNELQKDKMAEAYSEIGMKGERRRGKGHDGLYQGLSTATKDTYDALHMQALPPRRAKRSGSGATNFSLLKQAGDVEENPGPMDWIWRILFLVGAATGAHSFEQEVTQIPAALSVPEGENLVLNCSFTDSAIYNLQWFRQDPGKGLTSLLLIQSSQREQTSGRLNASLDKSSGRSTLYIAASQPGDSATYLCAVRPTSGGSYIPTFGRGTSLIVHPYTRTTPGERSSLPAFYPGTSGSCSGCGSLSLPLLAGLVAADAVASLLIVGAVFLCARPRRSPAQEDGKVYINMPGRGSSRRVKFSRSADAPAYQQGQNQLYNELNLGRREEYDVLDKRRGRDPEMGGKPRRKNPQEGLYNELQKDKMAEAYSEIGMKGERRRGKGHDGLYQGLSTATKDTYDALHMQALPPRRAKRSGSGVKQTLNFDLLKLAGDVESNPGPGHMALPVTALLLPLALLLHAARPSQFRVSPLDRTWNLGETVELKCQVLLSNPTSGCSWLFQPRGAAASPTFLLYLSQNKPKAAEGLDTQRFSGKRLGDTFVLTLSDFRRENEGYYFCSALSNSIMYFSHFVPVFLPAKPTTTPAPRPPTPAPTIASQPLSLRPEACRPAAGGAVHTRGLDFACDIYIWAPLAGTCGVLLLSLVITLYCNHRNRRRVCKCPRPVVKSGDKPSLSARYV

SEQ ID NO: 11570 - protein, 944 aa, synthetic construct; identical to SEQ ID NO: 11569

SEQ ID NO: 11571 - protein, 1110 aa, synthetic construct
MALPVTALLLPLALLLHAARPNAGVTQTPKFQVLKTGQSMTLQCAQDMNHEYMSWYRQDPGMGLRLIHYSVAIQTTDQGEVPNGYNVSRSTIEDFPLRLLSAAPSQTSVYFCASSYLGNTGELFFGEGSRLTVLEGQPKANPTVTLFPPSSEELQANKATLVCLISDFYPGAVTVAWKADGSPVKAGVETTKPSKQSNNKYAASSYLSLTPEQWKSHRSYSCQVTHEGSTVEKTVAPTECSGSTTPGERSSLPAFYPGTSGSCSGCGSLSLPLLAGLVAADAVASLLIVGAVFLCARPRRSPAQEDGKVYINMPGRGSTSRVKFSRSADAPAYQQGQNQLYNELNLGRREEYDVLDKRRGRDPEMGGKPRRKNPQEGLYNELQKDKMAEAYSEIGMKGERRRGKGHDGLYQGLSTATKDTYDALHMQALPPRRAKRSGSGATNFSLLKQAGDVEENPGPMDWIWRILFLVGAATGAHSFEQEVTQIPAALSVPEGENLVLNCSFTDSAIYNLQWFRQDPGKGLTSLLLIQSSQREQTSGRLNASLDKSSGRSTLYIAASQPGDSATYLCAVRPTSGGSYIPTFGRGTSLIVHPYTRASTKGPSVFPLAPSSKSTSGGTAALGCLVKDYFPEPVTVSWNSGALTSGVHTFPAVLQSSGLYSLSSVVTVPSSSLGTQTYICNVNHKPSNTKVDKRVEPKSCGTTTPGERSSLPAFYPGTSGSCSGCGSLSLPLLAGLVAADAVASLLIVGAVFLCARPRRSPAQEDGKVYINMPGRGSSRRVKFSRSADAPAYQQGQNQLYNELNLGRREEYDVLDKRRGRDPEMGGKPRRKNPQEGLYNELQKDKMAEAYSEIGMKGERRRGKGHDGLYQGLSTATKDTYDALHMQALPPRRAKRSGSGVKQTLNFDLLKLAGDVESNPGPGHMATYEVLCEVARKLGTDDREVVLFLLNVFIPQPTLAQLIGALRALKEEGRLTFPLLAECLFRAGRRDLLRDLLHLDPRFLERHLAGTMSYFSPYQLTVLHVDGELCARDIRSLIFLSKDTIGSRSTPQTFLHWVYCMENLDLLGPTDVDALMSMLRSLSRVDLQRQVQTLMGLHLSGPSHSQHYRHTP

SEQ ID NO: 11572 - protein, 1163 aa, synthetic construct
MALPVTALLLPLALLLHAARPNAGVTQTPKFQVLKTGQSMTLQCAQDMNHEYMSWYRQDPGMGLRLIHYSVAIQTTDQGEVPNGYNVSRSTIEDFPLRLLSAAPSQTSVYFCASSYLGNTGELFFGEGSRLTVLEGQPKANPTVTLFPPSSEELQANKATLVCLISDFYPGAVTVAWKADGSPVKAGVETTKPSKQSNNKYAASSYLSLTPEQWKSHRSYSCQVTHEGSTVEKTVAPTECSGSTTPGERSSLPAFYPGTSGSCSGCGSLSLPLLAGLVAADAVASLLIVGAVFLCARPRRSPAQEDGKVYINMPGRGSTSRVKFSRSADAPAYQQGQNQLYNELNLGRREEYDVLDKRRGRDPEMGGKPRRKNPQEGLYNELQKDKMAEAYSEIGMKGERRRGKGHDGLYQGLSTATKDTYDALHMQALPPRRAKRSGSGATNFSLLKQAGDVEENPGPMDWIWRILFLVGAATGAHSFEQEVTQIPAALSVPEGENLVLNCSFTDSAIYNLQWFRQDPGKGLTSLLLIQSSQREQTSGRLNASLDKSSGRSTLYIAASQPGDSATYLCAVRPTSGGSYIPTFGRGTSLIVHPYTRASTKGPSVFPLAPSSKSTSGGTAALGCLVKDYFPEPVTVSWNSGALTSGVHTFPAVLQSSGLYSLSSVVTVPSSSLGTQTYICNVNHKPSNTKVDKRVEPKSCGTTTPGERSSLPAFYPGTSGSCSGCGSLSLPLLAGLVAADAVASLLIVGAVFLCARPRRSPAQEDGKVYINMPGRGSSRRVKFSRSADAPAYQQGQNQLYNELNLGRREEYDVLDKRRGRDPEMGGKPRRKNPQEGLYNELQKDKMAEAYSEIGMKGERRRGKGHDGLYQGLSTATKDTYDALHMQALPPRRAKRSGSGVKQTLNFDLLKLAGDVESNPGPGHMSDSKEVPSLPFLRHLLEELDSHEDSLLLFLCHDAAPGCTTVTQALCSLSQQRKLTLAALVEMLYVLQRMDLLKSRFGLSKEGAEQLLGTSFLTRYRKLMVCVGEELDSSELRALRLFACNLNPSLSTALSESSRFVELVLALENVGLVSPSSVSVLADMLRTLRRLDLCQQLVEYEQQEQARYRYCYAASPSLPVRTLRRGHGASEHEQLCMPVQESSDSPELLRTPVQESSSDSPEQTT

SEQ ID NO: 11573 - protein, 1157 aa, synthetic construct
MALPVTALLLPLALLLHAARPNAGVTQTPKFQVLKTGQSMTLQCAQDMNHEYMSWYRQDPGMGLRLIHYSVAIQTTDQGEVPNGYNVSRSTIEDFPLRLLSAAPSQTSVYFCASSYLGNTGELFFGEGSRLTVLEGQPKANPTVTLFPPSSEELQANKATLVCLISDFYPGAVTVAWKADGSPVKAGVETTKPSKQSNNKYAASSYLSLTPEQWKSHRSYSCQVTHEGSTVEKTVAPTECSGSTTPGERSSLPAFYPGTSGSCSGCGSLSLPLLAGLVAADAVASLLIVGAVFLCARPRRSPAQEDGKVYINMPGRGSTSRVKFSRSADAPAYQQGQNQLYNELNLGRREEYDVLDKRRGRDPEMGGKPRRKNPQEGLYNELQKDKMAEAYSEIGMKGERRRGKGHDGLYQGLSTATKDTYDALHMQALPPRRAKRSGSGATNFSLLKQAGDVEENPGPMDWIWRILFLVGAATGAHSFEQEVTQIPAALSVPEGENLVLNCSFTDSAIYNLQWFRQDPGKGLTSLLLIQSSQREQTSGRLNASLDKSSGRSTLYIAASQPGDSATYLCAVRPTSGGSYIPTFGRGTSLIVHPYTRASTKGPSVFPLAPSSKSTSGGTAALGCLVKDYFPEPVTVSWNSGALTSGVHTFPAVLQSSGLYSLSSVVTVPSSSLGTQTYICNVNHKPSNTKVDKRVEPKSCGTTTPGERSSLPAFYPGTSGSCSGCGSLSLPLLAGLVAADAVASLLIVGAVFLCARPRRSPAQEDGKVYINMPGRGSSRRVKFSRSADAPAYQQGQNQLYNELNLGRREEYDVLDKRRGRDPEMGGKPRRKNPQEGLYNELQKDKMAEAYSEIGMKGERRRGKGHDGLYQGLSTATKDTYDALHMQALPPRRAKRSGSGVKQTLNFDLLKLAGDVESNPGPGHMALPVTALLLPLALLLHAARPSQFRVSPLDRTWNLGETVELKCQVLLSNPTSGCSWLFQPRGAAASPTFLLYLSQNKPKAAEGLDTQRFSGKRLGDTFVLTLSDFRRENEGYYFCSALSNSIMYFSHFVPVFLPAKPTTTPAPRPPTPAPTIASQPLSLRPEACRPAAGGAVHTRGLDFACDIYIWAPLAGTCGVLLLSLVITLYCNHRNRRRVCKCPRPVVKSGDKPSLSARYV

SEQ ID NO: 11574 - protein, 1294 aa, synthetic construct
MALPVTALLLPLALLLHAARPEVQLVESGGGLVQAGGSLRLSCAASGRTFSMGWFRQAPGKEREFVAAITYSGGSPYYADSVKGRFTISRDNAKNTVYLQMNSLKPEDTAVYYCAANPTYGSDWNAENWGQGTQVTVSSGTGGGGSGGGGSGGGGSEFNAGVTQTPKFQVLKTGQSMTLQCAQDMNHEYMSWYRQDPGMGLRLIHYSVAIQTTDQGEVPNGYNVSRSTIEDFPLRLLSAAPSQTSVYFCASSYLGNTGELFFGEGSRLTVLEGQPKANPTVTLFPPSSEELQANKATLVCLISDFYPGAVTVAWKADGSPVKAGVETTKPSKQSNNKYAASSYLSLTPEQWKSHRSYSCQVTHEGSTVEKTVAPTECSGSTTPGERSSLPAFYPGTSGSCSGCGSLSLPLLAGLVAADAVASLLIVGAVFLCARPRRSPAQEDGKVYINMPGRGSTSRVKFSRSADAPAYQQGQNQLYNELNLGRREEYDVLDKRRGRDPEMGGKPRRKNPQEGLYNELQKDKMAEAYSEIGMKGERRRGKGHDGLYQGLSTATKDTYDALHMQALPPRRAKRSGSGATNFSLLKQAGDVEENPGPMDWIWRILFLVGAATGAHSFEQEVTQIPAALSVPEGENLVLNCSFTDSAIYNLQWFRQDPGKGLTSLLLIQSSQREQTSGRLNASLDKSSGRSTLYIAASQPGDSATYLCAVRPTSGGSYIPTFGRGTSLIVHPYTRASTKGPSVFPLAPSSKSTSGGTAALGCLVKDYFPEPVTVSWNSGALTSGVHTFPAVLQSSGLYSLSSVVTVPSSSLGTQTYICNVNHKPSNTKVDKRVEPKSCGTTTPGERSSLPAFYPGTSGSCSGCGSLSLPLLAGLVAADAVASLLIVGAVFLCARPRRSPAQEDGKVYINMPGRGSSRRVKFSRSADAPAYQQGQNQLYNELNLGRREEYDVLDKRRGRDPEMGGKPRRKNPQEGLYNELQKDKMAEAYSEIGMKGERRRGKGHDGLYQGLSTATKDTYDALHMQALPPRRAKRSGSGVKQTLNFDLLKLAGDVESNPGPGHMALPVTALLLPLALLLHAARPSQFRVSPLDRTWNLGETVELKCQVLLSNPTSGCSWLFQPRGAAASPTFLLYLSQNKPKAAEGLDTQRFSGKRLGDTFVLTLSDFRRENEGYYFCSALSNSIMYFSHFVPVFLPAKPTTTPAPRPPTPAPTIASQPLSLRPEACRPAAGGAVHTRGLDFACDIYIWAPLAGTCGVLLLSLVITLYCNHRNRRRVCKCPRPVVKSGDKPSLSARYV

SEQ ID NO: 11575 - protein, 1431 aa, synthetic construct
MALPVTALLLPLALLLHAARPEVQLVESGGGLVQAGGSLRLSCAASGRTFSMGWFRQAPGKEREFVAAITYSGGSPYYADSVKGRFTISRDNAKNTVYLQMNSLKPEDTAVYYCAANPTYGSDWNAENWGQGTQVTVSSGTGGGGSGGGGSGGGGSEFNAGVTQTPKFQVLKTGQSMTLQCAQDMNHEYMSWYRQDPGMGLRLIHYSVAIQTTDQGEVPNGYNVSRSTIEDFPLRLLSAAPSQTSVYFCASSYLGNTGELFFGEGSRLTVLEGQPKANPTVTLFPPSSEELQANKATLVCLISDFYPGAVTVAWKADGSPVKAGVETTKPSKQSNNKYAASSYLSLTPEQWKSHRSYSCQVTHEGSTVEKTVAPTECSGSTTPGERSSLPAFYPGTSGSCSGCGSLSLPLLAGLVAADAVASLLIVGAVFLCARPRRSPAQEDGKVYINMPGRGSTSRVKFSRSADAPAYQQGQNQLYNELNLGRREEYDVLDKRRGRDPEMGGKPRRKNPQEGLYNELQKDKMAEAYSEIGMKGERRRGKGHDGLYQGLSTATKDTYDALHMQALPPRRAKRSGSGATNFSLLKQAGDVEENPGPMDWIWRILFLVGAATGAHSGPEVQLVESGGGLVQAGGSLRLSCAASGRTFTMGWFRQAPGKEREFVAAISLSPTLAYYADSVKGRFTISRDNAKNTVVLQMNSLKPEDTALYYCAADRKSVMSIRPDYWGQGTQVTVSSGSGGGGSGGGGSGGGGSFEQEVTQIPAALSVPEGENLVLNCSFTDSAIYNLQWFRQDPGKGLTSLLLIQSSQREQTSGRLNASLDKSSGRSTLYIAASQPGDSATYLCAVRPTSGGSYIPTFGRGTSLIVHPYTRASTKGPSVFPLAPSSKSTSGGTAALGCLVKDYFPEPVTVSWNSGALTSGVHTFPAVLQSSGLYSLSSVVTVPSSSLGTQTYICNVNHKPSNTKVDKRVEPKSCGTTTPGERSSLPAFYPGTSGSCSGCGSLSLPLLAGLVAADAVASLLIVGAVFLCARPRRSPAQEDGKVYINMPGRGSSRRVKFSRSADAPAYQQGQNQLYNELNLGRREEYDVLDKRRGRDPEMGGKPRRKNPQEGLYNELQKDKMAEAYSEIGMKGERRRGKGHDGLYQGLSTATKDTYDALHMQALPPRRAKRSGSGVKQTLNFDLLKLAGDVESNPGPGHMALPVTALLLPLALLLHAARPSQFRVSPLDRTWNLGETVELKCQVLLSNPTSGCSWLFQPRGAAASPTFLLYLSQNKPKAAEGLDTQRFSGKRLGDTFVLTLSDFRRENEGYYFCSALSNSIMYFSHFVPVFLPAKPTTTPAPRPPTPAPTIASQPLSLRPEACRPAAGGAVHTRGLDFACDIYIWAPLAGTCGVLLLSLVITLYCNHRNRRRVCKCPRPVVKSGDKPSLSARYV

SEQ ID NO: 11576 - protein, 815 aa, synthetic construct
MALPVTALLLPLALLLHAARPEFNAGVTQTPKFQVLKTGQSMTLQCAQDMNHEYMSWYRQDPGMGLRLIHYSVAIQTTDQGEVPNGYNVSRSTIEDFPLRLLSAAPSQTSVYFCASSYLGNTGELFFGEGSRLTVLEDLKNVFPPEVAVFEPSEAEISHTQKATLVCLATGFYPDHVELSWWVNGKEVHSGVSTDPQPLKEQPALNDSRYCLSSRLRVSATFWQNPRNHFRCQVQFYGLSENDEWTQDRAKPVTQIVSAEAWGRADCGSQSFGLLDPKLCYLLDGILFIYGVILTALFLRVKFSRSADAPAYQQGQNQLYNELNLGRREEYDVLDKRRGRDPEMGGKPRRKNPQEGLYNELQKDKMAEAYSEIGMKGERRRGKGHDGLYQGLSTATKDTYDALHMQALPPRRAKRSGSGATNFSLLKQAGDVEENPGPTSMDWIWRILFLVGAATGAHSFEQEVTQIPAALSVPEGENLVLNCSFTDSAIYNLQWFRQDPGKGLTSLLLIQSSQREQTSGRLNASLDKSSGRSTLYIAASQPGDSATYLCAVRPTSGGSYIPTFGRGTSLIVHPYTRIQNPDPAVYQLRDSKSSDKSVCLFTDFDSQTNVSQSKDSDVYITDKTVLDMRSMDFKSNSAVAWSNKSDFACANAFNNSIIPEDTFFPSPESSCGTQSFGLLDPKLCYLLDGILFIYGVILTALFLRVKFSRSADAPAYQQGQNQLYNELNLGRREEYDVLDKRRGRDPEMGGKPRRKNPQEGLYNELQKDKMAEAYSEIGMKGERRRGKGHDGLYQGLSTATKDTYDALHMQALPPR

SEQ ID NO: 11577 - protein, 857 aa, synthetic construct
MALPVTALLLPLALLLHAARPEFNAGVTQTPKFQVLKTGQSMTLQCAQDMNHEYMSWYRQDPGMGLRLIHYSVAIQTTDQGEVPNGYNVSRSTIEDFPLRLLSAAPSQTSVYFCASSYLGNTGELFFGEGSRLTVLEDLKNVFPPEVAVFEPSEAEISHTQKATLVCLATGFYPDHVELSWWVNGKEVHSGVSTDPQPLKEQPALNDSRYCLSSRLRVSATFWQNPRNHFRCQVQFYGLSENDEWTQDRAKPVTQIVSAEAWGRADCGSQSFGLLDPKLCYLLDGILFIYGVILTALFLRVKFSRSADAPAYQQGQNQLYNELNLGRREEYDVLDKRRGRDPEMGGKPRRKNPQEGLYNELQKDKMAEAYSEIGMKGERRRGKGHDGLYQGLSTATKDTYDALHMQALPPRRAKRSGSGATNFSLLKQAGDVEENPGPTSMDWIWRILFLVGAATGAHSFEQEVTQIPAALSVPEGENLVLNCSFTDSAIYNLQWFRQDPGKGLTSLLLIQSSQREQTSGRLNASLDKSSGRSTLYIAASQPGDSATYLCAVRPTSGGSYIPTFGRGTSLIVHPYTRIQNPDPAVYQLRDSKSSDKSVCLFTDFDSQTNVSQSKDSDVYITDKTVLDMRSMDFKSNSAVAWSNKSDFACANAFNNSIIPEDTFFPSPESSCGTQSFGLLDPKLCYLLDGILFIYGVILTALFLKRGRKKLLYIFKQPFMRPVQTTQEEDGCSCRFPEEEEGGCELRVKFSRSADAPAYQQGQNQLYNELNLGRREEYDVLDKRRGRDPEMGGKPRRKNPQEGLYNELQKDKMAEAYSEIGMKGERRRGKGHDGLYQGLSTATKDTYDALHMQALPPR

SEQ ID NO: 11578 - protein, 856 aa, synthetic construct
MALPVTALLLPLALLLHAARPEFNAGVTQTPKFQVLKTGQSMTLQCAQDMNHEYMSWYRQDPGMGLRLIHYSVAIQTTDQGEVPNGYNVSRSTIEDFPLRLLSAAPSQTSVYFCASSYLGNTGELFFGEGSRLTVLEDLKNVFPPEVAVFEPSEAEISHTQKATLVCLATGFYPDHVELSWWVNGKEVHSGVSTDPQPLKEQPALNDSRYCLSSRLRVSATFWQNPRNHFRCQVQFYGLSENDEWTQDRAKPVTQIVSAEAWGRADCGSQSFGLLDPKLCYLLDGILFIYGVILTALFLRVKFSRSADAPAYQQGQNQLYNELNLGRREEYDVLDKRRGRDPEMGGKPRRKNPQEGLYNELQKDKMAEAYSEIGMKGERRRGKGHDGLYQGLSTATKDTYDALHMQALPPRRAKRSGSGATNFSLLKQAGDVEENPGPTSMDWIWRILFLVGAATGAHSFEQEVTQIPAALSVPEGENLVLNCSFTDSAIYNLQWFRQDPGKGLTSLLLIQSSQREQTSGRLNASLDKSSGRSTLYIAASQPGDSATYLCAVRPTSGGSYIPTFGRGTSLIVHPYTRIQNPDPAVYQLRDSKSSDKSVCLFTDFDSQTNVSQSKDSDVYITDKTVLDMRSMDFKSNSAVAWSNKSDFACANAFNNSIIPEDTFFPSPESSCGTQSFGLLDPKLCYLLDGILFIYGVILTALFLRSKRSRLLHSDYMNMTPRRPGPTRKHYQPYAPPRDFAAYRSRVKFSRSADAPAYQQGQNQLYNELNLGRREEYDVLDKRRGRDPEMGGKPRRKNPQEGLYNELQKDKMAEAYSEIGMKGERRRGKGHDGLYQGLSTATKDTYDALHMQALPPR

SEQ ID NO: 11579 - protein, 851 aa, synthetic construct
MALPVTALLLPLALLLHAARPEFNAGVTQTPKFQVLKTGQSMTLQCAQDMNHEYMSWYRQDPGMGLRLIHYSVAIQTTDQGEVPNGYNVSRSTIEDFPLRLLSAAPSQTSVYFCASSYLGNTGELFFGEGSRLTVLEDLKNVFPPEVAVFEPSEAEISHTQKATLVCLATGFYPDHVELSWWVNGKEVHSGVSTDPQPLKEQPALNDSRYCLSSRLRVSATFWQNPRNHFRCQVQFYGLSENDEWTQDRAKPVTQIVSAEAWGRADCGSQSFGLLDPKLCYLLDGILFIYGVILTALFLRVKFSRSADAPAYQQGQNQLYNELNLGRREEYDVLDKRRGRDPEMGGKPRRKNPQEGLYNELQKDKMAEAYSEIGMKGERRRGKGHDGLYQGLSTATKDTYDALHMQALPPRRAKRSGSGATNFSLLKQAGDVEENPGPTSMDWIWRILFLVGAATGAHSFEQEVTQIPAALSVPEGENLVLNCSFTDSAIYNLQWFRQDPGKGLTSLLLIQSSQREQTSGRLNASLDKSSGRSTLYIAASQPGDSATYLCAVRPTSGGSYIPTFGRGTSLIVHPYTRIQNPDPAVYQLRDSKSSDKSVCLFTDFDSQTNVSQSKDSDVYITDKTVLDMRSMDFKSNSAVAWSNKSDFACANAFNNSIIPEDTFFPSPESSCGTQSFGLLDPKLCYLLDGILFIYGVILTALFLRDQRLPPDAHKPPGGGSFRTPIQEEQADAHSTLAKIRVKFSRSADAPAYQQGQNQLYNELNLGRREEYDVLDKRRGRDPEMGGKPRRKNPQEGLYNELQKDKMAEAYSEIGMKGERRRGKGHDGLYQGLSTATKDTYDALHMQALPPR

SEQ ID NO: 11580 - protein, 935 aa, synthetic construct
MALPVTALLLPLALLLHAARPEFNAGVTQTPKFQVLKTGQSMTLQCAQDMNHEYMSWYRQDPGMGLRLIHYSVAIQTTDQGEVPNGYNVSRSTIEDFPLRLLSAAPSQTSVYFCASSYLGNTGELFFGEGSRLTVLEDLKNVFPPEVAVFEPSEAEISHTQKATLVCLATGFYPDHVELSWWVNGKEVHSGVSTDPQPLKEQPALNDSRYCLSSRLRVSATFWQNPRNHFRCQVQFYGLSENDEWTQDRAKPVTQIVSAEAWGRADCGSQSFGLLDPKLCYLLDGILFIYGVILTALFLRVKFSRSADAPAYQQGQNQLYNELNLGRREEYDVLDKRRGRDPEMGGKPRRKNPQEGLYNELQKDKMAEAYSEIGMKGERRRGKGHDGLYQGLSTATKDTYDALHMQALPPRRAKRSGSGATNFSLLKQAGDVEENPGPTSMDWIWRILFLVGAATGAHSFEQEVTQIPAALSVPEGENLVLNCSFTDSAIYNLQWFRQDPGKGLTSLLLIQSSQREQTSGRLNASLDKSSGRSTLYIAASQPGDSATYLCAVRPTSGGSYIPTFGRGTSLIVHPYTRIQNPDPAVYQLRDSKSSDKSVCLFTDFDSQTNVSQSKDSDVYITDKTVLDMRSMDFKSNSAVAWSNKSDFACANAFNNSIIPEDTFFPSPESSCGTQSFGLLDPKLCYLLDGILFIYGVILTALFLWRRKRKEKQSETSPKEFLTIYEDVKDLKTRRNHEQEQTFPGGGSTIYSMIQSQSSAPTSQEPAYTLYSLIQPSRKSGSRKRNHSPSFNSTIYEVIGKSQPKAQNPARLSRKELENFDVYSRVKFSRSADAPAYQQGQNQLYNELNLGRREEYDVLDKRRGRDPEMGGKPRRKNPQEGLYNELQKDKMAEAYSEIGMKGERRRGKGHDGLYQGLSTATKDTYDALHMQALPPR

SEQ ID NO: 11581 - protein, 898 aa, synthetic construct
MALPVTALLLPLALLLHAARPEFNAGVTQTPKFQVLKTGQSMTLQCAQDMNHEYMSWYRQDPGMGLRLIHYSVAIQTTDQGEVPNGYNVSRSTIEDFPLRLLSAAPSQTSVYFCASSYLGNTGELFFGEGSRLTVLEDLKNVFPPEVAVFEPSEAEISHTQKATLVCLATGFYPDHVELSWWVNGKEVHSGVSTDPQPLKEQPALNDSRYCLSSRLRVSATFWQNPRNHFRCQVQFYGLSENDEWTQDRAKPVTQIVSAEAWGRADCGSQSFGLLDPKLCYLLDGILFIYGVILTALFLRSKRSRLLHSDYMNMTPRRPGPTRKHYQPYAPPRDFAAYRSRVKFSRSADAPAYQQGQNQLYNELNLGRREEYDVLDKRRGRDPEMGGKPRRKNPQEGLYNELQKDKMAEAYSEIGMKGERRRGKGHDGLYQGLSTATKDTYDALHMQALPPRRAKRSGSGATNFSLLKQAGDVEENPGPTSMDWIWRILFLVGAATGAHSFEQEVTQIPAALSVPEGENLVLNCSFTDSAIYNLQWFRQDPGKGLTSLLLIQSSQREQTSGRLNASLDKSSGRSTLYIAASQPGDSATYLCAVRPTSGGSYIPTFGRGTSLIVHPYTRIQNPDPAVYQLRDSKSSDKSVCLFTDFDSQTNVSQSKDSDVYITDKTVLDMRSMDFKSNSAVAWSNKSDFACANAFNNSIIPEDTFFPSPESSCGTQSFGLLDPKLCYLLDGILFIYGVILTALFLKRGRKKLLYIFKQPFMRPVQTTQEEDGCSCRFPEEEEGGCELRVKFSRSADAPAYQQGQNQLYNELNLGRREEYDVLDKRRGRDPEMGGKPRRKNPQEGLYNELQKDKMAEAYSEIGMKGERRRGKGHDGLYQGLSTATKDTYDALHMQALPPR

SEQ ID NO: 11582 - protein, 897 aa, synthetic construct
MALPVTALLLPLALLLHAARPEFNAGVTQTPKFQVLKTGQSMTLQCAQDMNHEYMSWYRQDPGMGLRLIHYSVAIQTTDQGEVPNGYNVSRSTIEDFPLRLLSAAPSQTSVYFCASSYLGNTGELFFGEGSRLTVLEDLKNVFPPEVAVFEPSEAEISHTQKATLVCLATGFYPDHVELSWWVNGKEVHSGVSTDPQPLKEQPALNDSRYCLSSRLRVSATFWQNPRNHFRCQVQFYGLSENDEWTQDRAKPVTQIVSAEAWGRADCGSQSFGLLDPKLCYLLDGILFIYGVILTALFLRSKRSRLLHSDYMNMTPRRPGPTRKHYQPYAPPRDFAAYRSRVKFSRSADAPAYQQGQNQLYNELNLGRREEYDVLDKRRGRDPEMGGKPRRKNPQEGLYNELQKDKMAEAYSEIGMKGERRRGKGHDGLYQGLSTATKDTYDALHMQALPPRRAKRSGSGATNFSLLKQAGDVEENPGPTSMDWIWRILFLVGAATGAHSFEQEVTQIPAALSVPEGENLVLNCSFTDSAIYNLQWFRQDPGKGLTSLLLIQSSQREQTSGRLNASLDKSSGRSTLYIAASQPGDSATYLCAVRPTSGGSYIPTFGRGTSLIVHPYTRIQNPDPAVYQLRDSKSSDKSVCLFTDFDSQTNVSQSKDSDVYITDKTVLDMRSMDFKSNSAVAWSNKSDFACANAFNNSIIPEDTFFPSPESSCGTQSFGLLDPKLCYLLDGILFIYGVILTALFLRSKRSRLLHSDYMNMTPRRPGPTRKHYQPYAPPRDFAAYRSRVKFSRSADAPAYQQGQNQLYNELNLGRREEYDVLDKRRGRDPEMGGKPRRKNPQEGLYNELQKDKMAEAYSEIGMKGERRRGKGHDGLYQGLSTATKDTYDALHMQALPPR

SEQ ID NO: 11583 - protein, 898 aa, synthetic construct; identical to SEQ ID NO: 11581

SEQ ID NO: 11584 - protein, 815 aa, synthetic construct
MALPVTALLLPLALLLHAARPEFNAGVTQTPKFQVLKTGQSMTLQCAQDMNHEYMSWYRQDPGMGLRLIHYSVAIQTTDQGEVPNGYNVSRSTIEDFPLRLLSAAPSQTSVYFCASSYLGNTGELFFGEGSRLTVLEDLKNVFPPEVAVFEPSEAEISHTQKATLVCLATGFYPDHVELSWWVNGKEVHSGVSTDPQPLKEQPALNDSRYCLSSRLRVSATFWQNPRNHFRCQVQFYGLSENDEWTQDRAKPVTQIVSAEAWGRADCGSQSFGLLDPKLCYLLDGILFIYGVILTALFLRVKFSRSADAPAYQQGQNQLYNELNLGRREEYDVLDKRRGRDPEMGGKPRRKNPQEGLFNELQKDKMAEAFSEIGMKGERRRGKGHDGLFQGLSTATKDTFDALHMQALPPRRAKRSGSGATNFSLLKQAGDVEENPGPTSMDWIWRILFLVGAATGAHSFEQEVTQIPAALSVPEGENLVLNCSFTDSAIYNLQWFRQDPGKGLTSLLLIQSSQREQTSGRLNASLDKSSGRSTLYIAASQPGDSATYLCAVRPTSGGSYIPTFGRGTSLIVHPYTRIQNPDPAVYQLRDSKSSDKSVCLFTDFDSQTNVSQSKDSDVYITDKTVLDMRSMDFKSNSAVAWSNKSDFACANAFNNSIIPEDTFFPSPESSCGTQSFGLLDPKLCYLLDGILFIYGVILTALFLRVKFSRSADAPAYQQGQNQLYNELNLGRREEYDVLDKRRGRDPEMGGKPRRKNPQEGLYNELQKDKMAEAYSEIGMKGERRRGKGHDGLYQGLSTATKDTYDALHMQALPPR

SEQ ID NO: 11585 - protein, 815 aa, synthetic construct; identical to SEQ ID NO: 11584

SEQ ID NO: 11586 - protein, 857 aa, synthetic construct
MALPVTALLLPLALLLHAARPEFNAGVTQTPKFQVLKTGQSMTLQCAQDMNHEYMSWYRQDPGMGLRLIHYSVAIQTTDQGEVPNGYNVSRSTIEDFPLRLLSAAPSQTSVYFCASSYLGNTGELFFGEGSRLTVLEDLKNVFPPEVAVFEPSEAEISHTQKATLVCLATGFYPDHVELSWWVNGKEVHSGVSTDPQPLKEQPALNDSRYCLSSRLRVSATFWQNPRNHFRCQVQFYGLSENDEWTQDRAKPVTQIVSAEAWGRADCGSQSFGLLDPKLCYLLDGILFIYGVILTALFLRVKFSRSADAPAYQQGQNQLYNELNLGRREEYDVLDKRRGRDPEMGGKPRRKNPQEGLFNELQKDKMAEAFSEIGMKGERRRGKGHDGLFQGLSTATKDTFDALHMQALPPRRAKRSGSGATNFSLLKQAGDVEENPGPTSMDWIWRILFLVGAATGAHSFEQEVTQIPAALSVPEGENLVLNCSFTDSAIYNLQWFRQDPGKGLTSLLLIQSSQREQTSGRLNASLDKSSGRSTLYIAASQPGDSATYLCAVRPTSGGSYIPTFGRGTSLIVHPYTRIQNPDPAVYQLRDSKSSDKSVCLFTDFDSQTNVSQSKDSDVYITDKTVLDMRSMDFKSNSAVAWSNKSDFACANAFNNSIIPEDTFFPSPESSCGTQSFGLLDPKLCYLLDGILFIYGVILTALFLKRGRKKLLYIFKQPFMRPVQTTQEEDGCSCRFPEEEEGGCELRVKFSRSADAPAYQQGQNQLYNELNLGRREEYDVLDKRRGRDPEMGGKPRRKNPQEGLYNELQKDKMAEAYSEIGMKGERRRGKGHDGLYQGLSTATKDTYDALHMQALPPR

SEQ ID NO: 11587 - protein, 856 aa, synthetic construct
MALPVTALLLPLALLLHAARPEFNAGVTQTPKFQVLKTGQSMTLQCAQDMNHEYMSWYRQDPGMGLRLIHYSVAIQTTDQGEVPNGYNVSRSTIEDFPLRLLSAAPSQTSVYFCASSYLGNTGELFFGEGSRLTVLEDLKNVFPPEVAVFEPSEAEISHTQKATLVCLATGFYPDHVELSWWVNGKEVHSGVSTDPQPLKEQPALNDSRYCLSSRLRVSATFWQNPRNHFRCQVQFYGLSENDEWTQDRAKPVTQIVSAEAWGRADCGSQSFGLLDPKLCYLLDGILFIYGVILTALFLRVKFSRSADAPAYQQGQNQLYNELNLGRREEYDVLDKRRGRDPEMGGKPRRKNPQEGLFNELQKDKMAEAFSEIGMKGERRRGKGHDGLFQGLSTATKDTFDALHMQALPPRRAKRSGSGATNFSLLKQAGDVEENPGPTSMDWIWRILFLVGAATGAHSFEQEVTQIPAALSVPEGENLVLNCSFTDSAIYNLQWFRQDPGKGLTSLLLIQSSQREQTSGRLNASLDKSSGRSTLYIAASQPGDSATYLCAVRPTSGGSYIPTFGRGTSLIVHPYTRIQNPDPAVYQLRDSKSSDKSVCLFTDFDSQTNVSQSKDSDVYITDKTVLDMRSMDFKSNSAVAWSNKSDFACANAFNNSIIPEDTFFPSPESSCGTQSFGLLDPKLCYLLDGILFIYGVILTALFLRSKRSRLLHSDYMNMTPRRPGPTRKHYQPYAPPRDFAAYRSRVKFSRSADAPAYQQGQNQLYNELNLGRREEYDVLDKRRGRDPEMGGKPRRKNPQEGLYNELQKDKMAEAYSEIGMKGERRRGKGHDGLYQGLSTATKDTYDALHMQALPPR

SEQ ID NO: 11588 - protein, 851 aa, synthetic construct
MALPVTALLLPLALLLHAARPEFNAGVTQTPKFQVLKTGQSMTLQCAQDMNHEYMSWYRQDPGMGLRLIHYSVAIQTTDQGEVPNGYNVSRSTIEDFPLRLLSAAPSQTSVYFCASSYLGNTGELFFGEGSRLTVLEDLKNVFPPEVAVFEPSEAEISHTQKATLVCLATGFYPDHVELSWWVNGKEVHSGVSTDPQPLKEQPALNDSRYCLSSRLRVSATFWQNPRNHFRCQVQFYGLSENDEWTQDRAKPVTQIVSAEAWGRADCGSQSFGLLDPKLCYLLDGILFIYGVILTALFLRVKFSRSADAPAYQQGQNQLYNELNLGRREEYDVLDKRRGRDPEMGGKPRRKNPQEGLFNELQKDKMAEAFSEIGMKGERRRGKGHDGLFQGLSTATKDTFDALHMQALPPRRAKRSGSGATNFSLLKQAGDVEENPGPTSMDWIWRILFLVGAATGAHSFEQEVTQIPAALSVPEGENLVLNCSFTDSAIYNLQWFRQDPGKGLTSLLLIQSSQREQTSGRLNASLDKSSGRSTLYIAASQPGDSATYLCAVRPTSGGSYIPTFGRGTSLIVHPYTRIQNPDPAVYQLRDSKSSDKSVCLFTDFDSQTNVSQSKDSDVYITDKTVLDMRSMDFKSNSAVAWSNKSDFACANAFNNSIIPEDTFFPSPESSCGTQSFGLLDPKLCYLLDGILFIYGVILTALFLRDQRLPPDAHKPPGGGSFRTPIQEEQADAHSTLAKIRVKFSRSADAPAYQQGQNQLYNELNLGRREEYDVLDKRRGRDPEMGGKPRRKNPQEGLYNELQKDKMAEAYSEIGMKGERRRGKGHDGLYQGLSTATKDTYDALHMQALPPR

SEQ ID NO: 11589 - protein, 935 aa, synthetic construct
MALPVTALLLPLALLLHAARPEFNAGVTQTPKFQVLKTGQSMTLQCAQDMNHEYMSWYRQDPGMGLRLIHYSVAIQTTDQGEVPNGYNVSRSTIEDFPLRLLSAAPSQTSVYFCASSYLGNTGELFFGEGSRLTVLEDLKNVFPPEVAVFEPSEAEISHTQKATLVCLATGFYPDHVELSWWVNGKEVHSGVSTDPQPLKEQPALNDSRYCLSSRLRVSATFWQNPRNHFRCQVQFYGLSENDEWTQDRAKPVTQIVSAEAWGRADCGSQSFGLLDPKLCYLLDGILFIYGVILTALFLRVKFSRSADAPAYQQGQNQLYNELNLGRREEYDVLDKRRGRDPEMGGKPRRKNPQEGLFNELQKDKMAEAFSEIGMKGERRRGKGHDGLFQGLSTATKDTFDALHMQALPPRRAKRSGSGATNFSLLKQAGDVEENPGPTSMDWIWRILFLVGAATGAHSFEQEVTQIPAALSVPEGENLVLNCSFTDSAIYNLQWFRQDPGKGLTSLLLIQSSQREQTSGRLNASLDKSSGRSTLYIAASQPGDSATYLCAVRPTSGGSYIPTFGRGTSLIVHPYTRIQNPDPAVYQLRDSKSSDKSVCLFTDFDSQTNVSQSKDSDVYITDKTVLDMRSMDFKSNSAVAWSNKSDFACANAFNNSIIPEDTFFPSPESSCGTQSFGLLDPKLCYLLDGILFIYGVILTALFLWRRKRKEKQSETSPKEFLTIYEDVKDLKTRRNHEQEQTFPGGGSTIYSMIQSQSSAPTSQEPAYTLYSLIQPSRKSGSRKRNHSPSFNSTIYEVIGKSQPKAQNPARLSRKELENFDVYSRVKFSRSADAPAYQQGQNQLYNELNLGRREEYDVLDKRRGRDPEMGGKPRRKNPQEGLYNELQKDKMAEAYSEIGMKGERRRGKGHDGLYQGLSTATKDTYDALHMQALPPR

SEQ ID NO: 11590 - protein, 856 aa, synthetic construct; identical to SEQ ID NO: 11587

SEQ ID NO: 11591 - protein, 857 aa, synthetic construct; identical to SEQ ID NO: 11586

SEQ ID NO: 11592 - protein, 815 aa, synthetic construct
MALPVTALLLPLALLLHAARPEFNAGVTQTPKFQVLKTGQSMTLQCAQDMNHEYMSWYRQDPGMGLRLIHYSVAIQTTDQGEVPNGYNVSRSTIEDFPLRLLSAAPSQTSVYFCASSYLGNTGELFFGEGSRLTVLEDLKNVFPPEVAVFEPSEAEISHTQKATLVCLATGFYPDHVELSWWVNGKEVHSGVSTDPQPLKEQPALNDSRYCLSSRLRVSATFWQNPRNHFRCQVQFYGLSENDEWTQDRAKPVTQIVSAEAWGRADCGSQSFGLLDPKLCYLLDGILFIYGVILTALFLRVKFSRSADAPAYQQGQNQLYNELNLGRREEYDVLDKRRGRDPEMGGKPRRKNPQEGLFNELQKDKMAEAFSEIGMKGERRRGKGHDGLFQGLSTATKDTFDALHMQALPPRRAKRSGSGATNFSLLKQAGDVEENPGPTSMDWIWRILFLVGAATGAHSFEQEVTQIPAALSVPEGENLVLNCSFTDSAIYNLQWFRQDPGKGLTSLLLIQSSQREQTSGRLNASLDKSSGRSTLYIAASQPGDSATYLCAVRPTSGGSYIPTFGRGTSLIVHPYTRIQNPDPAVYQLRDSKSSDKSVCLFTDFDSQTNVSQSKDSDVYITDKTVLDMRSMDFKSNSAVAWSNKSDFACANAFNNSIIPEDTFFPSPESSCGTQSFGLLDPKLSYLLDGILFIYGVILTALFLRVKFSRSADAPAYQQGQNQLYNELNLGRREEYDVLDKRRGRDPEMGGKPRRKNPQEGLYNELQKDKMAEAYSEIGMKGERRRGKGHDGLYQGLSTATKDTYDALHMQALPPR

SEQ ID NO: 11593 - protein, 815 aa, synthetic construct; identical to SEQ ID NO: 11592

SEQ ID NO: 11594 - protein, 815 aa, synthetic construct
MALPVTALLLPLALLLHAARPEFNAGVTQTPKFQVLKTGQSMTLQCAQDMNHEYMSWYRQDPGMGLRLIHYSVAIQTTDQGEVPNGYNVSRSTIEDFPLRLLSAAPSQTSVYFCASSYLGNTGELFFGEGSRLTVLEDLKNVFPPEVAVFEPSEAEISHTQKATLVCLATGFYPDHVELSWWVNGKEVHSGVSTDPQPLKEQPALNDSRYCLSSRLRVSATFWQNPRNHFRCQVQFYGLSENDEWTQDRAKPVTQIVSAEAWGRADCGSQSFGLLDPKLSYLLDGILFIYGVILTALFLRVKFSRSADAPAYQQGQNQLYNELNLGRREEYDVLDKRRGRDPEMGGKPRRKNPQEGLYNELQKDKMAEAYSEIGMKGERRRGKGHDGLYQGLSTATKDTYDALHMQALPPRRAKRSGSGATNFSLLKQAGDVEENPGPTSMDWIWRILFLVGAATGAHSFEQEVTQIPAALSVPEGENLVLNCSFTDSAIYNLQWFRQDPGKGLTSLLLIQSSQREQTSGRLNASLDKSSGRSTLYIAASQPGDSATYLCAVRPTSGGSYIPTFGRGTSLIVHPYTRIQNPDPAVYQLRDSKSSDKSVCLFTDFDSQTNVSQSKDSDVYITDKTVLDMRSMDFKSNSAVAWSNKSDFACANAFNNSIIPEDTFFPSPESSCGTQSFGLLDPKLSYLLDGILFIYGVILTALFLRVKFSRSADAPAYQQGQNQLYNELNLGRREEYDVLDKRRGRDPEMGGKPRRKNPQEGLYNELQKDKMAEAYSEIGMKGERRRGKGHDGLYQGLSTATKDTYDALHMQALPPR

SEQ ID NO: 11595 - protein, 1084 aa, synthetic construct
MALPVTALLLPLALLLHAARPEFNAGVTQTPKFQVLKTGQSMTLQCAQDMNHEYMSWYRQDPGMGLRLIHYSVAIQTTDQGEVPNGYNVSRSTIEDFPLRLLSAAPSQTSVYFCASSYLGNTGELFFGEGSRLTVLEDLKNVFPPEVAVFEPSEAEISHTQKATLVCLATGFYPDHVELSWWVNGKEVHSGVSTDPQPLKEQPALNDSRYCLSSRLRVSATFWQNPRNHFRCQVQFYGLSENDEWTQDRAKPVTQIVSAEAWGRADCGSQSFGLLDPKLCYLLDGILFIYGVILTALFLRVKFSRSADAPAYQQGQNQLYNELNLGRREEYDVLDKRRGRDPEMGGKPRRKNPQEGLYNELQKDKMAEAYSEIGMKGERRRGKGHDGLYQGLSTATKDTYDALHMQALPPRRAKRSGSGATNFSLLKQAGDVEENPGPTSMDWIWRILFLVGAATGAHSFEQEVTQIPAALSVPEGENLVLNCSFTDSAIYNLQWFRQDPGKGLTSLLLIQSSQREQTSGRLNASLDKSSGRSTLYIAASQPGDSATYLCAVRPTSGGSYIPTFGRGTSLIVHPYTRIQNPDPAVYQLRDSKSSDKSVCLFTDFDSQTNVSQSKDSDVYITDKTVLDMRSMDFKSNSAVAWSNKSDFACANAFNNSIIPEDTFFPSPESSCGTQSFGLLDPKLCYLLDGILFIYGVILTALFLRVKFSRSADAPAYQQGQNQLYNELNLGRREEYDVLDKRRGRDPEMGGKPRRKNPQEGLYNELQKDKMAEAYSEIGMKGERRRGKGHDGLYQGLSTATKDTYDALHMQALPPRRAKRSGSGVKQTLNFDLLKLAGDVESNPGPSRGHMALPVTALLLPLALLLHAARPSQFRVSPLDRTWNLGETVELKCQVLLSNPTSGCSWLFQPRGAAASPTFLLYLSQNKPKAAEGLDTQRFSGKRLGDTFVLTLSDFRRENEGYYFCSALSNSIMYFSHFVPVFLPAKPTTTPAPRPPTPAPTIASQPLSLRPEACRPAAGGAVHTRGLDFACDIYIWAPLAGTCGVLLLSLVITLYCNHRNRRRVCKCPRPVVKSGDKPSLSARYV

SEQ ID NO: 11596 - protein, 824 aa, synthetic construct
MALPVTALLLPLALLLHAARPEFNAGVTQTPKFQVLKTGQSMTLQCAQDMNHEYMSWYRQDPGMGLRLIHYSVAIQTTDQGEVPNGYNVSRSTIEDFPLRLLSAAPSQTSVYFCASSYLGNTGELFFGEGSRLTVLEDLKNVFPPEVAVFEPSEAEISHTQKATLVCLATGFYPDHVELSWWVNGKEVHSGVSTDPQPLKEQPALNDSRYCLSSRLRVSATFWQNPRNHFRCQVQFYGLSENDEWTQDRAKPVTQIVSAEAWGRADCGSQSFGLLDPKLCYLLDGILFIYGVILTALFLRVKFSRSADAPAYQQGQNQLYNELNLGRREEYDVLDKRRGRDPEMGGKPRRKNPQEGLYNELQKDKMAEAYSEIGMKGERRRGKGHDGLYQGLSTATKDTYDALHMQALPPRRAKRSGSGATNFSLLKQAGDVEENPGPTSMDWIWRILFLVGAATGAHSFEQEVTQIPAALSVPEGENLVLNCSFTDSAIYNLQWFRQDPGKGLTSLLLIQSSQREQTSGRLNASLDKSSGRSTLYIAASQPGDSATYLCAVRPTSGGSYIPTFGRGTSLIVHPYTRASTKGPSVFPLAPSSKSTSGGTAALGCLVKDYFPEPVTVSWNSGALTSGVHTFPAVLQSSGLYSLSSVVTVPSSSLGTQTYICNVNHKPSNTKVDKRVEPKSCGTQSFGLLDPKLSYLLDGILFIYGVILTALFLRVKFSRSADAPAYQQGQNQLYNELNLGRREEYDVLDKRRGRDPEMGGKPRRKNPQEGLYNELQKDKMAEAYSEIGMKGERRRGKGHDGLYQGLSTATKDTYDALHMQALPPR

SEQ ID NO: 11597 - protein, 815 aa, synthetic construct
MALPVTALLLPLALLLHAARPEFNAGVTQTPKFQVLKTGQSMTLQCAQDMNHEYMSWYRQDPGMGLRLIHYSVAIQTTDQGEVPNGYNVSRSTIEDFPLRLLSAAPSQTSVYFCASSYLGNTGELFFGEGSRLTVLEDLKNVFPPEVAVFEPSEAEISHTQKATLVCLATGFYPDHVELSWWVNGKEVHSGVSTDPQPLKEQPALNDSRYCLSSRLRVSATFWQNPRNHFRCQVQFYGLSENDEWTQDRAKPVTQIVSAEAWGRADCGSQSFGLLDPKLCYLLDGILFIYGVILTALFLRVKFSRSADAPAYQQGQNQLYNELNLGRREEYDVLDKRRGRDPEMGGKPRRKNPQEGLYNELQKDKMAEAYSEIGMKGERRRGKGHDGLYQGLSTATKDTYDALHMQALPPRRAKRSGSGATNFSLLKQAGDVEENPGPTSMDWIWRILFLVGAATGAHSFEQEVTQIPAALSVPEGENLVLNCSFTDSAIYNLQWFRQDPGKGLTSLLLIQSSQREQTSGRLNASLDKSSGRSTLYIAASQPGDSATYLCAVRPTSGGSYIPTFGRGTSLIVHPYTRIQNPDPAVYQLRDSKSSDKSVCLFTDFDSQTNVSQSKDSDVYITDKTVLDMRSMDFKSNSAVAWSNKSDFACANAFNNSIIPEDTFFPSPESSCGTQSFGLLDPKLSYLLDGILFIYGVILTALFLRVKFSRSADAPAYQQGQNQLYNELNLGRREEYDVLDKRRGRDPEMGGKPRRKNPQEGLYNELQKDKMAEAYSEIGMKGERRRGKGHDGLYQGLSTATKDTYDALHMQALPPR

SEQ ID NO: 11598 - protein, 986 aa, synthetic construct
MALPVTALLLPLALLLHAARPEFNAGVTQTPKFQVLKTGQSMTLQCAQDMNHEYMSWYRQDPGMGLRLIHYSVAIQTTDQGEVPNGYNVSRSTIEDFPLRLLSAAPSQTSVYFCASSYLGNTGELFFGEGSRLTVLEGQPKANPTVTLFPPSSEELQANKATLVCLISDFYPGAVTVAWKADGSPVKAGVETTKPSKQSNNKYAASSYLSLTPEQWKSHRSYSCQVTHEGSTVEKTVAPTECSGSLGEPQLCYILDAILFLYGIVLTLLYCRLKIQVRKAAITSYEKSDGVYTGLSTRNQETYETLKHEKPPQRAKRSGSGATNFSLLKQAGDVEENPGPTSMDWIWRILFLVGAATGAHSFEQEVTQIPAALSVPEGENLVLNCSFTDSAIYNLQWFRQDPGKGLTSLLLIQSSQREQTSGRLNASLDKSSGRSTLYIAASQPGDSATYLCAVRPTSGGSYIPTFGRGTSLIVHPYTRIQNPDPAVYQLRDSKSSDKSVCLFTDFDSQTNVSQSKDSDVYITDKTVLDMRSMDFKSNSAVAWSNKSDFACANAFNNSIIPEDTFFPSPESSCGTQSFGLLDPKLCYLLDGILFIYGVILTALFLRVKFSRSADAPAYQQGQNQLYNELNLGRREEYDVLDKRRGRDPEMGGKPRRKNPQEGLYNELQKDKMAEAYSEIGMKGERRRGKGHDGLYQGLSTATKDTYDALHMQALPPRRAKRSGSGVKQTLNFDLLKLAGDVESNPGPSRGHMALPVTALLLPLALLLHAARPSQFRVSPLDRTWNLGETVELKCQVLLSNPTSGCSWLFQPRGAAASPTFLLYLSQNKPKAAEGLDTQRFSGKRLGDTFVLTLSDFRRENEGYYFCSALSNSIMYFSHFVPVFLPAKPTTTPAPRPPTPAPTIASQPLSLRPEACRPAAGGAVHTRGLDFACDIYIWAPLAGTCGVLLLSLVITLYCNHRNRRRVCKCPRPVVKSGDKPSLSARYV

SEQ ID NO: 11599 - protein, 750 aa, synthetic construct
MALPVTALLLPLALLLHAARPEFNAGVTQTPKFQVLKTGQSMTLQCAQDMNHEYMSWYRQDPGMGLRLIHYSVAIQTTDQGEVPNGYNVSRSTIEDFPLRLLSAAPSQTSVYFCASSYLGNTGELFFGEGSRLTVLEDLKNVFPPEVAVFEPSEAEISHTQKATLVCLATGFYPDHVELSWWVNGKEVHSGVSTDPQPLKEQPALNDSRYCLSSRLRVSATFWQNPRNHFRCQVQFYGLSENDEWTQDRAKPVTQIVSAEAWGRADCGSQSFGLLDPKLCYLLDGILFIYGVILTALFLRVKFSRSADAPAYQQGQNQLYNELNLGRREEYDVLDKRRGRDPEMGGKPRRKNPQEGLYNELQKDKMAEAYSEIGMKGERRRGKGHDGLYQGLSTATKDTYDALHMQALPPRRAKRSGSGATNFSLLKQAGDVEENPGPTSMDWIWRILFLVGAATGAHSFEQEVTQIPAALSVPEGENLVLNCSFTDSAIYNLQWFRQDPGKGLTSLLLIQSSQREQTSGRLNASLDKSSGRSTLYIAASQPGDSATYLCAVRPTSGGSYIPTFGRGTSLIVHPYTRASTKGPSVFPLAPSSKSTSGGTAALGCLVKDYFPEPVTVSWNSGALTSGVHTFPAVLQSSGLYSLSSVVTVPSSSLGTQTYICNVNHKPSNTKVDKRVEPKSCGTLGEPQLCYILDAILFLYGIVLTLLYCRLKIQVRKAAITSYEKSDGVYTGLSTRNQETYETLKHEKPPQ

SEQ ID NO: 11600 - protein, 750 aa, synthetic construct; identical to SEQ ID NO: 11599

SEQ ID NO: 11601 - protein, 741 aa, synthetic construct
MALPVTALLLPLALLLHAARPEFNAGVTQTPKFQVLKTGQSMTLQCAQDMNHEYMSWYRQDPGMGLRLIHYSVAIQTTDQGEVPNGYNVSRSTIEDFPLRLLSAAPSQTSVYFCASSYLGNTGELFFGEGSRLTVLEDLKNVFPPEVAVFEPSEAEISHTQKATLVCLATGFYPDHVELSWWVNGKEVHSGVSTDPQPLKEQPALNDSRYCLSSRLRVSATFWQNPRNHFRCQVQFYGLSENDEWTQDRAKPVTQIVSAEAWGRADCGSQSFGLLDPKLCYLLDGILFIYGVILTALFLRVKFSRSADAPAYQQGQNQLYNELNLGRREEYDVLDKRRGRDPEMGGKPRRKNPQEGLYNELQKDKMAEAYSEIGMKGERRRGKGHDGLYQGLSTATKDTYDALHMQALPPRRAKRSGSGATNFSLLKQAGDVEENPGPTSMDWIWRILFLVGAATGAHSFEQEVTQIPAALSVPEGENLVLNCSFTDSAIYNLQWFRQDPGKGLTSLLLIQSSQREQTSGRLNASLDKSSGRSTLYIAASQPGDSATYLCAVRPTSGGSYIPTFGRGTSLIVHPYTRIQNPDPAVYQLRDSKSSDKSVCLFTDFDSQTNVSQSKDSDVYITDKTVLDMRSMDFKSNSAVAWSNKSDFACANAFNNSIIPEDTFFPSPESSCGTLGEPQLCYILDAILFLYGIVLTLLYCRLKIQVRKAAITSYEKSDGVYTGLSTRNQETYETLKHEKPPQ

SEQ ID NO: 11602 - protein, 990 aa, synthetic construct
MALPVTALLLPLALLLHAARPEFNAGVTQTPKFQVLKTGQSMTLQCAQDMNHEYMSWYRQDPGMGLRLIHYSVAIQTTDQGEVPNGYNVSRSTIEDFPLRLLSAAPSQTSVYFCASSYLGNTGELFFGEGSRLTVLEGQPKANPTVTLFPPSSEELQANKATLVCLISDFYPGAVTVAWKADGSPVKAGVETTKPSKQSNNKYAASSYLSLTPEQWKSHRSYSCQVTHEGSTVEKTVAPTECSTTPGERSSLPAFYPGTSGSCSGCGSLSLPLLAGLVAADAVASLLIVGAVFLCARPRRSPAQEDGKVYINMPGRGRAKRSGSGATNFSLLKQAGDVEENPGPTSMDWIWRILFLVGAATGAHSFEQEVTQIPAALSVPEGENLVLNCSFTDSAIYNLQWFRQDPGKGLTSLLLIQSSQREQTSGRLNASLDKSSGRSTLYIAASQPGDSATYLCAVRPTSGGSYIPTFGRGTSLIVHPYTRIQNPDPAVYQLRDSKSSDKSVCLFTDFDSQTNVSQSKDSDVYITDKTVLDMRSMDFKSNSAVAWSNKSDFACANAFNNSIIPEDTFFPSPESSCGTQSFGLLDPKLCYLLDGILFIYGVILTALFLRVKFSRSADAPAYQQGQNQLYNELNLGRREEYDVLDKRRGRDPEMGGKPRRKNPQEGLYNELQKDKMAEAYSEIGMKGERRRGKGHDGLYQGLSTATKDTYDALHMQALPPRRAKRSGSGVKQTLNFDLLKLAGDVESNPGPSRGHMALPVTALLLPLALLLHAARPSQFRVSPLDRTWNLGETVELKCQVLLSNPTSGCSWLFQPRGAAASPTFLLYLSQNKPKAAEGLDTQRFSGKRLGDTFVLTLSDFRRENEGYYFCSALSNSIMYFSHFVPVFLPAKPTTTPAPRPPTPAPTIASQPLSLRPEACRPAAGGAVHTRGLDFACDIYIWAPLAGTCGVLLLSLVITLYCNHRNRRRVCKCPRPVVKSGDKPSLSARYV

SEQ ID NO: 11603 - protein, 1023 aa, synthetic construct
MALPVTALLLPLALLLHAARPEFNAGVTQTPKFQVLKTGQSMTLQCAQDMNHEYMSWYRQDPGMGLRLIHYSVAIQTTDQGEVPNGYNVSRSTIEDFPLRLLSAAPSQTSVYFCASSYLGNTGELFFGEGSRLTVLEDLKNVFPPEVAVFEPSEAEISHTQKATLVCLATGFYPDHVELSWWVNGKEVHSGVSTDPQPLKEQPALNDSRYCLSSRLRVSATFWQNPRNHFRCQVQFYGLSENDEWTQDRAKPVTQIVSAEAWGRADCGSQSFGLLDPKLCYLLDGILFIYGVILTALFLRVKFSRSADAPAYQQGQNQLYNELNLGRREEYDVLDKRRGRDPEMGGKPRRKNPQEGLYNELQKDKMAEAYSEIGMKGERRRGKGHDGLYQGLSTATKDTYDALHMQALPPRRAKRSGSGATNFSLLKQAGDVEENPGPTSMDWIWRILFLVGAATGAHSFEQEVTQIPAALSVPEGENLVLNCSFTDSAIYNLQWFRQDPGKGLTSLLLIQSSQREQTSGRLNASLDKSSGRSTLYIAASQPGDSATYLCAVRPTSGGSYIPTFGRGTSLIVHPYTRASTKGPSVFPLAPSSKSTSGGTAALGCLVKDYFPEPVTVSWNSGALTSGVHTFPAVLQSSGLYSLSSVVTVPSSSLGTQTYICNVNHKPSNTKVDKRVEPKSCTTPGERSSLPAFYPGTSGSCSGCGSLSLPLLAGLVAADAVASLLIVGAVFLCARPRRSPAQEDGKVYINMPGRGRAKRSGSGVKQTLNFDLLKLAGDVESNPGPSRGHMALPVTALLLPLALLLHAARPSQFRVSPLDRTWNLGETVELKCQVLLSNPTSGCSWLFQPRGAAASPTFLLYLSQNKPKAAEGLDTQRFSGKRLGDTFVLTLSDFRRENEGYYFCSALSNSIMYFSHFVPVFLPAKPTTTPAPRPPTPAPTIASQPLSLRPEACRPAAGGAVHTRGLDFACDIYIWAPLAGTCGVLLLSLVITLYCNHRNRRRVCKCPRPVVKSGDKPSLSARYV

SEQ ID NO: 11604 - protein, 1017 aa, synthetic construct
MALPVTALLLPLALLLHAARPAIQTTDQGEVPNGYNVSRSTIEDFPLRLLSAAPSQTSVYFCASSYLGNTGELFFGEGSRLTVLEGQPKANPTVTLFPPSSEELQANKATLVCLISDFYPGAVTVAWKADGSPVKAGVETTKPSKQSNNKYAASSYLSLTPEQWKSHRSYSCQVTHEGSTVEKTVAPTECSGSQSFGLLDPKLCYLLDGILFIYGVILTALFLRVKFSRSADAPAYQQGQNQLYNELNLGRREEYDVLDKRRGRDPEMGGKPRRKNPQEGLYNELQKDKMAEAYSEIGMKGERRRGKGHDGLYQGLSTATKDTYDALHMQALPPRRAKRSGSGATNFSLLKQAGDVEENPGPTSMDWIWRILFLVGAATGAHSFEQEVTQIPAALSVPEGENLVLNCSFTDSAIYNLQWFRQDPGKGLTSLLLIQSSQREQTSGRLNASLDKSSGRSTLYIAASQPGDSATYLCAVRPTSGGSYIPTFGRGTSLIVHPYTRASTKGPSVFPLAPSSKSTSGGTAALGCLVKDYFPEPVTVSWNSGALTSGVHTFPAVLQSSGLYSLSSVVTVPSSSLGTQTYICNVNHKPSNTKVDKRVEPKSCGTQSFGLLDPKLCYLLDGILFIYGVILTALFLRVKFSRSADAPAYQQGQNQLYNELNLGRREEYDVLDKRRGRDPEMGGKPRRKNPQEGLYNELQKDKMAEAYSEIGMKGERRRGKGHDGLYQGLSTATKDTYDALHMQALPPRRAKRSGSGVKQTLNFDLLKLAGDVESNPGPSRGHMALPVTALLLPLALLLHAARPSQFRVSPLDRTWNLGETVELKCQVLLSNPTSGCSWLFQPRGAAASPTFLLYLSQNKPKAAEGLDTQRFSGKRLGDTFVLTLSDFRRENEGYYFCSALSNSIMYFSHFVPVFLPAKPTTTPAPRPPTPAPTIASQPLSLRPEACRPAAGGAVHTRGLDFACDIYIWAPLAGTCGVLLLSLVITLYCNHRNRRRVCKCPRPVVKSGDKPSLSARYV

SEQ ID NO: 11605 - protein, 1035 aa, synthetic construct
MALPVTALLLPLALLLHAARPAIQTTDQGEVPNGYNVSRSTIEDFPLRLLSAAPSQTSVYFCASSYLGNTGELFFGEGSRLTVLEGQPKANPTVTLFPPSSEELQANKATLVCLISDFYPGAVTVAWKADGSPVKAGVETTKPSKQSNNKYAASSYLSLTPEQWKSHRSYSCQVTHEGSTVEKTVAPTECSGSQSFGLLDPKLCYLLDGILFIYGVILTALFLRVKFSRSADAPAYQQGQNQLYNELNLGRREEYDVLDKRRGRDPEMGGKPRRKNPQEGLYNELQKDKMAEAYSEIGMKGERRRGKGHDGLYQGLSTATKDTYDALHMQALPPRRAKRSGSGATNFSLLKQAGDVEENPGPTSMDWIWRILFLVGAATGAHSFEQEVTQIPAALSVPEGENLVLNCSFTDSAIYNLQWFRQDPGKGLTSLLLIQSSQREQTSGRLNASLDKSSGRSTLYIAASQPGDSATYLCAVRPTSGGSYIPTFGRGTSLIVHPYTRASPTSPKVFPLSLCSTQPDGNVVIACLVQGFFPQEPLSVTWSESGQGVTARNFPPSQDASGDLYTTSSQLTLPATQCLAGKSVTCHVKHYTNPSQDVTVPCPVPSTPPTPSPSTPPTPSPSGTQSFGLLDPKLCYLLDGILFIYGVILTALFLRVKFSRSADAPAYQQGQNQLYNELNLGRREEYDVLDKRRGRDPEMGGKPRRKNPQEGLYNELQKDKMAEAYSEIGMKGERRRGKGHDGLYQGLSTATKDTYDALHMQALPPRRAKRSGSGVKQTLNFDLLKLAGDVESNPGPSRGHMALPVTALLLPLALLLHAARPSQFRVSPLDRTWNLGETVELKCQVLLSNPTSGCSWLFQPRGAAASPTFLLYLSQNKPKAAEGLDTQRFSGKRLGDTFVLTLSDFRRENEGYYFCSALSNSIMYFSHFVPVFLPAKPTTTPAPRPPTPAPTIASQPLSLRPEACRPAAGGAVHTRGLDFACDIYIWAPLAGTCGVLLLSLVITLYCNHRNRRRVCKCPRPVVKSGDKPSLSARYV

SEQ ID NO: 11606 - protein, 1019 aa, synthetic construct
ASTMALPVTALLLPLALLLHAARPAIQTTDQGEVPNGYNVSRSTIEDFPLRLLSAAPSQTSVYFCASSYLGNTGELFFGEGSRLTVLEGQPKANPTVTLFPPSSEELQANKATLVCLISDFYPGAVTVAWKADGSPVKAGVETTKPSKQSNNKYAASSYLSLTPEQWKSHRSYSCQVTHEGSTVEKTVAPTECSGSQSFGLLDPKLCYLLDGILFIYGVILTALFLRVKFSRSADAPAYQQGQNQLYNELNLGRREEYDVLDKRRGRDPEMGGKPRRKNPQEGLYNELQKDKMAEAYSEIGMKGERRRGKGHDGLYQGLSTATKDTYDALHMQALPPRRAKRSGSGATNFSLLKQAGDVEENPGPTSMDWIWRILFLVGAATGAHSFEQEVTQIPAALSVPEGENLVLNCSFTDSAIYNLQWFRQDPGKGLTSLLLIQSSQREQTSGRLNASLDKSSGRSTLYIAASQPGDSATYLCAVRPTSGGSYIPTFGRGTSLIVHPYTRASTKGPSVFPLAPCSRSTSESTAALGCLVKDYFPEPVTVSWNSGALTSGVHTFPAVLQSSGLYSLSSVVTVPSSNFGTQTYTCNVDHKPSNTKVDKTVERKCGTQSFGLLDPKLCYLLDGILFIYGVILTALFLRVKFSRSADAPAYQQGQNQLYNELNLGRREEYDVLDKRRGRDPEMGGKPRRKNPQEGLYNELQKDKMAEAYSEIGMKGERRRGKGHDGLYQGLSTATKDTYDALHMQALPPRRAKRSGSGVKQTLNFDLLKLAGDVESNPGPSRGHMALPVTALLLPLALLLHAARPSQFRVSPLDRTWNLGETVELKCQVLLSNPTSGCSWLFQPRGAAASPTFLLYLSQNKPKAAEGLDTQRFSGKRLGDTFVLTLSDFRRENEGYYFCSALSNSIMYFSHFVPVFLPAKPTTTPAPRPPTPAPTIASQPLSLRPEACRPAAGGAVHTRGLDFACDIYIWAPLAGTCGVLLLSLVITLYCNHRNRRRVCKCPRPVVKSGDKPSLSARYV

SEQ ID NO: 11607 - protein, 1123 aa, synthetic construct
MALPVTALLLPLALLLHAARPNAGVTQTPKFQVLKTGQSMTLQCAQDMNHEYMSWYRQDPGMGLRLIHYSVAIQTTDQGEVPNGYNVSRSTIEDFPLRLLSAAPSQTSVYFCASSYLGNTGELFFGEGSRLTVLEGQPKANPTVTLFPPSSEELQANKATLVCLISDFYPGAVTVAWKADGSPVKAGVETTKPSKQSNNKYAASSYLSLTPEQWKSHRSYSCQVTHEGSTVEKTVAPTECSGSQSFGLLDPKLCYLLDGILFIYGVILTALFLRVKFSRSADAPAYQQGQNQLYNELNLGRREEYDVLDKRRGRDPEMGGKPRRKNPQEGLYNELQKDKMAEAYSEIGMKGERRRGKGHDGLYQGLSTATKDTYDALHMQALPPRRAKRSGSGATNFSLLKQAGDVEENPGPTSMDWIWRILFLVGAATGAHSFEQEVTQIPAALSVPEGENLVLNCSFTDSAIYNLQWFRQDPGKGLTSLLLIQSSQREQTSGRLNASLDKSSGRSTLYIAASQPGDSATYLCAVRPTSGGSYIPTFGRGTSLIVHPYTRAPTKAPDVFPIISGCRHPKDNSPVVLACLITGYHPTSVTVTWYMGTQSQPQRTFPEIQRRDSYYMTSSQLSTPLQQWRQGEYKCVVQHTASKSKKEIFRWPESPKAQASSVPTAQPQAEGSLAKATTAPATTRNTGRGGEEKKKEKEKEEQEERETKTPGTQSFGLLDPKLCYLLDGILFIYGVILTALFLRVKFSRSADAPAYQQGQNQLYNELNLGRREEYDVLDKRRGRDPEMGGKPRRKNPQEGLYNELQKDKMAEAYSEIGMKGERRRGKGHDGLYQGLSTATKDTYDALHMQALPPRRAKRSGSGVKQTLNFDLLKLAGDVESNPGPSRGHMALPVTALLLPLALLLHAARPSQFRVSPLDRTWNLGETVELKCQVLLSNPTSGCSWLFQPRGAAASPTFLLYLSQNKPKAAEGLDTQRFSGKRLGDTFVLTLSDFRRENEGYYFCSALSNSIMYFSHFVPVFLPAKPTTTPAPRPPTPAPTIASQPLSLRPEACRPAAGGAVHTRGLDFACDIYIWAPLAGTCGVLLLSLVITLYCNHRNRRRVCKCPRPVVKSGDKPSLSARYV

SEQ ID NO: 11608 - protein, 1065 aa, synthetic construct
MALPVTALLLPLALLLHAARPNAGVTQTPKFQVLKTGQSMTLQCAQDMNHEYMSWYRQDPGMGLRLIHYSVAIQTTDQGEVPNGYNVSRSTIEDFPLRLLSAAPSQTSVYFCASSYLGNTGELFFGEGSRLTVLEGQPKANPTVTLFPPSSEELQANKATLVCLISDFYPGAVTVAWKADGSPVKAGVETTKPSKQSNNKYAASSYLSLTPEQWKSHRSYSCQVTHEGSTVEKTVAPTECSGSQSFGLLDPKLCYLLDGILFIYGVILTALFLRVKFSRSADAPAYQQGQNQLYNELNLGRREEYDVLDKRRGRDPEMGGKPRRKNPQEGLYNELQKDKMAEAYSEIGMKGERRRGKGHDGLYQGLSTATKDTYDALHMQALPPRRAKRSGSGATNFSLLKQAGDVEENPGPTSMDWIWRILFLVGAATGAHSFEQEVTQIPAALSVPEGENLVLNCSFTDSAIYNLQWFRQDPGKGLTSLLLIQSSQREQTSGRLNASLDKSSGRSTLYIAASQPGDSATYLCAVRPTSGGSYIPTFGRGTSLIVHPYTRASTKGPSVFPLAPCSRSTSESTAALGCLVKDYFPEPVTVSWNSGALTSGVHTFPAVLQSSGLYSLSSVVTVPSSNFGTQTYTCNVDHKPSNTKVDKTVERKGTQSFGLLDPKLCYLLDGILFIYGVILTALFLRVKFSRSADAPAYQQGQNQLYNELNLGRREEYDVLDKRRGRDPEMGGKPRRKNPQEGLYNELQKDKMAEAYSEIGMKGERRRGKGHDGLYQGLSTATKDTYDALHMQALPPRRAKRSGSGVKQTLNFDLLKLAGDVESNPGPSRGHMALPVTALLLPLALLLHAARPSQFRVSPLDRTWNLGETVELKCQVLLSNPTSGCSWLFQPRGAAASPTFLLYLSQNKPKAAEGLDTQRFSGKRLGDTFVLTLSDFRRENEGYYFCSALSNSIMYFSHFVPVFLPAKPTTTPAPRPPTPAPTIASQPLSLRPEACRPAAGGAVHTRGLDFACDIYIWAPLAGTCGVLLLSLVITLYCNHRNRRRVCKCPRPVVKSGDKPSLSARYV

SEQ ID NO: 11609 - protein, 1072 aa, synthetic construct
MALPVTALLLPLALLLHAARPNAGVTQTPKFQVLKTGQSMTLQCAQDMNHEYMSWYRQDPGMGLRLIHYSVAIQTTDQGEVPNGYNVSRSTIEDFPLRLLSAAPSQTSVYFCASSYLGNTGELFFGEGSRLTVLEGQPKANPTVTLFPPSSEELQANKATLVCLISDFYPGAVTVAWKADGSPVKAGVETTKPSKQSNNKYAASSYLSLTPEQWKSHRSYSCQVTHEGSTVEKTVAPTECSGSQSFGLLDPKLCYLLDGILFIYGVILTALFLRVKFSRSADAPAYQQGQNQLYNELNLGRREEYDVLDKRRGRDPEMGGKPRRKNPQEGLYNELQKDKMAEAYSEIGMKGERRRGKGHDGLYQGLSTATKDTYDALHMQALPPRRAKRSGSGATNFSLLKQAGDVEENPGPTSMDWIWRILFLVGAATGAHSFEQEVTQIPAALSVPEGENLVLNCSFTDSAIYNLQWFRQDPGKGLTSLLLIQSSQREQTSGRLNASLDKSSGRSTLYIAASQPGDSATYLCAVRPTSGGSYIPTFGRGTSLIVHPYTRASPTSPKVFPLSLDSTPQDGNVVVACLVQGFFPQEPLSVTWSESGQNVTARNFPPSQDASGDLYTTSSQLTLPATQCPDGKSVTCHVKHYTNPSQDVTVPCPVPPPPPGTQSFGLLDPKLCYLLDGILFIYGVILTALFLRVKFSRSADAPAYQQGQNQLYNELNLGRREEYDVLDKRRGRDPEMGGKPRRKNPQEGLYNELQKDKMAEAYSEIGMKGERRRGKGHDGLYQGLSTATKDTYDALHMQALPPRRAKRSGSGVKQTLNFDLLKLAGDVESNPGPSRGHMALPVTALLLPLALLLHAARPSQFRVSPLDRTWNLGETVELKCQVLLSNPTSGCSWLFQPRGAAASPTFLLYLSQNKPKAAEGLDTQRFSGKRLGDTFVLTLSDFRRENEGYYFCSALSNSIMYFSHFVPVFLPAKPTTTPAPRPPTPAPTIASQPLSLRPEACRPAAGGAVHTRGLDFACDIYIWAPLAGTCGVLLLSLVITLYCNHRNRRRVCKCPRPVVKSGDKPSLSARYV

SEQ ID NO: 11610 - protein, 1067 aa, synthetic construct
MALPVTALLLPLALLLHAARPNAGVTQTPKFQVLKTGQSMTLQCAQDMNHEYMSWYRQDPGMGLRLIHYSVAIQTTDQGEVPNGYNVSRSTIEDFPLRLLSAAPSQTSVYFCASSYLGNTGELFFGEGSRLTVLEGQPKANPTVTLFPPSSEELQANKATLVCLISDFYPGAVTVAWKADGSPVKAGVETTKPSKQSNNKYAASSYLSLTPEQWKSHRSYSCQVTHEGSTVEKTVAPTECSGSQSFGLLDPKLCYLLDGILFIYGVILTALFLRVKFSRSADAPAYQQGQNQLYNELNLGRREEYDVLDKRRGRDPEMGGKPRRKNPQEGLYNELQKDKMAEAYSEIGMKGERRRGKGHDGLYQGLSTATKDTYDALHMQALPPRRAKRSGSGATNFSLLKQAGDVEENPGPTSMDWIWRILFLVGAATGAHSFEQEVTQIPAALSVPEGENLVLNCSFTDSAIYNLQWFRQDPGKGLTSLLLIQSSQREQTSGRLNASLDKSSGRSTLYIAASQPGDSATYLCAVRPTSGGSYIPTFGRGTSLIVHPYTRASTQSPSVFPLTRCCKNIPSNATSVTLGCLATGYFPEPVMVTWDTGSLNGTTMTLPATTLTLSGHYATISLLTVSGAWAKQMFTCRVAHTPSSTDWVDNKTFSGTQSFGLLDPKLCYLLDGILFIYGVILTALFLRVKFSRSADAPAYQQGQNQLYNELNLGRREEYDVLDKRRGRDPEMGGKPRRKNPQEGLYNELQKDKMAEAYSEIGMKGERRRGKGHDGLYQGLSTATKDTYDALHMQALPPRRAKRSGSGVKQTLNFDLLKLAGDVESNPGPSRGHMALPVTALLLPLALLLHAARPSQFRVSPLDRTWNLGETVELKCQVLLSNPTSGCSWLFQPRGAAASPTFLLYLSQNKPKAAEGLDTQRFSGKRLGDTFVLTLSDFRRENEGYYFCSALSNSIMYFSHFVPVFLPAKPTTTPAPRPPTPAPTIASQPLSLRPEACRPAAGGAVHTRGLDFACDIYIWAPLAGTCGVLLLSLVITLYCNHRNRRRVCKCPRPVVKSGDKPSLSARYV

SEQ ID NO: 11611 - protein, 1067 aa, synthetic construct
MALPVTALLLPLALLLHAARPNAGVTQTPKFQVLKTGQSMTLQCAQDMNHEYMSWYRQDPGMGLRLIHYSVAIQTTDQGEVPNGYNVSRSTIEDFPLRLLSAAPSQTSVYFCASSYLGNTGELFFGEGSRLTVLEGQPKANPTVTLFPPSSEELQANKATLVCLISDFYPGAVTVAWKADGSPVKAGVETTKPSKQSNNKYAASSYLSLTPEQWKSHRSYSCQVTHEGSTVEKTVAPTECSGSQSFGLLDPKLCYLLDGILFIYGVILTALFLRVKFSRSADAPAYQQGQNQLYNELNLGRREEYDVLDKRRGRDPEMGGKPRRKNPQEGLYNELQKDKMAEAYSEIGMKGERRRGKGHDGLYQGLSTATKDTYDALHMQALPPRRAKRSGSGATNFSLLKQAGDVEENPGPTSMDWIWRILFLVGAATGAHSFEQEVTQIPAALSVPEGENLVLNCSFTDSAIYNLQWFRQDPGKGLTSLLLIQSSQREQTSGRLNASLDKSSGRSTLYIAASQPGDSATYLCAVRPTSGGSYIPTFGRGTSLIVHPYTRASTKGPSVFPLAPCSRSTSESTAALGCLVKDYFPEPVTVSWNSGALTSGVHTFPAVLQSSGLYSLSSVVTVPSSSLGTKTYTCNVDHKPSNTKVDKRVESKYGGTQSFGLLDPKLCYLLDGILFIYGVILTALFLRVKFSRSADAPAYQQGQNQLYNELNLGRREEYDVLDKRRGRDPEMGGKPRRKNPQEGLYNELQKDKMAEAYSEIGMKGERRRGKGHDGLYQGLSTATKDTYDALHMQALPPRRAKRSGSGVKQTLNFDLLKLAGDVESNPGPSRGHMALPVTALLLPLALLLHAARPSQFRVSPLDRTWNLGETVELKCQVLLSNPTSGCSWLFQPRGAAASPTFLLYLSQNKPKAAEGLDTQRFSGKRLGDTFVLTLSDFRRENEGYYFCSALSNSIMYFSHFVPVFLPAKPTTTPAPRPPTPAPTIASQPLSLRPEACRPAAGGAVHTRGLDFACDIYIWAPLAGTCGVLLLSLVITLYCNHRNRRRVCKCPRPVVKSGDKPSLSARYV

SEQ ID NO: 11612 - protein, 1067 aa, synthetic construct
MALPVTALLLPLALLLHAARPNAGVTQTPKFQVLKTGQSMTLQCAQDMNHEYMSWYRQDPGMGLRLIHYSVAIQTTDQGEVPNGYNVSRSTIEDFPLRLLSAAPSQTSVYFCASSYLGNTGELFFGEGSRLTVLEGQPKANPTVTLFPPSSEELQANKATLVCLISDFYPGAVTVAWKADGSPVKAGVETTKPSKQSNNKYAASSYLSLTPEQWKSHRSYSCQVTHEGSTVEKTVAPTECSGSQSFGLLDPKLCYLLDGILFIYGVILTALFLRVKFSRSADAPAYQQGQNQLYNELNLGRREEYDVLDKRRGRDPEMGGKPRRKNPQEGLYNELQKDKMAEAYSEIGMKGERRRGKGHDGLYQGLSTATKDTYDALHMQALPPRRAKRSGSGATNFSLLKQAGDVEENPGPTSMDWIWRILFLVGAATGAHSFEQEVTQIPAALSVPEGENLVLNCSFTDSAIYNLQWFRQDPGKGLTSLLLIQSSQREQTSGRLNASLDKSSGRSTLYIAASQPGDSATYLCAVRPTSGGSYIPTFGRGTSLIVHPYTRASTKGPSVFPLAPCSRSTSESTAALGCLVKDYFPEPVTVSWNSGALTSGVHTFPAVLQSSGLYSLSSVVTVPSSNFGTQTYTCNVDHKPSNTKVDKTVERKCCGTQSFGLLDPKLCYLLDGILFIYGVILTALFLRVKFSRSADAPAYQQGQNQLYNELNLGRREEYDVLDKRRGRDPEMGGKPRRKNPQEGLYNELQKDKMAEAYSEIGMKGERRRGKGHDGLYQGLSTATKDTYDALHMQALPPRRAKRSGSGVKQTLNFDLLKLAGDVESNPGPSRGHMALPVTALLLPLALLLHAARPSQFRVSPLDRTWNLGETVELKCQVLLSNPTSGCSWLFQPRGAAASPTFLLYLSQNKPKAAEGLDTQRFSGKRLGDTFVLTLSDFRRENEGYYFCSALSNSIMYFSHFVPVFLPAKPTTTPAPRPPTPAPTIASQPLSLRPEACRPAAGGAVHTRGLDFACDIYIWAPLAGTCGVLLLSLVITLYCNHRNRRRVCKCPRPVVKSGDKPSLSARYV

SEQ ID NO: 11613 - protein, 1082 aa, synthetic construct
MALPVTALLLPLALLLHAARPNAGVTQTPKFQVLKTGQSMTLQCAQDMNHEYMSWYRQDPGMGLRLIHYSVAIQTTDQGEVPNGYNVSRSTIEDFPLRLLSAAPSQTSVYFCASSYLGNTGELFFGEGSRLTVLEDLKNVFPPEVAVFEPSEAEISHTQKATLVCLATGFYPDHVELSWWVNGKEVHSGVSTDPQPLKEQPALNDSRYCLSSRLRVSATFWQNPRNHFRCQVQFYGLSENDEWTQDRAKPVTQIVSAEAWGRADCGSQSFGLLDPKLCYLLDGILFIYGVILTALFLRVKFSRSADAPAYQQGQNQLYNELNLGRREEYDVLDKRRGRDPEMGGKPRRKNPQEGLYNELQKDKMAEAYSEIGMKGERRRGKGHDGLYQGLSTATKDTYDALHMQALPPRRAKRSGSGATNFSLLKQAGDVEENPGPTSMDWIWRILFLVGAATGAHSFEQEVTQIPAALSVPEGENLVLNCSFTDSAIYNLQWFRQDPGKGLTSLLLIQSSQREQTSGRLNASLDKSSGRSTLYIAASQPGDSATYLCAVRPTSGGSYIPTFGRGTSLIVHPYTRIQNPDPAVYQLRDSKSSDKSVCLFTDFDSQTNVSQSKDSDVYITDKTVLDMRSMDFKSNSAVAWSNKSDFACANAFNNSIIPEDTFFPSPESSCGTQSFGLLDPKLCYLLDGILFIYGVILTALFLRVKFSRSADAPAYQQGQNQLYNELNLGRREEYDVLDKRRGRDPEMGGKPRRKNPQEGLYNELQKDKMAEAYSEIGMKGERRRGKGHDGLYQGLSTATKDTYDALHMQALPPRRAKRSGSGVKQTLNFDLLKLAGDVESNPGPSRGHMALPVTALLLPLALLLHAARPSQFRVSPLDRTWNLGETVELKCQVLLSNPTSGCSWLFQPRGAAASPTFLLYLSQNKPKAAEGLDTQRFSGKRLGDTFVLTLSDFRRENEGYYFCSALSNSIMYFSHFVPVFLPAKPTTTPAPRPPTPAPTIASQPLSLRPEACRPAAGGAVHTRGLDFACDIYIWAPLAGTCGVLLLSLVITLYCNHRNRRRVCKCPRPVVKSGDKPSLSARYV

SEQ ID NO: 11614 - protein, 1082 aa, synthetic construct
MALPVTALLLPLALLLHAARPNAGVTQTPKFQVLKTGQSMTLQCAQDMNHEYMSWYRQDPGMGLRLIHYSVAIQTTDQGEVPNGYNVSRSTIEDFPLRLLSAAPSQTSVYFCASSYLGNTGELFFGEGSRLTVLEDLKNVFPPEVAVFEPSKAEIAHTQKATLVCLATGFYPDHVELSWWVNGKEVHSGVCTDPQPLKEQPALNDSRYCLSSRLRVSATFWQNPRNHFRCQVQFYGLSENDEWTQDRAKPVTQIVSAEAWGRADCGSQSFGLLDPKLCYLLDGILFIYGVILTALFLRVKFSRSADAPAYQQGQNQLYNELNLGRREEYDVLDKRRGRDPEMGGKPRRKNPQEGLYNELQKDKMAEAYSEIGMKGERRRGKGHDGLYQGLSTATKDTYDALHMQALPPRRAKRSGSGATNFSLLKQAGDVEENPGPTSMDWIWRILFLVGAATGAHSFEQEVTQIPAALSVPEGENLVLNCSFTDSAIYNLQWFRQDPGKGLTSLLLIQSSQREQTSGRLNASLDKSSGRSTLYIAASQPGDSATYLCAVRPTSGGSYIPTFGRGTSLIVHPYTRIQNPDPAVYQLRDSKSSDKSVCLFTDFDSQTNVSQSKDSDVYITDKCVLDMRSMDFKSNSAVAWSNKSDFACANAFNNSIIPEDTFFPSSDVPCGTQSFGLLDPKLCYLLDGILFIYGVILTALFLRVKFSRSADAPAYQQGQNQLYNELNLGRREEYDVLDKRRGRDPEMGGKPRRKNPQEGLYNELQKDKMAEAYSEIGMKGERRRGKGHDGLYQGLSTATKDTYDALHMQALPPRRAKRSGSGVKQTLNFDLLKLAGDVESNPGPSRGHMALPVTALLLPLALLLHAARPSQFRVSPLDRTWNLGETVELKCQVLLSNPTSGCSWLFQPRGAAASPTFLLYLSQNKPKAAEGLDTQRFSGKRLGDTFVLTLSDFRRENEGYYFCSALSNSIMYFSHFVPVFLPAKPTTTPAPRPPTPAPTIASQPLSLRPEACRPAAGGAVHTRGLDFACDIYIWAPLAGTCGVLLLSLVITLYCNHRNRRRVCKCPRPVVKSGDKPSLSARYV

SEQ ID NO: 11615 - protein, 813 aa, synthetic construct
MALPVTALLLPLALLLHAARPNAGVTQTPKFQVLKTGQSMTLQCAQDMNHEYMSWYRQDPGMGLRLIHYSVAIQTTDQGEVPNGYNVSRSTIEDFPLRLLSAAPSQTSVYFCASSYLGNTGELFFGEGSRLTVLEDLKNVFPPEVAVFEPSEAEISHTQKATLVCLATGFYPDHVELSWWVNGKEVHSGVCTDPQPLKEQPALNDSRYCLSSRLRVSATFWQNPRNHFRCQVQFYGLSENDEWTQDRAKPVTQIVSAEAWGRADCGSQSFGLLDPKLCYLLDGILFIYGVILTALFLRVKFSRSADAPAYQQGQNQLYNELNLGRREEYDVLDKRRGRDPEMGGKPRRKNPQEGLYNELQKDKMAEAYSEIGMKGERRRGKGHDGLYQGLSTATKDTYDALHMQALPPRRAKRSGSGATNFSLLKQAGDVEENPGPTSMDWIWRILFLVGAATGAHSFEQEVTQIPAALSVPEGENLVLNCSFTDSAIYNLQWFRQDPGKGLTSLLLIQSSQREQTSGRLNASLDKSSGRSTLYIAASQPGDSATYLCAVRPTSGGSYIPTFGRGTSLIVHPYTRIQNPDPAVYQLRDSKSSDKSVCLFTDFDSQTNVSQSKDSDVYITDKCVLDMRSMDFKSNSAVAWSNKSDFACANAFNNSIIPEDTFFPSPESSCGTQSFGLLDPKLCYLLDGILFIYGVILTALFLRVKFSRSADAPAYQQGQNQLYNELNLGRREEYDVLDKRRGRDPEMGGKPRRKNPQEGLYNELQKDKMAEAYSEIGMKGERRRGKGHDGLYQGLSTATKDTYDALHMQALPPR

SEQ ID NO: 11616 - protein, 854 aa, synthetic construct
MALPVTALLLPLALLLHAARPNAGVTQTPKFQVLKTGQSMTLQCAQDMNHEYMSWYRQDPGMGLRLIHYSVAIQTTDQGEVPNGYNVSRSTIEDFPLRLLSAAPSQTSVYFCASSYLGNTGELFFGEGSRLTVLEQSFGLLDPKLCYLLDGILFIYGVILTALFLRVKFSRSADAPAYQQGQNQLYNELNLGRREEYDVLDKRRGRDPEMGGKPRRKNPQEGLYNELQKDKMAEAYSEIGMKGERRRGKGHDGLYQGLSTATKDTYDALHMQALPPRRAKRSGSGATNFSLLKQAGDVEENPGPTSMDWIWRILFLVGAATGAHSFEQEVTQIPAALSVPEGENLVLNCSFTDSAIYNLQWFRQDPGKGLTSLLLIQSSQREQTSGRLNASLDKSSGRSTLYIAASQPGDSATYLCAVRPTSGGSYIPTFGRGTSLIVHPYTRQSFGLLDPKLCYLLDGILFIYGVILTALFLRVKFSRSADAPAYQQGQNQLYNELNLGRREEYDVLDKRRGRDPEMGGKPRRKNPQEGLYNELQKDKMAEAYSEIGMKGERRRGKGHDGLYQGLSTATKDTYDALHMQALPPRRAKRSGSGVKQTLNFDLLKLAGDVESNPGPSRGHMALPVTALLLPLALLLHAARPSQFRVSPLDRTWNLGETVELKCQVLLSNPTSGCSWLFQPRGAAASPTFLLYLSQNKPKAAEGLDTQRFSGKRLGDTFVLTLSDFRRENEGYYFCSALSNSIMYFSHFVPVFLPAKPTTTPAPRPPTPAPTIASQPLSLRPEACRPAAGGAVHTRGLDFACDIYIWAPLAGTCGVLLLSLVITLYCNHRNRRRVCKCPRPVVKSGDKPSLSARYV

SEQ ID NO: 11617 - protein, 854 aa, synthetic construct
MALPVTALLLPLALLLHAARPNAGVTQTPKFQVLKTGQSMTLQCAQDMNHEYMSWYRQDPGMGLRLIHYSVAIQTTDQGEVPNGYNVSRSTIEDFPLRLLSAAPSQTSVYFCASSYLGNTGELFFGEGSRLTVLEDLKNVFPPEVAVFEPSEAEISHTQKATLVCLATGFYPDHVELSWWVNGKEVHSGVCTDPQPLKEQPALNDSRYCLSSRLRVSATFWQNPRNHFRCQVQFYGLSENDEWTQDRAKPVTQIVSAEAWGRADCGSQSFGLLDPKLCYLLDGILFIYGVILTALFLRSKRSRLLHSDYMNMTPRRPGPTRKHYQPYAPPRDFAAYRSRVKFSRSADAPAYQQGQNQLYNELNLGRREEYDVLDKRRGRDPEMGGKPRRKNPQEGLYNELQKDKMAEAYSEIGMKGERRRGKGHDGLYQGLSTATKDTYDALHMQALPPRRAKRSGSGATNFSLLKQAGDVEENPGPTSMDWIWRILFLVGAATGAHSFEQEVTQIPAALSVPEGENLVLNCSFTDSAIYNLQWFRQDPGKGLTSLLLIQSSQREQTSGRLNASLDKSSGRSTLYIAASQPGDSATYLCAVRPTSGGSYIPTFGRGTSLIVHPYTRIQNPDPAVYQLRDSKSSDKSVCLFTDFDSQTNVSQSKDSDVYITDKCVLDMRSMDFKSNSAVAWSNKSDFACANAFNNSIIPEDTFFPSPESSCGTQSFGLLDPKLCYLLDGILFIYGVILTALFLRVKFSRSADAPAYQQGQNQLYNELNLGRREEYDVLDKRRGRDPEMGGKPRRKNPQEGLYNELQKDKMAEAYSEIGMKGERRRGKGHDGLYQGLSTATKDTYDALHMQALPPR

SEQ ID NO: 11618 - protein, 895 aa, synthetic construct
MALPVTALLLPLALLLHAARPNAGVTQTPKFQVLKTGQSMTLQCAQDMNHEYMSWYRQDPGMGLRLIHYSVAIQTTDQGEVPNGYNVSRSTIEDFPLRLLSAAPSQTSVYFCASSYLGNTGELFFGEGSRLTVLEDLKNVFPPEVAVFEPSEAEISHTQKATLVCLATGFYPDHVELSWWVNGKEVHSGVCTDPQPLKEQPALNDSRYCLSSRLRVSATFWQNPRNHFRCQVQFYGLSENDEWTQDRAKPVTQIVSAEAWGRADCGSQSFGLLDPKLCYLLDGILFIYGVILTALFLRSKRSRLLHSDYMNMTPRRPGPTRKHYQPYAPPRDFAAYRSRVKFSRSADAPAYQQGQNQLYNELNLGRREEYDVLDKRRGRDPEMGGKPRRKNPQEGLYNELQKDKMAEAYSEIGMKGERRRGKGHDGLYQGLSTATKDTYDALHMQALPPRRAKRSGSGATNFSLLKQAGDVEENPGPTSMDWIWRILFLVGAATGAHSFEQEVTQIPAALSVPEGENLVLNCSFTDSAIYNLQWFRQDPGKGLTSLLLIQSSQREQTSGRLNASLDKSSGRSTLYIAASQPGDSATYLCAVRPTSGGSYIPTFGRGTSLIVHPYTRIQNPDPAVYQLRDSKSSDKSVCLFTDFDSQTNVSQSKDSDVYITDKCVLDMRSMDFKSNSAVAWSNKSDFACANAFNNSIIPEDTFFPSPESSCGTQSFGLLDPKLCYLLDGILFIYGVILTALFLRSKRSRLLHSDYMNMTPRRPGPTRKHYQPYAPPRDFAAYRSRVKFSRSADAPAYQQGQNQLYNELNLGRREEYDVLDKRRGRDPEMGGKPRRKNPQEGLYNELQKDKMAEAYSEIGMKGERRRGKGHDGLYQGLSTATKDTYDALHMQALPPR

SEQ ID NO: 11619 - protein, 813 aa, synthetic construct
MALPVTALLLPLALLLHAARPNAGVTQTPKFQVLKTGQSMTLQCAQDMNHEYMSWYRQDPGMGLRLIHYSVAIQTTDQGEVPNGYNVSRSTIEDFPLRLLSAAPSQTSVYFCASSYLGNTGELFFGEGSRLTVLEDLKNVFPPEVAVFEPSEAEISHTQKATLVCLATGFYPDHVELSWWVNGKEVHSGVSTDPQPLKEQPALNDSRYCLSSRLRVSATFWQNPRNHFRCQVQFYGLSENDEWTQDRAKPVTQIVSAEAWGRADCGSQSFGLLDPKLCYLLDGILFIYGVILTALFLRVKFSRSADAPAYQQGQNQLYNELNLGRREEYDVLDKRRGRDPEMGGKPRRKNPQEGLYNELQKDKMAEAYSEIGMKGERRRGKGHDGLYQGLSTATKDTYDALHMQALPPRRAKRSGSGATNFSLLKQAGDVEENPGPTSMDWIWRILFLVGAATGAHSFEQEVTQIPAALSVPEGENLVLNCSFTDSAIYNLQWFRQDPGKGLTSLLLIQSSQREQTSGRLNASLDKSSGRSTLYIAASQPGDSATYLCAVRPTSGGSYIPTFGRGTSLIVHPYTRIQNPDPAVYQLRDSKSSDKSVCLFTDFDSQTNVSQSKDSDVYITDKTVLDMRSMDFKSNSAVAWSNKSDFACANAFNNSIIPEDTFFPSPESSCGTQSFGLLDPKLCYLLDGILFIYGVILTALFLRVKFSRSADAPAYQQGQNQLYNELNLGRREEYDVLDKRRGRDPEMGGKPRRKNPQEGLYNELQKDKMAEAYSEIGMKGERRRGKGHDGLYQGLSTATKDTYDALHMQALPPR

SEQ ID NO: 11620 - protein, 1057 aa, synthetic construct
MALPVTALLLPLALLLHAARPNAGVTQTPKFQVLKTGQSMTLQCAQDMNHEYMSWYRQDPGMGLRLIHYSVAIQTTDQGEVPNGYNVSRSTIEDFPLRLLSAAPSQTSVYFCASSYLGNTGELFFGEGSRLTVLEDKQLDADVSPKPTIFLPSIAETKLQKAGTYLCLLEKFFPDVIKIHWQEKKSNTILGSQEGNTMKTNDTYMKFSWLTVPEKSLDKEHRCIVRHENNKNGVDQEIIFPPIKTDVITGSQSFGLLDPKLCYLLDGILFIYGVILTALFLRVKFSRSADAPAYQQGQNQLYNELNLGRREEYDVLDKRRGRDPEMGGKPRRKNPQEGLYNELQKDKMAEAYSEIGMKGERRRGKGHDGLYQGLSTATKDTYDALHMQALPPRRAKRSGSGATNFSLLKQAGDVEENPGPTSMDWIWRILFLVGAATGAHSFEQEVTQIPAALSVPEGENLVLNCSFTDSAIYNLQWFRQDPGKGLTSLLLIQSSQREQTSGRLNASLDKSSGRSTLYIAASQPGDSATYLCAVRPTSGGSYIPTFGRGTSLIVHPYTRSQPHTKPSVFVMKNGTNVACLVKEFYPKDIRINLVSSKKITEFDPAIVISPSGKYNAVKLGKYEDSNSVTCSVQHDNKTVHSTDFGTQSFGLLDPKLCYLLDGILFIYGVILTALFLRVKFSRSADAPAYQQGQNQLYNELNLGRREEYDVLDKRRGRDPEMGGKPRRKNPQEGLYNELQKDKMAEAYSEIGMKGERRRGKGHDGLYQGLSTATKDTYDALHMQALPPRRAKRSGSGVKQTLNFDLLKLAGDVESNPGPSRGHMALPVTALLLPLALLLHAARPSQFRVSPLDRTWNLGETVELKCQVLLSNPTSGCSWLFQPRGAAASPTFLLYLSQNKPKAAEGLDTQRFSGKRLGDTFVLTLSDFRRENEGYYFCSALSNSIMYFSHFVPVFLPAKPTTTPAPRPPTPAPTIASQPLSLRPEACRPAAGGAVHTRGLDFACDIYIWAPLAGTCGVLLLSLVITLYCNHRNRRRVCKCPRPVVKSGDKPSLSARYV

SEQ ID NO: 11621 - protein, 951 aa, synthetic construct
MALPVTALLLPLALLLHAARPACGVTQSPTHLIKTRGQQATLRCSPISGHTSVYWYQQALGLGLQFLLWYDEGEERNRGNFPPRFSGRQFPNYSSELNVNALELEDSALYLCASSLGGDELGADGNEQFFGPGTRLTVLEGTGGGGSGGGGSGGGGSEFNAGVTQTPKFQVLKTGQSMTLQCAQDMNHEYMSWYRQDPGMGLRLIHYSVAIQTTDQGEVPNGYNVSRSTIEDFPLRLLSAAPSQTSVYFCASSYLGNTGELFFGEGSRLTVLEDLKNVFPPEVAVFEPSEAEISHTQKATLVCLATGFYPDHVELSWWVNGKEVHSGVSTDPQPLKEQPALNDSRYCLSSRLRVSATFWQNPRNHFRCQVQFYGLSENDEWTQDRAKPVTQIVSAEAWGRADCGSQSFGLLDPKLCYLLDGILFIYGVILTALFLRVKFSRSADAPAYQQGQNQLYNELNLGRREEYDVLDKRRGRDPEMGGKPRRKNPQEGLYNELQKDKMAEAYSEIGMKGERRRGKGHDGLYQGLSTATKDTYDALHMQALPPRRAKRSGSGATNFSLLKQAGDVEENPGPTSMDWIWRILFLVGAATGAHSFEQEVTQIPAALSVPEGENLVLNCSFTDSAIYNLQWFRQDPGKGLTSLLLIQSSQREQTSGRLNASLDKSSGRSTLYIAASQPGDSATYLCAVRPTSGGSYIPTFGRGTSLIVHPYTRIQNPDPAVYQLRDSKSSDKSVCLFTDFDSQTNVSQSKDSDVYITDKTVLDMRSMDFKSNSAVAWSNKSDFACANAFNNSIIPEDTFFPSPESSCGTQSFGLLDPKLCYLLDGILFIYGVILTALFLRVKFSRSADAPAYQQGQNQLYNELNLGRREEYDVLDKRRGRDPEMGGKPRRKNPQEGLYNELQKDKMAEAYSEIGMKGERRRGKGHDGLYQGLSTATKDTYDALHMQALPPR

SEQ ID NO: 11622 - protein, 1090 aa, synthetic construct
MALPVTALLLPLALLLHAARPACGVTQSPTHLIKTRGQQATLRCSPISGHTSVYWYQQALGLGLQFLLWYDEGEERNRGNFPPRFSGRQFPNYSSELNVNALELEDSALYLCASSLGGDELGADGNEQFFGPGTRLTVLEGTGGGGSGGGGSGGGGSEFNAGVTQTPKFQVLKTGQSMTLQCAQDMNHEYMSWYRQDPGMGLRLIHYSVAIQTTDQGEVPNGYNVSRSTIEDFPLRLLSAAPSQTSVYFCASSYLGNTGELFFGEGSRLTVLEDLKNVFPPEVAVFEPSEAEISHTQKATLVCLATGFYPDHVELSWWVNGKEVHSGVSTDPQPLKEQPALNDSRYCLSSRLRVSATFWQNPRNHFRCQVQFYGLSENDEWTQDRAKPVTQIVSAEAWGRADCGSQSFGLLDPKLCYLLDGILFIYGVILTALFLRVKFSRSADAPAYQQGQNQLYNELNLGRREEYDVLDKRRGRDPEMGGKPRRKNPQEGLYNELQKDKMAEAYSEIGMKGERRRGKGHDGLYQGLSTATKDTYDALHMQALPPRRAKRSGSGATNFSLLKQAGDVEENPGPTSMDWIWRILFLVGAATGAHSGPQVQLQESGGGLAQAGGSLRLSCAASGRTFSMGWFRQAPGKEREFVAAITYSGGSPYYASSVRGRFTISRDNAKNTVYLQMNSLKPEDTAVYYCAANPTYGSDWNAENWGQGTQVTVSSGSGGGGSGGGGSGGGGSFEFEQEVTQIPAALSVPEGENLVLNCSFTDSAIYNLQWFRQDPGKGLTSLLLIQSSQREQTSGRLNASLDKSSGRSTLYIAASQPGDSATYLCAVRPTSGGSYIPTFGRGTSLIVHPYTRIQNPDPAVYQLRDSKSSDKSVCLFTDFDSQTNVSQSKDSDVYITDKTVLDMRSMDFKSNSAVAWSNKSDFACANAFNNSIIPEDTFFPSPESSCGTQSFGLLDPKLCYLLDGILFIYGVILTALFLRVKFSRSADAPAYQQGQNQLYNELNLGRREEYDVLDKRRGRDPEMGGKPRRKNPQEGLYNELQKDKMAEAYSEIGMKGERRRGKGHDGLYQGLSTATKDTYDALHMQALPPR

SEQ ID NO: 11623 - protein, 953 aa, synthetic construct
MALPVTALLLPLALLLHAARPDIQMTQSPSSLSASVGDRVTITCKASDHINNWLAWYQQKPGQAPKLLIYGATTLETGVPSRFSGSGSGTDYTLTISSLQPEDFATYYCQQSWNTPWTFGQGTKLEIKRLEDLKNVFPPEVAVFEPSEAEISHTQKATLVCLATGFYPDHVELSWWVNGKEVHSGVSTDPQPLKEQPALNDSRYCLSSRLRVSATFWQNPRNHFRCQVQFYGLSENDEWTQDRAKPVTQIVSAEAWGRADCGSQSFGLLDPKLCYLLDGILFIYGVILTALFLRVKFSRSADAPAYQQGQNQLYNELNLGRREEYDVLDKRRGRDPEMGGKPRRKNPQEGLYNELQKDKMAEAYSEIGMKGERRRGKGHDGLYQGLSTATKDTYDALHMQALPPRRAKRSGSGATNFSLLKQAGDVEENPGPTSMDWIWRILFLVGAATGAHSGPQLQLQESGPGLVKPSETLSLTCTVSGDSISSGDYYWGWIRQPPGKGLEWIGHIYYSGVTYYNPSLKSRVTISVDTSRNQFSLKLSSVTAADTAVYYCTREDSSNWRSRGQGTLVTVSSGSGGGGSGGGGSGGGGSFEQVQLQQPGAELVKPGASVKMSCKASGYAFSSYWINWMKQKPGQGLEWIGQIYPGDGDTNYNGKFKGRATLTADTSSSTAYMQLSSLTSEDSAVYFCARSITTVVGCAMDYWGQGTSVTVSSTRIQNPDPAVYQLRDSKSSDKSVCLFTDFDSQTNVSQSKDSDVYITDKTVLDMRSMDFKSNSAVAWSNKSDFACANAFNNSIIPEDTFFPSPESSCGTQSFGLLDPKLCYLLDGILFIYGVILTALFLRVKFSRSADAPAYQQGQNQLYNELNLGRREEYDVLDKRRGRDPEMGGKPRRKNPQEGLYNELQKDKMAEAYSEIGMKGERRRGKGHDGLYQGLSTATKDTYDALHMQALPPR

SEQ ID NO: 11624 - protein, 8 aa, synthetic construct
GGGGGGGG

SEQ ID NO: 11625 - protein, 8 aa, synthetic construct
GGGGGGGG

SEQ ID NO: 11626 - protein, 497 aa, synthetic construct
MALPVTALLLPLALLLHAARPDIQMTQSPSSLSASVGDRVTITCKASDHINNWLAWYQQKPGQAPKLLIYGATTLETGVPSRFSGSGSGTDYTLTISSLQPEDFATYYCQQSWNTPWTFGQGTKLEIKRGGGGSGGGGSGGGGSQVQLQQPGAELVKPGASVKMSCKASGYAFSSYWINWMKQKPGQGLEWIGQIYPGDGDTNYNGKFKGRATLTADTSSSTAYMQLSSLTSEDSAVYFCARSITTVVGCAMDYWGQGTSVTVSSTREQKLISEEDLKIEVMYPPPYLDNEKSNGTIIHVKGKHLCPSPLFPGPSKPFWVLVVVGGVLACYSLLVTVAFIIFWVRSKRSRLLHSDYMNMTPRRPGPTRKHYQPYAPPRDFAAYRSRVKFSRSADAPAYQQGQNQLYNELNLGRREEYDVLDKRRGRDPEMGGKPRRKNPQEGLYNELQKDKMAEAYSEIGMKGERRRGKGHDGLYQGLSTATKDTYDALHMQALPPR

SEQ ID NO: 11627 - protein, 503 aa, synthetic construct
MALPVTALLLPLALLLHAARPDIQMTQSPSSLSASVGDRVTITCKASDHINNWLAWYQQKPGQAPKLLIYGATTLETGVPSRFSGSGSGTDYTLTISSLQPEDFATYYCQQSWNTPWTFGQGTKLEIKRGGGGSGGGGSGGGGSQVQLQQPGAELVKPGASVKMSCKASGYAFSSYWINWMKQKPGQGLEWIGQIYPGDGDTNYNGKFKGRATLTADTSSSTAYMQLSSLTSEDSAVYFCARSITTVVGCAMDYWGQGTSVTVSSTREQKLISEEDLAKPTTTPAPRPPTPAPTIASQPLSLRPEACRPAAGGAVHTRGLDFACDIYIWAPLAGTCGVLLLSLVITLYCKRGRKKLLYIFKQPFMRPVQTTQEEDGCSCRFPEEEEGGCELRVKFSRSADAPAYQQGQNQLYNELNLGRREEYDVLDKRRGRDPEMGGKPRRKNPQEGLYNELQKDKMAEAYSEIGMKGERRRGKGHDGLYQGLSTATKDTYDALHMQALPPR

SEQ ID NO: 11628 - protein, 503 aa, synthetic construct
MALPVTALLLPLALLLHAARPQVQLQQPGAELVKPGASVKMSCKASGYAFSSYWINWMKQKPGQGLEWIGQIYPGDGDTNYNGKFKGRATLTADTSSSTAYMQLSSLTSEDSAVYFCARSITTVVGCAMDYWGQGTSVTVSSGGGGSGGGGSGGGGSDIQMTQSPSSLSASVGDRVTITCKASDHINNWLAWYQQKPGQAPKLLIYGATTLETGVPSRFSGSGSGTDYTLTISSLQPEDFATYYCQQSWNTPWTFGQGTKLEIKRTREQKLISEEDLAKPTTTPAPRPPTPAPTIASQPLSLRPEACRPAAGGAVHTRGLDFACDIYIWAPLAGTCGVLLLSLVITLYCKRGRKKLLYIFKQPFMRPVQTTQEEDGCSCRFPEEEEGGCELRVKFSRSADAPAYQQGQNQLYNELNLGRREEYDVLDKRRGRDPEMGGKPRRKNPQEGLYNELQKDKMAEAYSEIGMKGERRRGKGHDGLYQGLSTATKDTYDALHMQALPPR

SEQ ID NO: 11629 - protein, 916 aa, synthetic construct
MALPVTALLLPLALLLHAARPDIQMTQSPSSLSASVGDRVTITCKASDHINNWLAWYQQKPGQAPKLLIYGATTLETGVPSRFSGSGSGTDYTLTISSLQPEDFATYYCQQSWNTPWTFGQGTKLEIKRGGGGSGGGGSGGGGSQVQLQQPGAELVKPGASVKMSCKASGYAFSSYWINWMKQKPGQGLEWIGQIYPGDGDTNYNGKFKGRATLTADTSSSTAYMQLSSLTSEDSAVYFCARSITTVVGCAMDYWGQGTSVTVSSTREQKLISEEDLAKPTTTPAPRPPTPAPTIASQPLSLRPEACRPAAGGAVHTRGLDFACDIYIWAPLAGTCGVLLLSLVITLYCGRARVKFSRSADAPAYQQGQNQLYNELNLGRREEYDVLDKRRGRDPEMGGKPRRKNPQEGLYNELQKDKMAEAYSEIGMKGERRRGKGHDGLYQGLSTATKDTYDALHMQALPPRSRGSGATNFSLLKQAGDVEENPGPGIHMATYEVLCEVARKLGTDDREVVLFLLNVFIPQPTLAQLIGALRALKEEGRLTFPLLAECLFRAGRRDLLRDLLHLDPRFLERHLAGTMSYFSPYQLTVLHVDGELCARDIRSLIFLSKDTIGSRSTPQTFLHWVYCMENLDLLGPTDVDALMSMLRSLSRVDLQRQVQTLMGLHLSGPSHSQHYRHTPLETDFYDYKDDDDKTSGSGEGRGSLLTCGDVEENPGPHMTEYKPTVRLATRDDVPRAVRTLAAAFADYPATRHTVDPDRHIERVTELQELFLTRVGLDIGKVWVADDGAAVAVWTTPESVEAGAVFAEIGPRMAELSGSRLAAQQQMEGLLAPHRPKEPAWFLATVGVSPDHQGKGLGSAVVLPGVEAAERAGVPAFLETSAPRNLPFYERLGFTVTADVEVPEGPRTWCMTRKPGA

SEQ ID NO: 11630 - protein, 856 aa, synthetic construct
MALPVTALLLPLALLLHAARPDIQMTQSPSSLSASVGDRVTITCKASDHINNWLAWYQQKPGQAPKLLIYGATTLETGVPSRFSGSGSGTDYTLTISSLQPEDFATYYCQQSWNTPWTFGQGTKLEIKRLEIQNPDPAVYQLRDSKSSDKSVCLFTDFDSQTNVSQSKDSDVYITDKCVLDMRSMDFKSNSAVAWSNKSDFACANAFNNSIIPEDTFFPSSDVPCDVKLVEKSFETDTNLNFQNLSVIGFRILLLKVAGFNLLMTLRLWSSRAKRSGSGVKQTLNFDLLKLAGDVESNPGPTSMDWIWRILFLVGAATGAHSFEQVQLQQPGAELVKPGASVKMSCKASGYAFSSYWINWMKQKPGQGLEWIGQIYPGDGDTNYNGKFKGRATLTADTSSSTAYMQLSSLTSEDSAVYFCARSITTVVGCAMDYWGQGTSVTVSSTREDLKNVFPPEVAVFEPSKAEIAHTQKATLVCLATGFYPDHVELSWWVNGKEVHSGVCTDPQPLKEQPALNDSRYCLSSRLRVSATFWQNPRNHFRCQVQFYGLSENDEWTQDRAKPVTQIVSAEAWGRADCGITSASYHQGVLSATILYEILLGKATLYAVLVSALVLMAMVKRKDSRGRAKRSGSGATNFSLLKQAGDVEENPGPSRGHMTEYKPTVRLATRDDVPRAVRTLAAAFADYPATRHTVDPDRHIERVTELQELFLTRVGLDIGKVWVADDGAAVAVWTTPESVEAGAVFAEIGPRMAELSGSRLAAQQQMEGLLAPHRPKEPAWFLATVGVSPDHQGKGLGSAVVLPGVEAAERAGVPAFLETSAPRNLPFYERLGFTVTADVEVPEGPRTWCMTRKPGA

SEQ ID NO: 11631 - protein, 855 aa, synthetic construct
MALPVTALLLPLALLLHAARPDIQMTQSPSSLSASVGDRVTITCKASDHINNWLAWYQQKPGQAPKLLIYGATTLETGVPSRFSGSGSGTDYTLTISSLQPEDFATYYCQQSWNTPWTFGQGTKLEIKRLEDLKNVFPPEVAVFEPSKAEIAHTQKATLVCLATGFYPDHVELSWWVNGKEVHSGVCTDPQPLKEQPALNDSRYCLSSRLRVSATFWQNPRNHFRCQVQFYGLSENDEWTQDRAKPVTQIVSAEAWGRADCGITSASYHQGVLSATILYEILLGKATLYAVLVSALVLMAMVKRKDSRGRAKRSGSGATNFSLLKQAGDVEENPGPTSMDWIWRILFLVGAATGAHSFEQVQLQQPGAELVKPGASVKMSCKASGYAFSSYWINWMKQKPGQGLEWIGQIYPGDGDTNYNGKFKGRATLTADTSSSTAYMQLSSLTSEDSAVYFCARSITTVVGCAMDYWGQGTSVTVSSTRIQNPDPAVYQLRDSKSSDKSVCLFTDFDSQTNVSQSKDSDVYITDKCVLDMRSMDFKSNSAVAWSNKSDFACANAFNNSIIPEDTFFPSSDVPCDVKLVEKSFETDTNLNFQNLSVIGFRILLLKVAGFNLLMTLRLWSSRAKRSGSGVKQTLNFDLLKLAGDVESNPGPSRGHMTEYKPTVRLATRDDVPRAVRTLAAAFADYPATRHTVDPDRHIERVTELQELFLTRVGLDIGKVWVADDGAAVAVWTTPESVEAGAVFAEIGPRMAELSGSRLAAQQQMEGLLAPHRPKEPAWFLATVGVSPDHQGKGLGSAVVLPGVEAAERAGVPAFLETSAPRNLPFYERLGFTVTADVEVPEGPRTWCMTRKPGA

SEQ ID NO: 11632 - protein, 622 aa, synthetic construct
MALPVTALLLPLALLLHAARPDIQMTQSPSSLSASVGDRVTITCKASDHINNWLAWYQQKPGQAPKLLIYGATTLETGVPSRFSGSGSGTDYTLTISSLQPEDFATYYCQQSWNTPWTFGQGTKLEIKRLEDLKNVFPPEVAVFEPSEAEISHTQKATLVCLATGFYPDHVELSWWVNGKEVHSGVCTDPQPLKEQPALNDSRYCLSSRLRVSATFWQNPRNHFRCQVQFYGLSENDEWTQDRAKPVTQIVSAEAWGRADCGFTSESYQQGVLSATILYEILLGKATLYAVLVSALVLMAMVKRKDSRGRAKRSGSGATNFSLLKQAGDVEENPGPTSMDWIWRILFLVGAATGAHSFEQVQLQQPGAELVKPGASVKMSCKASGYAFSSYWINWMKQKPGQGLEWIGQIYPGDGDTNYNGKFKGRATLTADTSSSTAYMQLSSLTSEDSAVYFCARSITTVVGCAMDYWGQGTSVTVSSTRIQNPDPAVYQLRDSKSSDKSVCLFTDFDSQTNVSQSKDSDVYITDKCVLDMRSMDFKSNSAVAWSNKSDFACANAFNNSIIPEDTFFPSPESSCDVKLVEKSFETDTNLNFQNLSVIGFRILLLKVAGFNLLMTLRLWSS

SEQ ID NO: 11633 - protein, 847 aa, synthetic construct
MALPVTALLLPLALLLHAARPDIQMTQSPSSLSASVGDRVTITCKASDHINNWLAWYQQKPGQAPKLLIYGATTLETGVPSRFSGSGSGTDYTLTISSLQPEDFATYYCQQSWNTPWTFGQGTKLEIKRLEDLKNVFPPEVAVFEPSEAEISHTQKATLVCLATGFYPDHVELSWWVNGKEVHSGVCTDPQPLKEQPALNDSRYCLSSRLRVSATFWQNPRNHFRCQVQFYGLSENDEWTQDRAKPVTQIVSAEAWGRADCGFTSESYQQGVLSATILYEILLGKATLYAVLVSALVLMAMVKRKDSRGRAKRSGSGATNFSLLKQAGDVEENPGPTSMDWIWRILFLVGAATGAHSFEQVQLQQPGAELVKPGASVKMSCKASGYAFSSYWINWMKQKPGQGLEWIGQIYPGDGDTNYNGKFKGRATLTADTSSSTAYMQLSSLTSEDSAVYFCARSITTVVGCAMDYWGQGTSVTVSSTRIQNPDPAVYQLRDSKSSDKSVCLFTDFDSQTNVSQSKDSDVYITDKCVLDMRSMDFKSNSAVAWSNKSDFACANAFNNSIIPEDTFFPSPESSCDVKLVEKSFETDTNLNFQNLSVIGFRILLLKVAGFNLLMTLRLWSSRAKRSGSGVKQTLNFDLLKLAGDVESNPGPSRGGIHTMATYEVLCEVARKLGTDDREVVLFLLNVFIPQPTLAQLIGALRALKEEGRLTFPLLAECLFRAGRRDLLRDLLHLDPRFLERHLAGTMSYFSPYQLTVLHVDGELCARDIRSLIFLSKDTIGSRSTPQTFLHWVYCMENLDLLGPTDVDALMSMLRSLSRVDLQRQVQTLMGLHLSGPSHSQHYRHTP

SEQ ID NO: 11634 - protein, 626 aa, synthetic construct
MALPVTALLLPLALLLHAARPDIQMTQSPSSLSASVGDRVTITCKASDHINNWLAWYQQKPGQAPKLLIYGATTLETGVPSRFSGSGSGTDYTLTISSLQPEDFATYYCQQSWNTPWTFGQGTKLEIKRLEIQNPDPAVYQLRDSKSSDKSVCLFTDFDSQTNVSQSKDSDVYITDKCVLDMRSMDFKSNSAVAWSNKSDFACANAFNNSIIPEDTFFPSPESSCDVKLVEKSFETDTNLNFQNLSVIGFRILLLKVAGFNLLMTLRLWSSRAKRSGSGVKQTLNFDLLKLAGDVESNPGPTSMDWIWRILFLVGAATGAHSFEQVQLQQPGAELVKPGASVKMSCKASGYAFSSYWINWMKQKPGQGLEWIGQIYPGDGDTNYNGKFKGRATLTADTSSSTAYMQLSSLTSEDSAVYFCARSITTVVGCAMDYWGQGTSVTVSSTREDLKNVFPPEVAVFEPSEAEISHTQKATLVCLATGFYPDHVELSWWVNGKEVHSGVCTDPQPLKEQPALNDSRYCLSSRLRVSATFWQNPRNHFRCQVQFYGLSENDEWTQDRAKPVTQIVSAEAWGRADCGFTSESYQQGVLSATILYEILLGKATLYAVLVSALVLMAMVKRKDSRG

SEQ ID NO: 11635 - protein, 848 aa, synthetic construct
MALPVTALLLPLALLLHAARPDIQMTQSPSSLSASVGDRVTITCKASDHINNWLAWYQQKPGQAPKLLIYGATTLETGVPSRFSGSGSGTDYTLTISSLQPEDFATYYCQQSWNTPWTFGQGTKLEIKRLEIQNPDPAVYQLRDSKSSDKSVCLFTDFDSQTNVSQSKDSDVYITDKCVLDMRSMDFKSNSAVAWSNKSDFACANAFNNSIIPEDTFFPSPESSCDVKLVEKSFETDTNLNFQNLSVIGFRILLLKVAGFNLLMTLRLWSSRAKRSGSGVKQTLNFDLLKLAGDVESNPGPTSMDWIWRILFLVGAATGAHSFEQVQLQQPGAELVKPGASVKMSCKASGYAFSSYWINWMKQKPGQGLEWIGQIYPGDGDTNYNGKFKGRATLTADTSSSTAYMQLSSLTSEDSAVYFCARSITTVVGCAMDYWGQGTSVTVSSTREDLKNVFPPEVAVFEPSEAEISHTQKATLVCLATGFYPDHVELSWWVNGKEVHSGVCTDPQPLKEQPALNDSRYCLSSRLRVSATFWQNPRNHFRCQVQFYGLSENDEWTQDRAKPVTQIVSAEAWGRADCGFTSESYQQGVLSATILYEILLGKATLYAVLVSALVLMAMVKRKDSRGRAKRSGSGATNFSLLKQAGDVEENPGPSRGGIHTMATYEVLCEVARKLGTDDREVVLFLLNVFIPQPTLAQLIGALRALKEEGRLTFPLLAECLFRAGRRDLLRDLLHLDPRFLERHLAGTMSYFSPYQLTVLHVDGELCARDIRSLIFLSKDTIGSRSTPQTFLHWVYCMENLDLLGPTDVDALMSMLRSLSRVDLQRQVQTLMGLHLSGPSHSQHYRHTP

SEQ ID NO: 11636 - protein, 900 aa, synthetic construct
MALPVTALLLPLALLLHAARPLEGKPIPNPLLGLDSTGSGEDLKNVFPPEVAVFEPSKAEIAHTQKATLVCLATGFYPDHVELSWWVNGKEVHSGVCTDPQPLKEQPALNDSRYCLSSRLRVSATFWQNPRNHFRCQVQFYGLSENDEWTQDRAKPVTQIVSAEAWGRADCGITSASYHQGVLSATILYEILLGKATLYAVLVSALVLMAMVKRKDSRGRAKRSGSGATNFSLLKQAGDVEENPGPTSMALPVTALLLPLALLLHAARPDIQMTQSPSSLSASVGDRVTITCKASDHINNWLAWYQQKPGQAPKLLIYGATTLETGVPSRFSGSGSGTDYTLTISSLQPEDFATYYCQQSWNTPWTFGQGTKLEIKRGGGGSGGGGSGGGGSQVQLQQPGAELVKPGASVKMSCKASGYAFSSYWINWMKQKPGQGLEWIGQIYPGDGDTNYNGKFKGRATLTADTSSSTAYMQLSSLTSEDSAVYFCARSITTVVGCAMDYWGQGTSVTVSSTREQKLISEEDGSGIQNPDPAVYQLRDSKSSDKSVCLFTDFDSQTNVSQSKDSDVYITDKCVLDMRSMDFKSNSAVAWSNKSDFACANAFNNSIIPEDTFFPSSDVPCDVKLVEKSFETDTNLNFQNLSVIGFRILLLKVAGFNLLMTLRLWSSRAKRSGSGVKQTLNFDLLKLAGDVESNPGPSRGHMTEYKPTVRLATRDDVPRAVRTLAAAFADYPATRHTVDPDRHIERVTELQELFLTRVGLDIGKVWVADDGAAVAVWTTPESVEAGAVFAEIGPRMAELSGSRLAAQQQMEGLLAPHRPKEPAWFLATVGVSPDHQGKGLGSAVVLPGVEAAERAGVPAFLETSAPRNLPFYERLGFTVTADVEVPEGPRTWCMTRKPGA

SEQ ID NO: 11637 - protein, 901 aa, synthetic construct
MALPVTALLLPLALLLHAARPLEQKLISEEDLGSGDRPDPAVYQLRDSKSSDKSVCLFTDFDSQTNVSQSKDSDVYITDKCVLDMRSMDFKSNSAVAWSNKSDFACANAFNNSIIPEDTFFPSPESSCDVKLVEKSFETDTNLNFQNLSVIGFRILLLKVAGFNLLMTLRLWSSSSRAKRSGSGVKQTLNFDLLKLAGDVESNPGPTSMALPVTALLLPLALLLHAARPDIQMTQSPSSLSASVGDRVTITCKASDHINNWLAWYQQKPGQAPKLLIYGATTLETGVPSRFSGSGSGTDYTLTISSLQPEDFATYYCQQSWNTPWTFGQGTKLEIKRGGGGSGGGGSGGGGSQVQLQQPGAELVKPGASVKMSCKASGYAFSSYWINWMKQKPGQGLEWIGQIYPGDGDTNYNGKFKGRATLTADTSSSTAYMQLSSLTSEDSAVYFCARSITTVVGCAMDYWGQGTSVTVSSTRGKPIPNPLLGLDSTGSGEDLKNVFPPEVAVFEPSEAEISHTQKATLVCLATGFYPDHVELSWWVNGKEVHSGVCTDPQPLKEQPALNDSRYCLSSRLRVSATFWQNPRNHFRCQVQFYGLSENDEWTQDRAKPVTQIVSAEAWGRADCGFTSESYQQGVLSATILYEILLGKATLYAVLVSALVLMAMVKRKDSRGRAKRSGSGATNFSLLKQAGDVEENPGPSRGHMTEYKPTVRLATRDDVPRAVRTLAAAFADYPATRHTVDPDRHIERVTELQELFLTRVGLDIGKVWVADDGAAVAVWTTPESVEAGAVFAEIGPRMAELSGSRLAAQQQMEGLLAPHRPKEPAWFLATVGVSPDHQGKGLGSAVVLPGVEAAERAGVPAFLETSAPRNLPFYERLGFTVTADVEVPEGPRTWCMTRKPGA

SEQ ID NO: 11638 - protein, 855 aa, synthetic construct
MALPVTALLLPLALLLHAARPDIQMTQSPSSLSASVGDRVTITCKASDHINNWLAWYQQKPGQAPKLLIYGATTLETGVPSRFSGSGSGTDYTLTISSLQPEDFATYYCQQSWNTPWTFGQGTKLEIKRLEDLKNVFPPEVAVFEPSEAEISHTQKATLVCLATGFYPDHVELSWWVNGKEVHSGVSTDPQPLKEQPALNDSRYCLSSRLRVSATFWQNPRNHFRCQVQFYGLSENDEWTQDRAKPVTQIVSAEAWGRADCGFTSESYQQGVLSATILYEILLGKATLYAVLVSALVLMAMVKRKDSRGRAKRSGSGATNFSLLKQAGDVEENPGPTSMDWIWRILFLVGAATGAHSFEQVQLQQPGAELVKPGASVKMSCKASGYAFSSYWINWMKQKPGQGLEWIGQIYPGDGDTNYNGKFKGRATLTADTSSSTAYMQLSSLTSEDSAVYFCARSITTVVGCAMDYWGQGTSVTVSSTRIQNPDPAVYQLRDSKSSDKSVCLFTDFDSQTNVSQSKDSDVYITDKTVLDMRSMDFKSNSAVAWSNKSDFACANAFNNSIIPEDTFFPSPESSCDVKLVEKSFETDTNLNFQNLSVIGFRILLLKVAGFNLLMTLRLWSSRAKRSGSGVKQTLNFDLLKLAGDVESNPGPSRGHMTEYKPTVRLATRDDVPRAVRTLAAAFADYPATRHTVDPDRHIERVTELQELFLTRVGLDIGKVWVADDGAAVAVWTTPESVEAGAVFAEIGPRMAELSGSRLAAQQQMEGLLAPHRPKEPAWFLATVGVSPDHQGKGLGSAVVLPGVEAAERAGVPAFLETSAPRNLPFYERLGFTVTADVEVPEGPRTWCMTRKPGA

SEQ ID NO: 11639 - protein, 937 aa, synthetic construct
MALPVTALLLPLALLLHAARPDIQMTQSPSSLSASVGDRVTITCKASDHINNWLAWYQQKPGQAPKLLIYGATTLETGVPSRFSGSGSGTDYTLTISSLQPEDFATYYCQQSWNTPWTFGQGTKLEIKRLEDLKNVFPPEVAVFEPSEAEISHTQKATLVCLATGFYPDHVELSWWVNGKEVHSGVSTDPQPLKEQPALNDSRYCLSSRLRVSATFWQNPRNHFRCQVQFYGLSENDEWTQDRAKPVTQIVSAEAWGRADCGFTSESYQQGVLSATILYEILLGKATLYAVLVSALVLMAMVKRKDSRGRAKRSGSGATNFSLLKQAGDVEENPGPTSMDWIWRILFLVGAATGAHSFEQVQLQQPGAELVKPGASVKMSCKASGYAFSSYWINWMKQKPGQGLEWIGQIYPGDGDTNYNGKFKGRATLTADTSSSTAYMQLSSLTSEDSAVYFCARSITTVVGCAMDYWGQGTSVTVSSTREQKLISEEDGSGTPFPSLAPPIMLLVDGKQQMVVVCLVLDVAPPGLDSPIWFSAGNGSALDAFTYGPSPATDGTWTNLAHLSLPSEELASWEPLVCHTGPGAEGHSRSTQPMHLSGEASTARTCPQEPLRGTPGGALWLGVLRLLLFKLLLFDLLLTCSCLCDPAGPLPSPATTTRLRALGSHRLHPATETGGREATSSPRPQPRDRRWGDTPPGRKPGSPVRAKRSGSGVKQTLNFDLLKLAGDVESNPGPSRGHMTEYKPTVRLATRDDVPRAVRTLAAAFADYPATRHTVDPDRHIERVTELQELFLTRVGLDIGKVWVADDGAAVAVWTTPESVEAGAVFAEIGPRMAELSGSRLAAQQQMEGLLAPHRPKEPAWFLATVGVSPDHQGKGLGSAVVLPGVEAAERAGVPAFLETSAPRNLPFYERLGFTVTADVEVPEGPRTWCMTRKPGA

SEQ ID NO: 11640 - protein, 955 aa, synthetic construct
MALPVTALLLPLALLLHAARPLEDLKNVFPPEVAVFEPSEAEISHTQKATLVCLATGFYPDHVELSWWVNGKEVHSGVSTDPQPLKEQPALNDSRYCLSSRLRVSATFWQNPRNHFRCQVQFYGLSENDEWTQDRAKPVTQIVSAEAWGRADCGFTSESYQQGVLSATILYEILLGKATLYAVLVSALVLMAMVKRKDSRGRAKRSGSGATNFSLLKQAGDVEENPGPTSMALPVTALLLPLALLLHAARPDIQMTQSPSSLSASVGDRVTITCKASDHINNWLAWYQQKPGQAPKLLIYGATTLETGVPSRFSGSGSGTDYTLTISSLQPEDFATYYCQQSWNTPWTFGQGTKLEIKRGGGGSGGGGSGGGGSQVQLQQPGAELVKPGASVKMSCKASGYAFSSYWINWMKQKPGQGLEWIGQIYPGDGDTNYNGKFKGRATLTADTSSSTAYMQLSSLTSEDSAVYFCARSITTVVGCAMDYWGQGTSVTVSSTREQKLISEEDLGSGTPFPSLAPPIMLLVDGKQQMVVVCLVLDVAPPGLDSPIWFSAGNGSALDAFTYGPSPATDGTWTNLAHLSLPSEELASWEPLVCHTGPGAEGHSRSTQPMHLSGEASTARTCPQEPLRGTPGGALWLGVLRLLLFKLLLFDLLLTCSCLCDPAGPLPSPATTTRLRALGSHRLHPATETGGREATSSPRPQPRDRRWGDTPPGRKPGSPVRAKRSGSGVKQTLNFDLLKLAGDVESNPGPSRSRGHMTEYKPTVRLATRDDVPRAVRTLAAAFADYPATRHTVDPDRHIERVTELQELFLTRVGLDIGKVWVADDGAAVAVWTTPESVEAGAVFAEIGPRMAELSGSRLAAQQQMEGLLAPHRPKEPAWFLATVGVSPDHQGKGLGSAVVLPGVEAAERAGVPAFLETSAPRNLPFYERLGFTVTADVEVPEGPRTWCMTRKPGA

SEQ ID NO: 11641 - protein, 892 aa, synthetic construct
MALPVTALLLPLALLLHAARPDIQMTQSPSSLSASVGDRVTITCKASDHINNWLAWYQQKPGQAPKLLIYGATTLETGVPSRFSGSGSGTDYTLTISSLQPEDFATYYCQQSWNTPWTFGQGTKLEIKRLEGKPIPNPLLGLDSTGSGDKQLDADVSPKPTIFLPSIAETKLQKAGTYLCLLEKFFPDVIKIHWQEKKSNTILGSQEGNTMKTNDTYMKFSWLTVPEKSLDKEHRCIVRHENNKNGVDQEIIFPPIKTDVITMDPKDNCSKDANDTLLLQLTNTSAYYMYLLLLLKSVVYFAIITCCLLRRTAFCCNGEKSRAKRSGSGATNFSLLKQAGDVEENPGPTSMDWIWRILFLVGAATGAHSFEQVQLQQPGAELVKPGASVKMSCKASGYAFSSYWINWMKQKPGQGLEWIGQIYPGDGDTNYNGKFKGRATLTADTSSSTAYMQLSSLTSEDSAVYFCARSITTVVGCAMDYWGQGTSVTVSSTREQKLISEEDGSGSQPHTKPSVFVMKNGTNVACLVKEFYPKDIRINLVSSKKITEFDPAIVISPSGKYNAVKLGKYEDSNSVTCSVQHDNKTVHSTDFEVKTDSTDHVKPKETENTKQPSKSCHKPKAIVHTEKVNMMSLTVLGLRMLFAKTVAVNFLLTAKLFFLRAKRSGSGVKQTLNFDLLKLAGDVESNPGPSRGHMTEYKPTVRLATRDDVPRAVRTLAAAFADYPATRHTVDPDRHIERVTELQELFLTRVGLDIGKVWVADDGAAVAVWTTPESVEAGAVFAEIGPRMAELSGSRLAAQQQMEGLLAPHRPKEPAWFLATVGVSPDHQGKGLGSAVVLPGVEAAERAGVPAFLETSAPRNLPFYERLGFTVTADVEVPEGPRTWCMTRKPGA

SEQ ID NO: 11642 - protein, 630 aa, synthetic construct
MALPVTALLLPLALLLHAARPDIQMTQSPSSLSASVGDRVTITCKASDHINNWLAWYQQKPGQAPKLLIYGATTLETGVPSRFSGSGSGTDYTLTISSLQPEDFATYYCQQSWNTPWTFGQGTKLEIKRLESQPHTKPSVFVMKNGTNVACLVKEFYPKDIRINLVSSKKITEFDPAIVISPSGKYNAVKLGKYEDSNSVTCSVQHDNKTVHSTDFEVKTDSTDHVKPKETENTKQPSKSCHKPKAIVHTEKVNMMSLTVLGLRMLFAKTVAVNFLLTAKLFFLRAKRSGSGATNFSLLKQAGDVEENPGPTSMDWIWRILFLVGAATGAHSFEQVQLQQPGAELVKPGASVKMSCKASGYAFSSYWINWMKQKPGQGLEWIGQIYPGDGDTNYNGKFKGRATLTADTSSSTAYMQLSSLTSEDSAVYFCARSITTVVGCAMDYWGQGTSVTVSSTRDKQLDADVSPKPTIFLPSIAETKLQKAGTYLCLLEKFFPDVIKIHWQEKKSNTILGSQEGNTMKTNDTYMKFSWLTVPEKSLDKEHRCIVRHENNKNGVDQEIIFPPIKTDVITMDPKDNCSKDANDTLLLQLTNTSAYYMYLLLLLKSVVYFAIITCCLLRRTAFCCNGEKS

SEQ ID NO: 11643 - protein, 907 aa, synthetic construct
MALPVTALLLPLALLLHAARPLEGKPIPNPLLGLDSTGSGDKQLDADVSPKPTIFLPSIAETKLQKAGTYLCLLEKFFPDVIKIHWQEKKSNTILGSQEGNTMKTNDTYMKFSWLTVPEKSLDKEHRCIVRHENNKNGVDQEIIFPPIKTDVITMDPKDNCSKDANDTLLLQLTNTSAYYMYLLLLLKSVVYFAIITCCLLRRTAFCCNGEKSRAKRSGSGATNFSLLKQAGDVEENPGPTSMALPVTALLLPLALLLHAARPDIQMTQSPSSLSASVGDRVTITCKASDHINNWLAWYQQKPGQAPKLLIYGATTLETGVPSRFSGSGSGTDYTLTISSLQPEDFATYYCQQSWNTPWTFGQGTKLEIKRGGGGSGGGGSGGGGSQVQLQQPGAELVKPGASVKMSCKASGYAFSSYWINWMKQKPGQGLEWIGQIYPGDGDTNYNGKFKGRATLTADTSSSTAYMQLSSLTSEDSAVYFCARSITTVVGCAMDYWGQGTSVTVSSTREQKLISEEDGSGSQPHTKPSVFVMKNGTNVACLVKEFYPKDIRINLVSSKKITEFDPAIVISPSGKYNAVKLGKYEDSNSVTCSVQHDNKTVHSTDFEVKTDSTDHVKPKETENTKQPSKSCHKPKAIVHTEKVNMMSLTVLGLRMLFAKTVAVNFLLTAKLFFLRAKRSGSGVKQTLNFDLLKLAGDVESNPGPSRGHMTEYKPTVRLATRDDVPRAVRTLAAAFADYPATRHTVDPDRHIERVTELQELFLTRVGLDIGKVWVADDGAAVAVWTTPESVEAGAVFAEIGPRMAELSGSRLAAQQQMEGLLAPHRPKEPAWFLATVGVSPDHQGKGLGSAVVLPGVEAAERAGVPAFLETSAPRNLPFYERLGFTVTADVEVPEGPRTWCMTRKPGA

SEQ ID NO: 11644 - protein, 1032 aa, synthetic construct
MALPVTALLLPLALLLHAARPDIQMTQSPSSLSASVGDRVTITCKASDHINNWLAWYQQKPGQAPKLLIYGATTLETGVPSRFSGSGSGTDYTLTISSLQPEDFATYYCQQSWNTPWTFGQGTKLEIKRGQPKANPTVTLFPPSSEELQANKATLVCLISDFYPGAVTVAWKADGSPVKAGVETTKPSKQSNNKYAASSYLSLTPEQWKSHRSYSCQVTHEGSTVEKTVAPTECSGSQSFGLLDPKLCYLLDGILFIYGVILTALFLRVKFSRSADAPAYQQGQNQLYNELNLGRREEYDVLDKRRGRDPEMGGKPQRRKNPQEGLYNELQKDKMAEAYSEIGMKGERRRGKGHDGLYQGLSTATKDTYDALHMQALPPRRAKRSGSGATNFSLLKQAGDVEENPGPTSMDWIWRILFLVGAATGAHSFEQVQLQQPGAELVKPGASVKMSCKASGYAFSSYWINWMKQKPGQGLEWIGQIYPGDGDTNYNGKFKGRATLTADTSSSTAYMQLSSLTSEDSAVYFCARSITTVVGCAMDYWGQGTSVTVSSASTKGPSVFPLAPSSKSTSGGTAALGCLVKDYFPEPVTVSWNSGALTSGVHTFPAVLQSSGLYSLSSVVTVPSSSLGTQTYICNVNHKPSNTKVDKRVEPKSCGTQSFGLLDPKLCYLLDGILFIYGVILTALFLRVKFSRSADAPAYQQGQNQLYNELNLGRREEYDVLDKRRGRDPEMGGKPQRRKNPQEGLYNELQKDKMAEAYSEIGMKGERRRGKGHDGLYQGLSTATKDTYDALHMQALPPRRAKRSGSGVKQTLNFDLLKLAGDVESNPGPSRGHMTEYKPTVRLATRDDVPRAVRTLAAAFADYPATRHTVDPDRHIERVTELQELFLTRVGLDIGKVWVADDGAAVAVWTTPESVEAGAVFAEIGPRMAELSGSRLAAQQQMEGLLAPHRPKEPAWFLATVGVSPDHQGKGLGSAVVLPGVEAAERAGVPAFLETSAPRNLPFYERLGFTVTADVEVPEGPRTWCMTRKPGA

SEQ ID NO: 11645 - protein, 818 aa, synthetic construct; identical to SEQ ID NO: 9379

SEQ ID NO: 11646 - protein, 818 aa, synthetic construct
MALPVTALLLPLALLLHAARPDIQMTQSPSSLSASVGDRVTITCKASDHINNWLAWYQQKPGQAPKLLIYGATTLETGVPSRFSGSGSGTDYTLTISSLQPEDFATYYCQQSWNTPWTFGQGTKLEIKRLEDLKNVFPPEVAVFEPSKAEIAHTQKATLVCLATGFYPDHVELSWWVNGKEVHSGVCTDPQPLKEQPALNDSRYCLSSRLRVSATFWQNPRNHFRCQVQFYGLSENDEWTQDRAKPVTQIVSAEAWGRADCGSQSFGLLDPKLCYLLDGILFIYGVILTALFLRVKFSRSADAPAYQQGQNQLYNELNLGRREEYDVLDKRRGRDPEMGGKPQRRKNPQEGLYNELQKDKMAEAYSEIGMKGERRRGKGHDGLYQGLSTATKDTYDALHMQALPPRRAKRSGSGATNFSLLKQAGDVEENPGPTSMDWIWRILFLVGAATGAHSFEQVQLQQPGAELVKPGASVKMSCKASGYAFSSYWINWMKQKPGQGLEWIGQIYPGDGDTNYNGKFKGRATLTADTSSSTAYMQLSSLTSEDSAVYFCARSITTVVGCAMDYWGQGTSVTVSSTRIQNPDPAVYQLRDSKSSDKSVCLFTDFDSQTNVSQSKDSDVYITDKCVLDMRSMDFKSNSAVAWSNKSDFACANAFNNSIIPEDTFFPSSDVPCGTQSFGLLDPKLCYLLDGILFIYGVILTALFLRVKFSRSADAPAYQQGQNQLYNELNLGRREEYDVLDKRRGRDPEMGGKPQRRKNPQEGLYNELQKDKMAEAYSEIGMKGERRRGKGHDGLYQGLSTATKDTYDALHMQALPPR

SEQ ID NO: 11647 - protein, 889 aa, synthetic construct
MALPVTALLLPLALLLHAARPDIQMTQSPSSLSASVGDRVTITCKASDHINNWLAWYQQKPGQAPKLLIYGATTLETGVPSRFSGSGSGTDYTLTISSLQPEDFATYYCQQSWNTPWTFGQGTKLEIKRLEGKPIPNPLLGLDSTGSGEDLKNVFPPEVAVFEPSEAEISHTQKATLVCLATGFYPDHVELSWWVNGKEVHSGVSTDPQPLKEQPALNDSRYCLSSRLRVSATFWQNPRNHFRCQVQFYGLSENDEWTQDRAKPVTQIVSAEAWGRADCGSQSFGLLDPKLCYLLDGILFIYGVILTALFLRVKFSRSADAPAYQQGQNQLYNELNLGRREEYDVLDKRRGRDPEMGGKPQRRKNPQEGLYNELQKDKMAEAYSEIGMKGERRRGKGHDGLYQGLSTATKDTYDALHMQALPPRRAKRSGSGATNFSLLKQAGDVEENPGPTSMDWIWRILFLVGAATGAHSFEQVQLQQPGAELVKPGASVKMSCKASGYAFSSYWINWMKQKPGQGLEWIGQIYPGDGDTNYNGKFKGRATLTADTSSSTAYMQLSSLTSEDSAVYFCARSITTVVGCAMDYWGQGTSVTVSSTREQKLISEEDGSGIQNPDPAVYQLRDSKSSDKSVCLFTDFDSQTNVSQSKDSDVYITDKTVLDMRSMDFKSNSAVAWSNKSDFACANAFNNSIIPEDTFFPSPESSCGTQSFGLLDPKLCYLLDGILFIYGVILTALFLRSKRSRLLHSDYMNMTPRRPGPTRKHYQPYAPPRDFAAYRSRVKFSRSADAPAYQQGQNQLYNELNLGRREEYDVLDKRRGRDPEMGGKPQRRKNPQEGLYNELQKDKMAEAYSEIGMKGERRRGKGHDGLYQGLSTATKDTYDALHMQALPPR

SEQ ID NO: 11648 - protein, 930 aa, synthetic construct
MALPVTALLLPLALLLHAARPDIQMTQSPSSLSASVGDRVTITCKASDHINNWLAWYQQKPGQAPKLLIYGATTLETGVPSRFSGSGSGTDYTLTISSLQPEDFATYYCQQSWNTPWTFGQGTKLEIKRLEGKPIPNPLLGLDSTGSGEDLKNVFPPEVAVFEPSEAEISHTQKATLVCLATGFYPDHVELSWWVNGKEVHSGVSTDPQPLKEQPALNDSRYCLSSRLRVSATFWQNPRNHFRCQVQFYGLSENDEWTQDRAKPVTQIVSAEAWGRADCGSQSFGLLDPKLCYLLDGILFIYGVILTALFLRSKRSRLLHSDYMNMTPRRPGPTRKHYQPYAPPRDFAAYRSRVKFSRSADAPAYQQGQNQLYNELNLGRREEYDVLDKRRGRDPEMGGKPQRRKNPQEGLYNELQKDKMAEAYSEIGMKGERRRGKGHDGLYQGLSTATKDTYDALHMQALPPRRAKRSGSGATNFSLLKQAGDVEENPGPTSMDWIWRILFLVGAATGAHSFEQVQLQQPGAELVKPGASVKMSCKASGYAFSSYWINWMKQKPGQGLEWIGQIYPGDGDTNYNGKFKGRATLTADTSSSTAYMQLSSLTSEDSAVYFCARSITTVVGCAMDYWGQGTSVTVSSTREQKLISEEDGSGIQNPDPAVYQLRDSKSSDKSVCLFTDFDSQTNVSQSKDSDVYITDKTVLDMRSMDFKSNSAVAWSNKSDFACANAFNNSIIPEDTFFPSPESSCGTQSFGLLDPKLCYLLDGILFIYGVILTALFLRSKRSRLLHSDYMNMTPRRPGPTRKHYQPYAPPRDFAAYRSRVKFSRSADAPAYQQGQNQLYNELNLGRREEYDVLDKRRGRDPEMGGKPQRRKNPQEGLYNELQKDKMAEAYSEIGMKGERRRGKGHDGLYQGLSTATKDTYDALHMQALPPR

SEQ ID NO: 11649 - protein, 891 aa, synthetic construct
MALPVTALLLPLALLLHAARPDIQMTQSPSSLSASVGDRVTITCKASDHINNWLAWYQQKPGQAPKLLIYGATTLETGVPSRFSGSGSGTDYTLTISSLQPEDFATYYCQQSWNTPWTFGQGTKLEIKRLEGKPIPNPLLGLDSTGSGEDLKNVFPPEVAVFEPSEAEISHTQKATLVCLATGFYPDHVELSWWVNGKEVHSGVSTDPQPLKEQPALNDSRYCLSSRLRVSATFWQNPRNHFRCQVQFYGLSENDEWTQDRAKPVTQIVSAEAWGRADCGSQSFGLLDPKLCYLLDGILFIYGVILTALFLRVKFSRSADAPAYQQGQNQLYNELNLGRREEYDVLDKRRGRDPEMGGKPQRRKNPQEGLYNELQKDKMAEAYSEIGMKGERRRGKGHDGLYQGLSTATKDTYDALHMQALPPRRAKRSGSGATNFSLLKQAGDVEENPGPTSMDWIWRILFLVGAATGAHSFEQVQLQQPGAELVKPGASVKMSCKASGYAFSSYWINWMKQKPGQGLEWIGQIYPGDGDTNYNGKFKGRATLTADTSSSTAYMQLSSLTSEDSAVYFCARSITTVVGCAMDYWGQGTSVTVSSTREQKLISEEDLGSGIQNPDPAVYQLRDSKSSDKSVCLFTDFDSQTNVSQSKDSDVYITDKTVLDMRSMDFKSNSAVAWSNKSDFACANAFNNSIIPEDTFFPSPESSCGTQSFGLLDPKLCYLLDGILFIYGVILTALFLKRGRKKLLYIFKQPFMRPVQTTQEEDGCSCRFPEEEEGGCELRVKFSRSADAPAYQQGQNQLYNELNLGRREEYDVLDKRRGRDPEMGGKPQRRKNPQEGLYNELQKDKMAEAYSEIGMKGERRRGKGHDGLYQGLSTATKDTYDALHMQALPPR

SEQ ID NO: 11650 - protein, 933 aa, synthetic construct
MALPVTALLLPLALLLHAARPDIQMTQSPSSLSASVGDRVTITCKASDHINNWLAWYQQKPGQAPKLLIYGATTLETGVPSRFSGSGSGTDYTLTISSLQPEDFATYYCQQSWNTPWTFGQGTKLEIKRLEGKPIPNPLLGLDSTGSGEDLKNVFPPEVAVFEPSEAEISHTQKATLVCLATGFYPDHVELSWWVNGKEVHSGVSTDPQPLKEQPALNDSRYCLSSRLRVSATFWQNPRNHFRCQVQFYGLSENDEWTQDRAKPVTQIVSAEAWGRADCGSQSFGLLDPKLCYLLDGILFIYGVILTALFLKRGRKKLLYIFKQPFMRPVQTTQEEDGCSCRFPEEEEGGCELRVKFSRSADAPAYQQGQNQLYNELNLGRREEYDVLDKRRGRDPEMGGKPQRRKNPQEGLYNELQKDKMAEAYSEIGMKGERRRGKGHDGLYQGLSTATKDTYDALHMQALPPRRAKRSGSGATNFSLLKQAGDVEENPGPTSMDWIWRILFLVGAATGAHSFEQVQLQQPGAELVKPGASVKMSCKASGYAFSSYWINWMKQKPGQGLEWIGQIYPGDGDTNYNGKFKGRATLTADTSSSTAYMQLSSLTSEDSAVYFCARSITTVVGCAMDYWGQGTSVTVSSTREQKLISEEDLGSGIQNPDPAVYQLRDSKSSDKSVCLFTDFDSQTNVSQSKDSDVYITDKTVLDMRSMDFKSNSAVAWSNKSDFACANAFNNSIIPEDTFFPSPESSCGTQSFGLLDPKLCYLLDGILFIYGVILTALFLKRGRKKLLYIFKQPFMRPVQTTQEEDGCSCRFPEEEEGGCELRVKFSRSADAPAYQQGQNQLYNELNLGRREEYDVLDKRRGRDPEMGGKPQRRKNPQEGLYNELQKDKMAEAYSEIGMKGERRRGKGHDGLYQGLSTATKDTYDALHMQALPPR

SEQ ID NO: 11651 - protein, 823 aa, synthetic construct
MALPVTALLLPLALLLHAARPDIQMTQSPSSLSASVGDRVTITCKASDHINNWLAWYQQKPGQAPKLLIYGATTLETGVPSRFSGSGSGTDYTLTISSLQPEDFATYYCQQSWNTPWTFGQGTKLEIKRLEQSFGLLDPKLCYLLDGILFIYGVILTALFLRVKFSRSADAPAYQQGQNQLYNELNLGRREEYDVLDKRRGRDPEMGGKPQRRKNPQEGLYNELQKDKMAEAYSEIGMKGERRRGKGHDGLYQGLSTATKDTYDALHMQALPPRRAKRSGSGATNFSLLKQAGDVEENPGPTSMDWIWRILFLVGAATGAHSFEQVQLQQPGAELVKPGASVKMSCKASGYAFSSYWINWMKQKPGQGLEWIGQIYPGDGDTNYNGKFKGRATLTADTSSSTAYMQLSSLTSEDSAVYFCARSITTVVGCAMDYWGQGTSVTVSSTRQSFGLLDPKLCYLLDGILFIYGVILTALFLRVKFSRSADAPAYQQGQNQLYNELNLGRREEYDVLDKRRGRDPEMGGKPQRRKNPQEGLYNELQKDKMAEAYSEIGMKGERRRGKGHDGLYQGLSTATKDTYDALHMQALPPRRAKRSGSGVKQTLNFDLLKLAGDVESNPGPSRGHMTEYKPTVRLATRDDVPRAVRTLAAAFADYPATRHTVDPDRHIERVTELQELFLTRVGLDIGKVWVADDGAAVAVWTTPESVEAGAVFAEIGPRMAELSGSRLAAQQQMEGLLAPHRPKEPAWFLATVGVSPDHQGKGLGSAVVLPGVEAAERAGVPAFLETSAPRNLPFYERLGFTVTADVEVPEGPRTWCMTRKPGA

SEQ ID NO: 11652 - protein, 648 aa, synthetic construct
MALPVTALLLPLALLLHAARPDIQMTQSPSSLSASVGDRVTITCKASDHINNWLAWYQQKPGQAPKLLIYGATTLETGVPSRFSGSGSGTDYTLTISSLQPEDFATYYCQQSWNTPWTFGQGTKLEIKRLEGQPKANPTVTLFPPSSEELQANKATLVCLISDFYPGAVTVAWKADGSPVKAGVETTKPSKQSNNKYAASSYLSLTPEQWKSHRSYSCQVTHEGSTVEKTVAPTECSPIKTDVITMDPKDNCSKDANDTLLLQLTNTSAYYMYLLLLLKSVVYFAIITCCLLRRTAFCCNGEKSRAKRSGSGATNFSLLKQAGDVEENPGPTSMDWIWRILFLVGAATGAHSFEQVQLQQPGAELVKPGASVKMSCKASGYAFSSYWINWMKQKPGQGLEWIGQIYPGDGDTNYNGKFKGRATLTADTSSSTAYMQLSSLTSEDSAVYFCARSITTVVGCAMDYWGQGTSVTVSSTRASTKGPSVFPLAPSSKSTSGGTAALGCLVKDYFPEPVTVSWNSGALTSGVHTFPAVLQSSGLYSLSSVVTVPSSSLGTQTYICNVNHKPSNTKVDKRVEPKSCEVKTDSTDHVKPKETENTKQPSKSCHKPKAIVHTEKVNMMSLTVLGLRMLFAKTVAVNFLLTAKLFFL

SEQ ID NO: 11653 - protein, 626 aa, synthetic construct
MALPVTALLLPLALLLHAARPDIQMTQSPSSLSASVGDRVTITCKASDHINNWLAWYQQKPGQAPKLLIYGATTLETGVPSRFSGSGSGTDYTLTISSLQPEDFATYYCQQSWNTPWTFGQGTKLEIKRLEGQPKANPTVTLFPPSSEELQANKATLVCLISDFYPGAVTVAWKADGSPVKAGVETTKPSKQSNNKYAASSYLSLTPEQWKSHRSYSCQVTHEGSTVEKTVAPTECSGRADCGITSASYHQGVLSATILYEILLGKATLYAVLVSALVLMAMVKRKDSRGRAKRSGSGATNFSLLKQAGDVEENPGPTSMDWIWRILFLVGAATGAHSFEQVQLQQPGAELVKPGASVKMSCKASGYAFSSYWINWMKQKPGQGLEWIGQIYPGDGDTNYNGKFKGRATLTADTSSSTAYMQLSSLTSEDSAVYFCARSITTVVGCAMDYWGQGTSVTVSSTRASTKGPSVFPLAPSSKSTSGGTAALGCLVKDYFPEPVTVSWNSGALTSGVHTFPAVLQSSGLYSLSSVVTVPSSSLGTQTYICNVNHKPSNTKVDKRVEPKSCIPEDTFFPSSDVPCDVKLVEKSFETDTNLNFQNLSVIGFRILLLKVAGFNLLMTLRLWSS

SEQ ID NO: 11654 - protein, 626 aa, synthetic construct
MALPVTALLLPLALLLHAARPDIQMTQSPSSLSASVGDRVTITCKASDHINNWLAWYQQKPGQAPKLLIYGATTLETGVPSRFSGSGSGTDYTLTISSLQPEDFATYYCQQSWNTPWTFGQGTKLEIKRLEGQPKANPTVTLFPPSSEELQANKATLVCLISDFYPGAVTVAWKADGSPVKAGVETTKPSKQSNNKYAASSYLSLTPEQWKSHRSYSCQVTHEGSTVEKTVAPTECSGRADCGFTSESYQQGVLSATILYEILLGKATLYAVLVSALVLMAMVKRKDSRGRAKRSGSGATNFSLLKQAGDVEENPGPTSMDWIWRILFLVGAATGAHSFEQVQLQQPGAELVKPGASVKMSCKASGYAFSSYWINWMKQKPGQGLEWIGQIYPGDGDTNYNGKFKGRATLTADTSSSTAYMQLSSLTSEDSAVYFCARSITTVVGCAMDYWGQGTSVTVSSTRASTKGPSVFPLAPSSKSTSGGTAALGCLVKDYFPEPVTVSWNSGALTSGVHTFPAVLQSSGLYSLSSVVTVPSSSLGTQTYICNVNHKPSNTKVDKRVEPKSCIPEDTFFPSPESSCDVKLVEKSFETDTNLNFQNLSVIGFRILLLKVAGFNLLMTLRLWSS

SEQ ID NO: 11655 - protein, 452 aa, synthetic construct
MALPVTALLLPLALLLHAARPDIQMTQSPSSLSASVGDRVTITCKASDHINNWLAWYQQKPGQAPKLLIYGATTLETGVPSRFSGSGSGTDYTLTISSLQPEDFATYYCQQSWNTPWTFGQGTKLEIKRGGGGSGGGGSGGGGSQVQLQQPGAELVKPGASVKMSCKASGYAFSSYWINWMKQKPGQGLEWIGQIYPGDGDTNYNGKFKGRATLTADTSSSTAYMQLSSLTSEDSAVYFCARSITTVVGCAMDYWGQGTSVTVSSTRDGNEEMGGITQTPYKVSISGTTVILTCPQYPGSEILWQHNDKNIGGDEDDKNIGSDEDHLSLKEFSELEQSGYYVCYPRGSKPEDANFYLYLRARVCENCMEMDVMSVATIVIVDICITGGLLLLVYYWSKNRKAKAKPVTRGAGAGGRQRGQNKERPPPVPNPDYEPIRKGQRDLYSGLNQRRI

SEQ ID NO: 11656 - protein, 417 aa, synthetic construct
MALPVTALLLPLALLLHAARPDIQMTQSPSSLSASVGDRVTITCKASDHINNWLAWYQQKPGQAPKLLIYGATTLETGVPSRFSGSGSGTDYTLTISSLQPEDFATYYCQQSWNTPWTFGQGTKLEIKRGGGGSGGGGSGGGGSQVQLQQPGAELVKPGASVKMSCKASGYAFSSYWINWMKQKPGQGLEWIGQIYPGDGDTNYNGKFKGRATLTADTSSSTAYMQLSSLTSEDSAVYFCARSITTVVGCAMDYWGQGTSVTVSSTRFKIPIEELEDRVFVNCNTSITWVEGTVGTLLSDITRLDLGKRILDPRGIYRCNGTDIYKDKESTVQVHYRMCQSCVELDPATVAGIIVTDVIATLLLALGVFCFAGHETGRLSGAADTQALLRNDQVYQPLRDRDDAQYSHLGGNWARNK

SEQ ID NO: 11657 - protein, 427 aa, synthetic construct
MALPVTALLLPLALLLHAARPDIQMTQSPSSLSASVGDRVTITCKASDHINNWLAWYQQKPGQAPKLLIYGATTLETGVPSRFSGSGSGTDYTLTISSLQPEDFATYYCQQSWNTPWTFGQGTKLEIKRGGGGSGGGGSGGGGSQVQLQQPGAELVKPGASVKMSCKASGYAFSSYWINWMKQKPGQGLEWIGQIYPGDGDTNYNGKFKGRATLTADTSSSTAYMQLSSLTSEDSAVYFCARSITTVVGCAMDYWGQGTSVTVSSTRQSIKGNHLVKVYDYQEDGSVLLTCDAEAKNITWFKDGKMIGFLTEDKKKWNLGSNAKDPRGMYQCKGSQNKSKPLQVYYRMCQNCIELNAATISGFLFAEIVSIFVLAVGVYFIAGQDGVRQSRASDKQTLLPNDQLYQPLKDREDDQYSHLQGNQLRRN

SEQ ID NO: 11658 - protein, 410 aa, synthetic construct
MALPVTALLLPLALLLHAARPDIQMTQSPSSLSASVGDRVTITCKASDHINNWLAWYQQKPGQAPKLLIYGATTLETGVPSRFSGSGSGTDYTLTISSLQPEDFATYYCQQSWNTPWTFGQGTKLEIKRGGGGSGGGGSGGGGSQVQLQQPGAELVKPGASVKMSCKASGYAFSSYWINWMKQKPGQGLEWIGQIYPGDGDTNYNGKFKGRATLTADTSSSTAYMQLSSLTSEDSAVYFCARSITTVVGCAMDYWGQGTSVTVSSTRQSFGLLDPKLCYLLDGILFIYGVILTALFLRVKFSRSADAPAYQQGQNQLYNELNLGRREEYDVLDKRRGRDPEMGGKPQRRKNPQEGLYNELQKDKMAEAYSEIGMKGERRRGKGHDGLYQGLSTATKDTYDALHMQALPPR

SEQ ID NO: 11659 - protein, 452 aa, synthetic construct
MALPVTALLLPLALLLHAARPQVQLQQPGAELVKPGASVKMSCKASGYAFSSYWINWMKQKPGQGLEWIGQIYPGDGDTNYNGKFKGRATLTADTSSSTAYMQLSSLTSEDSAVYFCARSITTVVGCAMDYWGQGTSVTVSSGGGGSGGGGSGGGGSDIQMTQSPSSLSASVGDRVTITCKASDHINNWLAWYQQKPGQAPKLLIYGATTLETGVPSRFSGSGSGTDYTLTISSLQPEDFATYYCQQSWNTPWTFGQGTKLEIKRTRDGNEEMGGITQTPYKVSISGTTVILTCPQYPGSEILWQHNDKNIGGDEDDKNIGSDEDHLSLKEFSELEQSGYYVCYPRGSKPEDANFYLYLRARVCENCMEMDVMSVATIVIVDICITGGLLLLVYYWSKNRKAKAKPVTRGAGAGGRQRGQNKERPPPVPNPDYEPIRKGQRDLYSGLNQRRI

SEQ ID NO: 11660 - protein, 417 aa, synthetic construct
MALPVTALLLPLALLLHAARPQVQLQQPGAELVKPGASVKMSCKASGYAFSSYWINWMKQKPGQGLEWIGQIYPGDGDTNYNGKFKGRATLTADTSSSTAYMQLSSLTSEDSAVYFCARSITTVVGCAMDYWGQGTSVTVSSGGGGSGGGGSGGGGSDIQMTQSPSSLSASVGDRVTITCKASDHINNWLAWYQQKPGQAPKLLIYGATTLETGVPSRFSGSGSGTDYTLTISSLQPEDFATYYCQQSWNTPWTFGQGTKLEIKRTRFKIPIEELEDRVFVNCNTSITWVEGTVGTLLSDITRLDLGKRILDPRGIYRCNGTDIYKDKESTVQVHYRMCQSCVELDPATVAGIIVTDVIATLLLALGVFCFAGHETGRLSGAADTQALLRNDQVYQPLRDRDDAQYSHLGGNWARNK

SEQ ID NO: 11661 - protein, 427 aa, synthetic construct
MALPVTALLLPLALLLHAARPQVQLQQPGAELVKPGASVKMSCKASGYAFSSYWINWMKQKPGQGLEWIGQIYPGDGDTNYNGKFKGRATLTADTSSSTAYMQLSSLTSEDSAVYFCARSITTVVGCAMDYWGQGTSVTVSSGGGGSGGGGSGGGGSDIQMTQSPSSLSASVGDRVTITCKASDHINNWLAWYQQKPGQAPKLLIYGATTLETGVPSRFSGSGSGTDYTLTISSLQPEDFATYYCQQSWNTPWTFGQGTKLEIKRTRQSIKGNHLVKVYDYQEDGSVLLTCDAEAKNITWFKDGKMIGFLTEDKKKWNLGSNAKDPRGMYQCKGSQNKSKPLQVYYRMCQNCIELNAATISGFLFAEIVSIFVLAVGVYFIAGQDGVRQSRASDKQTLLPNDQLYQPLKDREDDQYSHLQGNQLRRN

SEQ ID NO: 11662 - protein, 410 aa, synthetic construct
MALPVTALLLPLALLLHAARPQVQLQQPGAELVKPGASVKMSCKASGYAFSSYWINWMKQKPGQGLEWIGQIYPGDGDTNYNGKFKGRATLTADTSSSTAYMQLSSLTSEDSAVYFCARSITTVVGCAMDYWGQGTSVTVSSGGGGSGGGGSGGGGSDIQMTQSPSSLSASVGDRVTITCKASDHINNWLAWYQQKPGQAPKLLIYGATTLETGVPSRFSGSGSGTDYTLTISSLQPEDFATYYCQQSWNTPWTFGQGTKLEIKRTRQSFGLLDPKLCYLLDGILFIYGVILTALFLRVKFSRSADAPAYQQGQNQLYNELNLGRREEYDVLDKRRGRDPEMGGKPQRRKNPQEGLYNELQKDKMAEAYSEIGMKGERRRGKGHDGLYQGLSTATKDTYDALHMQALPPR

SEQ ID NO: 11663 - protein, 505 aa, synthetic construct
MALPVTALLLPLALLLHAARPDIQMTQSPSSLSASVGDRVTITCKASDHINNWLAWYQQKPGQAPKLLIYGATTLETGVPSRFSGSGSGTDYTLTISSLQPEDFATYYCQQSWNTPWTFGQGTKLEIKRGGGGSGGGGSGGGGSQVQLQQPGAELVKPGASVKMSCKASGYAFSSYWINWMKQKPGQGLEWIGQIYPGDGDTNYNGKFKGRATLTADTSSSTAYMQLSSLTSEDSAVYFCARSITTVVGCAMDYWGQGTSVTVSSTRGMRTEDLPKAVVFLEPQWYRVLEKDSVTLKCQGAYSPEDNSTQWFHNESLISSQASSYFIDAATVDDSGEYRCQTNLSTLSDPVQLEVHIGWLLLQAPRWVFKEEDPIHLRCHSWKNTALHKVTYLQNGKGRKYFHHNSDFYIPKATLKDSGSYFCRGLVGSKNVSSETVNITITQGLAVPTISSFFPPGYQVSFCLVMVLLFAVDTGLYFSVKTNIRSSTRDWKDHKFKWRKDPQDK

SEQ ID NO: 11664 - protein, 787 aa, synthetic construct
MALPVTALLLPLALLLHAARPDIQMTQSPSSLSASVGDRVTITCKASDHINNWLAWYQQKPGQAPKLLIYGATTLETGVPSRFSGSGSGTDYTLTISSLQPEDFATYYCQQSWNTPWTFGQGTKLEIKRGGGGSGGGGSGGGGSQVQLQQPGAELVKPGASVKMSCKASGYAFSSYWINWMKQKPGQGLEWIGQIYPGDGDTNYNGKFKGRATLTADTSSSTAYMQLSSLTSEDSAVYFCARSITTVVGCAMDYWGQGTSVTVSSTRGGSGQQQTLPKPFIWAEPHFMVPKEKQVTICCQGNYGAVEYQLHFEGSLFAVDRPKPPERINKVQFYIPDMNSRMAGQYSCIYRVGELWSEPSNLLDLVVTEMYDTPTLSVHPGPEVISGEKVTFYCRLDTATSMFLLLKEGRSSHVQRGYGKVQAEFPLGPVTTAHRGTYRCFGSYNNHAWSFPSEPVKLLVTGDIENTSLAPEDPTFPADTWGTYLLTTETGLQKDHALWDHTAQNLLRMGLAFLVLVALVWFLVEDWLSRKRTRERASRASTWEGRRRLNTQTLRAKRSGSGVKQTLNFDLLKLAGDVESNPGPSRGHMTEYKPTVRLATRDDVPRAVRTLAAAFADYPATRHTVDPDRHIERVTELQELFLTRVGLDIGKVWVADDGAAVAVWTTPESVEAGAVFAEIGPRMAELSGSRLAAQQQMEGLLAPHRPKEPAWFLATVGVSPDHQGKGLGSAVVLPGVEAAERAGVPAFLETSAPRNLPFYERLGFTVTADVEVPEGPRTWCMTRKPGA

SEQ ID NO: 11665 - protein, 620 aa, synthetic construct
MALPVTALLLPLALLLHAARPDIQMTQSPSSLSASVGDRVTITCKASDHINNWLAWYQQKPGQAPKLLIYGATTLETGVPSRFSGSGSGTDYTLTISSLQPEDFATYYCQQSWNTPWTFGQGTKLEIKRGGGGSGGGGSGGGGSQVQLQQPGAELVKPGASVKMSCKASGYAFSSYWINWMKQKPGQGLEWIGQIYPGDGDTNYNGKFKGRATLTADTSSSTAYMQLSSLTSEDSAVYFCARSITTVVGCAMDYWGQGTSVTVSSTRKIEVMYPPPYLDNEKSNGTIIHVKGARGDIENTSLAPEDPTFPADTWGTYLLTTETGLQKDHALWDHTAQNLLRMGLAFLVLVALVWFLVEDWLSRKRTRERASRASTWEGRRRLNTQTLRAKRSGSGVKQTLNFDLLKLAGDVESNPGPSRGHMTEYKPTVRLATRDDVPRAVRTLAAAFADYPATRHTVDPDRHIERVTELQELFLTRVGLDIGKVWVADDGAAVAVWTTPESVEAGAVFAEIGPRMAELSGSRLAAQQQMEGLLAPHRPKEPAWFLATVGVSPDHQGKGLGSAVVLPGVEAAERAGVPAFLETSAPRNLPFYERLGFTVTADVEVPEGPRTWCMTRKPGA

SEQ ID NO: 11666 - protein, 707 aa, synthetic construct
MALPVTALLLPLALLLHAARPDIQMTQSPSSLSASVGDRVTITCKASDHINNWLAWYQQKPGQAPKLLIYGATTLETGVPSRFSGSGSGTDYTLTISSLQPEDFATYYCQQSWNTPWTFGQGTKLEIKRGGGGSGGGGSGGGGSQVQLQQPGAELVKPGASVKMSCKASGYAFSSYWINWMKQKPGQGLEWIGQIYPGDGDTNYNGKFKGRATLTADTSSSTAYMQLSSLTSEDSAVYFCARSITTVVGCAMDYWGQGTSVTVSSTRLWVSQPPEIRTLEGSSAFLPCSFNASQGRLAIGSVTWFRDEVVPGKEVRNGTPEFRGRLAPLASSRFLHDHQAELHIRDVRGHDASIYVCRVEVLGLGVGTGNGTRLVVEKEHPQLGAGTVLLLRAGFYAVSFLSVAVGSTVYYQGKCLTWKGPRRQLPAVVPAPLPPPCGSSAHLLPPVPGGRAKRSGSGVKQTLNFDLLKLAGDVESNPGPSRMYRMQLLSCIALSLALVTNSAPTSSSTKKTQLQLEHLLLDLQMILNGINNYKNPKLTEMLTAKFYMPKKATELKHLQCLEEELKPLEEVLNLAQSKNFHLRPRDLISNINVIVLELKGSETTFMCEYADETATIVEFLNRWITFCQSIISTLTKIEVMYPPPYLDNEKSNGTIIHVKGKHLCPSPLFPGPSKPFWVLVVVGGVLACYSLLVTVAFIIFWVRSKRS

SEQ ID NO: 11667 - protein, 683 aa, synthetic construct
MALPVTALLLPLALLLHAARPDIQMTQSPSSLSASVGDRVTITCKASDHINNWLAWYQQKPGQAPKLLIYGATTLETGVPSRFSGSGSGTDYTLTISSLQPEDFATYYCQQSWNTPWTFGQGTKLEIKRGGGGSGGGGSGGGGSQVQLQQPGAELVKPGASVKMSCKASGYAFSSYWINWMKQKPGQGLEWIGQIYPGDGDTNYNGKFKGRATLTADTSSSTAYMQLSSLTSEDSAVYFCARSITTVVGCAMDYWGQGTSVTVSSTRLWVSQPPEIRTLEGSSAFLPCSFNASQGRLAIGSVTWFRDEVVPGKEVRNGTPEFRGRLAPLASSRFLHDHQAELHIRDVRGHDASIYVCRVEVLGLGVGTGNGTRLVVEKEHPQLGAGTVLLLRAGFYAVSFLSVAVGSTVYYQGKCLTWKGPRRQLPAVVPAPLPPPCGSSAHLLPPVPGGRAKRSGSGVKQTLNFDLLKLAGDVESNPGPSRGHMTEYKPTVRLATRDDVPRAVRTLAAAFADYPATRHTVDPDRHIERVTELQELFLTRVGLDIGKVWVADDGAAVAVWTTPESVEAGAVFAEIGPRMAELSGSRLAAQQQMEGLLAPHRPKEPAWFLATVGVSPDHQGKGLGSAVVLPGVEAAERAGVPAFLETSAPRNLPFYERLGFTVTADVEVPEGPRTWCMTRKPGA

SEQ ID NO: 11668 - protein, 359 aa, synthetic construct
MALPVTALLLPLALLLHAARPDIQMTQSPSSLSASVGDRVTITCKASDHINNWLAWYQQKPGQAPKLLIYGATTLETGVPSRFSGSGSGTDYTLTISSLQPEDFATYYCQQSWNTPWTFGQGTKLEIKRGGGGSGGGGSGGGGSQVQLQQPGAELVKPGASVKMSCKASGYAFSSYWINWMKQKPGQGLEWIGQIYPGDGDTNYNGKFKGRATLTADTSSSTAYMQLSSLTSEDSAVYFCARSITTVVGCAMDYWGQGTSVTVSSTRKIEVMYPPPYLDNEKSNGTIIHVKGARITQGLAVSTISSFFPPGYQVSFCLVMVLLFAVDTGLYFSVKTNIRSSTRDWKDHKFKWRKDPQDK

SEQ ID NO: 11669 - protein, 359 aa, synthetic construct
MALPVTALLLPLALLLHAARPDIQMTQSPSSLSASVGDRVTITCKASDHINNWLAWYQQKPGQAPKLLIYGATTLETGVPSRFSGSGSGTDYTLTISSLQPEDFATYYCQQSWNTPWTFGQGTKLEIKRGGGGSGGGGSGGGGSQVQLQQPGAELVKPGASVKMSCKASGYAFSSYWINWMKQKPGQGLEWIGQIYPGDGDTNYNGKFKGRATLTADTSSSTAYMQLSSLTSEDSAVYFCARSITTVVGCAMDYWGQGTSVTVSSTRKIEVMYPPPYLDNEKSNGTIIHVKGARITQGLAVPTISSFFPPGYQVSFCLVMVLLFAVDTGLYFSVKTNIRSSTRDWKDHKFKWRKDPQDK

SEQ ID NO: 11670 - protein, 338 aa, synthetic construct
MALPVTALLLPLALLLHAARPDIQMTQSPSSLSASVGDRVTITCKASDHINNWLAWYQQKPGQAPKLLIYGATTLETGVPSRFSGSGSGTDYTLTISSLQPEDFATYYCQQSWNTPWTFGQGTKLEIKRGGGGSGGGGSGGGGSQVQLQQPGAELVKPGASVKMSCKASGYAFSSYWINWMKQKPGQGLEWIGQIYPGDGDTNYNGKFKGRATLTADTSSSTAYMQLSSLTSEDSAVYFCARSITTVVGCAMDYWGQGTSVTVSSTRKIEVMYPPPYLDNEKSNGTIIHVKGARITQGLAVSTISSFSPPGYQVSFCLVMVLLFAVDTGLYFSVKTNI

SEQ ID NO: 11671 - protein, 369 aa, synthetic construct
MALPVTALLLPLALLLHAARPDIQMTQSPSSLSASVGDRVTITCKASDHINNWLAWYQQKPGQAPKLLIYGATTLETGVPSRFSGSGSGTDYTLTISSLQPEDFATYYCQQSWNTPWTFGQGTKLEIKRGGGGSGGGGSGGGGSQVQLQQPGAELVKPGASVKMSCKASGYAFSSYWINWMKQKPGQGLEWIGQIYPGDGDTNYNGKFKGRATLTADTSSSTAYMQLSSLTSEDSAVYFCARSITTVVGCAMDYWGQGTSVTVSSTRKIEVMYPPPYLDNEKSNGTIIHVKGARVEKEHPQLGAGTVLLLRAGFYAVSFLSVAVGSTVYYQGKCLTWKGPRRQLPAVVPAPLPPPCGSSAHLLPPVPGG

SEQ ID NO: 11672 - protein, 450 aa, synthetic construct
MALPVTALLLPLALLLHAARPDIQMTQSPSSLSASVGDRVTITCKASDHINNWLAWYQQKPGQAPKLLIYGATTLETGVPSRFSGSGSGTDYTLTISSLQPEDFATYYCQQSWNTPWTFGQGTKLEIKRGGGGSGGGGSGGGGSQVQLQQPGAELVKPGASVKMSCKASGYAFSSYWINWMKQKPGQGLEWIGQIYPGDGDTNYNGKFKGRATLTADTSSSTAYMQLSSLTSEDSAVYFCARSITTVVGCAMDYWGQGTSVTVSSTRKIEVMYPPPYLDNEKSNGTIIHVKGARKSVRFYLVVSPASASTQTSWTPRDLVSSQTQTQSCVPPTAGARQAPESPSTIPVPSQPQNSTLRPGPAAPIALVPVFCGLLVAKSLVLSALLVWWGDIWWKTMMELRSLDTQKATCHLQQVTDLPWTSVSSPVEREILYHTVARTKISDDDDEHTL

SEQ ID NO: 11673 - protein, 387 aa, synthetic construct
MALPVTALLLPLALLLHAARPDIQMTQSPSSLSASVGDRVTITCKASDHINNWLAWYQQKPGQAPKLLIYGATTLETGVPSRFSGSGSGTDYTLTISSLQPEDFATYYCQQSWNTPWTFGQGTKLEIKRGGGGSGGGGSGGGGSQVQLQQPGAELVKPGASVKMSCKASGYAFSSYWINWMKQKPGQGLEWIGQIYPGDGDTNYNGKFKGRATLTADTSSSTAYMQLSSLTSEDSAVYFCARSITTVVGCAMDYWGQGTSVTVSSTRKIEVMYPPPYLDNEKSNGTIIHVKGARGDIENTSLAPEDPTFPADTWGTYLLTTETGLQKDHALWDHTAQNLLRMGLAFLVLVALVWFLVEDWLSRKRTRERASRASTWEGRRRLNTQTL

SEQ ID NO: 11674 - protein, 983 aa, synthetic construct
MALPVTALLLPLALLLHAARPDIQMTQSPSSLSASVGDRVTITCKASDHINNWLAWYQQKPGQAPKLLIYGATTLETGVPSRFSGSGSGTDYTLTISSLQPEDFATYYCQQSWNTPWTFGQGTKLEIKRLEGQPKANPTVTLFPPSSEELQANKATLVCLISDFYPGAVTVAWKADGSPVKAGVETTKPSKQSNNKYAASSYLSLTPEQWKSHRSYSCQVTHEGSTVEKTVAPTECSGSQSFGLLDPKLCYLLDGILFIYGVILTALFLRVKFSRSADAPAYQQGQNQLYNELNLGRREEYDVLDKRRGRDPEMGGKPQRRKNPQEGLYNELQKDKMAEAYSEIGMKGERRRGKGHDGLYQGLSTATKDTYDALHMQALPPRRAKRSGSGATNFSLLKQAGDVEENPGPTSMDWIWRILFLVGAATGAHSFEQVQLQQPGAELVKPGASVKMSCKASGYAFSSYWINWMKQKPGQGLEWIGQIYPGDGDTNYNGKFKGRATLTADTSSSTAYMQLSSLTSEDSAVYFCARSITTVVGCAMDYWGQGTSVTVSSTRASTKGPSVFPLAPSSKSTSGGTAALGCLVKDYFPEPVTVSWNSGALTSGVHTFPAVLQSSGLYSLSSVVTVPSSSLGTQTYICNVNHKPSNTKVDKRVEPKSCGTGDIENTSLAPEDPTFPADTWGTYLLTTETGLQKDHALWDHTAQNLLRMGLAFLVLVALVWFLVEDWLSRKRTRERASRASTWEGRRRLNTQTLRAKRSGSGATNFSLLKQAGDVEENPGPSRGHMTEYKPTVRLATRDDVPRAVRTLAAAFADYPATRHTVDPDRHIERVTELQELFLTRVGLDIGKVWVADDGAAVAVWTTPESVEAGAVFAEIGPRMAELSGSRLAAQQQMEGLLAPHRPKEPAWFLATVGVSPDHQGKGLGSAVVLPGVEAAERAGVPAFLETSAPRNLPFYERLGFTVTADVEVPEGPRTWCMTRKPGA

SEQ ID NO: 11675 - protein, 1049 aa, synthetic construct
MALPVTALLLPLALLLHAARPDIQMTQSPSSLSASVGDRVTITCKASDHINNWLAWYQQKPGQAPKLLIYGATTLETGVPSRFSGSGSGTDYTLTISSLQPEDFATYYCQQSWNTPWTFGQGTKLEIKRLEGQPKANPTVTLFPPSSEELQANKATLVCLISDFYPGAVTVAWKADGSPVKAGVETTKPSKQSNNKYAASSYLSLTPEQWKSHRSYSCQVTHEGSTVEKTVAPTECSGSQSFGLLDPKLCYLLDGILFIYGVILTALFLRVKFSRSADAPAYQQGQNQLYNELNLGRREEYDVLDKRRGRDPEMGGKPQRRKNPQEGLYNELQKDKMAEAYSEIGMKGERRRGKGHDGLYQGLSTATKDTYDALHMQALPPRRAKRSGSGATNFSLLKQAGDVEENPGPTSMDWIWRILFLVGAATGAHSFEQVQLQQPGAELVKPGASVKMSCKASGYAFSSYWINWMKQKPGQGLEWIGQIYPGDGDTNYNGKFKGRATLTADTSSSTAYMQLSSLTSEDSAVYFCARSITTVVGCAMDYWGQGTSVTVSSTRASTKGPSVFPLAPSSKSTSGGTAALGCLVKDYFPEPVTVSWNSGALTSGVHTFPAVLQSSGLYSLSSVVTVPSSSLGTQTYICNVNHKPSNTKVDKRVEPKSCGTKSVRFYLVVSPASASTQTSWTPRDLVSSQTQTQSCVPPTAGARQAPESPSTIPVPSQPQNSTLRPGPAAPIALVPVFCGLLVAKSLVLSALLVWWGDIWWKTMMELRSLDTQKATCHLQQVTDLPWTSVSSPVEREILYHTVARTKISDDDDEHTLRAKRSGSGVKQTLNFDLLKLAGDVESNPGPSRGHMTEYKPTVRLATRDDVPRAVRTLAAAFADYPATRHTVDPDRHIERVTELQELFLTRVGLDIGKVWVADDGAAVAVWTTPESVEAGAVFAEIGPRMAELSGSRLAAQQQMEGLLAPHRPKEPAWFLATVGVSPDHQGKGLGSAVVLPGVEAAERAGVPAFLETSAPRNLPFYERLGFTVTADVEVPEGPRTWCMTRKPGA

SEQ ID NO: 11676 - protein, 969 aa, synthetic construct
MALPVTALLLPLALLLHAARPDIQMTQSPSSLSASVGDRVTITCKASDHINNWLAWYQQKPGQAPKLLIYGATTLETGVPSRFSGSGSGTDYTLTISSLQPEDFATYYCQQSWNTPWTFGQGTKLEIKRLEGQPKANPTVTLFPPSSEELQANKATLVCLISDFYPGAVTVAWKADGSPVKAGVETTKPSKQSNNKYAASSYLSLTPEQWKSHRSYSCQVTHEGSTVEKTVAPTECSGSQSFGLLDPKLCYLLDGILFIYGVILTALFLRVKFSRSADAPAYQQGQNQLYNELNLGRREEYDVLDKRRGRDPEMGGKPQRRKNPQEGLYNELQKDKMAEAYSEIGMKGERRRGKGHDGLYQGLSTATKDTYDALHMQALPPRRAKRSGSGATNFSLLKQAGDVEENPGPTSMDWIWRILFLVGAATGAHSFEQVQLQQPGAELVKPGASVKMSCKASGYAFSSYWINWMKQKPGQGLEWIGQIYPGDGDTNYNGKFKGRATLTADTSSSTAYMQLSSLTSEDSAVYFCARSITTVVGCAMDYWGQGTSVTVSSTRASTKGPSVFPLAPSSKSTSGGTAALGCLVKDYFPEPVTVSWNSGALTSGVHTFPAVLQSSGLYSLSSVVTVPSSSLGTQTYICNVNHKPSNTKVDKRVEPKSCGTVVEKEHPQLGAGTVLLLRAGFYAVSFLSVAVGSTVYYQGKCLTWKGPRRQLPAVVPAPLPPPCGSSAHLLPPVPGGRAKRSGSGVKQTLNFDLLKLAGDVESNPGPSRGHMTEYKPTVRLATRDDVPRAVRTLAAAFADYPATRHTVDPDRHIERVTELQELFLTRVGLDIGKVWVADDGAAVAVWTTPESVEAGAVFAEIGPRMAELSGSRLAAQQQMEGLLAPHRPKEPAWFLATVGVSPDHQGKGLGSAVVLPGVEAAERAGVPAFLETSAPRNLPFYERLGFTVTADVEVPEGPRTWCMTRKPGA

SEQ ID NO: 11677 - protein, 998 aa, synthetic construct
MALPVTALLLPLALLLHAARPDIQMTQSPSSLSASVGDRVTITCKASDHINNWLAWYQQKPGQAPKLLIYGATTLETGVPSRFSGSGSGTDYTLTISSLQPEDFATYYCQQSWNTPWTFGQGTKLEIKRLEDLKNVFPPEVAVFEPSEAEISHTQKATLVCLATGFYPDHVELSWWVNGKEVHSGVSTDPQPLKEQPALNDSRYCLSSRLRVSATFWQNPRNHFRCQVQFYGLSENDEWTQDRAKPVTQIVSAEAWGRADCGSQSFGLLDPKLCYLLDGILFIYGVILTALFLRVKFSRSADAPAYQQGQNQLYNELNLGRREEYDVLDKRRGRDPEMGGKPQRRKNPQEGLYNELQKDKMAEAYSEIGMKGERRRGKGHDGLYQGLSTATKDTYDALHMQALPPRRAKRSGSGATNFSLLKQAGDVEENPGPTSMDWIWRILFLVGAATGAHSFEQVQLQQPGAELVKPGASVKMSCKASGYAFSSYWINWMKQKPGQGLEWIGQIYPGDGDTNYNGKFKGRATLTADTSSSTAYMQLSSLTSEDSAVYFCARSITTVVGCAMDYWGQGTSVTVSSTRIQNPDPAVYQLRDSKSSDKSVCLFTDFDSQTNVSQSKDSDVYITDKTVLDMRSMDFKSNSAVAWSNKSDFACANAFNNSIIPEDTFFPSPESSCGTGDIENTSLAPEDPTFPADTWGTYLLTTETGLQKDHALWDHTAQNLLRMGLAFLVLVALVWFLVEDWLSRKRTRERASRASTWEGRRRLNTQTLRAKRSGSGATNFSLLKQAGDVEENPGPSRGHMTEYKPTVRLATRDDVPRAVRTLAAAFADYPATRHTVDPDRHIERVTELQELFLTRVGLDIGKVWVADDGAAVAVWTTPESVEAGAVFAEIGPRMAELSGSRLAAQQQMEGLLAPHRPKEPAWFLATVGVSPDHQGKGLGSAVVLPGVEAAERAGVPAFLETSAPRNLPFYERLGFTVTADVEVPEGPRTWCMTRKPGA

SEQ ID NO: 11678 - protein, 1064 aa, synthetic construct
MALPVTALLLPLALLLHAARPDIQMTQSPSSLSASVGDRVTITCKASDHINNWLAWYQQKPGQAPKLLIYGATTLETGVPSRFSGSGSGTDYTLTISSLQPEDFATYYCQQSWNTPWTFGQGTKLEIKRLEDLKNVFPPEVAVFEPSEAEISHTQKATLVCLATGFYPDHVELSWWVNGKEVHSGVSTDPQPLKEQPALNDSRYCLSSRLRVSATFWQNPRNHFRCQVQFYGLSENDEWTQDRAKPVTQIVSAEAWGRADCGSQSFGLLDPKLCYLLDGILFIYGVILTALFLRVKFSRSADAPAYQQGQNQLYNELNLGRREEYDVLDKRRGRDPEMGGKPQRRKNPQEGLYNELQKDKMAEAYSEIGMKGERRRGKGHDGLYQGLSTATKDTYDALHMQALPPRRAKRSGSGATNFSLLKQAGDVEENPGPTSMDWIWRILFLVGAATGAHSFEQVQLQQPGAELVKPGASVKMSCKASGYAFSSYWINWMKQKPGQGLEWIGQIYPGDGDTNYNGKFKGRATLTADTSSSTAYMQLSSLTSEDSAVYFCARSITTVVGCAMDYWGQGTSVTVSSTRIQNPDPAVYQLRDSKSSDKSVCLFTDFDSQTNVSQSKDSDVYITDKTVLDMRSMDFKSNSAVAWSNKSDFACANAFNNSIIPEDTFFPSPESSCGTKSVRFYLVVSPASASTQTSWTPRDLVSSQTQTQSCVPPTAGARQAPESPSTIPVPSQPQNSTLRPGPAAPIALVPVFCGLLVAKSLVLSALLVWWGDIWWKTMMELRSLDTQKATCHLQQVTDLPWTSVSSPVEREILYHTVARTKISDDDDEHTLRAKRSGSGVKQTLNFDLLKLAGDVESNPGPSRGHMTEYKPTVRLATRDDVPRAVRTLAAAFADYPATRHTVDPDRHIERVTELQELFLTRVGLDIGKVWVADDGAAVAVWTTPESVEAGAVFAEIGPRMAELSGSRLAAQQQMEGLLAPHRPKEPAWFLATVGVSPDHQGKGLGSAVVLPGVEAAERAGVPAFLETSAPRNLPFYERLGFTVTADVEVPEGPRTWCMTRKPGA

SEQ ID NO: 11679 - protein, 984 aa, synthetic construct
MALPVTALLLPLALLLHAARPDIQMTQSPSSLSASVGDRVTITCKASDHINNWLAWYQQKPGQAPKLLIYGATTLETGVPSRFSGSGSGTDYTLTISSLQPEDFATYYCQQSWNTPWTFGQGTKLEIKRLEDLKNVFPPEVAVFEPSEAEISHTQKATLVCLATGFYPDHVELSWWVNGKEVHSGVSTDPQPLKEQPALNDSRYCLSSRLRVSATFWQNPRNHFRCQVQFYGLSENDEWTQDRAKPVTQIVSAEAWGRADCGSQSFGLLDPKLCYLLDGILFIYGVILTALFLRVKFSRSADAPAYQQGQNQLYNELNLGRREEYDVLDKRRGRDPEMGGKPQRRKNPQEGLYNELQKDKMAEAYSEIGMKGERRRGKGHDGLYQGLSTATKDTYDALHMQALPPRRAKRSGSGATNFSLLKQAGDVEENPGPTSMDWIWRILFLVGAATGAHSFEQVQLQQPGAELVKPGASVKMSCKASGYAFSSYWINWMKQKPGQGLEWIGQIYPGDGDTNYNGKFKGRATLTADTSSSTAYMQLSSLTSEDSAVYFCARSITTVVGCAMDYWGQGTSVTVSSTRIQNPDPAVYQLRDSKSSDKSVCLFTDFDSQTNVSQSKDSDVYITDKTVLDMRSMDFKSNSAVAWSNKSDFACANAFNNSIIPEDTFFPSPESSCGTVVEKEHPQLGAGTVLLLRAGFYAVSFLSVAVGSTVYYQGKCLTWKGPRRQLPAVVPAPLPPPCGSSAHLLPPVPGGRAKRSGSGVKQTLNFDLLKLAGDVESNPGPSRGHMTEYKPTVRLATRDDVPRAVRTLAAAFADYPATRHTVDPDRHIERVTELQELFLTRVGLDIGKVWVADDGAAVAVWTTPESVEAGAVFAEIGPRMAELSGSRLAAQQQMEGLLAPHRPKEPAWFLATVGVSPDHQGKGLGSAVVLPGVEAAERAGVPAFLETSAPRNLPFYERLGFTVTADVEVPEGPRTWCMTRKPGA

SEQ ID NO: 11680 - protein, 955 aa, synthetic construct
MALPVTALLLPLALLLHAARPDIQMTQSPSSLSASVGDRVTITCKASDHINNWLAWYQQKPGQAPKLLIYGATTLETGVPSRFSGSGSGTDYTLTISSLQPEDFATYYCQQSWNTPWTFGQGTKLEIKRLEGQPKANPTVTLFPPSSEELQANKATLVCLISDFYPGAVTVAWKADGSPVKAGVETTKPSKQSNNKYAASSYLSLTPEQWKSHRSYSCQVTHEGSTVEKTVAPTECSGSQSFGLLDPKLCYLLDGILFIYGVILTALFLRVKFSRSADAPAYQQGQNQLYNELNLGRREEYDVLDKRRGRDPEMGGKPQRRKNPQEGLYNELQKDKMAEAYSEIGMKGERRRGKGHDGLYQGLSTATKDTYDALHMQALPPRRAKRSGSGATNFSLLKQAGDVEENPGPTSMDWIWRILFLVGAATGAHSFEQVQLQQPGAELVKPGASVKMSCKASGYAFSSYWINWMKQKPGQGLEWIGQIYPGDGDTNYNGKFKGRATLTADTSSSTAYMQLSSLTSEDSAVYFCARSITTVVGCAMDYWGQGTSVTVSSTRASTKGPSVFPLAPSSKSTSGGTAALGCLVKDYFPEPVTVSWNSGALTSGVHTFPAVLQSSGLYSLSSVVTVPSSSLGTQTYICNVNHKPSNTKVDKRVEPKSCGTITQGLAVSTISSFFPPGYQVSFCLVMVLLFAVDTGLYFSVKTNIRSSTRDWKDHKFKWRKDPQDKRAKRSGSGATNFSLLKQAGDVEENPGPSRGHMTEYKPTVRLATRDDVPRAVRTLAAAFADYPATRHTVDPDRHIERVTELQELFLTRVGLDIGKVWVADDGAAVAVWTTPESVEAGAVFAEIGPRMAELSGSRLAAQQQMEGLLAPHRPKEPAWFLATVGVSPDHQGKGLGSAVVLPGVEAAERAGVPAFLETSAPRNLPFYERLGFTVTADVEVPEGPRTWCMTRKPGA

SEQ ID NO: 11681 - protein, 970 aa, synthetic construct
MALPVTALLLPLALLLHAARPDIQMTQSPSSLSASVGDRVTITCKASDHINNWLAWYQQKPGQAPKLLIYGATTLETGVPSRFSGSGSGTDYTLTISSLQPEDFATYYCQQSWNTPWTFGQGTKLEIKRLEDLKNVFPPEVAVFEPSEAEISHTQKATLVCLATGFYPDHVELSWWVNGKEVHSGVSTDPQPLKEQPALNDSRYCLSSRLRVSATFWQNPRNHFRCQVQFYGLSENDEWTQDRAKPVTQIVSAEAWGRADCGSQSFGLLDPKLCYLLDGILFIYGVILTALFLRVKFSRSADAPAYQQGQNQLYNELNLGRREEYDVLDKRRGRDPEMGGKPQRRKNPQEGLYNELQKDKMAEAYSEIGMKGERRRGKGHDGLYQGLSTATKDTYDALHMQALPPRRAKRSGSGATNFSLLKQAGDVEENPGPTSMDWIWRILFLVGAATGAHSFEQVQLQQPGAELVKPGASVKMSCKASGYAFSSYWINWMKQKPGQGLEWIGQIYPGDGDTNYNGKFKGRATLTADTSSSTAYMQLSSLTSEDSAVYFCARSITTVVGCAMDYWGQGTSVTVSSTRIQNPDPAVYQLRDSKSSDKSVCLFTDFDSQTNVSQSKDSDVYITDKTVLDMRSMDFKSNSAVAWSNKSDFACANAFNNSIIPEDTFFPSPESSCGTITQGLAVSTISSFFPPGYQVSFCLVMVLLFAVDTGLYFSVKTNIRSSTRDWKDHKFKWRKDPQDKRAKRSGSGATNFSLLKQAGDVEENPGPSRGHMTEYKPTVRLATRDDVPRAVRTLAAAFADYPATRHTVDPDRHIERVTELQELFLTRVGLDIGKVWVADDGAAVAVWTTPESVEAGAVFAEIGPRMAELSGSRLAAQQQMEGLLAPHRPKEPAWFLATVGVSPDHQGKGLGSAVVLPGVEAAERAGVPAFLETSAPRNLPFYERLGFTVTADVEVPEGPRTWCMTRKPGA

SEQ ID NO: 11682 - protein, 653 aa, synthetic construct; identical to SEQ ID NO: 9381

SEQ ID NO: 11683 - protein, 500 aa, synthetic construct
MALPVTALLLPLALLLHAARPDIVLTQSPASLAVSLGQRATISCRASKSVSTSGYSYLHWYQQKPGQPPKLLIYLASNLESGVPARFSGSGSGTDFTLNIHPVEEEDAATYYCQHSRELPFTFGSGTKLEIKGGGGSGGGGSGGGGSQVQLVESGGGLVQPGGSLKLSCAASGFDFSRYWMSWVRQAPGKGLEWIGEINPTSSTINFTPSLKDKVFISRDNAKNTLYLQMSKVRSEDTALYYCARGNYYRYGDAMDYWGQGTSVTVSSTREQKLISEEDLKIEVMYPPPYLDNEKSNGTIIHVKGKHLCPSPLFPGPSKPFWVLVVVGGVLACYSLLVTVAFIIFWVRSKRSRLLHSDYMNMTPRRPGPTRKHYQPYAPPRDFAAYRSRVKFSRSADAPAYQQGQNQLYNELNLGRREEYDVLDKRRGRDPEMGGKPRRKNPQEGLYNELQKDKMAEAYSEIGMKGERRRGKGHDGLYQGLSTATKDTYDALHMQALPPR

SEQ ID NO: 11684 - protein, 506 aa, synthetic construct
MALPVTALLLPLALLLHAARPDIVLTQSPASLAVSLGQRATISCRASKSVSTSGYSYLHWYQQKPGQPPKLLIYLASNLESGVPARFSGSGSGTDFTLNIHPVEEEDAATYYCQHSRELPFTFGSGTKLEIKGGGGSGGGGSGGGGSQVQLVESGGGLVQPGGSLKLSCAASGFDFSRYWMSWVRQAPGKGLEWIGEINPTSSTINFTPSLKDKVFISRDNAKNTLYLQMSKVRSEDTALYYCARGNYYRYGDAMDYWGQGTSVTVSSTREQKLISEEDLAKPTTTPAPRPPTPAPTIASQPLSLRPEACRPAAGGAVHTRGLDFACDIYIWAPLAGTCGVLLLSLVITLYCKRGRKKLLYIFKQPFMRPVQTTQEEDGCSCRFPEEEEGGCELRVKFSRSADAPAYQQGQNQLYNELNLGRREEYDVLDKRRGRDPEMGGKPRRKNPQEGLYNELQKDKMAEAYSEIGMKGERRRGKGHDGLYQGLSTATKDTYDALHMQALPPR

SEQ ID NO: 11685 - protein, 506 aa, synthetic construct
MALPVTALLLPLALLLHAARPQVQLVESGGGLVQPGGSLKLSCAASGFDFSRYWMSWVRQAPGKGLEWIGEINPTSSTINFTPSLKDKVFISRDNAKNTLYLQMSKVRSEDTALYYCARGNYYRYGDAMDYWGQGTSVTVSSGGGGSGGGGSGGGGSDIVLTQSPASLAVSLGQRATISCRASKSVSTSGYSYLHWYQQKPGQPPKLLIYLASNLESGVPARFSGSGSGTDFTLNIHPVEEEDAATYYCQHSRELPFTFGSGTKLEIKTREQKLISEEDLAKPTTTPAPRPPTPAPTIASQPLSLRPEACRPAAGGAVHTRGLDFACDIYIWAPLAGTCGVLLLSLVITLYCKRGRKKLLYIFKQPFMRPVQTTQEEDGCSCRFPEEEEGGCELRVKFSRSADAPAYQQGQNQLYNELNLGRREEYDVLDKRRGRDPEMGGKPRRKNPQEGLYNELQKDKMAEAYSEIGMKGERRRGKGHDGLYQGLSTATKDTYDALHMQALPPR

SEQ ID NO: 11686 - protein, 919 aa, synthetic construct
MALPVTALLLPLALLLHAARPDIVLTQSPASLAVSLGQRATISCRASKSVSTSGYSYLHWYQQKPGQPPKLLIYLASNLESGVPARFSGSGSGTDFTLNIHPVEEEDAATYYCQHSRELPFTFGSGTKLEIKGGGGSGGGGSGGGGSQVQLVESGGGLVQPGGSLKLSCAASGFDFSRYWMSWVRQAPGKGLEWIGEINPTSSTINFTPSLKDKVFISRDNAKNTLYLQMSKVRSEDTALYYCARGNYYRYGDAMDYWGQGTSVTVSSTREQKLISEEDLAKPTTTPAPRPPTPAPTIASQPLSLRPEACRPAAGGAVHTRGLDFACDIYIWAPLAGTCGVLLLSLVITLYCGRARVKFSRSADAPAYQQGQNQLYNELNLGRREEYDVLDKRRGRDPEMGGKPRRKNPQEGLYNELQKDKMAEAYSEIGMKGERRRGKGHDGLYQGLSTATKDTYDALHMQALPPRSRGSGATNFSLLKQAGDVEENPGPGIHMATYEVLCEVARKLGTDDREVVLFLLNVFIPQPTLAQLIGALRALKEEGRLTFPLLAECLFRAGRRDLLRDLLHLDPRFLERHLAGTMSYFSPYQLTVLHVDGELCARDIRSLIFLSKDTIGSRSTPQTFLHWVYCMENLDLLGPTDVDALMSMLRSLSRVDLQRQVQTLMGLHLSGPSHSQHYRHTPLETDFYDYKDDDDKTSGSGEGRGSLLTCGDVEENPGPHMTEYKPTVRLATRDDVPRAVRTLAAAFADYPATRHTVDPDRHIERVTELQELFLTRVGLDIGKVWVADDGAAVAVWTTPESVEAGAVFAEIGPRMAELSGSRLAAQQQMEGLLAPHRPKEPAWFLATVGVSPDHQGKGLGSAVVLPGVEAAERAGVPAFLETSAPRNLPFYERLGFTVTADVEVPEGPRTWCMTRKPGA

SEQ ID NO: 11687 - protein, 859 aa, synthetic construct
MALPVTALLLPLALLLHAARPDIVLTQSPASLAVSLGQRATISCRASKSVSTSGYSYLHWYQQKPGQPPKLLIYLASNLESGVPARFSGSGSGTDFTLNIHPVEEEDAATYYCQHSRELPFTFGSGTKLEIKLEIQNPDPAVYQLRDSKSSDKSVCLFTDFDSQTNVSQSKDSDVYITDKCVLDMRSMDFKSNSAVAWSNKSDFACANAFNNSIIPEDTFFPSSDVPCDVKLVEKSFETDTNLNFQNLSVIGFRILLLKVAGFNLLMTLRLWSSRAKRSGSGVKQTLNFDLLKLAGDVESNPGPTSMDWIWRILFLVGAATGAHSFEQVQLVESGGGLVQPGGSLKLSCAASGFDFSRYWMSWVRQAPGKGLEWIGEINPTSSTINFTPSLKDKVFISRDNAKNTLYLQMSKVRSEDTALYYCARGNYYRYGDAMDYWGQGTSVTVSSTREDLKNVFPPEVAVFEPSKAEIAHTQKATLVCLATGFYPDHVELSWWVNGKEVHSGVCTDPQPLKEQPALNDSRYCLSSRLRVSATFWQNPRNHFRCQVQFYGLSENDEWTQDRAKPVTQIVSAEAWGRADCGITSASYHQGVLSATILYEILLGKATLYAVLVSALVLMAMVKRKDSRGRAKRSGSGATNFSLLKQAGDVEENPGPSRGHMTEYKPTVRLATRDDVPRAVRTLAAAFADYPATRHTVDPDRHIERVTELQELFLTRVGLDIGKVWVADDGAAVAVWTTPESVEAGAVFAEIGPRMAELSGSRLAAQQQMEGLLAPHRPKEPAWFLATVGVSPDHQGKGLGSAVVLPGVEAAERAGVPAFLETSAPRNLPFYERLGFTVTADVEVPEGPRTWCMTRKPGA

SEQ ID NO: 11688 - protein, 858 aa, synthetic construct
MALPVTALLLPLALLLHAARPDIVLTQSPASLAVSLGQRATISCRASKSVSTSGYSYLHWYQQKPGQPPKLLIYLASNLESGVPARFSGSGSGTDFTLNIHPVEEEDAATYYCQHSRELPFTFGSGTKLEIKLEDLKNVFPPEVAVFEPSKAEIAHTQKATLVCLATGFYPDHVELSWWVNGKEVHSGVCTDPQPLKEQPALNDSRYCLSSRLRVSATFWQNPRNHFRCQVQFYGLSENDEWTQDRAKPVTQIVSAEAWGRADCGITSASYHQGVLSATILYEILLGKATLYAVLVSALVLMAMVKRKDSRGRAKRSGSGATNFSLLKQAGDVEENPGPTSMDWIWRILFLVGAATGAHSFEQVQLVESGGGLVQPGGSLKLSCAASGFDFSRYWMSWVRQAPGKGLEWIGEINPTSSTINFTPSLKDKVFISRDNAKNTLYLQMSKVRSEDTALYYCARGNYYRYGDAMDYWGQGTSVTVSSTRIQNPDPAVYQLRDSKSSDKSVCLFTDFDSQTNVSQSKDSDVYITDKCVLDMRSMDFKSNSAVAWSNKSDFACANAFNNSIIPEDTFFPSSDVPCDVKLVEKSFETDTNLNFQNLSVIGFRILLLKVAGFNLLMTLRLWSSRAKRSGSGVKQTLNFDLLKLAGDVESNPGPSRGHMTEYKPTVRLATRDDVPRAVRTLAAAFADYPATRHTVDPDRHIERVTELQELFLTRVGLDIGKVWVADDGAAVAVWTTPESVEAGAVFAEIGPRMAELSGSRLAAQQQMEGLLAPHRPKEPAWFLATVGVSPDHQGKGLGSAVVLPGVEAAERAGVPAFLETSAPRNLPFYERLGFTVTADVEVPEGPRTWCMTRKPGA

SEQ ID NO: 11689 - protein, 625 aa, synthetic construct
MALPVTALLLPLALLLHAARPDIVLTQSPASLAVSLGQRATISCRASKSVSTSGYSYLHWYQQKPGQPPKLLIYLASNLESGVPARFSGSGSGTDFTLNIHPVEEEDAATYYCQHSRELPFTFGSGTKLEIKLEDLKNVFPPEVAVFEPSEAEISHTQKATLVCLATGFYPDHVELSWWVNGKEVHSGVCTDPQPLKEQPALNDSRYCLSSRLRVSATFWQNPRNHFRCQVQFYGLSENDEWTQDRAKPVTQIVSAEAWGRADCGFTSESYQQGVLSATILYEILLGKATLYAVLVSALVLMAMVKRKDSRGRAKRSGSGATNFSLLKQAGDVEENPGPTSMDWIWRILFLVGAATGAHSFEQVQLVESGGGLVQPGGSLKLSCAASGFDFSRYWMSWVRQAPGKGLEWIGEINPTSSTINFTPSLKDKVFISRDNAKNTLYLQMSKVRSEDTALYYCARGNYYRYGDAMDYWGQGTSVTVSSTRIQNPDPAVYQLRDSKSSDKSVCLFTDFDSQTNVSQSKDSDVYITDKCVLDMRSMDFKSNSAVAWSNKSDFACANAFNNSIIPEDTFFPSPESSCDVKLVEKSFETDTNLNFQNLSVIGFRILLLKVAGFNLLMTLRLWSS

SEQ ID NO: 11690 - protein, 850 aa, synthetic construct
MALPVTALLLPLALLLHAARPDIVLTQSPASLAVSLGQRATISCRASKSVSTSGYSYLHWYQQKPGQPPKLLIYLASNLESGVPARFSGSGSGTDFTLNIHPVEEEDAATYYCQHSRELPFTFGSGTKLEIKLEDLKNVFPPEVAVFEPSEAEISHTQKATLVCLATGFYPDHVELSWWVNGKEVHSGVCTDPQPLKEQPALNDSRYCLSSRLRVSATFWQNPRNHFRCQVQFYGLSENDEWTQDRAKPVTQIVSAEAWGRADCGFTSESYQQGVLSATILYEILLGKATLYAVLVSALVLMAMVKRKDSRGRAKRSGSGATNFSLLKQAGDVEENPGPTSMDWIWRILFLVGAATGAHSFEQVQLVESGGGLVQPGGSLKLSCAASGFDFSRYWMSWVRQAPGKGLEWIGEINPTSSTINFTPSLKDKVFISRDNAKNTLYLQMSKVRSEDTALYYCARGNYYRYGDAMDYWGQGTSVTVSSTRIQNPDPAVYQLRDSKSSDKSVCLFTDFDSQTNVSQSKDSDVYITDKCVLDMRSMDFKSNSAVAWSNKSDFACANAFNNSIIPEDTFFPSPESSCDVKLVEKSFETDTNLNFQNLSVIGFRILLLKVAGFNLLMTLRLWSSRAKRSGSGVKQTLNFDLLKLAGDVESNPGPSRGGIHTMATYEVLCEVARKLGTDDREVVLFLLNVFIPQPTLAQLIGALRALKEEGRLTFPLLAECLFRAGRRDLLRDLLHLDPRFLERHLAGTMSYFSPYQLTVLHVDGELCARDIRSLIFLSKDTIGSRSTPQTFLHWVYCMENLDLLGPTDVDALMSMLRSLSRVDLQRQVQTLMGLHLSGPSHSQHYRHTP

SEQ ID NO: 11691 - protein, 629 aa, synthetic construct
MALPVTALLLPLALLLHAARPDIVLTQSPASLAVSLGQRATISCRASKSVSTSGYSYLHWYQQKPGQPPKLLIYLASNLESGVPARFSGSGSGTDFTLNIHPVEEEDAATYYCQHSRELPFTFGSGTKLEIKLEIQNPDPAVYQLRDSKSSDKSVCLFTDFDSQTNVSQSKDSDVYITDKCVLDMRSMDFKSNSAVAWSNKSDFACANAFNNSIIPEDTFFPSPESSCDVKLVEKSFETDTNLNFQNLSVIGFRILLLKVAGFNLLMTLRLWSSRAKRSGSGVKQTLNFDLLKLAGDVESNPGPTSMDWIWRILFLVGAATGAHSFEQVQLVESGGGLVQPGGSLKLSCAASGFDFSRYWMSWVRQAPGKGLEWIGEINPTSSTINFTPSLKDKVFISRDNAKNTLYLQMSKVRSEDTALYYCARGNYYRYGDAMDYWGQGTSVTVSSTREDLKNVFPPEVAVFEPSEAEISHTQKATLVCLATGFYPDHVELSWWVNGKEVHSGVCTDPQPLKEQPALNDSRYCLSSRLRVSATFWQNPRNHFRCQVQFYGLSENDEWTQDRAKPVTQIVSAEAWGRADCGFTSESYQQGVLSATILYEILLGKATLYAVLVSALVLMAMVKRKDSRG

SEQ ID NO: 11692 - protein, 851 aa, synthetic construct
MALPVTALLLPLALLLHAARPDIVLTQSPASLAVSLGQRATISCRASKSVSTSGYSYLHWYQQKPGQPPKLLIYLASNLESGVPARFSGSGSGTDFTLNIHPVEEEDAATYYCQHSRELPFTFGSGTKLEIKLEIQNPDPAVYQLRDSKSSDKSVCLFTDFDSQTNVSQSKDSDVYITDKCVLDMRSMDFKSNSAVAWSNKSDFACANAFNNSIIPEDTFFPSPESSCDVKLVEKSFETDTNLNFQNLSVIGFRILLLKVAGFNLLMTLRLWSSRAKRSGSGVKQTLNFDLLKLAGDVESNPGPTSMDWIWRILFLVGAATGAHSFEQVQLVESGGGLVQPGGSLKLSCAASGFDFSRYWMSWVRQAPGKGLEWIGEINPTSSTINFTPSLKDKVFISRDNAKNTLYLQMSKVRSEDTALYYCARGNYYRYGDAMDYWGQGTSVTVSSTREDLKNVFPPEVAVFEPSEAEISHTQKATLVCLATGFYPDHVELSWWVNGKEVHSGVCTDPQPLKEQPALNDSRYCLSSRLRVSATFWQNPRNHFRCQVQFYGLSENDEWTQDRAKPVTQIVSAEAWGRADCGFTSESYQQGVLSATILYEILLGKATLYAVLVSALVLMAMVKRKDSRGRAKRSGSGATNFSLLKQAGDVEENPGPSRGGIHTMATYEVLCEVARKLGTDDREVVLFLLNVFIPQPTLAQLIGALRALKEEGRLTFPLLAECLFRAGRRDLLRDLLHLDPRFLERHLAGTMSYFSPYQLTVLHVDGELCARDIRSLIFLSKDTIGSRSTPQTFLHWVYCMENLDLLGPTDVDALMSMLRSLSRVDLQRQVQTLMGLHLSGPSHSQHYRHTP

SEQ ID NO: 11693 - protein, 903 aa, synthetic construct
MALPVTALLLPLALLLHAARPLEGKPIPNPLLGLDSTGSGEDLKNVFPPEVAVFEPSKAEIAHTQKATLVCLATGFYPDHVELSWWVNGKEVHSGVCTDPQPLKEQPALNDSRYCLSSRLRVSATFWQNPRNHFRCQVQFYGLSENDEWTQDRAKPVTQIVSAEAWGRADCGITSASYHQGVLSATILYEILLGKATLYAVLVSALVLMAMVKRKDSRGRAKRSGSGATNFSLLKQAGDVEENPGPTSMALPVTALLLPLALLLHAARPDIVLTQSPASLAVSLGQRATISCRASKSVSTSGYSYLHWYQQKPGQPPKLLIYLASNLESGVPARFSGSGSGTDFTLNIHPVEEEDAATYYCQHSRELPFTFGSGTKLEIKGGGGSGGGGSGGGGSQVQLVESGGGLVQPGGSLKLSCAASGFDFSRYWMSWVRQAPGKGLEWIGEINPTSSTINFTPSLKDKVFISRDNAKNTLYLQMSKVRSEDTALYYCARGNYYRYGDAMDYWGQGTSVTVSSTREQKLISEEDGSGIQNPDPAVYQLRDSKSSDKSVCLFTDFDSQTNVSQSKDSDVYITDKCVLDMRSMDFKSNSAVAWSNKSDFACANAFNNSIIPEDTFFPSSDVPCDVKLVEKSFETDTNLNFQNLSVIGFRILLLKVAGFNLLMTLRLWSSRAKRSGSGVKQTLNFDLLKLAGDVESNPGPSRGHMTEYKPTVRLATRDDVPRAVRTLAAAFADYPATRHTVDPDRHIERVTELQELFLTRVGLDIGKVWVADDGAAVAVWTTPESVEAGAVFAEIGPRMAELSGSRLAAQQQMEGLLAPHRPKEPAWFLATVGVSPDHQGKGLGSAVVLPGVEAAERAGVPAFLETSAPRNLPFYERLGFTVTADVEVPEGPRTWCMTRKPGA

SEQ ID NO: 11694 - protein, 904 aa, synthetic construct
MALPVTALLLPLALLLHAARPLEQKLISEEDLGSGDRPDPAVYQLRDSKSSDKSVCLFTDFDSQTNVSQSKDSDVYITDKCVLDMRSMDFKSNSAVAWSNKSDFACANAFNNSIIPEDTFFPSPESSCDVKLVEKSFETDTNLNFQNLSVIGFRILLLKVAGFNLLMTLRLWSSSSRAKRSGSGVKQTLNFDLLKLAGDVESNPGPTSMALPVTALLLPLALLLHAARPDIVLTQSPASLAVSLGQRATISCRASKSVSTSGYSYLHWYQQKPGQPPKLLIYLASNLESGVPARFSGSGSGTDFTLNIHPVEEEDAATYYCQHSRELPFTFGSGTKLEIKGGGGSGGGGSGGGGSQVQLVESGGGLVQPGGSLKLSCAASGFDFSRYWMSWVRQAPGKGLEWIGEINPTSSTINFTPSLKDKVFISRDNAKNTLYLQMSKVRSEDTALYYCARGNYYRYGDAMDYWGQGTSVTVSSTRGKPIPNPLLGLDSTGSGEDLKNVFPPEVAVFEPSEAEISHTQKATLVCLATGFYPDHVELSWWVNGKEVHSGVCTDPQPLKEQPALNDSRYCLSSRLRVSATFWQNPRNHFRCQVQFYGLSENDEWTQDRAKPVTQIVSAEAWGRADCGFTSESYQQGVLSATILYEILLGKATLYAVLVSALVLMAMVKRKDSRGRAKRSGSGATNFSLLKQAGDVEENPGPSRGHMTEYKPTVRLATRDDVPRAVRTLAAAFADYPATRHTVDPDRHIERVTELQELFLTRVGLDIGKVWVADDGAAVAVWTTPESVEAGAVFAEIGPRMAELSGSRLAAQQQMEGLLAPHRPKEPAWFLATVGVSPDHQGKGLGSAVVLPGVEAAERAGVPAFLETSAPRNLPFYERLGFTVTADVEVPEGPRTWCMTRKPGA

SEQ ID NO: 11695 - protein, 858 aa, synthetic construct
MALPVTALLLPLALLLHAARPDIVLTQSPASLAVSLGQRATISCRASKSVSTSGYSYLHWYQQKPGQPPKLLIYLASNLESGVPARFSGSGSGTDFTLNIHPVEEEDAATYYCQHSRELPFTFGSGTKLEIKLEDLKNVFPPEVAVFEPSEAEISHTQKATLVCLATGFYPDHVELSWWVNGKEVHSGVSTDPQPLKEQPALNDSRYCLSSRLRVSATFWQNPRNHFRCQVQFYGLSENDEWTQDRAKPVTQIVSAEAWGRADCGFTSESYQQGVLSATILYEILLGKATLYAVLVSALVLMAMVKRKDSRGRAKRSGSGATNFSLLKQAGDVEENPGPTSMDWIWRILFLVGAATGAHSFEQVQLVESGGGLVQPGGSLKLSCAASGFDFSRYWMSWVRQAPGKGLEWIGEINPTSSTINFTPSLKDKVFISRDNAKNTLYLQMSKVRSEDTALYYCARGNYYRYGDAMDYWGQGTSVTVSSTRIQNPDPAVYQLRDSKSSDKSVCLFTDFDSQTNVSQSKDSDVYITDKTVLDMRSMDFKSNSAVAWSNKSDFACANAFNNSIIPEDTFFPSPESSCDVKLVEKSFETDTNLNFQNLSVIGFRILLLKVAGFNLLMTLRLWSSRAKRSGSGVKQTLNFDLLKLAGDVESNPGPSRGHMTEYKPTVRLATRDDVPRAVRTLAAAFADYPATRHTVDPDRHIERVTELQELFLTRVGLDIGKVWVADDGAAVAVWTTPESVEAGAVFAEIGPRMAELSGSRLAAQQQMEGLLAPHRPKEPAWFLATVGVSPDHQGKGLGSAVVLPGVEAAERAGVPAFLETSAPRNLPFYERLGFTVTADVEVPEGPRTWCMTRKPGA

SEQ ID NO: 11696 - protein, 940 aa, synthetic construct
MALPVTALLLPLALLLHAARPDIVLTQSPASLAVSLGQRATISCRASKSVSTSGYSYLHWYQQKPGQPPKLLIYLASNLESGVPARFSGSGSGTDFTLNIHPVEEEDAATYYCQHSRELPFTFGSGTKLEIKLEDLKNVFPPEVAVFEPSEAEISHTQKATLVCLATGFYPDHVELSWWVNGKEVHSGVSTDPQPLKEQPALNDSRYCLSSRLRVSATFWQNPRNHFRCQVQFYGLSENDEWTQDRAKPVTQIVSAEAWGRADCGFTSESYQQGVLSATILYEILLGKATLYAVLVSALVLMAMVKRKDSRGRAKRSGSGATNFSLLKQAGDVEENPGPTSMDWIWRILFLVGAATGAHSFEQVQLVESGGGLVQPGGSLKLSCAASGFDFSRYWMSWVRQAPGKGLEWIGEINPTSSTINFTPSLKDKVFISRDNAKNTLYLQMSKVRSEDTALYYCARGNYYRYGDAMDYWGQGTSVTVSSTREQKLISEEDGSGTPFPSLAPPIMLLVDGKQQMVVVCLVLDVAPPGLDSPIWFSAGNGSALDAFTYGPSPATDGTWTNLAHLSLPSEELASWEPLVCHTGPGAEGHSRSTQPMHLSGEASTARTCPQEPLRGTPGGALWLGVLRLLLFKLLLFDLLLTCSCLCDPAGPLPSPATTTRLRALGSHRLHPATETGGREATSSPRPQPRDRRWGDTPPGRKPGSPVRAKRSGSGVKQTLNFDLLKLAGDVESNPGPSRGHMTEYKPTVRLATRDDVPRAVRTLAAAFADYPATRHTVDPDRHIERVTELQELFLTRVGLDIGKVWVADDGAAVAVWTTPESVEAGAVFAEIGPRMAELSGSRLAAQQQMEGLLAPHRPKEPAWFLATVGVSPDHQGKGLGSAVVLPGVEAAERAGVPAFLETSAPRNLPFYERLGFTVTADVEVPEGPRTWCMTRKPGA

SEQ ID NO: 11697 - protein, 958 aa, synthetic construct
MALPVTALLLPLALLLHAARPLEDLKNVFPPEVAVFEPSEAEISHTQKATLVCLATGFYPDHVELSWWVNGKEVHSGVSTDPQPLKEQPALNDSRYCLSSRLRVSATFWQNPRNHFRCQVQFYGLSENDEWTQDRAKPVTQIVSAEAWGRADCGFTSESYQQGVLSATILYEILLGKATLYAVLVSALVLMAMVKRKDSRGRAKRSGSGATNFSLLKQAGDVEENPGPTSMALPVTALLLPLALLLHAARPDIVLTQSPASLAVSLGQRATISCRASKSVSTSGYSYLHWYQQKPGQPPKLLIYLASNLESGVPARFSGSGSGTDFTLNIHPVEEEDAATYYCQHSRELPFTFGSGTKLEIKGGGGSGGGGSGGGGSQVQLVESGGGLVQPGGSLKLSCAASGFDFSRYWMSWVRQAPGKGLEWIGEINPTSSTINFTPSLKDKVFISRDNAKNTLYLQMSKVRSEDTALYYCARGNYYRYGDAMDYWGQGTSVTVSSTREQKLISEEDLGSGTPFPSLAPPIMLLVDGKQQMVVVCLVLDVAPPGLDSPIWFSAGNGSALDAFTYGPSPATDGTWTNLAHLSLPSEELASWEPLVCHTGPGAEGHSRSTQPMHLSGEASTARTCPQEPLRGTPGGALWLGVLRLLLFKLLLFDLLLTCSCLCDPAGPLPSPATTTRLRALGSHRLHPATETGGREATSSPRPQPRDRRWGDTPPGRKPGSPVRAKRSGSGVKQTLNFDLLKLAGDVESNPGPSRSRGHMTEYKPTVRLATRDDVPRAVRTLAAAFADYPATRHTVDPDRHIERVTELQELFLTRVGLDIGKVWVADDGAAVAVWTTPESVEAGAVFAEIGPRMAELSGSRLAAQQQMEGLLAPHRPKEPAWFLATVGVSPDHQGKGLGSAVVLPGVEAAERAGVPAFLETSAPRNLPFYERLGFTVTADVEVPEGPRTWCMTRKPGA

SEQ ID NO: 11698 - protein, 895 aa, synthetic construct
MALPVTALLLPLALLLHAARPDIVLTQSPASLAVSLGQRATISCRASKSVSTSGYSYLHWYQQKPGQPPKLLIYLASNLESGVPARFSGSGSGTDFTLNIHPVEEEDAATYYCQHSRELPFTFGSGTKLEIKLEGKPIPNPLLGLDSTGSGDKQLDADVSPKPTIFLPSIAETKLQKAGTYLCLLEKFFPDVIKIHWQEKKSNTILGSQEGNTMKTNDTYMKFSWLTVPEKSLDKEHRCIVRHENNKNGVDQEIIFPPIKTDVITMDPKDNCSKDANDTLLLQLTNTSAYYMYLLLLLKSVVYFAIITCCLLRRTAFCCNGEKSRAKRSGSGATNFSLLKQAGDVEENPGPTSMDWIWRILFLVGAATGAHSFEQVQLVESGGGLVQPGGSLKLSCAASGFDFSRYWMSWVRQAPGKGLEWIGEINPTSSTINFTPSLKDKVFISRDNAKNTLYLQMSKVRSEDTALYYCARGNYYRYGDAMDYWGQGTSVTVSSTREQKLISEEDGSGSQPHTKPSVFVMKNGTNVACLVKEFYPKDIRINLVSSKKITEFDPAIVISPSGKYNAVKLGKYEDSNSVTCSVQHDNKTVHSTDFEVKTDSTDHVKPKETENTKQPSKSCHKPKAIVHTEKVNMMSLTVLGLRMLFAKTVAVNFLLTAKLFFLRAKRSGSGVKQTLNFDLLKLAGDVESNPGPSRGHMTEYKPTVRLATRDDVPRAVRTLAAAFADYPATRHTVDPDRHIERVTELQELFLTRVGLDIGKVWVADDGAAVAVWTTPESVEAGAVFAEIGPRMAELSGSRLAAQQQMEGLLAPHRPKEPAWFLATVGVSPDHQGKGLGSAVVLPGVEAAERAGVPAFLETSAPRNLPFYERLGFTVTADVEVPEGPRTWCMTRKPGA

SEQ ID NO: 11699 - protein, 633 aa, synthetic construct
MALPVTALLLPLALLLHAARPDIVLTQSPASLAVSLGQRATISCRASKSVSTSGYSYLHWYQQKPGQPPKLLIYLASNLESGVPARFSGSGSGTDFTLNIHPVEEEDAATYYCQHSRELPFTFGSGTKLEIKLESQPHTKPSVFVMKNGTNVACLVKEFYPKDIRINLVSSKKITEFDPAIVISPSGKYNAVKLGKYEDSNSVTCSVQHDNKTVHSTDFEVKTDSTDHVKPKETENTKQPSKSCHKPKAIVHTEKVNMMSLTVLGLRMLFAKTVAVNFLLTAKLFFLRAKRSGSGATNFSLLKQAGDVEENPGPTSMDWIWRILFLVGAATGAHSFEQVQLVESGGGLVQPGGSLKLSCAASGFDFSRYWMSWVRQAPGKGLEWIGEINPTSSTINFTPSLKDKVFISRDNAKNTLYLQMSKVRSEDTALYYCARGNYYRYGDAMDYWGQGTSVTVSSTRDKQLDADVSPKPTIFLPSIAETKLQKAGTYLCLLEKFFPDVIKIHWQEKKSNTILGSQEGNTMKTNDTYMKFSWLTVPEKSLDKEHRCIVRHENNKNGVDQEIIFPPIKTDVITMDPKDNCSKDANDTLLLQLTNTSAYYMYLLLLLKSVVYFAIITCCLLRRTAFCCNGEKS

SEQ ID NO: 11700 - protein, 910 aa, synthetic construct
MALPVTALLLPLALLLHAARPLEGKPIPNPLLGLDSTGSGDKQLDADVSPKPTIFLPSIAETKLQKAGTYLCLLEKFFPDVIKIHWQEKKSNTILGSQEGNTMKTNDTYMKFSWLTVPEKSLDKEHRCIVRHENNKNGVDQEIIFPPIKTDVITMDPKDNCSKDANDTLLLQLTNTSAYYMYLLLLLKSVVYFAIITCCLLRRTAFCCNGEKSRAKRSGSGATNFSLLKQAGDVEENPGPTSMALPVTALLLPLALLLHAARPDIVLTQSPASLAVSLGQRATISCRASKSVSTSGYSYLHWYQQKPGQPPKLLIYLASNLESGVPARFSGSGSGTDFTLNIHPVEEEDAATYYCQHSRELPFTFGSGTKLEIKGGGGSGGGGSGGGGSQVQLVESGGGLVQPGGSLKLSCAASGFDFSRYWMSWVRQAPGKGLEWIGEINPTSSTINFTPSLKDKVFISRDNAKNTLYLQMSKVRSEDTALYYCARGNYYRYGDAMDYWGQGTSVTVSSTREQKLISEEDGSGSQPHTKPSVFVMKNGTNVACLVKEFYPKDIRINLVSSKKITEFDPAIVISPSGKYNAVKLGKYEDSNSVTCSVQHDNKTVHSTDFEVKTDSTDHVKPKETENTKQPSKSCHKPKAIVHTEKVNMMSLTVLGLRMLFAKTVAVNFLLTAKLFFLRAKRSGSGVKQTLNFDLLKLAGDVESNPGPSRGHMTEYKPTVRLATRDDVPRAVRTLAAAFADYPATRHTVDPDRHIERVTELQELFLTRVGLDIGKVWVADDGAAVAVWTTPESVEAGAVFAEIGPRMAELSGSRLAAQQQMEGLLAPHRPKEPAWFLATVGVSPDHQGKGLGSAVVLPGVEAAERAGVPAFLETSAPRNLPFYERLGFTVTADVEVPEGPRTWCMTRKPGA

SEQ ID NO: 11701 - protein, 1035 aa, synthetic construct
MALPVTALLLPLALLLHAARPDIVLTQSPASLAVSLGQRATISCRASKSVSTSGYSYLHWYQQKPGQPPKLLIYLASNLESGVPARFSGSGSGTDFTLNIHPVEEEDAATYYCQHSRELPFTFGSGTKLEIKGQPKANPTVTLFPPSSEELQANKATLVCLISDFYPGAVTVAWKADGSPVKAGVETTKPSKQSNNKYAASSYLSLTPEQWKSHRSYSCQVTHEGSTVEKTVAPTECSGSQSFGLLDPKLCYLLDGILFIYGVILTALFLRVKFSRSADAPAYQQGQNQLYNELNLGRREEYDVLDKRRGRDPEMGGKPQRRKNPQEGLYNELQKDKMAEAYSEIGMKGERRRGKGHDGLYQGLSTATKDTYDALHMQALPPRRAKRSGSGATNFSLLKQAGDVEENPGPTSMDWIWRILFLVGAATGAHSFEQVQLVESGGGLVQPGGSLKLSCAASGFDFSRYWMSWVRQAPGKGLEWIGEINPTSSTINFTPSLKDKVFISRDNAKNTLYLQMSKVRSEDTALYYCARGNYYRYGDAMDYWGQGTSVTVSSASTKGPSVFPLAPSSKSTSGGTAALGCLVKDYFPEPVTVSWNSGALTSGVHTFPAVLQSSGLYSLSSVVTVPSSSLGTQTYICNVNHKPSNTKVDKRVEPKSCGTQSFGLLDPKLCYLLDGILFIYGVILTALFLRVKFSRSADAPAYQQGQNQLYNELNLGRREEYDVLDKRRGRDPEMGGKPQRRKNPQEGLYNELQKDKMAEAYSEIGMKGERRRGKGHDGLYQGLSTATKDTYDALHMQALPPRRAKRSGSGVKQTLNFDLLKLAGDVESNPGPSRGHMTEYKPTVRLATRDDVPRAVRTLAAAFADYPATRHTVDPDRHIERVTELQELFLTRVGLDIGKVWVADDGAAVAVWTTPESVEAGAVFAEIGPRMAELSGSRLAAQQQMEGLLAPHRPKEPAWFLATVGVSPDHQGKGLGSAVVLPGVEAAERAGVPAFLETSAPRNLPFYERLGFTVTADVEVPEGPRTWCMTRKPGA

SEQ ID NO: 11702 - protein, 821 aa, synthetic construct
MALPVTALLLPLALLLHAARPDIVLTQSPASLAVSLGQRATISCRASKSVSTSGYSYLHWYQQKPGQPPKLLIYLASNLESGVPARFSGSGSGTDFTLNIHPVEEEDAATYYCQHSRELPFTFGSGTKLEIKLEDLKNVFPPEVAVFEPSEAEISHTQKATLVCLATGFYPDHVELSWWVNGKEVHSGVSTDPQPLKEQPALNDSRYCLSSRLRVSATFWQNPRNHFRCQVQFYGLSENDEWTQDRAKPVTQIVSAEAWGRADCGSQSFGLLDPKLCYLLDGILFIYGVILTALFLRVKFSRSADAPAYQQGQNQLYNELNLGRREEYDVLDKRRGRDPEMGGKPQRRKNPQEGLYNELQKDKMAEAYSEIGMKGERRRGKGHDGLYQGLSTATKDTYDALHMQALPPRRAKRSGSGATNFSLLKQAGDVEENPGPTSMDWIWRILFLVGAATGAHSFEQVQLVESGGGLVQPGGSLKLSCAASGFDFSRYWMSWVRQAPGKGLEWIGEINPTSSTINFTPSLKDKVFISRDNAKNTLYLQMSKVRSEDTALYYCARGNYYRYGDAMDYWGQGTSVTVSSTRIQNPDPAVYQLRDSKSSDKSVCLFTDFDSQTNVSQSKDSDVYITDKTVLDMRSMDFKSNSAVAWSNKSDFACANAFNNSIIPEDTFFPSPESSCGTQSFGLLDPKLCYLLDGILFIYGVILTALFLRVKFSRSADAPAYQQGQNQLYNELNLGRREEYDVLDKRRGRDPEMGGKPQRRKNPQEGLYNELQKDKMAEAYSEIGMKGERRRGKGHDGLYQGLSTATKDTYDALHMQALPPR

SEQ ID NO: 11703 - protein, 821 aa, synthetic construct
MALPVTALLLPLALLLHAARPDIVLTQSPASLAVSLGQRATISCRASKSVSTSGYSYLHWYQQKPGQPPKLLIYLASNLESGVPARFSGSGSGTDFTLNIHPVEEEDAATYYCQHSRELPFTFGSGTKLEIKLEDLKNVFPPEVAVFEPSKAEIAHTQKATLVCLATGFYPDHVELSWWVNGKEVHSGVCTDPQPLKEQPALNDSRYCLSSRLRVSATFWQNPRNHFRCQVQFYGLSENDEWTQDRAKPVTQIVSAEAWGRADCGSQSFGLLDPKLCYLLDGILFIYGVILTALFLRVKFSRSADAPAYQQGQNQLYNELNLGRREEYDVLDKRRGRDPEMGGKPQRRKNPQEGLYNELQKDKMAEAYSEIGMKGERRRGKGHDGLYQGLSTATKDTYDALHMQALPPRRAKRSGSGATNFSLLKQAGDVEENPGPTSMDWIWRILFLVGAATGAHSFEQVQLVESGGGLVQPGGSLKLSCAASGFDFSRYWMSWVRQAPGKGLEWIGEINPTSSTINFTPSLKDKVFISRDNAKNTLYLQMSKVRSEDTALYYCARGNYYRYGDAMDYWGQGTSVTVSSTRIQNPDPAVYQLRDSKSSDKSVCLFTDFDSQTNVSQSKDSDVYITDKCVLDMRSMDFKSNSAVAWSNKSDFACANAFNNSIIPEDTFFPSSDVPCGTQSFGLLDPKLCYLLDGILFIYGVILTALFLRVKFSRSADAPAYQQGQNQLYNELNLGRREEYDVLDKRRGRDPEMGGKPQRRKNPQEGLYNELQKDKMAEAYSEIGMKGERRRGKGHDGLYQGLSTATKDTYDALHMQALPPR

SEQ ID NO: 11704 - protein, 892 aa, synthetic construct
MALPVTALLLPLALLLHAARPDIVLTQSPASLAVSLGQRATISCRASKSVSTSGYSYLHWYQQKPGQPPKLLIYLASNLESGVPARFSGSGSGTDFTLNIHPVEEEDAATYYCQHSRELPFTFGSGTKLEIKLEGKPIPNPLLGLDSTGSGEDLKNVFPPEVAVFEPSEAEISHTQKATLVCLATGFYPDHVELSWWVNGKEVHSGVSTDPQPLKEQPALNDSRYCLSSRLRVSATFWQNPRNHFRCQVQFYGLSENDEWTQDRAKPVTQIVSAEAWGRADCGSQSFGLLDPKLCYLLDGILFIYGVILTALFLRVKFSRSADAPAYQQGQNQLYNELNLGRREEYDVLDKRRGRDPEMGGKPQRRKNPQEGLYNELQKDKMAEAYSEIGMKGERRRGKGHDGLYQGLSTATKDTYDALHMQALPPRRAKRSGSGATNFSLLKQAGDVEENPGPTSMDWIWRILFLVGAATGAHSFEQVQLVESGGGLVQPGGSLKLSCAASGFDFSRYWMSWVRQAPGKGLEWIGEINPTSSTINFTPSLKDKVFISRDNAKNTLYLQMSKVRSEDTALYYCARGNYYRYGDAMDYWGQGTSVTVSSTREQKLISEEDGSGIQNPDPAVYQLRDSKSSDKSVCLFTDFDSQTNVSQSKDSDVYITDKTVLDMRSMDFKSNSAVAWSNKSDFACANAFNNSIIPEDTFFPSPESSCGTQSFGLLDPKLCYLLDGILFIYGVILTALFLRSKRSRLLHSDYMNMTPRRPGPTRKHYQPYAPPRDFAAYRSRVKFSRSADAPAYQQGQNQLYNELNLGRREEYDVLDKRRGRDPEMGGKPQRRKNPQEGLYNELQKDKMAEAYSEIGMKGERRRGKGHDGLYQGLSTATKDTYDALHMQALPPR

SEQ ID NO: 11705 - protein, 933 aa, synthetic construct
MALPVTALLLPLALLLHAARPDIVLTQSPASLAVSLGQRATISCRASKSVSTSGYSYLHWYQQKPGQPPKLLIYLASNLESGVPARFSGSGSGTDFTLNIHPVEEEDAATYYCQHSRELPFTFGSGTKLEIKLEGKPIPNPLLGLDSTGSGEDLKNVFPPEVAVFEPSEAEISHTQKATLVCLATGFYPDHVELSWWVNGKEVHSGVSTDPQPLKEQPALNDSRYCLSSRLRVSATFWQNPRNHFRCQVQFYGLSENDEWTQDRAKPVTQIVSAEAWGRADCGSQSFGLLDPKLCYLLDGILFIYGVILTALFLRSKRSRLLHSDYMNMTPRRPGPTRKHYQPYAPPRDFAAYRSRVKFSRSADAPAYQQGQNQLYNELNLGRREEYDVLDKRRGRDPEMGGKPQRRKNPQEGLYNELQKDKMAEAYSEIGMKGERRRGKGHDGLYQGLSTATKDTYDALHMQALPPRRAKRSGSGATNFSLLKQAGDVEENPGPTSMDWIWRILFLVGAATGAHSFEQVQLVESGGGLVQPGGSLKLSCAASGFDFSRYWMSWVRQAPGKGLEWIGEINPTSSTINFTPSLKDKVFISRDNAKNTLYLQMSKVRSEDTALYYCARGNYYRYGDAMDYWGQGTSVTVSSTREQKLISEEDGSGIQNPDPAVYQLRDSKSSDKSVCLFTDFDSQTNVSQSKDSDVYITDKTVLDMRSMDFKSNSAVAWSNKSDFACANAFNNSIIPEDTFFPSPESSCGTQSFGLLDPKLCYLLDGILFIYGVILTALFLRSKRSRLLHSDYMNMTPRRPGPTRKHYQPYAPPRDFAAYRSRVKFSRSADAPAYQQGQNQLYNELNLGRREEYDVLDKRRGRDPEMGGKPQRRKNPQEGLYNELQKDKMAEAYSEIGMKGERRRGKGHDGLYQGLSTATKDTYDALHMQALPPR

SEQ ID NO: 11706 - protein, 894 aa, synthetic construct
MALPVTALLLPLALLLHAARPDIVLTQSPASLAVSLGQRATISCRASKSVSTSGYSYLHWYQQKPGQPPKLLIYLASNLESGVPARFSGSGSGTDFTLNIHPVEEEDAATYYCQHSRELPFTFGSGTKLEIKLEGKPIPNPLLGLDSTGSGEDLKNVFPPEVAVFEPSEAEISHTQKATLVCLATGFYPDHVELSWWVNGKEVHSGVSTDPQPLKEQPALNDSRYCLSSRLRVSATFWQNPRNHFRCQVQFYGLSENDEWTQDRAKPVTQIVSAEAWGRADCGSQSFGLLDPKLCYLLDGILFIYGVILTALFLRVKFSRSADAPAYQQGQNQLYNELNLGRREEYDVLDKRRGRDPEMGGKPQRRKNPQEGLYNELQKDKMAEAYSEIGMKGERRRGKGHDGLYQGLSTATKDTYDALHMQALPPRRAKRSGSGATNFSLLKQAGDVEENPGPTSMDWIWRILFLVGAATGAHSFEQVQLVESGGGLVQPGGSLKLSCAASGFDFSRYWMSWVRQAPGKGLEWIGEINPTSSTINFTPSLKDKVFISRDNAKNTLYLQMSKVRSEDTALYYCARGNYYRYGDAMDYWGQGTSVTVSSTREQKLISEEDLGSGIQNPDPAVYQLRDSKSSDKSVCLFTDFDSQTNVSQSKDSDVYITDKTVLDMRSMDFKSNSAVAWSNKSDFACANAFNNSIIPEDTFFPSPESSCGTQSFGLLDPKLCYLLDGILFIYGVILTALFLKRGRKKLLYIFKQPFMRPVQTTQEEDGCSCRFPEEEEGGCELRVKFSRSADAPAYQQGQNQLYNELNLGRREEYDVLDKRRGRDPEMGGKPQRRKNPQEGLYNELQKDKMAEAYSEIGMKGERRRGKGHDGLYQGLSTATKDTYDALHMQALPPR

SEQ ID NO: 11707 - protein, 936 aa, synthetic construct
MALPVTALLLPLALLLHAARPDIVLTQSPASLAVSLGQRATISCRASKSVSTSGYSYLHWYQQKPGQPPKLLIYLASNLESGVPARFSGSGSGTDFTLNIHPVEEEDAATYYCQHSRELPFTFGSGTKLEIKLEGKPIPNPLLGLDSTGSGEDLKNVFPPEVAVFEPSEAEISHTQKATLVCLATGFYPDHVELSWWVNGKEVHSGVSTDPQPLKEQPALNDSRYCLSSRLRVSATFWQNPRNHFRCQVQFYGLSENDEWTQDRAKPVTQIVSAEAWGRADCGSQSFGLLDPKLCYLLDGILFIYGVILTALFLKRGRKKLLYIFKQPFMRPVQTTQEEDGCSCRFPEEEEGGCELRVKFSRSADAPAYQQGQNQLYNELNLGRREEYDVLDKRRGRDPEMGGKPQRRKNPQEGLYNELQKDKMAEAYSEIGMKGERRRGKGHDGLYQGLSTATKDTYDALHMQALPPRRAKRSGSGATNFSLLKQAGDVEENPGPTSMDWIWRILFLVGAATGAHSFEQVQLVESGGGLVQPGGSLKLSCAASGFDFSRYWMSWVRQAPGKGLEWIGEINPTSSTINFTPSLKDKVFISRDNAKNTLYLQMSKVRSEDTALYYCARGNYYRYGDAMDYWGQGTSVTVSSTREQKLISEEDLGSGIQNPDPAVYQLRDSKSSDKSVCLFTDFDSQTNVSQSKDSDVYITDKTVLDMRSMDFKSNSAVAWSNKSDFACANAFNNSIIPEDTFFPSPESSCGTQSFGLLDPKLCYLLDGILFIYGVILTALFLKRGRKKLLYIFKQPFMRPVQTTQEEDGCSCRFPEEEEGGCELRVKFSRSADAPAYQQGQNQLYNELNLGRREEYDVLDKRRGRDPEMGGKPQRRKNPQEGLYNELQKDKMAEAYSEIGMKGERRRGKGHDGLYQGLSTATKDTYDALHMQALPPR

SEQ ID NO: 11708 - protein, 826 aa, synthetic construct
MALPVTALLLPLALLLHAARPDIVLTQSPASLAVSLGQRATISCRASKSVSTSGYSYLHWYQQKPGQPPKLLIYLASNLESGVPARFSGSGSGTDFTLNIHPVEEEDAATYYCQHSRELPFTFGSGTKLEIKLEQSFGLLDPKLCYLLDGILFIYGVILTALFLRVKFSRSADAPAYQQGQNQLYNELNLGRREEYDVLDKRRGRDPEMGGKPQRRKNPQEGLYNELQKDKMAEAYSEIGMKGERRRGKGHDGLYQGLSTATKDTYDALHMQALPPRRAKRSGSGATNFSLLKQAGDVEENPGPTSMDWIWRILFLVGAATGAHSFEQVQLVESGGGLVQPGGSLKLSCAASGFDFSRYWMSWVRQAPGKGLEWIGEINPTSSTINFTPSLKDKVFISRDNAKNTLYLQMSKVRSEDTALYYCARGNYYRYGDAMDYWGQGTSVTVSSTRQSFGLLDPKLCYLLDGILFIYGVILTALFLRVKFSRSADAPAYQQGQNQLYNELNLGRREEYDVLDKRRGRDPEMGGKPQRRKNPQEGLYNELQKDKMAEAYSEIGMKGERRRGKGHDGLYQGLSTATKDTYDALHMQALPPRRAKRSGSGVKQTLNFDLLKLAGDVESNPGPSRGHMTEYKPTVRLATRDDVPRAVRTLAAAFADYPATRHTVDPDRHIERVTELQELFLTRVGLDIGKVWVADDGAAVAVWTTPESVEAGAVFAEIGPRMAELSGSRLAAQQQMEGLLAPHRPKEPAWFLATVGVSPDHQGKGLGSAVVLPGVEAAERAGVPAFLETSAPRNLPFYERLGFTVTADVEVPEGPRTWCMTRKPGA

SEQ ID NO: 11709 - protein, 651 aa, synthetic construct
MALPVTALLLPLALLLHAARPDIVLTQSPASLAVSLGQRATISCRASKSVSTSGYSYLHWYQQKPGQPPKLLIYLASNLESGVPARFSGSGSGTDFTLNIHPVEEEDAATYYCQHSRELPFTFGSGTKLEIKLEGQPKANPTVTLFPPSSEELQANKATLVCLISDFYPGAVTVAWKADGSPVKAGVETTKPSKQSNNKYAASSYLSLTPEQWKSHRSYSCQVTHEGSTVEKTVAPTECSPIKTDVITMDPKDNCSKDANDTLLLQLTNTSAYYMYLLLLLKSVVYFAIITCCLLRRTAFCCNGEKSRAKRSGSGATNFSLLKQAGDVEENPGPTSMDWIWRILFLVGAATGAHSFEQVQLVESGGGLVQPGGSLKLSCAASGFDFSRYWMSWVRQAPGKGLEWIGEINPTSSTINFTPSLKDKVFISRDNAKNTLYLQMSKVRSEDTALYYCARGNYYRYGDAMDYWGQGTSVTVSSTRASTKGPSVFPLAPSSKSTSGGTAALGCLVKDYFPEPVTVSWNSGALTSGVHTFPAVLQSSGLYSLSSVVTVPSSSLGTQTYICNVNHKPSNTKVDKRVEPKSCEVKTDSTDHVKPKETENTKQPSKSCHKPKAIVHTEKVNMMSLTVLGLRMLFAKTVAVNFLLTAKLFFL

SEQ ID NO: 11710 - protein, 629 aa, synthetic construct
MALPVTALLLPLALLLHAARPDIVLTQSPASLAVSLGQRATISCRASKSVSTSGYSYLHWYQQKPGQPPKLLIYLASNLESGVPARFSGSGSGTDFTLNIHPVEEEDAATYYCQHSRELPFTFGSGTKLEIKLEGQPKANPTVTLFPPSSEELQANKATLVCLISDFYPGAVTVAWKADGSPVKAGVETTKPSKQSNNKYAASSYLSLTPEQWKSHRSYSCQVTHEGSTVEKTVAPTECSGRADCGITSASYHQGVLSATILYEILLGKATLYAVLVSALVLMAMVKRKDSRGRAKRSGSGATNFSLLKQAGDVEENPGPTSMDWIWRILFLVGAATGAHSFEQVQLVESGGGLVQPGGSLKLSCAASGFDFSRYWMSWVRQAPGKGLEWIGEINPTSSTINFTPSLKDKVFISRDNAKNTLYLQMSKVRSEDTALYYCARGNYYRYGDAMDYWGQGTSVTVSSTRASTKGPSVFPLAPSSKSTSGGTAALGCLVKDYFPEPVTVSWNSGALTSGVHTFPAVLQSSGLYSLSSVVTVPSSSLGTQTYICNVNHKPSNTKVDKRVEPKSCIPEDTFFPSSDVPCDVKLVEKSFETDTNLNFQNLSVIGFRILLLKVAGFNLLMTLRLWSS

SEQ ID NO: 11711 - protein, 629 aa, synthetic construct
MALPVTALLLPLALLLHAARPDIVLTQSPASLAVSLGQRATISCRASKSVSTSGYSYLHWYQQKPGQPPKLLIYLASNLESGVPARFSGSGSGTDFTLNIHPVEEEDAATYYCQHSRELPFTFGSGTKLEIKLEGQPKANPTVTLFPPSSEELQANKATLVCLISDFYPGAVTVAWKADGSPVKAGVETTKPSKQSNNKYAASSYLSLTPEQWKSHRSYSCQVTHEGSTVEKTVAPTECSGRADCGFTSESYQQGVLSATILYEILLGKATLYAVLVSALVLMAMVKRKDSRGRAKRSGSGATNFSLLKQAGDVEENPGPTSMDWIWRILFLVGAATGAHSFEQVQLVESGGGLVQPGGSLKLSCAASGFDFSRYWMSWVRQAPGKGLEWIGEINPTSSTINFTPSLKDKVFISRDNAKNTLYLQMSKVRSEDTALYYCARGNYYRYGDAMDYWGQGTSVTVSSTRASTKGPSVFPLAPSSKSTSGGTAALGCLVKDYFPEPVTVSWNSGALTSGVHTFPAVLQSSGLYSLSSVVTVPSSSLGTQTYICNVNHKPSNTKVDKRVEPKSCIPEDTFFPSPESSCDVKLVEKSFETDTNLNFQNLSVIGFRILLLKVAGFNLLMTLRLWSS

SEQ ID NO: 11712 - protein, 455 aa, synthetic construct
MALPVTALLLPLALLLHAARPDIVLTQSPASLAVSLGQRATISCRASKSVSTSGYSYLHWYQQKPGQPPKLLIYLASNLESGVPARFSGSGSGTDFTLNIHPVEEEDAATYYCQHSRELPFTFGSGTKLEIKGGGGSGGGGSGGGGSQVQLVESGGGLVQPGGSLKLSCAASGFDFSRYWMSWVRQAPGKGLEWIGEINPTSSTINFTPSLKDKVFISRDNAKNTLYLQMSKVRSEDTALYYCARGNYYRYGDAMDYWGQGTSVTVSSTRDGNEEMGGITQTPYKVSISGTTVILTCPQYPGSEILWQHNDKNIGGDEDDKNIGSDEDHLSLKEFSELEQSGYYVCYPRGSKPEDANFYLYLRARVCENCMEMDVMSVATIVIVDICITGGLLLLVYYWSKNRKAKAKPVTRGAGAGGRQRGQNKERPPPVPNPDYEPIRKGQRDLYSGLNQRRI

SEQ ID NO: 11713 - protein, 420 aa, synthetic construct
MALPVTALLLPLALLLHAARPDIVLTQSPASLAVSLGQRATISCRASKSVSTSGYSYLHWYQQKPGQPPKLLIYLASNLESGVPARFSGSGSGTDFTLNIHPVEEEDAATYYCQHSRELPFTFGSGTKLEIKGGGGSGGGGSGGGGSQVQLVESGGGLVQPGGSLKLSCAASGFDFSRYWMSWVRQAPGKGLEWIGEINPTSSTINFTPSLKDKVFISRDNAKNTLYLQMSKVRSEDTALYYCARGNYYRYGDAMDYWGQGTSVTVSSTRFKIPIEELEDRVFVNCNTSITWVEGTVGTLLSDITRLDLGKRILDPRGIYRCNGTDIYKDKESTVQVHYRMCQSCVELDPATVAGIIVTDVIATLLLALGVFCFAGHETGRLSGAADTQALLRNDQVYQPLRDRDDAQYSHLGGNWARNK

SEQ ID NO: 11714 - protein, 430 aa, synthetic construct
MALPVTALLLPLALLLHAARPDIVLTQSPASLAVSLGQRATISCRASKSVSTSGYSYLHWYQQKPGQPPKLLIYLASNLESGVPARFSGSGSGTDFTLNIHPVEEEDAATYYCQHSRELPFTFGSGTKLEIKGGGGSGGGGSGGGGSQVQLVESGGGLVQPGGSLKLSCAASGFDFSRYWMSWVRQAPGKGLEWIGEINPTSSTINFTPSLKDKVFISRDNAKNTLYLQMSKVRSEDTALYYCARGNYYRYGDAMDYWGQGTSVTVSSTRQSIKGNHLVKVYDYQEDGSVLLTCDAEAKNITWFKDGKMIGFLTEDKKKWNLGSNAKDPRGMYQCKGSQNKSKPLQVYYRMCQNCIELNAATISGFLFAEIVSIFVLAVGVYFIAGQDGVRQSRASDKQTLLPNDQLYQPLKDREDDQYSHLQGNQLRRN

SEQ ID NO: 11715 - protein, 413 aa, synthetic construct
MALPVTALLLPLALLLHAARPDIVLTQSPASLAVSLGQRATISCRASKSVSTSGYSYLHWYQQKPGQPPKLLIYLASNLESGVPARFSGSGSGTDFTLNIHPVEEEDAATYYCQHSRELPFTFGSGTKLEIKGGGGSGGGGSGGGGSQVQLVESGGGLVQPGGSLKLSCAASGFDFSRYWMSWVRQAPGKGLEWIGEINPTSSTINFTPSLKDKVFISRDNAKNTLYLQMSKVRSEDTALYYCARGNYYRYGDAMDYWGQGTSVTVSSTRQSFGLLDPKLCYLLDGILFIYGVILTALFLRVKFSRSADAPAYQQGQNQLYNELNLGRREEYDVLDKRRGRDPEMGGKPQRRKNPQEGLYNELQKDKMAEAYSEIGMKGERRRGKGHDGLYQGLSTATKDTYDALHMQALPPR

SEQ ID NO: 11716 - protein, 455 aa, synthetic construct
MALPVTALLLPLALLLHAARPQVQLVESGGGLVQPGGSLKLSCAASGFDFSRYWMSWVRQAPGKGLEWIGEINPTSSTINFTPSLKDKVFISRDNAKNTLYLQMSKVRSEDTALYYCARGNYYRYGDAMDYWGQGTSVTVSSGGGGSGGGGSGGGGSDIVLTQSPASLAVSLGQRATISCRASKSVSTSGYSYLHWYQQKPGQPPKLLIYLASNLESGVPARFSGSGSGTDFTLNIHPVEEEDAATYYCQHSRELPFTFGSGTKLEIKTRDGNEEMGGITQTPYKVSISGTTVILTCPQYPGSEILWQHNDKNIGGDEDDKNIGSDEDHLSLKEFSELEQSGYYVCYPRGSKPEDANFYLYLRARVCENCMEMDVMSVATIVIVDICITGGLLLLVYYWSKNRKAKAKPVTRGAGAGGRQRGQNKERPPPVPNPDYEPIRKGQRDLYSGLNQRRI

SEQ ID NO: 11717 - protein, 420 aa, synthetic construct
MALPVTALLLPLALLLHAARPQVQLVESGGGLVQPGGSLKLSCAASGFDFSRYWMSWVRQAPGKGLEWIGEINPTSSTINFTPSLKDKVFISRDNAKNTLYLQMSKVRSEDTALYYCARGNYYRYGDAMDYWGQGTSVTVSSGGGGSGGGGSGGGGSDIVLTQSPASLAVSLGQRATISCRASKSVSTSGYSYLHWYQQKPGQPPKLLIYLASNLESGVPARFSGSGSGTDFTLNIHPVEEEDAATYYCQHSRELPFTFGSGTKLEIKTRFKIPIEELEDRVFVNCNTSITWVEGTVGTLLSDITRLDLGKRILDPRGIYRCNGTDIYKDKESTVQVHYRMCQSCVELDPATVAGIIVTDVIATLLLALGVFCFAGHETGRLSGAADTQALLRNDQVYQPLRDRDDAQYSHLGGNWARNK

SEQ ID NO: 11718 - protein, 430 aa, synthetic construct
MALPVTALLLPLALLLHAARPQVQLVESGGGLVQPGGSLKLSCAASGFDFSRYWMSWVRQAPGKGLEWIGEINPTSSTINFTPSLKDKVFISRDNAKNTLYLQMSKVRSEDTALYYCARGNYYRYGDAMDYWGQGTSVTVSSGGGGSGGGGSGGGGSDIVLTQSPASLAVSLGQRATISCRASKSVSTSGYSYLHWYQQKPGQPPKLLIYLASNLESGVPARFSGSGSGTDFTLNIHPVEEEDAATYYCQHSRELPFTFGSGTKLEIKTRQSIKGNHLVKVYDYQEDGSVLLTCDAEAKNITWFKDGKMIGFLTEDKKKWNLGSNAKDPRGMYQCKGSQNKSKPLQVYYRMCQNCIELNAATISGFLFAEIVSIFVLAVGVYFIAGQDGVRQSRASDKQTLLPNDQLYQPLKDREDDQYSHLQGNQLRRN

SEQ ID NO: 11719 - protein, 413 aa, synthetic construct
MALPVTALLLPLALLLHAARPQVQLVESGGGLVQPGGSLKLSCAASGFDFSRYWMSWVRQAPGKGLEWIGEINPTSSTINFTPSLKDKVFISRDNAKNTLYLQMSKVRSEDTALYYCARGNYYRYGDAMDYWGQGTSVTVSSGGGGSGGGGSGGGGSDIVLTQSPASLAVSLGQRATISCRASKSVSTSGYSYLHWYQQKPGQPPKLLIYLASNLESGVPARFSGSGSGTDFTLNIHPVEEEDAATYYCQHSRELPFTFGSGTKLEIKTRQSFGLLDPKLCYLLDGILFIYGVILTALFLRVKFSRSADAPAYQQGQNQLYNELNLGRREEYDVLDKRRGRDPEMGGKPQRRKNPQEGLYNELQKDKMAEAYSEIGMKGERRRGKGHDGLYQGLSTATKDTYDALHMQALPPR

SEQ ID NO: 11720 - protein, 508 aa, synthetic construct
MALPVTALLLPLALLLHAARPDIVLTQSPASLAVSLGQRATISCRASKSVSTSGYSYLHWYQQKPGQPPKLLIYLASNLESGVPARFSGSGSGTDFTLNIHPVEEEDAATYYCQHSRELPFTFGSGTKLEIKGGGGSGGGGSGGGGSQVQLVESGGGLVQPGGSLKLSCAASGFDFSRYWMSWVRQAPGKGLEWIGEINPTSSTINFTPSLKDKVFISRDNAKNTLYLQMSKVRSEDTALYYCARGNYYRYGDAMDYWGQGTSVTVSSTRGMRTEDLPKAVVFLEPQWYRVLEKDSVTLKCQGAYSPEDNSTQWFHNESLISSQASSYFIDAATVDDSGEYRCQTNLSTLSDPVQLEVHIGWLLLQAPRWVFKEEDPIHLRCHSWKNTALHKVTYLQNGKGRKYFHHNSDFYIPKATLKDSGSYFCRGLVGSKNVSSETVNITITQGLAVPTISSFFPPGYQVSFCLVMVLLFAVDTGLYFSVKTNIRSSTRDWKDHKFKWRKDPQDK

SEQ ID NO: 11721 - protein, 790 aa, synthetic construct
MALPVTALLLPLALLLHAARPDIVLTQSPASLAVSLGQRATISCRASKSVSTSGYSYLHWYQQKPGQPPKLLIYLASNLESGVPARFSGSGSGTDFTLNIHPVEEEDAATYYCQHSRELPFTFGSGTKLEIKGGGGSGGGGSGGGGSQVQLVESGGGLVQPGGSLKLSCAASGFDFSRYWMSWVRQAPGKGLEWIGEINPTSSTINFTPSLKDKVFISRDNAKNTLYLQMSKVRSEDTALYYCARGNYYRYGDAMDYWGQGTSVTVSSTRGGSGQQQTLPKPFIWAEPHFMVPKEKQVTICCQGNYGAVEYQLHFEGSLFAVDRPKPPERINKVQFYIPDMNSRMAGQYSCIYRVGELWSEPSNLLDLVVTEMYDTPTLSVHPGPEVISGEKVTFYCRLDTATSMFLLLKEGRSSHVQRGYGKVQAEFPLGPVTTAHRGTYRCFGSYNNHAWSFPSEPVKLLVTGDIENTSLAPEDPTFPADTWGTYLLTTETGLQKDHALWDHTAQNLLRMGLAFLVLVALVWFLVEDWLSRKRTRERASRASTWEGRRRLNTQTLRAKRSGSGVKQTLNFDLLKLAGDVESNPGPSRGHMTEYKPTVRLATRDDVPRAVRTLAAAFADYPATRHTVDPDRHIERVTELQELFLTRVGLDIGKVWVADDGAAVAVWTTPESVEAGAVFAEIGPRMAELSGSRLAAQQQMEGLLAPHRPKEPAWFLATVGVSPDHQGKGLGSAVVLPGVEAAERAGVPAFLETSAPRNLPFYERLGFTVTADVEVPEGPRTWCMTRKPGA

SEQ ID NO: 11722 - protein, 623 aa, synthetic construct
MALPVTALLLPLALLLHAARPDIVLTQSPASLAVSLGQRATISCRASKSVSTSGYSYLHWYQQKPGQPPKLLIYLASNLESGVPARFSGSGSGTDFTLNIHPVEEEDAATYYCQHSRELPFTFGSGTKLEIKGGGGSGGGGSGGGGSQVQLVESGGGLVQPGGSLKLSCAASGFDFSRYWMSWVRQAPGKGLEWIGEINPTSSTINFTPSLKDKVFISRDNAKNTLYLQMSKVRSEDTALYYCARGNYYRYGDAMDYWGQGTSVTVSSTRKIEVMYPPPYLDNEKSNGTIIHVKGARGDIENTSLAPEDPTFPADTWGTYLLTTETGLQKDHALWDHTAQNLLRMGLAFLVLVALVWFLVEDWLSRKRTRERASRASTWEGRRRLNTQTLRAKRSGSGVKQTLNFDLLKLAGDVESNPGPSRGHMTEYKPTVRLATRDDVPRAVRTLAAAFADYPATRHTVDPDRHIERVTELQELFLTRVGLDIGKVWVADDGAAVAVWTTPESVEAGAVFAEIGPRMAELSGSRLAAQQQMEGLLAPHRPKEPAWFLATVGVSPDHQGKGLGSAVVLPGVEAAERAGVPAFLETSAPRNLPFYERLGFTVTADVEVPEGPRTWCMTRKPGA

SEQ ID NO: 11723 - protein, 710 aa, synthetic construct
MALPVTALLLPLALLLHAARPDIVLTQSPASLAVSLGQRATISCRASKSVSTSGYSYLHWYQQKPGQPPKLLIYLASNLESGVPARFSGSGSGTDFTLNIHPVEEEDAATYYCQHSRELPFTFGSGTKLEIKGGGGSGGGGSGGGGSQVQLVESGGGLVQPGGSLKLSCAASGFDFSRYWMSWVRQAPGKGLEWIGEINPTSSTINFTPSLKDKVFISRDNAKNTLYLQMSKVRSEDTALYYCARGNYYRYGDAMDYWGQGTSVTVSSTRLWVSQPPEIRTLEGSSAFLPCSFNASQGRLAIGSVTWFRDEVVPGKEVRNGTPEFRGRLAPLASSRFLHDHQAELHIRDVRGHDASIYVCRVEVLGLGVGTGNGTRLVVEKEHPQLGAGTVLLLRAGFYAVSFLSVAVGSTVYYQGKCLTWKGPRRQLPAVVPAPLPPPCGSSAHLLPPVPGGRAKRSGSGVKQTLNFDLLKLAGDVESNPGPSRMYRMQLLSCIALSLALVTNSAPTSSSTKKTQLQLEHLLLDLQMILNGINNYKNPKLTEMLTAKFYMPKKATELKHLQCLEEELKPLEEVLNLAQSKNFHLRPRDLISNINVIVLELKGSETTFMCEYADETATIVEFLNRWITFCQSIISTLTKIEVMYPPPYLDNEKSNGTIIHVKGKHLCPSPLFPGPSKPFWVLVVVGGVLACYSLLVTVAFIIFWVRSKRS

SEQ ID NO: 11724 - protein, 686 aa, synthetic construct
MALPVTALLLPLALLLHAARPDIVLTQSPASLAVSLGQRATISCRASKSVSTSGYSYLHWYQQKPGQPPKLLIYLASNLESGVPARFSGSGSGTDFTLNIHPVEEEDAATYYCQHSRELPFTFGSGTKLEIKGGGGSGGGGSGGGGSQVQLVESGGGLVQPGGSLKLSCAASGFDFSRYWMSWVRQAPGKGLEWIGEINPTSSTINFTPSLKDKVFISRDNAKNTLYLQMSKVRSEDTALYYCARGNYYRYGDAMDYWGQGTSVTVSSTRLWVSQPPEIRTLEGSSAFLPCSFNASQGRLAIGSVTWFRDEVVPGKEVRNGTPEFRGRLAPLASSRFLHDHQAELHIRDVRGHDASIYVCRVEVLGLGVGTGNGTRLVVEKEHPQLGAGTVLLLRAGFYAVSFLSVAVGSTVYYQGKCLTWKGPRRQLPAVVPAPLPPPCGSSAHLLPPVPGGRAKRSGSGVKQTLNFDLLKLAGDVESNPGPSRGHMTEYKPTVRLATRDDVPRAVRTLAAAFADYPATRHTVDPDRHIERVTELQELFLTRVGLDIGKVWVADDGAAVAVWTTPESVEAGAVFAEIGPRMAELSGSRLAAQQQMEGLLAPHRPKEPAWFLATVGVSPDHQGKGLGSAVVLPGVEAAERAGVPAFLETSAPRNLPFYERLGFTVTADVEVPEGPRTWCMTRKPGA

SEQ ID NO: 11725 - protein, 362 aa, synthetic construct
MALPVTALLLPLALLLHAARPDIVLTQSPASLAVSLGQRATISCRASKSVSTSGYSYLHWYQQKPGQPPKLLIYLASNLESGVPARFSGSGSGTDFTLNIHPVEEEDAATYYCQHSRELPFTFGSGTKLEIKGGGGSGGGGSGGGGSQVQLVESGGGLVQPGGSLKLSCAASGFDFSRYWMSWVRQAPGKGLEWIGEINPTSSTINFTPSLKDKVFISRDNAKNTLYLQMSKVRSEDTALYYCARGNYYRYGDAMDYWGQGTSVTVSSTRKIEVMYPPPYLDNEKSNGTIIHVKGARITQGLAVSTISSFFPPGYQVSFCLVMVLLFAVDTGLYFSVKTNIRSSTRDWKDHKFKWRKDPQDK

SEQ ID NO: 11726 - protein, 362 aa, synthetic construct
MALPVTALLLPLALLLHAARPDIVLTQSPASLAVSLGQRATISCRASKSVSTSGYSYLHWYQQKPGQPPKLLIYLASNLESGVPARFSGSGSGTDFTLNIHPVEEEDAATYYCQHSRELPFTFGSGTKLEIKGGGGSGGGGSGGGGSQVQLVESGGGLVQPGGSLKLSCAASGFDFSRYWMSWVRQAPGKGLEWIGEINPTSSTINFTPSLKDKVFISRDNAKNTLYLQMSKVRSEDTALYYCARGNYYRYGDAMDYWGQGTSVTVSSTRKIEVMYPPPYLDNEKSNGTIIHVKGARITQGLAVPTISSFFPPGYQVSFCLVMVLLFAVDTGLYFSVKTNIRSSTRDWKDHKFKWRKDPQDK

SEQ ID NO: 11727 - protein, 341 aa, synthetic construct
MALPVTALLLPLALLLHAARPDIVLTQSPASLAVSLGQRATISCRASKSVSTSGYSYLHWYQQKPGQPPKLLIYLASNLESGVPARFSGSGSGTDFTLNIHPVEEEDAATYYCQHSRELPFTFGSGTKLEIKGGGGSGGGGSGGGGSQVQLVESGGGLVQPGGSLKLSCAASGFDFSRYWMSWVRQAPGKGLEWIGEINPTSSTINFTPSLKDKVFISRDNAKNTLYLQMSKVRSEDTALYYCARGNYYRYGDAMDYWGQGTSVTVSSTRKIEVMYPPPYLDNEKSNGTIIHVKGARITQGLAVSTISSFSPPGYQVSFCLVMVLLFAVDTGLYFSVKTNI

SEQ ID NO: 11728 - protein, 372 aa, synthetic construct
MALPVTALLLPLALLLHAARPDIVLTQSPASLAVSLGQRATISCRASKSVSTSGYSYLHWYQQKPGQPPKLLIYLASNLESGVPARFSGSGSGTDFTLNIHPVEEEDAATYYCQHSRELPFTFGSGTKLEIKGGGGSGGGGSGGGGSQVQLVESGGGLVQPGGSLKLSCAASGFDFSRYWMSWVRQAPGKGLEWIGEINPTSSTINFTPSLKDKVFISRDNAKNTLYLQMSKVRSEDTALYYCARGNYYRYGDAMDYWGQGTSVTVSSTRKIEVMYPPPYLDNEKSNGTIIHVKGARVEKEHPQLGAGTVLLLRAGFYAVSFLSVAVGSTVYYQGKCLTWKGPRRQLPAVVPAPLPPPCGSSAHLLPPVPGG

SEQ ID NO: 11729 - protein, 453 aa, synthetic construct
MALPVTALLLPLALLLHAARPDIVLTQSPASLAVSLGQRATISCRASKSVSTSGYSYLHWYQQKPGQPPKLLIYLASNLESGVPARFSGSGSGTDFTLNIHPVEEEDAATYYCQHSRELPFTFGSGTKLEIKGGGGSGGGGSGGGGSQVQLVESGGGLVQPGGSLKLSCAASGFDFSRYWMSWVRQAPGKGLEWIGEINPTSSTINFTPSLKDKVFISRDNAKNTLYLQMSKVRSEDTALYYCARGNYYRYGDAMDYWGQGTSVTVSSTRKIEVMYPPPYLDNEKSNGTIIHVKGARKSVRFYLVVSPASASTQTSWTPRDLVSSQTQTQSCVPPTAGARQAPESPSTIPVPSQPQNSTLRPGPAAPIALVPVFCGLLVAKSLVLSALLVWWGDIWWKTMMELRSLDTQKATCHLQQVTDLPWTSVSSPVEREILYHTVARTKISDDDDEHTL

SEQ ID NO: 11730 - protein, 390 aa, synthetic construct
MALPVTALLLPLALLLHAARPDIVLTQSPASLAVSLGQRATISCRASKSVSTSGYSYLHWYQQKPGQPPKLLIYLASNLESGVPARFSGSGSGTDFTLNIHPVEEEDAATYYCQHSRELPFTFGSGTKLEIKGGGGSGGGGSGGGGSQVQLVESGGGLVQPGGSLKLSCAASGFDFSRYWMSWVRQAPGKGLEWIGEINPTSSTINFTPSLKDKVFISRDNAKNTLYLQMSKVRSEDTALYYCARGNYYRYGDAMDYWGQGTSVTVSSTRKIEVMYPPPYLDNEKSNGTIIHVKGARGDIENTSLAPEDPTFPADTWGTYLLTTETGLQKDHALWDHTAQNLLRMGLAFLVLVALVWFLVEDWLSRKRTRERASRASTWEGRRRLNTQTL

SEQ ID NO: 11731 - protein, 986 aa, synthetic construct
MALPVTALLLPLALLLHAARPDIVLTQSPASLAVSLGQRATISCRASKSVSTSGYSYLHWYQQKPGQPPKLLIYLASNLESGVPARFSGSGSGTDFTLNIHPVEEEDAATYYCQHSRELPFTFGSGTKLEIKLEGQPKANPTVTLFPPSSEELQANKATLVCLISDFYPGAVTVAWKADGSPVKAGVETTKPSKQSNNKYAASSYLSLTPEQWKSHRSYSCQVTHEGSTVEKTVAPTECSGSQSFGLLDPKLCYLLDGILFIYGVILTALFLRVKFSRSADAPAYQQGQNQLYNELNLGRREEYDVLDKRRGRDPEMGGKPQRRKNPQEGLYNELQKDKMAEAYSEIGMKGERRRGKGHDGLYQGLSTATKDTYDALHMQALPPRRAKRSGSGATNFSLLKQAGDVEENPGPTSMDWIWRILFLVGAATGAHSFEQVQLVESGGGLVQPGGSLKLSCAASGFDFSRYWMSWVRQAPGKGLEWIGEINPTSSTINFTPSLKDKVFISRDNAKNTLYLQMSKVRSEDTALYYCARGNYYRYGDAMDYWGQGTSVTVSSTRASTKGPSVFPLAPSSKSTSGGTAALGCLVKDYFPEPVTVSWNSGALTSGVHTFPAVLQSSGLYSLSSVVTVPSSSLGTQTYICNVNHKPSNTKVDKRVEPKSCGTGDIENTSLAPEDPTFPADTWGTYLLTTETGLQKDHALWDHTAQNLLRMGLAFLVLVALVWFLVEDWLSRKRTRERASRASTWEGRRRLNTQTLRAKRSGSGATNFSLLKQAGDVEENPGPSRGHMTEYKPTVRLATRDDVPRAVRTLAAAFADYPATRHTVDPDRHIERVTELQELFLTRVGLDIGKVWVADDGAAVAVWTTPESVEAGAVFAEIGPRMAELSGSRLAAQQQMEGLLAPHRPKEPAWFLATVGVSPDHQGKGLGSAVVLPGVEAAERAGVPAFLETSAPRNLPFYERLGFTVTADVEVPEGPRTWCMTRKPGA

SEQ ID NO: 11732 - protein, 1052 aa, synthetic construct
MALPVTALLLPLALLLHAARPDIVLTQSPASLAVSLGQRATISCRASKSVSTSGYSYLHWYQQKPGQPPKLLIYLASNLESGVPARFSGSGSGTDFTLNIHPVEEEDAATYYCQHSRELPFTFGSGTKLEIKLEGQPKANPTVTLFPPSSEELQANKATLVCLISDFYPGAVTVAWKADGSPVKAGVETTKPSKQSNNKYAASSYLSLTPEQWKSHRSYSCQVTHEGSTVEKTVAPTECSGSQSFGLLDPKLCYLLDGILFIYGVILTALFLRVKFSRSADAPAYQQGQNQLYNELNLGRREEYDVLDKRRGRDPEMGGKPQRRKNPQEGLYNELQKDKMAEAYSEIGMKGERRRGKGHDGLYQGLSTATKDTYDALHMQALPPRRAKRSGSGATNFSLLKQAGDVEENPGPTSMDWIWRILFLVGAATGAHSFEQVQLVESGGGLVQPGGSLKLSCAASGFDFSRYWMSWVRQAPGKGLEWIGEINPTSSTINFTPSLKDKVFISRDNAKNTLYLQMSKVRSEDTALYYCARGNYYRYGDAMDYWGQGTSVTVSSTRASTKGPSVFPLAPSSKSTSGGTAALGCLVKDYFPEPVTVSWNSGALTSGVHTFPAVLQSSGLYSLSSVVTVPSSSLGTQTYICNVNHKPSNTKVDKRVEPKSCGTKSVRFYLVVSPASASTQTSWTPRDLVSSQTQTQSCVPPTAGARQAPESPSTIPVPSQPQNSTLRPGPAAPIALVPVFCGLLVAKSLVLSALLVWWGDIWWKTMMELRSLDTQKATCHLQQVTDLPWTSVSSPVEREILYHTVARTKISDDDDEHTLRAKRSGSGVKQTLNFDLLKLAGDVESNPGPSRGHMTEYKPTVRLATRDDVPRAVRTLAAAFADYPATRHTVDPDRHIERVTELQELFLTRVGLDIGKVWVADDGAAVAVWTTPESVEAGAVFAEIGPRMAELSGSRLAAQQQMEGLLAPHRPKEPAWFLATVGVSPDHQGKGLGSAVVLPGVEAAERAGVPAFLETSAPRNLPFYERLGFTVTADVEVPEGPRTWCMTRKPGA

SEQ ID NO: 11733 - protein, 972 aa, synthetic construct
MALPVTALLLPLALLLHAARPDIVLTQSPASLAVSLGQRATISCRASKSVSTSGYSYLHWYQQKPGQPPKLLIYLASNLESGVPARFSGSGSGTDFTLNIHPVEEEDAATYYCQHSRELPFTFGSGTKLEIKLEGQPKANPTVTLFPPSSEELQANKATLVCLISDFYPGAVTVAWKADGSPVKAGVETTKPSKQSNNKYAASSYLSLTPEQWKSHRSYSCQVTHEGSTVEKTVAPTECSGSQSFGLLDPKLCYLLDGILFIYGVILTALFLRVKFSRSADAPAYQQGQNQLYNELNLGRREEYDVLDKRRGRDPEMGGKPQRRKNPQEGLYNELQKDKMAEAYSEIGMKGERRRGKGHDGLYQGLSTATKDTYDALHMQALPPRRAKRSGSGATNFSLLKQAGDVEENPGPTSMDWIWRILFLVGAATGAHSFEQVQLVESGGGLVQPGGSLKLSCAASGFDFSRYWMSWVRQAPGKGLEWIGEINPTSSTINFTPSLKDKVFISRDNAKNTLYLQMSKVRSEDTALYYCARGNYYRYGDAMDYWGQGTSVTVSSTRASTKGPSVFPLAPSSKSTSGGTAALGCLVKDYFPEPVTVSWNSGALTSGVHTFPAVLQSSGLYSLSSVVTVPSSSLGTQTYICNVNHKPSNTKVDKRVEPKSCGTVVEKEHPQLGAGTVLLLRAGFYAVSFLSVAVGSTVYYQGKCLTWKGPRRQLPAVVPAPLPPPCGSSAHLLPPVPGGRAKRSGSGVKQTLNFDLLKLAGDVESNPGPSRGHMTEYKPTVRLATRDDVPRAVRTLAAAFADYPATRHTVDPDRHIERVTELQELFLTRVGLDIGKVWVADDGAAVAVWTTPESVEAGAVFAEIGPRMAELSGSRLAAQQQMEGLLAPHRPKEPAWFLATVGVSPDHQGKGLGSAVVLPGVEAAERAGVPAFLETSAPRNLPFYERLGFTVTADVEVPEGPRTWCMTRKPGA

SEQ ID NO: 11734 - protein, 1001 aa, synthetic construct
MALPVTALLLPLALLLHAARPDIVLTQSPASLAVSLGQRATISCRASKSVSTSGYSYLHWYQQKPGQPPKLLIYLASNLESGVPARFSGSGSGTDFTLNIHPVEEEDAATYYCQHSRELPFTFGSGTKLEIKLEDLKNVFPPEVAVFEPSEAEISHTQKATLVCLATGFYPDHVELSWWVNGKEVHSGVSTDPQPLKEQPALNDSRYCLSSRLRVSATFWQNPRNHFRCQVQFYGLSENDEWTQDRAKPVTQIVSAEAWGRADCGSQSFGLLDPKLCYLLDGILFIYGVILTALFLRVKFSRSADAPAYQQGQNQLYNELNLGRREEYDVLDKRRGRDPEMGGKPQRRKNPQEGLYNELQKDKMAEAYSEIGMKGERRRGKGHDGLYQGLSTATKDTYDALHMQALPPRRAKRSGSGATNFSLLKQAGDVEENPGPTSMDWIWRILFLVGAATGAHSFEQVQLVESGGGLVQPGGSLKLSCAASGFDFSRYWMSWVRQAPGKGLEWIGEINPTSSTINFTPSLKDKVFISRDNAKNTLYLQMSKVRSEDTALYYCARGNYYRYGDAMDYWGQGTSVTVSSTRIQNPDPAVYQLRDSKSSDKSVCLFTDFDSQTNVSQSKDSDVYITDKTVLDMRSMDFKSNSAVAWSNKSDFACANAFNNSIIPEDTFFPSPESSCGTGDIENTSLAPEDPTFPADTWGTYLLTTETGLQKDHALWDHTAQNLLRMGLAFLVLVALVWFLVEDWLSRKRTRERASRASTWEGRRRLNTQTLRAKRSGSGATNFSLLKQAGDVEENPGPSRGHMTEYKPTVRLATRDDVPRAVRTLAAAFADYPATRHTVDPDRHIERVTELQELFLTRVGLDIGKVWVADDGAAVAVWTTPESVEAGAVFAEIGPRMAELSGSRLAAQQQMEGLLAPHRPKEPAWFLATVGVSPDHQGKGLGSAVVLPGVEAAERAGVPAFLETSAPRNLPFYERLGFTVTADVEVPEGPRTWCMTRKPGA

SEQ ID NO: 11735 - protein, 1067 aa, synthetic construct
MALPVTALLLPLALLLHAARPDIVLTQSPASLAVSLGQRATISCRASKSVSTSGYSYLHWYQQKPGQPPKLLIYLASNLESGVPARFSGSGSGTDFTLNIHPVEEEDAATYYCQHSRELPFTFGSGTKLEIKLEDLKNVFPPEVAVFEPSEAEISHTQKATLVCLATGFYPDHVELSWWVNGKEVHSGVSTDPQPLKEQPALNDSRYCLSSRLRVSATFWQNPRNHFRCQVQFYGLSENDEWTQDRAKPVTQIVSAEAWGRADCGSQSFGLLDPKLCYLLDGILFIYGVILTALFLRVKFSRSADAPAYQQGQNQLYNELNLGRREEYDVLDKRRGRDPEMGGKPQRRKNPQEGLYNELQKDKMAEAYSEIGMKGERRRGKGHDGLYQGLSTATKDTYDALHMQALPPRRAKRSGSGATNFSLLKQAGDVEENPGPTSMDWIWRILFLVGAATGAHSFEQVQLVESGGGLVQPGGSLKLSCAASGFDFSRYWMSWVRQAPGKGLEWIGEINPTSSTINFTPSLKDKVFISRDNAKNTLYLQMSKVRSEDTALYYCARGNYYRYGDAMDYWGQGTSVTVSSTRIQNPDPAVYQLRDSKSSDKSVCLFTDFDSQTNVSQSKDSDVYITDKTVLDMRSMDFKSNSAVAWSNKSDFACANAFNNSIIPEDTFFPSPESSCGTKSVRFYLVVSPASASTQTSWTPRDLVSSQTQTQSCVPPTAGARQAPESPSTIPVPSQPQNSTLRPGPAAPIALVPVFCGLLVAKSLVLSALLVWWGDIWWKTMMELRSLDTQKATCHLQQVTDLPWTSVSSPVEREILYHTVARTKISDDDDEHTLRAKRSGSGVKQTLNFDLLKLAGDVESNPGPSRGHMTEYKPTVRLATRDDVPRAVRTLAAAFADYPATRHTVDPDRHIERVTELQELFLTRVGLDIGKVWVADDGAAVAVWTTPESVEAGAVFAEIGPRMAELSGSRLAAQQQMEGLLAPHRPKEPAWFLATVGVSPDHQGKGLGSAVVLPGVEAAERAGVPAFLETSAPRNLPFYERLGFTVTADVEVPEGPRTWCMTRKPGA

SEQ ID NO: 11736 - protein, 987 aa, synthetic construct
MALPVTALLLPLALLLHAARPDIVLTQSPASLAVSLGQRATISCRASKSVSTSGYSYLHWYQQKPGQPPKLLIYLASNLESGVPARFSGSGSGTDFTLNIHPVEEEDAATYYCQHSRELPFTFGSGTKLEIKLEDLKNVFPPEVAVFEPSEAEISHTQKATLVCLATGFYPDHVELSWWVNGKEVHSGVSTDPQPLKEQPALNDSRYCLSSRLRVSATFWQNPRNHFRCQVQFYGLSENDEWTQDRAKPVTQIVSAEAWGRADCGSQSFGLLDPKLCYLLDGILFIYGVILTALFLRVKFSRSADAPAYQQGQNQLYNELNLGRREEYDVLDKRRGRDPEMGGKPQRRKNPQEGLYNELQKDKMAEAYSEIGMKGERRRGKGHDGLYQGLSTATKDTYDALHMQALPPRRAKRSGSGATNFSLLKQAGDVEENPGPTSMDWIWRILFLVGAATGAHSFEQVQLVESGGGLVQPGGSLKLSCAASGFDFSRYWMSWVRQAPGKGLEWIGEINPTSSTINFTPSLKDKVFISRDNAKNTLYLQMSKVRSEDTALYYCARGNYYRYGDAMDYWGQGTSVTVSSTRIQNPDPAVYQLRDSKSSDKSVCLFTDFDSQTNVSQSKDSDVYITDKTVLDMRSMDFKSNSAVAWSNKSDFACANAFNNSIIPEDTFFPSPESSCGTVVEKEHPQLGAGTVLLLRAGFYAVSFLSVAVGSTVYYQGKCLTWKGPRRQLPAVVPAPLPPPCGSSAHLLPPVPGGRAKRSGSGVKQTLNFDLLKLAGDVESNPGPSRGHMTEYKPTVRLATRDDVPRAVRTLAAAFADYPATRHTVDPDRHIERVTELQELFLTRVGLDIGKVWVADDGAAVAVWTTPESVEAGAVFAEIGPRMAELSGSRLAAQQQMEGLLAPHRPKEPAWFLATVGVSPDHQGKGLGSAVVLPGVEAAERAGVPAFLETSAPRNLPFYERLGFTVTADVEVPEGPRTWCMTRKPGA

SEQ ID NO: 11737 - protein, 958 aa, synthetic construct
MALPVTALLLPLALLLHAARPDIVLTQSPASLAVSLGQRATISCRASKSVSTSGYSYLHWYQQKPGQPPKLLIYLASNLESGVPARFSGSGSGTDFTLNIHPVEEEDAATYYCQHSRELPFTFGSGTKLEIKLEGQPKANPTVTLFPPSSEELQANKATLVCLISDFYPGAVTVAWKADGSPVKAGVETTKPSKQSNNKYAASSYLSLTPEQWKSHRSYSCQVTHEGSTVEKTVAPTECSGSQSFGLLDPKLCYLLDGILFIYGVILTALFLRVKFSRSADAPAYQQGQNQLYNELNLGRREEYDVLDKRRGRDPEMGGKPQRRKNPQEGLYNELQKDKMAEAYSEIGMKGERRRGKGHDGLYQGLSTATKDTYDALHMQALPPRRAKRSGSGATNFSLLKQAGDVEENPGPTSMDWIWRILFLVGAATGAHSFEQVQLVESGGGLVQPGGSLKLSCAASGFDFSRYWMSWVRQAPGKGLEWIGEINPTSSTINFTPSLKDKVFISRDNAKNTLYLQMSKVRSEDTALYYCARGNYYRYGDAMDYWGQGTSVTVSSTRASTKGPSVFPLAPSSKSTSGGTAALGCLVKDYFPEPVTVSWNSGALTSGVHTFPAVLQSSGLYSLSSVVTVPSSSLGTQTYICNVNHKPSNTKVDKRVEPKSCGTITQGLAVSTISSFFPPGYQVSFCLVMVLLFAVDTGLYFSVKTNIRSSTRDWKDHKFKWRKDPQDKRAKRSGSGATNFSLLKQAGDVEENPGPSRGHMTEYKPTVRLATRDDVPRAVRTLAAAFADYPATRHTVDPDRHIERVTELQELFLTRVGLDIGKVWVADDGAAVAVWTTPESVEAGAVFAEIGPRMAELSGSRLAAQQQMEGLLAPHRPKEPAWFLATVGVSPDHQGKGLGSAVVLPGVEAAERAGVPAFLETSAPRNLPFYERLGFTVTADVEVPEGPRTWCMTRKPGA

SEQ ID NO: 11738 - protein, 973 aa, synthetic construct
MALPVTALLLPLALLLHAARPDIVLTQSPASLAVSLGQRATISCRASKSVSTSGYSYLHWYQQKPGQPPKLLIYLASNLESGVPARFSGSGSGTDFTLNIHPVEEEDAATYYCQHSRELPFTFGSGTKLEIKLEDLKNVFPPEVAVFEPSEAEISHTQKATLVCLATGFYPDHVELSWWVNGKEVHSGVSTDPQPLKEQPALNDSRYCLSSRLRVSATFWQNPRNHFRCQVQFYGLSENDEWTQDRAKPVTQIVSAEAWGRADCGSQSFGLLDPKLCYLLDGILFIYGVILTALFLRVKFSRSADAPAYQQGQNQLYNELNLGRREEYDVLDKRRGRDPEMGGKPQRRKNPQEGLYNELQKDKMAEAYSEIGMKGERRRGKGHDGLYQGLSTATKDTYDALHMQALPPRRAKRSGSGATNFSLLKQAGDVEENPGPTSMDWIWRILFLVGAATGAHSFEQVQLVESGGGLVQPGGSLKLSCAASGFDFSRYWMSWVRQAPGKGLEWIGEINPTSSTINFTPSLKDKVFISRDNAKNTLYLQMSKVRSEDTALYYCARGNYYRYGDAMDYWGQGTSVTVSSTRIQNPDPAVYQLRDSKSSDKSVCLFTDFDSQTNVSQSKDSDVYITDKTVLDMRSMDFKSNSAVAWSNKSDFACANAFNNSIIPEDTFFPSPESSCGTITQGLAVSTISSFFPPGYQVSFCLVMVLLFAVDTGLYFSVKTNIRSSTRDWKDHKFKWRKDPQDKRAKRSGSGATNFSLLKQAGDVEENPGPSRGHMTEYKPTVRLATRDDVPRAVRTLAAAFADYPATRHTVDPDRHIERVTELQELFLTRVGLDIGKVWVADDGAAVAVWTTPESVEAGAVFAEIGPRMAELSGSRLAAQQQMEGLLAPHRPKEPAWFLATVGVSPDHQGKGLGSAVVLPGVEAAERAGVPAFLETSAPRNLPFYERLGFTVTADVEVPEGPRTWCMTRKPGA

SEQ ID NO: 11739 - protein, 656 aa, synthetic construct
MALPVTALLLPLALLLHAARPDIVLTQSPASLAVSLGQRATISCRASKSVSTSGYSYLHWYQQKPGQPPKLLIYLASNLESGVPARFSGSGSGTDFTLNIHPVEEEDAATYYCQHSRELPFTFGSGTKLEIKLEGQPKANPTVTLFPPSSEELQANKATLVCLISDFYPGAVTVAWKADGSPVKAGVETTKPSKQSNNKYAASSYLSLTPEQWKSHRSYSCQVTHEGSTVEKTVAPTECSGSLGEPQLCYILDAILFLYGIVLTLLYCRLKIQVRKAAITSYEKSDGVYTGLSTRNQETYETLKHEKPPQRAKRSGSGATNFSLLKQAGDVEENPGPTSMDWIWRILFLVGAATGAHSFEQVQLVESGGGLVQPGGSLKLSCAASGFDFSRYWMSWVRQAPGKGLEWIGEINPTSSTINFTPSLKDKVFISRDNAKNTLYLQMSKVRSEDTALYYCARGNYYRYGDAMDYWGQGTSVTVSSTRASTKGPSVFPLAPSSKSTSGGTAALGCLVKDYFPEPVTVSWNSGALTSGVHTFPAVLQSSGLYSLSSVVTVPSSSLGTQTYICNVNHKPSNTKVDKRVEPKSCGTLGEPQLCYILDAILFLYGIVLTLLYCRLKIQVRKAAITSYEKSDGVYTGLSTRNQETYETLKHEKPPQ

SEQ ID NO: 11740 - protein, 489 aa, synthetic construct
MALPVTALLLPLALLLHAARPDIQMTQSPSSLSASVGDRVTITCRASQNVGTAVAWFQQKPGKAPKILIYSASNRYTGVPSRSTGSGSGTDFTLTISSLQPEDFATYYCQQYSTYPLTFGQGTKLEIKGGGGSGGGGSGGGGSEVQLVESGGGLVQPGGSLRLSCAASGFTFSTYGMAWVRQTPDRRLELVATINSNGGKTYHPDSVKGRFTISRDNSKNTLYLQMNSLRAEDTAVYYCTREGLDYWGQGTLVTVSSTREQKLISEEDLKIEVMYPPPYLDNEKSNGTIIHVKGKHLCPSPLFPGPSKPFWVLVVVGGVLACYSLLVTVAFIIFWVRSKRSRLLHSDYMNMTPRRPGPTRKHYQPYAPPRDFAAYRSRVKFSRSADAPAYQQGQNQLYNELNLGRREEYDVLDKRRGRDPEMGGKPRRKNPQEGLYNELQKDKMAEAYSEIGMKGERRRGKGHDGLYQGLSTATKDTYDALHMQALPPR

SEQ ID NO: 11741 - protein, 495 aa, synthetic construct
MALPVTALLLPLALLLHAARPDIQMTQSPSSLSASVGDRVTITCRASQNVGTAVAWFQQKPGKAPKILIYSASNRYTGVPSRSTGSGSGTDFTLTISSLQPEDFATYYCQQYSTYPLTFGQGTKLEIKGGGGSGGGGSGGGGSEVQLVESGGGLVQPGGSLRLSCAASGFTFSTYGMAWVRQTPDRRLELVATINSNGGKTYHPDSVKGRFTISRDNSKNTLYLQMNSLRAEDTAVYYCTREGLDYWGQGTLVTVSSTREQKLISEEDLAKPTTTPAPRPPTPAPTIASQPLSLRPEACRPAAGGAVHTRGLDFACDIYIWAPLAGTCGVLLLSLVITLYCKRGRKKLLYIFKQPFMRPVQTTQEEDGCSCRFPEEEEGGCELRVKFSRSADAPAYQQGQNQLYNELNLGRREEYDVLDKRRGRDPEMGGKPRRKNPQEGLYNELQKDKMAEAYSEIGMKGERRRGKGHDGLYQGLSTATKDTYDALHMQALPPR

SEQ ID NO: 11742 - protein, 495 aa, synthetic construct
MALPVTALLLPLALLLHAARPEVQLVESGGGLVQPGGSLRLSCAASGFTFSTYGMAWVRQTPDRRLELVATINSNGGKTYHPDSVKGRFTISRDNSKNTLYLQMNSLRAEDTAVYYCTREGLDYWGQGTLVTVSSGGGGSGGGGSGGGGSDIQMTQSPSSLSASVGDRVTITCRASQNVGTAVAWFQQKPGKAPKILIYSASNRYTGVPSRSTGSGSGTDFTLTISSLQPEDFATYYCQQYSTYPLTFGQGTKLEIKTREQKLISEEDLAKPTTTPAPRPPTPAPTIASQPLSLRPEACRPAAGGAVHTRGLDFACDIYIWAPLAGTCGVLLLSLVITLYCKRGRKKLLYIFKQPFMRPVQTTQEEDGCSCRFPEEEEGGCELRVKFSRSADAPAYQQGQNQLYNELNLGRREEYDVLDKRRGRDPEMGGKPRRKNPQEGLYNELQKDKMAEAYSEIGMKGERRRGKGHDGLYQGLSTATKDTYDALHMQALPPR

SEQ ID NO: 11743 - protein, 908 aa, synthetic construct
MALPVTALLLPLALLLHAARPDIQMTQSPSSLSASVGDRVTITCRASQNVGTAVAWFQQKPGKAPKILIYSASNRYTGVPSRSTGSGSGTDFTLTISSLQPEDFATYYCQQYSTYPLTFGQGTKLEIKGGGGSGGGGSGGGGSEVQLVESGGGLVQPGGSLRLSCAASGFTFSTYGMAWVRQTPDRRLELVATINSNGGKTYHPDSVKGRFTISRDNSKNTLYLQMNSLRAEDTAVYYCTREGLDYWGQGTLVTVSSTREQKLISEEDLAKPTTTPAPRPPTPAPTIASQPLSLRPEACRPAAGGAVHTRGLDFACDIYIWAPLAGTCGVLLLSLVITLYCGRARVKFSRSADAPAYQQGQNQLYNELNLGRREEYDVLDKRRGRDPEMGGKPRRKNPQEGLYNELQKDKMAEAYSEIGMKGERRRGKGHDGLYQGLSTATKDTYDALHMQALPPRSRGSGATNFSLLKQAGDVEENPGPGIHMATYEVLCEVARKLGTDDREVVLFLLNVFIPQPTLAQLIGALRALKEEGRLTFPLLAECLFRAGRRDLLRDLLHLDPRFLERHLAGTMSYFSPYQLTVLHVDGELCARDIRSLIFLSKDTIGSRSTPQTFLHWVYCMENLDLLGPTDVDALMSMLRSLSRVDLQRQVQTLMGLHLSGPSHSQHYRHTPLETDFYDYKDDDDKTSGSGEGRGSLLTCGDVEENPGPHMTEYKPTVRLATRDDVPRAVRTLAAAFADYPATRHTVDPDRHIERVTELQELFLTRVGLDIGKVWVADDGAAVAVWTTPESVEAGAVFAEIGPRMAELSGSRLAAQQQMEGLLAPHRPKEPAWFLATVGVSPDHQGKGLGSAVVLPGVEAAERAGVPAFLETSAPRNLPFYERLGFTVTADVEVPEGPRTWCMTRKPGA

SEQ ID NO: 11744 - protein, 848 aa, synthetic construct
MALPVTALLLPLALLLHAARPDIQMTQSPSSLSASVGDRVTITCRASQNVGTAVAWFQQKPGKAPKILIYSASNRYTGVPSRSTGSGSGTDFTLTISSLQPEDFATYYCQQYSTYPLTFGQGTKLEIKLEIQNPDPAVYQLRDSKSSDKSVCLFTDFDSQTNVSQSKDSDVYITDKCVLDMRSMDFKSNSAVAWSNKSDFACANAFNNSIIPEDTFFPSSDVPCDVKLVEKSFETDTNLNFQNLSVIGFRILLLKVAGFNLLMTLRLWSSRAKRSGSGVKQTLNFDLLKLAGDVESNPGPTSMDWIWRILFLVGAATGAHSFEEVQLVESGGGLVQPGGSLRLSCAASGFTFSTYGMAWVRQTPDRRLELVATINSNGGKTYHPDSVKGRFTISRDNSKNTLYLQMNSLRAEDTAVYYCTREGLDYWGQGTLVTVSSTREDLKNVFPPEVAVFEPSKAEIAHTQKATLVCLATGFYPDHVELSWWVNGKEVHSGVCTDPQPLKEQPALNDSRYCLSSRLRVSATFWQNPRNHFRCQVQFYGLSENDEWTQDRAKPVTQIVSAEAWGRADCGITSASYHQGVLSATILYEILLGKATLYAVLVSALVLMAMVKRKDSRGRAKRSGSGATNFSLLKQAGDVEENPGPSRGHMTEYKPTVRLATRDDVPRAVRTLAAAFADYPATRHTVDPDRHIERVTELQELFLTRVGLDIGKVWVADDGAAVAVWTTPESVEAGAVFAEIGPRMAELSGSRLAAQQQMEGLLAPHRPKEPAWFLATVGVSPDHQGKGLGSAVVLPGVEAAERAGVPAFLETSAPRNLPFYERLGFTVTADVEVPEGPRTWCMTRKPGA

SEQ ID NO: 11745 - protein, 847 aa, synthetic construct
MALPVTALLLPLALLLHAARPDIQMTQSPSSLSASVGDRVTITCRASQNVGTAVAWFQQKPGKAPKILIYSASNRYTGVPSRSTGSGSGTDFTLTISSLQPEDFATYYCQQYSTYPLTFGQGTKLEIKLEDLKNVFPPEVAVFEPSKAEIAHTQKATLVCLATGFYPDHVELSWWVNGKEVHSGVCTDPQPLKEQPALNDSRYCLSSRLRVSATFWQNPRNHFRCQVQFYGLSENDEWTQDRAKPVTQIVSAEAWGRADCGITSASYHQGVLSATILYEILLGKATLYAVLVSALVLMAMVKRKDSRGRAKRSGSGATNFSLLKQAGDVEENPGPTSMDWIWRILFLVGAATGAHSFEEVQLVESGGGLVQPGGSLRLSCAASGFTFSTYGMAWVRQTPDRRLELVATINSNGGKTYHPDSVKGRFTISRDNSKNTLYLQMNSLRAEDTAVYYCTREGLDYWGQGTLVTVSSTRIQNPDPAVYQLRDSKSSDKSVCLFTDFDSQTNVSQSKDSDVYITDKCVLDMRSMDFKSNSAVAWSNKSDFACANAFNNSIIPEDTFFPSSDVPCDVKLVEKSFETDTNLNFQNLSVIGFRILLLKVAGFNLLMTLRLWSSRAKRSGSGVKQTLNFDLLKLAGDVESNPGPSRGHMTEYKPTVRLATRDDVPRAVRTLAAAFADYPATRHTVDPDRHIERVTELQELFLTRVGLDIGKVWVADDGAAVAVWTTPESVEAGAVFAEIGPRMAELSGSRLAAQQQMEGLLAPHRPKEPAWFLATVGVSPDHQGKGLGSAVVLPGVEAAERAGVPAFLETSAPRNLPFYERLGFTVTADVEVPEGPRTWCMTRKPGA

SEQ ID NO: 11746 - protein, 614 aa, synthetic construct
MALPVTALLLPLALLLHAARPDIQMTQSPSSLSASVGDRVTITCRASQNVGTAVAWFQQKPGKAPKILIYSASNRYTGVPSRSTGSGSGTDFTLTISSLQPEDFATYYCQQYSTYPLTFGQGTKLEIKLEDLKNVFPPEVAVFEPSEAEISHTQKATLVCLATGFYPDHVELSWWVNGKEVHSGVCTDPQPLKEQPALNDSRYCLSSRLRVSATFWQNPRNHFRCQVQFYGLSENDEWTQDRAKPVTQIVSAEAWGRADCGFTSESYQQGVLSATILYEILLGKATLYAVLVSALVLMAMVKRKDSRGRAKRSGSGATNFSLLKQAGDVEENPGPTSMDWIWRILFLVGAATGAHSFEEVQLVESGGGLVQPGGSLRLSCAASGFTFSTYGMAWVRQTPDRRLELVATINSNGGKTYHPDSVKGRFTISRDNSKNTLYLQMNSLRAEDTAVYYCTREGLDYWGQGTLVTVSSTRIQNPDPAVYQLRDSKSSDKSVCLFTDFDSQTNVSQSKDSDVYITDKCVLDMRSMDFKSNSAVAWSNKSDFACANAFNNSIIPEDTFFPSPESSCDVKLVEKSFETDTNLNFQNLSVIGFRILLLKVAGFNLLMTLRLWSS

SEQ ID NO: 11747 - protein, 839 aa, synthetic construct
MALPVTALLLPLALLLHAARPDIQMTQSPSSLSASVGDRVTITCRASQNVGTAVAWFQQKPGKAPKILIYSASNRYTGVPSRSTGSGSGTDFTLTISSLQPEDFATYYCQQYSTYPLTFGQGTKLEIKLEDLKNVFPPEVAVFEPSEAEISHTQKATLVCLATGFYPDHVELSWWVNGKEVHSGVCTDPQPLKEQPALNDSRYCLSSRLRVSATFWQNPRNHFRCQVQFYGLSENDEWTQDRAKPVTQIVSAEAWGRADCGFTSESYQQGVLSATILYEILLGKATLYAVLVSALVLMAMVKRKDSRGRAKRSGSGATNFSLLKQAGDVEENPGPTSMDWIWRILFLVGAATGAHSFEEVQLVESGGGLVQPGGSLRLSCAASGFTFSTYGMAWVRQTPDRRLELVATINSNGGKTYHPDSVKGRFTISRDNSKNTLYLQMNSLRAEDTAVYYCTREGLDYWGQGTLVTVSSTRIQNPDPAVYQLRDSKSSDKSVCLFTDFDSQTNVSQSKDSDVYITDKCVLDMRSMDFKSNSAVAWSNKSDFACANAFNNSIIPEDTFFPSPESSCDVKLVEKSFETDTNLNFQNLSVIGFRILLLKVAGFNLLMTLRLWSSRAKRSGSGVKQTLNFDLLKLAGDVESNPGPSRGGIHTMATYEVLCEVARKLGTDDREVVLFLLNVFIPQPTLAQLIGALRALKEEGRLTFPLLAECLFRAGRRDLLRDLLHLDPRFLERHLAGTMSYFSPYQLTVLHVDGELCARDIRSLIFLSKDTIGSRSTPQTFLHWVYCMENLDLLGPTDVDALMSMLRSLSRVDLQRQVQTLMGLHLSGPSHSQHYRHTP

SEQ ID NO: 11748 - protein, 618 aa, synthetic construct
MALPVTALLLPLALLLHAARPDIQMTQSPSSLSASVGDRVTITCRASQNVGTAVAWFQQKPGKAPKILIYSASNRYTGVPSRSTGSGSGTDFTLTISSLQPEDFATYYCQQYSTYPLTFGQGTKLEIKLEIQNPDPAVYQLRDSKSSDKSVCLFTDFDSQTNVSQSKDSDVYITDKCVLDMRSMDFKSNSAVAWSNKSDFACANAFNNSIIPEDTFFPSPESSCDVKLVEKSFETDTNLNFQNLSVIGFRILLLKVAGFNLLMTLRLWSSRAKRSGSGVKQTLNFDLLKLAGDVESNPGPTSMDWIWRILFLVGAATGAHSFEEVQLVESGGGLVQPGGSLRLSCAASGFTFSTYGMAWVRQTPDRRLELVATINSNGGKTYHPDSVKGRFTISRDNSKNTLYLQMNSLRAEDTAVYYCTREGLDYWGQGTLVTVSSTREDLKNVFPPEVAVFEPSEAEISHTQKATLVCLATGFYPDHVELSWWVNGKEVHSGVCTDPQPLKEQPALNDSRYCLSSRLRVSATFWQNPRNHFRCQVQFYGLSENDEWTQDRAKPVTQIVSAEAWGRADCGFTSESYQQGVLSATILYEILLGKATLYAVLVSALVLMAMVKRKDSRG

SEQ ID NO: 11749 - protein, 840 aa, synthetic construct
MALPVTALLLPLALLLHAARPDIQMTQSPSSLSASVGDRVTITCRASQNVGTAVAWFQQKPGKAPKILIYSASNRYTGVPSRSTGSGSGTDFTLTISSLQPEDFATYYCQQYSTYPLTFGQGTKLEIKLEIQNPDPAVYQLRDSKSSDKSVCLFTDFDSQTNVSQSKDSDVYITDKCVLDMRSMDFKSNSAVAWSNKSDFACANAFNNSIIPEDTFFPSPESSCDVKLVEKSFETDTNLNFQNLSVIGFRILLLKVAGFNLLMTLRLWSSRAKRSGSGVKQTLNFDLLKLAGDVESNPGPTSMDWIWRILFLVGAATGAHSFEEVQLVESGGGLVQPGGSLRLSCAASGFTFSTYGMAWVRQTPDRRLELVATINSNGGKTYHPDSVKGRFTISRDNSKNTLYLQMNSLRAEDTAVYYCTREGLDYWGQGTLVTVSSTREDLKNVFPPEVAVFEPSEAEISHTQKATLVCLATGFYPDHVELSWWVNGKEVHSGVCTDPQPLKEQPALNDSRYCLSSRLRVSATFWQNPRNHFRCQVQFYGLSENDEWTQDRAKPVTQIVSAEAWGRADCGFTSESYQQGVLSATILYEILLGKATLYAVLVSALVLMAMVKRKDSRGRAKRSGSGATNFSLLKQAGDVEENPGPSRGGIHTMATYEVLCEVARKLGTDDREVVLFLLNVFIPQPTLAQLIGALRALKEEGRLTFPLLAECLFRAGRRDLLRDLLHLDPRFLERHLAGTMSYFSPYQLTVLHVDGELCARDIRSLIFLSKDTIGSRSTPQTFLHWVYCMENLDLLGPTDVDALMSMLRSLSRVDLQRQVQTLMGLHLSGPSHSQHYRHTP

SEQ ID NO: 11750 - protein, 892 aa, synthetic construct
MALPVTALLLPLALLLHAARPLEGKPIPNPLLGLDSTGSGEDLKNVFPPEVAVFEPSKAEIAHTQKATLVCLATGFYPDHVELSWWVNGKEVHSGVCTDPQPLKEQPALNDSRYCLSSRLRVSATFWQNPRNHFRCQVQFYGLSENDEWTQDRAKPVTQIVSAEAWGRADCGITSASYHQGVLSATILYEILLGKATLYAVLVSALVLMAMVKRKDSRGRAKRSGSGATNFSLLKQAGDVEENPGPTSMALPVTALLLPLALLLHAARPDIQMTQSPSSLSASVGDRVTITCRASQNVGTAVAWFQQKPGKAPKILIYSASNRYTGVPSRSTGSGSGTDFTLTISSLQPEDFATYYCQQYSTYPLTFGQGTKLEIKGGGGSGGGGSGGGGSEVQLVESGGGLVQPGGSLRLSCAASGFTFSTYGMAWVRQTPDRRLELVATINSNGGKTYHPDSVKGRFTISRDNSKNTLYLQMNSLRAEDTAVYYCTREGLDYWGQGTLVTVSSTREQKLISEEDGSGIQNPDPAVYQLRDSKSSDKSVCLFTDFDSQTNVSQSKDSDVYITDKCVLDMRSMDFKSNSAVAWSNKSDFACANAFNNSIIPEDTFFPSSDVPCDVKLVEKSFETDTNLNFQNLSVIGFRILLLKVAGFNLLMTLRLWSSRAKRSGSGVKQTLNFDLLKLAGDVESNPGPSRGHMTEYKPTVRLATRDDVPRAVRTLAAAFADYPATRHTVDPDRHIERVTELQELFLTRVGLDIGKVWVADDGAAVAVWTTPESVEAGAVFAEIGPRMAELSGSRLAAQQQMEGLLAPHRPKEPAWFLATVGVSPDHQGKGLGSAVVLPGVEAAERAGVPAFLETSAPRNLPFYERLGFTVTADVEVPEGPRTWCMTRKPGA

SEQ ID NO: 11751 - protein, 893 aa, synthetic construct
MALPVTALLLPLALLLHAARPLEQKLISEEDLGSGDRPDPAVYQLRDSKSSDKSVCLFTDFDSQTNVSQSKDSDVYITDKCVLDMRSMDFKSNSAVAWSNKSDFACANAFNNSIIPEDTFFPSPESSCDVKLVEKSFETDTNLNFQNLSVIGFRILLLKVAGFNLLMTLRLWSSSSRAKRSGSGVKQTLNFDLLKLAGDVESNPGPTSMALPVTALLLPLALLLHAARPDIQMTQSPSSLSASVGDRVTITCRASQNVGTAVAWFQQKPGKAPKILIYSASNRYTGVPSRSTGSGSGTDFTLTISSLQPEDFATYYCQQYSTYPLTFGQGTKLEIKGGGGSGGGGSGGGGSEVQLVESGGGLVQPGGSLRLSCAASGFTFSTYGMAWVRQTPDRRLELVATINSNGGKTYHPDSVKGRFTISRDNSKNTLYLQMNSLRAEDTAVYYCTREGLDYWGQGTLVTVSSTRGKPIPNPLLGLDSTGSGEDLKNVFPPEVAVFEPSEAEISHTQKATLVCLATGFYPDHVELSWWVNGKEVHSGVCTDPQPLKEQPALNDSRYCLSSRLRVSATFWQNPRNHFRCQVQFYGLSENDEWTQDRAKPVTQIVSAEAWGRADCGFTSESYQQGVLSATILYEILLGKATLYAVLVSALVLMAMVKRKDSRGRAKRSGSGATNFSLLKQAGDVEENPGPSRGHMTEYKPTVRLATRDDVPRAVRTLAAAFADYPATRHTVDPDRHIERVTELQELFLTRVGLDIGKVWVADDGAAVAVWTTPESVEAGAVFAEIGPRMAELSGSRLAAQQQMEGLLAPHRPKEPAWFLATVGVSPDHQGKGLGSAVVLPGVEAAERAGVPAFLETSAPRNLPFYERLGFTVTADVEVPEGPRTWCMTRKPGA

SEQ ID NO: 11752 - protein, 847 aa, synthetic construct
MALPVTALLLPLALLLHAARPDIQMTQSPSSLSASVGDRVTITCRASQNVGTAVAWFQQKPGKAPKILIYSASNRYTGVPSRSTGSGSGTDFTLTISSLQPEDFATYYCQQYSTYPLTFGQGTKLEIKLEDLKNVFPPEVAVFEPSEAEISHTQKATLVCLATGFYPDHVELSWWVNGKEVHSGVSTDPQPLKEQPALNDSRYCLSSRLRVSATFWQNPRNHFRCQVQFYGLSENDEWTQDRAKPVTQIVSAEAWGRADCGFTSESYQQGVLSATILYEILLGKATLYAVLVSALVLMAMVKRKDSRGRAKRSGSGATNFSLLKQAGDVEENPGPTSMDWIWRILFLVGAATGAHSFEEVQLVESGGGLVQPGGSLRLSCAASGFTFSTYGMAWVRQTPDRRLELVATINSNGGKTYHPDSVKGRFTISRDNSKNTLYLQMNSLRAEDTAVYYCTREGLDYWGQGTLVTVSSTRIQNPDPAVYQLRDSKSSDKSVCLFTDFDSQTNVSQSKDSDVYITDKTVLDMRSMDFKSNSAVAWSNKSDFACANAFNNSIIPEDTFFPSPESSCDVKLVEKSFETDTNLNFQNLSVIGFRILLLKVAGFNLLMTLRLWSSRAKRSGSGVKQTLNFDLLKLAGDVESNPGPSRGHMTEYKPTVRLATRDDVPRAVRTLAAAFADYPATRHTVDPDRHIERVTELQELFLTRVGLDIGKVWVADDGAAVAVWTTPESVEAGAVFAEIGPRMAELSGSRLAAQQQMEGLLAPHRPKEPAWFLATVGVSPDHQGKGLGSAVVLPGVEAAERAGVPAFLETSAPRNLPFYERLGFTVTADVEVPEGPRTWCMTRKPGA

SEQ ID NO: 11753 - protein, 929 aa, synthetic construct
MALPVTALLLPLALLLHAARPDIQMTQSPSSLSASVGDRVTITCRASQNVGTAVAWFQQKPGKAPKILIYSASNRYTGVPSRSTGSGSGTDFTLTISSLQPEDFATYYCQQYSTYPLTFGQGTKLEIKLEDLKNVFPPEVAVFEPSEAEISHTQKATLVCLATGFYPDHVELSWWVNGKEVHSGVSTDPQPLKEQPALNDSRYCLSSRLRVSATFWQNPRNHFRCQVQFYGLSENDEWTQDRAKPVTQIVSAEAWGRADCGFTSESYQQGVLSATILYEILLGKATLYAVLVSALVLMAMVKRKDSRGRAKRSGSGATNFSLLKQAGDVEENPGPTSMDWIWRILFLVGAATGAHSFEEVQLVESGGGLVQPGGSLRLSCAASGFTFSTYGMAWVRQTPDRRLELVATINSNGGKTYHPDSVKGRFTISRDNSKNTLYLQMNSLRAEDTAVYYCTREGLDYWGQGTLVTVSSTREQKLISEEDGSGTPFPSLAPPIMLLVDGKQQMVVVCLVLDVAPPGLDSPIWFSAGNGSALDAFTYGPSPATDGTWTNLAHLSLPSEELASWEPLVCHTGPGAEGHSRSTQPMHLSGEASTARTCPQEPLRGTPGGALWLGVLRLLLFKLLLFDLLLTCSCLCDPAGPLPSPATTTRLRALGSHRLHPATETGGREATSSPRPQPRDRRWGDTPPGRKPGSPVRAKRSGSGVKQTLNFDLLKLAGDVESNPGPSRGHMTEYKPTVRLATRDDVPRAVRTLAAAFADYPATRHTVDPDRHIERVTELQELFLTRVGLDIGKVWVADDGAAVAVWTTPESVEAGAVFAEIGPRMAELSGSRLAAQQQMEGLLAPHRPKEPAWFLATVGVSPDHQGKGLGSAVVLPGVEAAERAGVPAFLETSAPRNLPFYERLGFTVTADVEVPEGPRTWCMTRKPGA

SEQ ID NO: 11754 - protein, 947 aa, synthetic construct
MALPVTALLLPLALLLHAARPLEDLKNVFPPEVAVFEPSEAEISHTQKATLVCLATGFYPDHVELSWWVNGKEVHSGVSTDPQPLKEQPALNDSRYCLSSRLRVSATFWQNPRNHFRCQVQFYGLSENDEWTQDRAKPVTQIVSAEAWGRADCGFTSESYQQGVLSATILYEILLGKATLYAVLVSALVLMAMVKRKDSRGRAKRSGSGATNFSLLKQAGDVEENPGPTSMALPVTALLLPLALLLHAARPDIQMTQSPSSLSASVGDRVTITCRASQNVGTAVAWFQQKPGKAPKILIYSASNRYTGVPSRSTGSGSGTDFTLTISSLQPEDFATYYCQQYSTYPLTFGQGTKLEIKGGGGSGGGGSGGGGSEVQLVESGGGLVQPGGSLRLSCAASGFTFSTYGMAWVRQTPDRRLELVATINSNGGKTYHPDSVKGRFTISRDNSKNTLYLQMNSLRAEDTAVYYCTREGLDYWGQGTLVTVSSTREQKLISEEDLGSGTPFPSLAPPIMLLVDGKQQMVVVCLVLDVAPPGLDSPIWFSAGNGSALDAFTYGPSPATDGTWTNLAHLSLPSEELASWEPLVCHTGPGAEGHSRSTQPMHLSGEASTARTCPQEPLRGTPGGALWLGVLRLLLFKLLLFDLLLTCSCLCDPAGPLPSPATTTRLRALGSHRLHPATETGGREATSSPRPQPRDRRWGDTPPGRKPGSPVRAKRSGSGVKQTLNFDLLKLAGDVESNPGPSRSRGHMTEYKPTVRLATRDDVPRAVRTLAAAFADYPATRHTVDPDRHIERVTELQELFLTRVGLDIGKVWVADDGAAVAVWTTPESVEAGAVFAEIGPRMAELSGSRLAAQQQMEGLLAPHRPKEPAWFLATVGVSPDHQGKGLGSAVVLPGVEAAERAGVPAFLETSAPRNLPFYERLGFTVTADVEVPEGPRTWCMTRKPGA

SEQ ID NO: 11755 - protein, 884 aa, synthetic construct
MALPVTALLLPLALLLHAARPDIQMTQSPSSLSASVGDRVTITCRASQNVGTAVAWFQQKPGKAPKILIYSASNRYTGVPSRSTGSGSGTDFTLTISSLQPEDFATYYCQQYSTYPLTFGQGTKLEIKLEGKPIPNPLLGLDSTGSGDKQLDADVSPKPTIFLPSIAETKLQKAGTYLCLLEKFFPDVIKIHWQEKKSNTILGSQEGNTMKTNDTYMKFSWLTVPEKSLDKEHRCIVRHENNKNGVDQEIIFPPIKTDVITMDPKDNCSKDANDTLLLQLTNTSAYYMYLLLLLKSVVYFAIITCCLLRRTAFCCNGEKSRAKRSGSGATNFSLLKQAGDVEENPGPTSMDWIWRILFLVGAATGAHSFEEVQLVESGGGLVQPGGSLRLSCAASGFTFSTYGMAWVRQTPDRRLELVATINSNGGKTYHPDSVKGRFTISRDNSKNTLYLQMNSLRAEDTAVYYCTREGLDYWGQGTLVTVSSTREQKLISEEDGSGSQPHTKPSVFVMKNGTNVACLVKEFYPKDIRINLVSSKKITEFDPAIVISPSGKYNAVKLGKYEDSNSVTCSVQHDNKTVHSTDFEVKTDSTDHVKPKETENTKQPSKSCHKPKAIVHTEKVNMMSLTVLGLRMLFAKTVAVNFLLTAKLFFLRAKRSGSGVKQTLNFDLLKLAGDVESNPGPSRGHMTEYKPTVRLATRDDVPRAVRTLAAAFADYPATRHTVDPDRHIERVTELQELFLTRVGLDIGKVWVADDGAAVAVWTTPESVEAGAVFAEIGPRMAELSGSRLAAQQQMEGLLAPHRPKEPAWFLATVGVSPDHQGKGLGSAVVLPGVEAAERAGVPAFLETSAPRNLPFYERLGFTVTADVEVPEGPRTWCMTRKPGA

SEQ ID NO: 11756 - protein, 622 aa, synthetic construct
MALPVTALLLPLALLLHAARPDIQMTQSPSSLSASVGDRVTITCRASQNVGTAVAWFQQKPGKAPKILIYSASNRYTGVPSRSTGSGSGTDFTLTISSLQPEDFATYYCQQYSTYPLTFGQGTKLEIKLESQPHTKPSVFVMKNGTNVACLVKEFYPKDIRINLVSSKKITEFDPAIVISPSGKYNAVKLGKYEDSNSVTCSVQHDNKTVHSTDFEVKTDSTDHVKPKETENTKQPSKSCHKPKAIVHTEKVNMMSLTVLGLRMLFAKTVAVNFLLTAKLFFLRAKRSGSGATNFSLLKQAGDVEENPGPTSMDWIWRILFLVGAATGAHSFEEVQLVESGGGLVQPGGSLRLSCAASGFTFSTYGMAWVRQTPDRRLELVATINSNGGKTYHPDSVKGRFTISRDNSKNTLYLQMNSLRAEDTAVYYCTREGLDYWGQGTLVTVSSTRDKQLDADVSPKPTIFLPSIAETKLQKAGTYLCLLEKFFPDVIKIHWQEKKSNTILGSQEGNTMKTNDTYMKFSWLTVPEKSLDKEHRCIVRHENNKNGVDQEIIFPPIKTDVITMDPKDNCSKDANDTLLLQLTNTSAYYMYLLLLLKSVVYFAIITCCLLRRTAFCCNGEKS

SEQ ID NO: 11757 - protein, 899 aa, synthetic construct
MALPVTALLLPLALLLHAARPLEGKPIPNPLLGLDSTGSGDKQLDADVSPKPTIFLPSIAETKLQKAGTYLCLLEKFFPDVIKIHWQEKKSNTILGSQEGNTMKTNDTYMKFSWLTVPEKSLDKEHRCIVRHENNKNGVDQEIIFPPIKTDVITMDPKDNCSKDANDTLLLQLTNTSAYYMYLLLLLKSVVYFAIITCCLLRRTAFCCNGEKSRAKRSGSGATNFSLLKQAGDVEENPGPTSMALPVTALLLPLALLLHAARPDIQMTQSPSSLSASVGDRVTITCRASQNVGTAVAWFQQKPGKAPKILIYSASNRYTGVPSRSTGSGSGTDFTLTISSLQPEDFATYYCQQYSTYPLTFGQGTKLEIKGGGGSGGGGSGGGGSEVQLVESGGGLVQPGGSLRLSCAASGFTFSTYGMAWVRQTPDRRLELVATINSNGGKTYHPDSVKGRFTISRDNSKNTLYLQMNSLRAEDTAVYYCTREGLDYWGQGTLVTVSSTREQKLISEEDGSGSQPHTKPSVFVMKNGTNVACLVKEFYPKDIRINLVSSKKITEFDPAIVISPSGKYNAVKLGKYEDSNSVTCSVQHDNKTVHSTDFEVKTDSTDHVKPKETENTKQPSKSCHKPKAIVHTEKVNMMSLTVLGLRMLFAKTVAVNFLLTAKLFFLRAKRSGSGVKQTLNFDLLKLAGDVESNPGPSRGHMTEYKPTVRLATRDDVPRAVRTLAAAFADYPATRHTVDPDRHIERVTELQELFLTRVGLDIGKVWVADDGAAVAVWTTPESVEAGAVFAEIGPRMAELSGSRLAAQQQMEGLLAPHRPKEPAWFLATVGVSPDHQGKGLGSAVVLPGVEAAERAGVPAFLETSAPRNLPFYERLGFTVTADVEVPEGPRTWCMTRKPGA

SEQ ID NO: 11758 - protein, 1024 aa, synthetic construct
MALPVTALLLPLALLLHAARPDIQMTQSPSSLSASVGDRVTITCRASQNVGTAVAWFQQKPGKAPKILIYSASNRYTGVPSRSTGSGSGTDFTLTISSLQPEDFATYYCQQYSTYPLTFGQGTKLEIKGQPKANPTVTLFPPSSEELQANKATLVCLISDFYPGAVTVAWKADGSPVKAGVETTKPSKQSNNKYAASSYLSLTPEQWKSHRSYSCQVTHEGSTVEKTVAPTECSGSQSFGLLDPKLCYLLDGILFIYGVILTALFLRVKFSRSADAPAYQQGQNQLYNELNLGRREEYDVLDKRRGRDPEMGGKPQRRKNPQEGLYNELQKDKMAEAYSEIGMKGERRRGKGHDGLYQGLSTATKDTYDALHMQALPPRRAKRSGSGATNFSLLKQAGDVEENPGPTSMDWIWRILFLVGAATGAHSFEEVQLVESGGGLVQPGGSLRLSCAASGFTFSTYGMAWVRQTPDRRLELVATINSNGGKTYHPDSVKGRFTISRDNSKNTLYLQMNSLRAEDTAVYYCTREGLDYWGQGTLVTVSSASTKGPSVFPLAPSSKSTSGGTAALGCLVKDYFPEPVTVSWNSGALTSGVHTFPAVLQSSGLYSLSSVVTVPSSSLGTQTYICNVNHKPSNTKVDKRVEPKSCGTQSFGLLDPKLCYLLDGILFIYGVILTALFLRVKFSRSADAPAYQQGQNQLYNELNLGRREEYDVLDKRRGRDPEMGGKPQRRKNPQEGLYNELQKDKMAEAYSEIGMKGERRRGKGHDGLYQGLSTATKDTYDALHMQALPPRRAKRSGSGVKQTLNFDLLKLAGDVESNPGPSRGHMTEYKPTVRLATRDDVPRAVRTLAAAFADYPATRHTVDPDRHIERVTELQELFLTRVGLDIGKVWVADDGAAVAVWTTPESVEAGAVFAEIGPRMAELSGSRLAAQQQMEGLLAPHRPKEPAWFLATVGVSPDHQGKGLGSAVVLPGVEAAERAGVPAFLETSAPRNLPFYERLGFTVTADVEVPEGPRTWCMTRKPGA

SEQ ID NO: 11759 - protein, 810 aa, synthetic construct
MALPVTALLLPLALLLHAARPDIQMTQSPSSLSASVGDRVTITCRASQNVGTAVAWFQQKPGKAPKILIYSASNRYTGVPSRSTGSGSGTDFTLTISSLQPEDFATYYCQQYSTYPLTFGQGTKLEIKLEDLKNVFPPEVAVFEPSEAEISHTQKATLVCLATGFYPDHVELSWWVNGKEVHSGVSTDPQPLKEQPALNDSRYCLSSRLRVSATFWQNPRNHFRCQVQFYGLSENDEWTQDRAKPVTQIVSAEAWGRADCGSQSFGLLDPKLCYLLDGILFIYGVILTALFLRVKFSRSADAPAYQQGQNQLYNELNLGRREEYDVLDKRRGRDPEMGGKPQRRKNPQEGLYNELQKDKMAEAYSEIGMKGERRRGKGHDGLYQGLSTATKDTYDALHMQALPPRRAKRSGSGATNFSLLKQAGDVEENPGPTSMDWIWRILFLVGAATGAHSFEEVQLVESGGGLVQPGGSLRLSCAASGFTFSTYGMAWVRQTPDRRLELVATINSNGGKTYHPDSVKGRFTISRDNSKNTLYLQMNSLRAEDTAVYYCTREGLDYWGQGTLVTVSSTRIQNPDPAVYQLRDSKSSDKSVCLFTDFDSQTNVSQSKDSDVYITDKTVLDMRSMDFKSNSAVAWSNKSDFACANAFNNSIIPEDTFFPSPESSCGTQSFGLLDPKLCYLLDGILFIYGVILTALFLRVKFSRSADAPAYQQGQNQLYNELNLGRREEYDVLDKRRGRDPEMGGKPQRRKNPQEGLYNELQKDKMAEAYSEIGMKGERRRGKGHDGLYQGLSTATKDTYDALHMQALPPR

SEQ ID NO: 11760 - protein, 810 aa, synthetic construct
MALPVTALLLPLALLLHAARPDIQMTQSPSSLSASVGDRVTITCRASQNVGTAVAWFQQKPGKAPKILIYSASNRYTGVPSRSTGSGSGTDFTLTISSLQPEDFATYYCQQYSTYPLTFGQGTKLEIKLEDLKNVFPPEVAVFEPSKAEIAHTQKATLVCLATGFYPDHVELSWWVNGKEVHSGVCTDPQPLKEQPALNDSRYCLSSRLRVSATFWQNPRNHFRCQVQFYGLSENDEWTQDRAKPVTQIVSAEAWGRADCGSQSFGLLDPKLCYLLDGILFIYGVILTALFLRVKFSRSADAPAYQQGQNQLYNELNLGRREEYDVLDKRRGRDPEMGGKPQRRKNPQEGLYNELQKDKMAEAYSEIGMKGERRRGKGHDGLYQGLSTATKDTYDALHMQALPPRRAKRSGSGATNFSLLKQAGDVEENPGPTSMDWIWRILFLVGAATGAHSFEEVQLVESGGGLVQPGGSLRLSCAASGFTFSTYGMAWVRQTPDRRLELVATINSNGGKTYHPDSVKGRFTISRDNSKNTLYLQMNSLRAEDTAVYYCTREGLDYWGQGTLVTVSSTRIQNPDPAVYQLRDSKSSDKSVCLFTDFDSQTNVSQSKDSDVYITDKCVLDMRSMDFKSNSAVAWSNKSDFACANAFNNSIIPEDTFFPSSDVPCGTQSFGLLDPKLCYLLDGILFIYGVILTALFLRVKFSRSADAPAYQQGQNQLYNELNLGRREEYDVLDKRRGRDPEMGGKPQRRKNPQEGLYNELQKDKMAEAYSEIGMKGERRRGKGHDGLYQGLSTATKDTYDALHMQALPPR

SEQ ID NO: 11761 - protein, 881 aa, synthetic construct
MALPVTALLLPLALLLHAARPDIQMTQSPSSLSASVGDRVTITCRASQNVGTAVAWFQQKPGKAPKILIYSASNRYTGVPSRSTGSGSGTDFTLTISSLQPEDFATYYCQQYSTYPLTFGQGTKLEIKLEGKPIPNPLLGLDSTGSGEDLKNVFPPEVAVFEPSEAEISHTQKATLVCLATGFYPDHVELSWWVNGKEVHSGVSTDPQPLKEQPALNDSRYCLSSRLRVSATFWQNPRNHFRCQVQFYGLSENDEWTQDRAKPVTQIVSAEAWGRADCGSQSFGLLDPKLCYLLDGILFIYGVILTALFLRVKFSRSADAPAYQQGQNQLYNELNLGRREEYDVLDKRRGRDPEMGGKPQRRKNPQEGLYNELQKDKMAEAYSEIGMKGERRRGKGHDGLYQGLSTATKDTYDALHMQALPPRRAKRSGSGATNFSLLKQAGDVEENPGPTSMDWIWRILFLVGAATGAHSFEEVQLVESGGGLVQPGGSLRLSCAASGFTFSTYGMAWVRQTPDRRLELVATINSNGGKTYHPDSVKGRFTISRDNSKNTLYLQMNSLRAEDTAVYYCTREGLDYWGQGTLVTVSSTREQKLISEEDGSGIQNPDPAVYQLRDSKSSDKSVCLFTDFDSQTNVSQSKDSDVYITDKTVLDMRSMDFKSNSAVAWSNKSDFACANAFNNSIIPEDTFFPSPESSCGTQSFGLLDPKLCYLLDGILFIYGVILTALFLRSKRSRLLHSDYMNMTPRRPGPTRKHYQPYAPPRDFAAYRSRVKFSRSADAPAYQQGQNQLYNELNLGRREEYDVLDKRRGRDPEMGGKPQRRKNPQEGLYNELQKDKMAEAYSEIGMKGERRRGKGHDGLYQGLSTATKDTYDALHMQALPPR

SEQ ID NO: 11762 - protein, 922 aa, synthetic construct
MALPVTALLLPLALLLHAARPDIQMTQSPSSLSASVGDRVTITCRASQNVGTAVAWFQQKPGKAPKILIYSASNRYTGVPSRSTGSGSGTDFTLTISSLQPEDFATYYCQQYSTYPLTFGQGTKLEIKLEGKPIPNPLLGLDSTGSGEDLKNVFPPEVAVFEPSEAEISHTQKATLVCLATGFYPDHVELSWWVNGKEVHSGVSTDPQPLKEQPALNDSRYCLSSRLRVSATFWQNPRNHFRCQVQFYGLSENDEWTQDRAKPVTQIVSAEAWGRADCGSQSFGLLDPKLCYLLDGILFIYGVILTALFLRSKRSRLLHSDYMNMTPRRPGPTRKHYQPYAPPRDFAAYRSRVKFSRSADAPAYQQGQNQLYNELNLGRREEYDVLDKRRGRDPEMGGKPQRRKNPQEGLYNELQKDKMAEAYSEIGMKGERRRGKGHDGLYQGLSTATKDTYDALHMQALPPRRAKRSGSGATNFSLLKQAGDVEENPGPTSMDWIWRILFLVGAATGAHSFEEVQLVESGGGLVQPGGSLRLSCAASGFTFSTYGMAWVRQTPDRRLELVATINSNGGKTYHPDSVKGRFTISRDNSKNTLYLQMNSLRAEDTAVYYCTREGLDYWGQGTLVTVSSTREQKLISEEDGSGIQNPDPAVYQLRDSKSSDKSVCLFTDFDSQTNVSQSKDSDVYITDKTVLDMRSMDFKSNSAVAWSNKSDFACANAFNNSIIPEDTFFPSPESSCGTQSFGLLDPKLCYLLDGILFIYGVILTALFLRSKRSRLLHSDYMNMTPRRPGPTRKHYQPYAPPRDFAAYRSRVKFSRSADAPAYQQGQNQLYNELNLGRREEYDVLDKRRGRDPEMGGKPQRRKNPQEGLYNELQKDKMAEAYSEIGMKGERRRGKGHDGLYQGLSTATKDTYDALHMQALPPR

SEQ ID NO: 11763 - protein, 883 aa, synthetic construct
MALPVTALLLPLALLLHAARPDIQMTQSPSSLSASVGDRVTITCRASQNVGTAVAWFQQKPGKAPKILIYSASNRYTGVPSRSTGSGSGTDFTLTISSLQPEDFATYYCQQYSTYPLTFGQGTKLEIKLEGKPIPNPLLGLDSTGSGEDLKNVFPPEVAVFEPSEAEISHTQKATLVCLATGFYPDHVELSWWVNGKEVHSGVSTDPQPLKEQPALNDSRYCLSSRLRVSATFWQNPRNHFRCQVQFYGLSENDEWTQDRAKPVTQIVSAEAWGRADCGSQSFGLLDPKLCYLLDGILFIYGVILTALFLRVKFSRSADAPAYQQGQNQLYNELNLGRREEYDVLDKRRGRDPEMGGKPQRRKNPQEGLYNELQKDKMAEAYSEIGMKGERRRGKGHDGLYQGLSTATKDTYDALHMQALPPRRAKRSGSGATNFSLLKQAGDVEENPGPTSMDWIWRILFLVGAATGAHSFEEVQLVESGGGLVQPGGSLRLSCAASGFTFSTYGMAWVRQTPDRRLELVATINSNGGKTYHPDSVKGRFTISRDNSKNTLYLQMNSLRAEDTAVYYCTREGLDYWGQGTLVTVSSTREQKLISEEDLGSGIQNPDPAVYQLRDSKSSDKSVCLFTDFDSQTNVSQSKDSDVYITDKTVLDMRSMDFKSNSAVAWSNKSDFACANAFNNSIIPEDTFFPSPESSCGTQSFGLLDPKLCYLLDGILFIYGVILTALFLKRGRKKLLYIFKQPFMRPVQTTQEEDGCSCRFPEEEEGGCELRVKFSRSADAPAYQQGQNQLYNELNLGRREEYDVLDKRRGRDPEMGGKPQRRKNPQEGLYNELQKDKMAEAYSEIGMKGERRRGKGHDGLYQGLSTATKDTYDALHMQALPPR

SEQ ID NO: 11764 - protein, 925 aa, synthetic construct
MALPVTALLLPLALLLHAARPDIQMTQSPSSLSASVGDRVTITCRASQNVGTAVAWFQQKPGKAPKILIYSASNRYTGVPSRSTGSGSGTDFTLTISSLQPEDFATYYCQQYSTYPLTFGQGTKLEIKLEGKPIPNPLLGLDSTGSGEDLKNVFPPEVAVFEPSEAEISHTQKATLVCLATGFYPDHVELSWWVNGKEVHSGVSTDPQPLKEQPALNDSRYCLSSRLRVSATFWQNPRNHFRCQVQFYGLSENDEWTQDRAKPVTQIVSAEAWGRADCGSQSFGLLDPKLCYLLDGILFIYGVILTALFLKRGRKKLLYIFKQPFMRPVQTTQEEDGCSCRFPEEEEGGCELRVKFSRSADAPAYQQGQNQLYNELNLGRREEYDVLDKRRGRDPEMGGKPQRRKNPQEGLYNELQKDKMAEAYSEIGMKGERRRGKGHDGLYQGLSTATKDTYDALHMQALPPRRAKRSGSGATNFSLLKQAGDVEENPGPTSMDWIWRILFLVGAATGAHSFEEVQLVESGGGLVQPGGSLRLSCAASGFTFSTYGMAWVRQTPDRRLELVATINSNGGKTYHPDSVKGRFTISRDNSKNTLYLQMNSLRAEDTAVYYCTREGLDYWGQGTLVTVSSTREQKLISEEDLGSGIQNPDPAVYQLRDSKSSDKSVCLFTDFDSQTNVSQSKDSDVYITDKTVLDMRSMDFKSNSAVAWSNKSDFACANAFNNSIIPEDTFFPSPESSCGTQSFGLLDPKLCYLLDGILFIYGVILTALFLKRGRKKLLYIFKQPFMRPVQTTQEEDGCSCRFPEEEEGGCELRVKFSRSADAPAYQQGQNQLYNELNLGRREEYDVLDKRRGRDPEMGGKPQRRKNPQEGLYNELQKDKMAEAYSEIGMKGERRRGKGHDGLYQGLSTATKDTYDALHMQALPPR

SEQ ID NO: 11765 - protein, 815 aa, synthetic construct
MALPVTALLLPLALLLHAARPDIQMTQSPSSLSASVGDRVTITCRASQNVGTAVAWFQQKPGKAPKILIYSASNRYTGVPSRSTGSGSGTDFTLTISSLQPEDFATYYCQQYSTYPLTFGQGTKLEIKLEQSFGLLDPKLCYLLDGILFIYGVILTALFLRVKFSRSADAPAYQQGQNQLYNELNLGRREEYDVLDKRRGRDPEMGGKPQRRKNPQEGLYNELQKDKMAEAYSEIGMKGERRRGKGHDGLYQGLSTATKDTYDALHMQALPPRRAKRSGSGATNFSLLKQAGDVEENPGPTSMDWIWRILFLVGAATGAHSFEEVQLVESGGGLVQPGGSLRLSCAASGFTFSTYGMAWVRQTPDRRLELVATINSNGGKTYHPDSVKGRFTISRDNSKNTLYLQMNSLRAEDTAVYYCTREGLDYWGQGTLVTVSSTRQSFGLLDPKLCYLLDGILFIYGVILTALFLRVKFSRSADAPAYQQGQNQLYNELNLGRREEYDVLDKRRGRDPEMGGKPQRRKNPQEGLYNELQKDKMAEAYSEIGMKGERRRGKGHDGLYQGLSTATKDTYDALHMQALPPRRAKRSGSGVKQTLNFDLLKLAGDVESNPGPSRGHMTEYKPTVRLATRDDVPRAVRTLAAAFADYPATRHTVDPDRHIERVTELQELFLTRVGLDIGKVWVADDGAAVAVWTTPESVEAGAVFAEIGPRMAELSGSRLAAQQQMEGLLAPHRPKEPAWFLATVGVSPDHQGKGLGSAVVLPGVEAAERAGVPAFLETSAPRNLPFYERLGFTVTADVEVPEGPRTWCMTRKPGA

SEQ ID NO: 11766 - protein, 640 aa, synthetic construct
MALPVTALLLPLALLLHAARPDIQMTQSPSSLSASVGDRVTITCRASQNVGTAVAWFQQKPGKAPKILIYSASNRYTGVPSRSTGSGSGTDFTLTISSLQPEDFATYYCQQYSTYPLTFGQGTKLEIKLEGQPKANPTVTLFPPSSEELQANKATLVCLISDFYPGAVTVAWKADGSPVKAGVETTKPSKQSNNKYAASSYLSLTPEQWKSHRSYSCQVTHEGSTVEKTVAPTECSPIKTDVITMDPKDNCSKDANDTLLLQLTNTSAYYMYLLLLLKSVVYFAIITCCLLRRTAFCCNGEKSRAKRSGSGATNFSLLKQAGDVEENPGPTSMDWIWRILFLVGAATGAHSFEEVQLVESGGGLVQPGGSLRLSCAASGFTFSTYGMAWVRQTPDRRLELVATINSNGGKTYHPDSVKGRFTISRDNSKNTLYLQMNSLRAEDTAVYYCTREGLDYWGQGTLVTVSSTRASTKGPSVFPLAPSSKSTSGGTAALGCLVKDYFPEPVTVSWNSGALTSGVHTFPAVLQSSGLYSLSSVVTVPSSSLGTQTYICNVNHKPSNTKVDKRVEPKSCEVKTDSTDHVKPKETENTKQPSKSCHKPKAIVHTEKVNMMSLTVLGLRMLFAKTVAVNFLLTAKLFFL

SEQ ID NO: 11767 - protein, 618 aa, synthetic construct
MALPVTALLLPLALLLHAARPDIQMTQSPSSLSASVGDRVTITCRASQNVGTAVAWFQQKPGKAPKILIYSASNRYTGVPSRSTGSGSGTDFTLTISSLQPEDFATYYCQQYSTYPLTFGQGTKLEIKLEGQPKANPTVTLFPPSSEELQANKATLVCLISDFYPGAVTVAWKADGSPVKAGVETTKPSKQSNNKYAASSYLSLTPEQWKSHRSYSCQVTHEGSTVEKTVAPTECSGRADCGITSASYHQGVLSATILYEILLGKATLYAVLVSALVLMAMVKRKDSRGRAKRSGSGATNFSLLKQAGDVEENPGPTSMDWIWRILFLVGAATGAHSFEEVQLVESGGGLVQPGGSLRLSCAASGFTFSTYGMAWVRQTPDRRLELVATINSNGGKTYHPDSVKGRFTISRDNSKNTLYLQMNSLRAEDTAVYYCTREGLDYWGQGTLVTVSSTRASTKGPSVFPLAPSSKSTSGGTAALGCLVKDYFPEPVTVSWNSGALTSGVHTFPAVLQSSGLYSLSSVVTVPSSSLGTQTYICNVNHKPSNTKVDKRVEPKSCIPEDTFFPSSDVPCDVKLVEKSFETDTNLNFQNLSVIGFRILLLKVAGFNLLMTLRLWSS

SEQ ID NO: 11768 - protein, 618 aa, synthetic construct
MALPVTALLLPLALLLHAARPDIQMTQSPSSLSASVGDRVTITCRASQNVGTAVAWFQQKPGKAPKILIYSASNRYTGVPSRSTGSGSGTDFTLTISSLQPEDFATYYCQQYSTYPLTFGQGTKLEIKLEGQPKANPTVTLFPPSSEELQANKATLVCLISDFYPGAVTVAWKADGSPVKAGVETTKPSKQSNNKYAASSYLSLTPEQWKSHRSYSCQVTHEGSTVEKTVAPTECSGRADCGFTSESYQQGVLSATILYEILLGKATLYAVLVSALVLMAMVKRKDSRGRAKRSGSGATNFSLLKQAGDVEENPGPTSMDWIWRILFLVGAATGAHSFEEVQLVESGGGLVQPGGSLRLSCAASGFTFSTYGMAWVRQTPDRRLELVATINSNGGKTYHPDSVKGRFTISRDNSKNTLYLQMNSLRAEDTAVYYCTREGLDYWGQGTLVTVSSTRASTKGPSVFPLAPSSKSTSGGTAALGCLVKDYFPEPVTVSWNSGALTSGVHTFPAVLQSSGLYSLSSVVTVPSSSLGTQTYICNVNHKPSNTKVDKRVEPKSCIPEDTFFPSPESSCDVKLVEKSFETDTNLNFQNLSVIGFRILLLKVAGFNLLMTLRLWSS

SEQ ID NO: 11769 - protein, 444 aa, synthetic construct
MALPVTALLLPLALLLHAARPDIQMTQSPSSLSASVGDRVTITCRASQNVGTAVAWFQQKPGKAPKILIYSASNRYTGVPSRSTGSGSGTDFTLTISSLQPEDFATYYCQQYSTYPLTFGQGTKLEIKGGGGSGGGGSGGGGSEVQLVESGGGLVQPGGSLRLSCAASGFTFSTYGMAWVRQTPDRRLELVATINSNGGKTYHPDSVKGRFTISRDNSKNTLYLQMNSLRAEDTAVYYCTREGLDYWGQGTLVTVSSTRDGNEEMGGITQTPYKVSISGTTVILTCPQYPGSEILWQHNDKNIGGDEDDKNIGSDEDHLSLKEFSELEQSGYYVCYPRGSKPEDANFYLYLRARVCENCMEMDVMSVATIVIVDICITGGLLLLVYYWSKNRKAKAKPVTRGAGAGGRQRGQNKERPPPVPNPDYEPIRKGQRDLYSGLNQRRI

SEQ ID NO: 11770 - protein, 409 aa, synthetic construct
MALPVTALLLPLALLLHAARPDIQMTQSPSSLSASVGDRVTITCRASQNVGTAVAWFQQKPGKAPKILIYSASNRYTGVPSRSTGSGSGTDFTLTISSLQPEDFATYYCQQYSTYPLTFGQGTKLEIKGGGGSGGGGSGGGGSEVQLVESGGGLVQPGGSLRLSCAASGFTFSTYGMAWVRQTPDRRLELVATINSNGGKTYHPDSVKGRFTISRDNSKNTLYLQMNSLRAEDTAVYYCTREGLDYWGQGTLVTVSSTRFKIPIEELEDRVFVNCNTSITWVEGTVGTLLSDITRLDLGKRILDPRGIYRCNGTDIYKDKESTVQVHYRMCQSCVELDPATVAGIIVTDVIATLLLALGVFCFAGHETGRLSGAADTQALLRNDQVYQPLRDRDDAQYSHLGGNWARNK

SEQ ID NO: 11771 - protein, 419 aa, synthetic construct
MALPVTALLLPLALLLHAARPDIQMTQSPSSLSASVGDRVTITCRASQNVGTAVAWFQQKPGKAPKILIYSASNRYTGVPSRSTGSGSGTDFTLTISSLQPEDFATYYCQQYSTYPLTFGQGTKLEIKGGGGSGGGGSGGGGSEVQLVESGGGLVQPGGSLRLSCAASGFTFSTYGMAWVRQTPDRRLELVATINSNGGKTYHPDSVKGRFTISRDNSKNTLYLQMNSLRAEDTAVYYCTREGLDYWGQGTLVTVSSTRQSIKGNHLVKVYDYQEDGSVLLTCDAEAKNITWFKDGKMIGFLTEDKKKWNLGSNAKDPRGMYQCKGSQNKSKPLQVYYRMCQNCIELNAATISGFLFAEIVSIFVLAVGVYFIAGQDGVRQSRASDKQTLLPNDQLYQPLKDREDDQYSHLQGNQLRRN

SEQ ID NO: 11772 - protein, 402 aa, synthetic construct
MALPVTALLLPLALLLHAARPDIQMTQSPSSLSASVGDRVTITCRASQNVGTAVAWFQQKPGKAPKILIYSASNRYTGVPSRSTGSGSGTDFTLTISSLQPEDFATYYCQQYSTYPLTFGQGTKLEIKGGGGSGGGGSGGGGSEVQLVESGGGLVQPGGSLRLSCAASGFTFSTYGMAWVRQTPDRRLELVATINSNGGKTYHPDSVKGRFTISRDNSKNTLYLQMNSLRAEDTAVYYCTREGLDYWGQGTLVTVSSTRQSFGLLDPKLCYLLDGILFIYGVILTALFLRVKFSRSADAPAYQQGQNQLYNELNLGRREEYDVLDKRRGRDPEMGGKPQRRKNPQEGLYNELQKDKMAEAYSEIGMKGERRRGKGHDGLYQGLSTATKDTYDALHMQALPPR

SEQ ID NO: 11773 - protein, 444 aa, synthetic construct
MALPVTALLLPLALLLHAARPEVQLVESGGGLVQPGGSLRLSCAASGFTFSTYGMAWVRQTPDRRLELVATINSNGGKTYHPDSVKGRFTISRDNSKNTLYLQMNSLRAEDTAVYYCTREGLDYWGQGTLVTVSSGGGGSGGGGSGGGGSDIQMTQSPSSLSASVGDRVTITCRASQNVGTAVAWFQQKPGKAPKILIYSASNRYTGVPSRSTGSGSGTDFTLTISSLQPEDFATYYCQQYSTYPLTFGQGTKLEIKTRDGNEEMGGITQTPYKVSISGTTVILTCPQYPGSEILWQHNDKNIGGDEDDKNIGSDEDHLSLKEFSELEQSGYYVCYPRGSKPEDANFYLYLRARVCENCMEMDVMSVATIVIVDICITGGLLLLVYYWSKNRKAKAKPVTRGAGAGGRQRGQNKERPPPVPNPDYEPIRKGQRDLYSGLNQRRI

SEQ ID NO: 11774 - protein, 409 aa, synthetic construct
MALPVTALLLPLALLLHAARPEVQLVESGGGLVQPGGSLRLSCAASGFTFSTYGMAWVRQTPDRRLELVATINSNGGKTYHPDSVKGRFTISRDNSKNTLYLQMNSLRAEDTAVYYCTREGLDYWGQGTLVTVSSGGGGSGGGGSGGGGSDIQMTQSPSSLSASVGDRVTITCRASQNVGTAVAWFQQKPGKAPKILIYSASNRYTGVPSRSTGSGSGTDFTLTISSLQPEDFATYYCQQYSTYPLTFGQGTKLEIKTRFKIPIEELEDRVFVNCNTSITWVEGTVGTLLSDITRLDLGKRILDPRGIYRCNGTDIYKDKESTVQVHYRMCQSCVELDPATVAGIIVTDVIATLLLALGVFCFAGHETGRLSGAADTQALLRNDQVYQPLRDRDDAQYSHLGGNWARNK

SEQ ID NO: 11775 - protein, 419 aa, synthetic construct
MALPVTALLLPLALLLHAARPEVQLVESGGGLVQPGGSLRLSCAASGFTFSTYGMAWVRQTPDRRLELVATINSNGGKTYHPDSVKGRFTISRDNSKNTLYLQMNSLRAEDTAVYYCTREGLDYWGQGTLVTVSSGGGGSGGGGSGGGGSDIQMTQSPSSLSASVGDRVTITCRASQNVGTAVAWFQQKPGKAPKILIYSASNRYTGVPSRSTGSGSGTDFTLTISSLQPEDFATYYCQQYSTYPLTFGQGTKLEIKTRQSIKGNHLVKVYDYQEDGSVLLTCDAEAKNITWFKDGKMIGFLTEDKKKWNLGSNAKDPRGMYQCKGSQNKSKPLQVYYRMCQNCIELNAATISGFLFAEIVSIFVLAVGVYFIAGQDGVRQSRASDKQTLLPNDQLYQPLKDREDDQYSHLQGNQLRRN

SEQ ID NO: 11776 - protein, 402 aa, synthetic construct
MALPVTALLLPLALLLHAARPEVQLVESGGGLVQPGGSLRLSCAASGFTFSTYGMAWVRQTPDRRLELVATINSNGGKTYHPDSVKGRFTISRDNSKNTLYLQMNSLRAEDTAVYYCTREGLDYWGQGTLVTVSSGGGGSGGGGSGGGGSDIQMTQSPSSLSASVGDRVTITCRASQNVGTAVAWFQQKPGKAPKILIYSASNRYTGVPSRSTGSGSGTDFTLTISSLQPEDFATYYCQQYSTYPLTFGQGTKLEIKTRQSFGLLDPKLCYLLDGILFIYGVILTALFLRVKFSRSADAPAYQQGQNQLYNELNLGRREEYDVLDKRRGRDPEMGGKPQRRKNPQEGLYNELQKDKMAEAYSEIGMKGERRRGKGHDGLYQGLSTATKDTYDALHMQALPPR

SEQ ID NO: 11777 - protein, 497 aa, synthetic construct
MALPVTALLLPLALLLHAARPDIQMTQSPSSLSASVGDRVTITCRASQNVGTAVAWFQQKPGKAPKILIYSASNRYTGVPSRSTGSGSGTDFTLTISSLQPEDFATYYCQQYSTYPLTFGQGTKLEIKGGGGSGGGGSGGGGSEVQLVESGGGLVQPGGSLRLSCAASGFTFSTYGMAWVRQTPDRRLELVATINSNGGKTYHPDSVKGRFTISRDNSKNTLYLQMNSLRAEDTAVYYCTREGLDYWGQGTLVTVSSTRGMRTEDLPKAVVFLEPQWYRVLEKDSVTLKCQGAYSPEDNSTQWFHNESLISSQASSYFIDAATVDDSGEYRCQTNLSTLSDPVQLEVHIGWLLLQAPRWVFKEEDPIHLRCHSWKNTALHKVTYLQNGKGRKYFHHNSDFYIPKATLKDSGSYFCRGLVGSKNVSSETVNITITQGLAVPTISSFFPPGYQVSFCLVMVLLFAVDTGLYFSVKTNIRSSTRDWKDHKFKWRKDPQDK

SEQ ID NO: 11778 - protein, 779 aa, synthetic construct
MALPVTALLLPLALLLHAARPDIQMTQSPSSLSASVGDRVTITCRASQNVGTAVAWFQQKPGKAPKILIYSASNRYTGVPSRSTGSGSGTDFTLTISSLQPEDFATYYCQQYSTYPLTFGQGTKLEIKGGGGSGGGGSGGGGSEVQLVESGGGLVQPGGSLRLSCAASGFTFSTYGMAWVRQTPDRRLELVATINSNGGKTYHPDSVKGRFTISRDNSKNTLYLQMNSLRAEDTAVYYCTREGLDYWGQGTLVTVSSTRGGSGQQQTLPKPFIWAEPHFMVPKEKQVTICCQGNYGAVEYQLHFEGSLFAVDRPKPPERINKVQFYIPDMNSRMAGQYSCIYRVGELWSEPSNLLDLVVTEMYDTPTLSVHPGPEVISGEKVTFYCRLDTATSMFLLLKEGRSSHVQRGYGKVQAEFPLGPVTTAHRGTYRCFGSYNNHAWSFPSEPVKLLVTGDIENTSLAPEDPTFPADTWGTYLLTTETGLQKDHALWDHTAQNLLRMGLAFLVLVALVWFLVEDWLSRKRTRERASRASTWEGRRRLNTQTLRAKRSGSGVKQTLNFDLLKLAGDVESNPGPSRGHMTEYKPTVRLATRDDVPRAVRTLAAAFADYPATRHTVDPDRHIERVTELQELFLTRVGLDIGKVWVADDGAAVAVWTTPESVEAGAVFAEIGPRMAELSGSRLAAQQQMEGLLAPHRPKEPAWFLATVGVSPDHQGKGLGSAVVLPGVEAAERAGVPAFLETSAPRNLPFYERLGFTVTADVEVPEGPRTWCMTRKPGA

SEQ ID NO: 11779 - protein, 612 aa, synthetic construct
MALPVTALLLPLALLLHAARPDIQMTQSPSSLSASVGDRVTITCRASQNVGTAVAWFQQKPGKAPKILIYSASNRYTGVPSRSTGSGSGTDFTLTISSLQPEDFATYYCQQYSTYPLTFGQGTKLEIKGGGGSGGGGSGGGGSEVQLVESGGGLVQPGGSLRLSCAASGFTFSTYGMAWVRQTPDRRLELVATINSNGGKTYHPDSVKGRFTISRDNSKNTLYLQMNSLRAEDTAVYYCTREGLDYWGQGTLVTVSSTRKIEVMYPPPYLDNEKSNGTIIHVKGARGDIENTSLAPEDPTFPADTWGTYLLTTETGLQKDHALWDHTAQNLLRMGLAFLVLVALVWFLVEDWLSRKRTRERASRASTWEGRRRLNTQTLRAKRSGSGVKQTLNFDLLKLAGDVESNPGPSRGHMTEYKPTVRLATRDDVPRAVRTLAAAFADYPATRHTVDPDRHIERVTELQELFLTRVGLDIGKVWVADDGAAVAVWTTPESVEAGAVFAEIGPRMAELSGSRLAAQQQMEGLLAPHRPKEPAWFLATVGVSPDHQGKGLGSAVVLPGVEAAERAGVPAFLETSAPRNLPFYERLGFTVTADVEVPEGPRTWCMTRKPGA

SEQ ID NO: 11780 - protein, 699 aa, synthetic construct
MALPVTALLLPLALLLHAARPDIQMTQSPSSLSASVGDRVTITCRASQNVGTAVAWFQQKPGKAPKILIYSASNRYTGVPSRSTGSGSGTDFTLTISSLQPEDFATYYCQQYSTYPLTFGQGTKLEIKGGGGSGGGGSGGGGSEVQLVESGGGLVQPGGSLRLSCAASGFTFSTYGMAWVRQTPDRRLELVATINSNGGKTYHPDSVKGRFTISRDNSKNTLYLQMNSLRAEDTAVYYCTREGLDYWGQGTLVTVSSTRLWVSQPPEIRTLEGSSAFLPCSFNASQGRLAIGSVTWFRDEVVPGKEVRNGTPEFRGRLAPLASSRFLHDHQAELHIRDVRGHDASIYVCRVEVLGLGVGTGNGTRLVVEKEHPQLGAGTVLLLRAGFYAVSFLSVAVGSTVYYQGKCLTWKGPRRQLPAVVPAPLPPPCGSSAHLLPPVPGGRAKRSGSGVKQTLNFDLLKLAGDVESNPGPSRMYRMQLLSCIALSLALVTNSAPTSSSTKKTQLQLEHLLLDLQMILNGINNYKNPKLTEMLTAKFYMPKKATELKHLQCLEEELKPLEEVLNLAQSKNFHLRPRDLISNINVIVLELKGSETTFMCEYADETATIVEFLNRWITFCQSIISTLTKIEVMYPPPYLDNEKSNGTIIHVKGKHLCPSPLFPGPSKPFWVLVVVGGVLACYSLLVTVAFIIFWVRSKRS

SEQ ID NO: 11781 - protein, 675 aa, synthetic construct
MALPVTALLLPLALLLHAARPDIQMTQSPSSLSASVGDRVTITCRASQNVGTAVAWFQQKPGKAPKILIYSASNRYTGVPSRSTGSGSGTDFTLTISSLQPEDFATYYCQQYSTYPLTFGQGTKLEIKGGGGSGGGGSGGGGSEVQLVESGGGLVQPGGSLRLSCAASGFTFSTYGMAWVRQTPDRRLELVATINSNGGKTYHPDSVKGRFTISRDNSKNTLYLQMNSLRAEDTAVYYCTREGLDYWGQGTLVTVSSTRLWVSQPPEIRTLEGSSAFLPCSFNASQGRLAIGSVTWFRDEVVPGKEVRNGTPEFRGRLAPLASSRFLHDHQAELHIRDVRGHDASIYVCRVEVLGLGVGTGNGTRLVVEKEHPQLGAGTVLLLRAGFYAVSFLSVAVGSTVYYQGKCLTWKGPRRQLPAVVPAPLPPPCGSSAHLLPPVPGGRAKRSGSGVKQTLNFDLLKLAGDVESNPGPSRGHMTEYKPTVRLATRDDVPRAVRTLAAAFADYPATRHTVDPDRHIERVTELQELFLTRVGLDIGKVWVADDGAAVAVWTTPESVEAGAVFAEIGPRMAELSGSRLAAQQQMEGLLAPHRPKEPAWFLATVGVSPDHQGKGLGSAVVLPGVEAAERAGVPAFLETSAPRNLPFYERLGFTVTADVEVPEGPRTWCMTRKPGA

SEQ ID NO: 11782 - protein, 351 aa, synthetic construct
MALPVTALLLPLALLLHAARPDIQMTQSPSSLSASVGDRVTITCRASQNVGTAVAWFQQKPGKAPKILIYSASNRYTGVPSRSTGSGSGTDFTLTISSLQPEDFATYYCQQYSTYPLTFGQGTKLEIKGGGGSGGGGSGGGGSEVQLVESGGGLVQPGGSLRLSCAASGFTFSTYGMAWVRQTPDRRLELVATINSNGGKTYHPDSVKGRFTISRDNSKNTLYLQMNSLRAEDTAVYYCTREGLDYWGQGTLVTVSSTRKIEVMYPPPYLDNEKSNGTIIHVKGARITQGLAVSTISSFFPPGYQVSFCLVMVLLFAVDTGLYFSVKTNIRSSTRDWKDHKFKWRKDPQDK

SEQ ID NO: 11783 - protein, 351 aa, synthetic construct
MALPVTALLLPLALLLHAARPDIQMTQSPSSLSASVGDRVTITCRASQNVGTAVAWFQQKPGKAPKILIYSASNRYTGVPSRSTGSGSGTDFTLTISSLQPEDFATYYCQQYSTYPLTFGQGTKLEIKGGGGSGGGGSGGGGSEVQLVESGGGLVQPGGSLRLSCAASGFTFSTYGMAWVRQTPDRRLELVATINSNGGKTYHPDSVKGRFTISRDNSKNTLYLQMNSLRAEDTAVYYCTREGLDYWGQGTLVTVSSTRKIEVMYPPPYLDNEKSNGTIIHVKGARITQGLAVPTISSFFPPGYQVSFCLVMVLLFAVDTGLYFSVKTNIRSSTRDWKDHKFKWRKDPQDK

SEQ ID NO: 11784 - protein, 330 aa, synthetic construct
MALPVTALLLPLALLLHAARPDIQMTQSPSSLSASVGDRVTITCRASQNVGTAVAWFQQKPGKAPKILIYSASNRYTGVPSRSTGSGSGTDFTLTISSLQPEDFATYYCQQYSTYPLTFGQGTKLEIKGGGGSGGGGSGGGGSEVQLVESGGGLVQPGGSLRLSCAASGFTFSTYGMAWVRQTPDRRLELVATINSNGGKTYHPDSVKGRFTISRDNSKNTLYLQMNSLRAEDTAVYYCTREGLDYWGQGTLVTVSSTRKIEVMYPPPYLDNEKSNGTIIHVKGARITQGLAVSTISSFSPPGYQVSFCLVMVLLFAVDTGLYFSVKTNI

SEQ ID NO: 11785 - protein, 361 aa, synthetic construct
MALPVTALLLPLALLLHAARPDIQMTQSPSSLSASVGDRVTITCRASQNVGTAVAWFQQKPGKAPKILIYSASNRYTGVPSRSTGSGSGTDFTLTISSLQPEDFATYYCQQYSTYPLTFGQGTKLEIKGGGGSGGGGSGGGGSEVQLVESGGGLVQPGGSLRLSCAASGFTFSTYGMAWVRQTPDRRLELVATINSNGGKTYHPDSVKGRFTISRDNSKNTLYLQMNSLRAEDTAVYYCTREGLDYWGQGTLVTVSSTRKIEVMYPPPYLDNEKSNGTIIHVKGARVEKEHPQLGAGTVLLLRAGFYAVSFLSVAVGSTVYYQGKCLTWKGPRRQLPAVVPAPLPPPCGSSAHLLPPVPGG

SEQ ID NO: 11786 - protein, 442 aa, synthetic construct
MALPVTALLLPLALLLHAARPDIQMTQSPSSLSASVGDRVTITCRASQNVGTAVAWFQQKPGKAPKILIYSASNRYTGVPSRSTGSGSGTDFTLTISSLQPEDFATYYCQQYSTYPLTFGQGTKLEIKGGGGSGGGGSGGGGSEVQLVESGGGLVQPGGSLRLSCAASGFTFSTYGMAWVRQTPDRRLELVATINSNGGKTYHPDSVKGRFTISRDNSKNTLYLQMNSLRAEDTAVYYCTREGLDYWGQGTLVTVSSTRKIEVMYPPPYLDNEKSNGTIIHVKGARKSVRFYLVVSPASASTQTSWTPRDLVSSQTQTQSCVPPTAGARQAPESPSTIPVPSQPQNSTLRPGPAAPIALVPVFCGLLVAKSLVLSALLVWWGDIWWKTMMELRSLDTQKATCHLQQVTDLPWTSVSSPVEREILYHTVARTKISDDDDEHTL

SEQ ID NO: 11787 - protein, 379 aa, synthetic construct
MALPVTALLLPLALLLHAARPDIQMTQSPSSLSASVGDRVTITCRASQNVGTAVAWFQQKPGKAPKILIYSASNRYTGVPSRSTGSGSGTDFTLTISSLQPEDFATYYCQQYSTYPLTFGQGTKLEIKGGGGSGGGGSGGGGSEVQLVESGGGLVQPGGSLRLSCAASGFTFSTYGMAWVRQTPDRRLELVATINSNGGKTYHPDSVKGRFTISRDNSKNTLYLQMNSLRAEDTAVYYCTREGLDYWGQGTLVTVSSTRKIEVMYPPPYLDNEKSNGTIIHVKGARGDIENTSLAPEDPTFPADTWGTYLLTTETGLQKDHALWDHTAQNLLRMGLAFLVLVALVWFLVEDWLSRKRTRERASRASTWEGRRRLNTQTL

SEQ ID NO: 11788 - protein, 975 aa, synthetic construct
MALPVTALLLPLALLLHAARPDIQMTQSPSSLSASVGDRVTITCRASQNVGTAVAWFQQKPGKAPKILIYSASNRYTGVPSRSTGSGSGTDFTLTISSLQPEDFATYYCQQYSTYPLTFGQGTKLEIKLEGQPKANPTVTLFPPSSEELQANKATLVCLISDFYPGAVTVAWKADGSPVKAGVETTKPSKQSNNKYAASSYLSLTPEQWKSHRSYSCQVTHEGSTVEKTVAPTECSGSQSFGLLDPKLCYLLDGILFIYGVILTALFLRVKFSRSADAPAYQQGQNQLYNELNLGRREEYDVLDKRRGRDPEMGGKPQRRKNPQEGLYNELQKDKMAEAYSEIGMKGERRRGKGHDGLYQGLSTATKDTYDALHMQALPPRRAKRSGSGATNFSLLKQAGDVEENPGPTSMDWIWRILFLVGAATGAHSFEEVQLVESGGGLVQPGGSLRLSCAASGFTFSTYGMAWVRQTPDRRLELVATINSNGGKTYHPDSVKGRFTISRDNSKNTLYLQMNSLRAEDTAVYYCTREGLDYWGQGTLVTVSSTRASTKGPSVFPLAPSSKSTSGGTAALGCLVKDYFPEPVTVSWNSGALTSGVHTFPAVLQSSGLYSLSSVVTVPSSSLGTQTYICNVNHKPSNTKVDKRVEPKSCGTGDIENTSLAPEDPTFPADTWGTYLLTTETGLQKDHALWDHTAQNLLRMGLAFLVLVALVWFLVEDWLSRKRTRERASRASTWEGRRRLNTQTLRAKRSGSGATNFSLLKQAGDVEENPGPSRGHMTEYKPTVRLATRDDVPRAVRTLAAAFADYPATRHTVDPDRHIERVTELQELFLTRVGLDIGKVWVADDGAAVAVWTTPESVEAGAVFAEIGPRMAELSGSRLAAQQQMEGLLAPHRPKEPAWFLATVGVSPDHQGKGLGSAVVLPGVEAAERAGVPAFLETSAPRNLPFYERLGFTVTADVEVPEGPRTWCMTRKPGA

SEQ ID NO: 11789 - protein, 1041 aa, synthetic construct
MALPVTALLLPLALLLHAARPDIQMTQSPSSLSASVGDRVTITCRASQNVGTAVAWFQQKPGKAPKILIYSASNRYTGVPSRSTGSGSGTDFTLTISSLQPEDFATYYCQQYSTYPLTFGQGTKLEIKLEGQPKANPTVTLFPPSSEELQANKATLVCLISDFYPGAVTVAWKADGSPVKAGVETTKPSKQSNNKYAASSYLSLTPEQWKSHRSYSCQVTHEGSTVEKTVAPTECSGSQSFGLLDPKLCYLLDGILFIYGVILTALFLRVKFSRSADAPAYQQGQNQLYNELNLGRREEYDVLDKRRGRDPEMGGKPQRRKNPQEGLYNELQKDKMAEAYSEIGMKGERRRGKGHDGLYQGLSTATKDTYDALHMQALPPRRAKRSGSGATNFSLLKQAGDVEENPGPTSMDWIWRILFLVGAATGAHSFEEVQLVESGGGLVQPGGSLRLSCAASGFTFSTYGMAWVRQTPDRRLELVATINSNGGKTYHPDSVKGRFTISRDNSKNTLYLQMNSLRAEDTAVYYCTREGLDYWGQGTLVTVSSTRASTKGPSVFPLAPSSKSTSGGTAALGCLVKDYFPEPVTVSWNSGALTSGVHTFPAVLQSSGLYSLSSVVTVPSSSLGTQTYICNVNHKPSNTKVDKRVEPKSCGTKSVRFYLVVSPASASTQTSWTPRDLVSSQTQTQSCVPPTAGARQAPESPSTIPVPSQPQNSTLRPGPAAPIALVPVFCGLLVAKSLVLSALLVWWGDIWWKTMMELRSLDTQKATCHLQQVTDLPWTSVSSPVEREILYHTVARTKISDDDDEHTLRAKRSGSGVKQTLNFDLLKLAGDVESNPGPSRGHMTEYKPTVRLATRDDVPRAVRTLAAAFADYPATRHTVDPDRHIERVTELQELFLTRVGLDIGKVWVADDGAAVAVWTTPESVEAGAVFAEIGPRMAELSGSRLAAQQQMEGLLAPHRPKEPAWFLATVGVSPDHQGKGLGSAVVLPGVEAAERAGVPAFLETSAPRNLPFYERLGFTVTADVEVPEGPRTWCMTRKPGA

SEQ ID NO: 11790 - protein, 961 aa, synthetic construct
MALPVTALLLPLALLLHAARPDIQMTQSPSSLSASVGDRVTITCRASQNVGTAVAWFQQKPGKAPKILIYSASNRYTGVPSRSTGSGSGTDFTLTISSLQPEDFATYYCQQYSTYPLTFGQGTKLEIKLEGQPKANPTVTLFPPSSEELQANKATLVCLISDFYPGAVTVAWKADGSPVKAGVETTKPSKQSNNKYAASSYLSLTPEQWKSHRSYSCQVTHEGSTVEKTVAPTECSGSQSFGLLDPKLCYLLDGILFIYGVILTALFLRVKFSRSADAPAYQQGQNQLYNELNLGRREEYDVLDKRRGRDPEMGGKPQRRKNPQEGLYNELQKDKMAEAYSEIGMKGERRRGKGHDGLYQGLSTATKDTYDALHMQALPPRRAKRSGSGATNFSLLKQAGDVEENPGPTSMDWIWRILFLVGAATGAHSFEEVQLVESGGGLVQPGGSLRLSCAASGFTFSTYGMAWVRQTPDRRLELVATINSNGGKTYHPDSVKGRFTISRDNSKNTLYLQMNSLRAEDTAVYYCTREGLDYWGQGTLVTVSSTRASTKGPSVFPLAPSSKSTSGGTAALGCLVKDYFPEPVTVSWNSGALTSGVHTFPAVLQSSGLYSLSSVVTVPSSSLGTQTYICNVNHKPSNTKVDKRVEPKSCGTVVEKEHPQLGAGTVLLLRAGFYAVSFLSVAVGSTVYYQGKCLTWKGPRRQLPAVVPAPLPPPCGSSAHLLPPVPGGRAKRSGSGVKQTLNFDLLKLAGDVESNPGPSRGHMTEYKPTVRLATRDDVPRAVRTLAAAFADYPATRHTVDPDRHIERVTELQELFLTRVGLDIGKVWVADDGAAVAVWTTPESVEAGAVFAEIGPRMAELSGSRLAAQQQMEGLLAPHRPKEPAWFLATVGVSPDHQGKGLGSAVVLPGVEAAERAGVPAFLETSAPRNLPFYERLGFTVTADVEVPEGPRTWCMTRKPGA

SEQ ID NO: 11791 - protein, 990 aa, synthetic construct
MALPVTALLLPLALLLHAARPDIQMTQSPSSLSASVGDRVTITCRASQNVGTAVAWFQQKPGKAPKILIYSASNRYTGVPSRSTGSGSGTDFTLTISSLQPEDFATYYCQQYSTYPLTFGQGTKLEIKLEDLKNVFPPEVAVFEPSEAEISHTQKATLVCLATGFYPDHVELSWWVNGKEVHSGVSTDPQPLKEQPALNDSRYCLSSRLRVSATFWQNPRNHFRCQVQFYGLSENDEWTQDRAKPVTQIVSAEAWGRADCGSQSFGLLDPKLCYLLDGILFIYGVILTALFLRVKFSRSADAPAYQQGQNQLYNELNLGRREEYDVLDKRRGRDPEMGGKPQRRKNPQEGLYNELQKDKMAEAYSEIGMKGERRRGKGHDGLYQGLSTATKDTYDALHMQALPPRRAKRSGSGATNFSLLKQAGDVEENPGPTSMDWIWRILFLVGAATGAHSFEEVQLVESGGGLVQPGGSLRLSCAASGFTFSTYGMAWVRQTPDRRLELVATINSNGGKTYHPDSVKGRFTISRDNSKNTLYLQMNSLRAEDTAVYYCTREGLDYWGQGTLVTVSSTRIQNPDPAVYQLRDSKSSDKSVCLFTDFDSQTNVSQSKDSDVYITDKTVLDMRSMDFKSNSAVAWSNKSDFACANAFNNSIIPEDTFFPSPESSCGTGDIENTSLAPEDPTFPADTWGTYLLTTETGLQKDHALWDHTAQNLLRMGLAFLVLVALVWFLVEDWLSRKRTRERASRASTWEGRRRLNTQTLRAKRSGSGATNFSLLKQAGDVEENPGPSRGHMTEYKPTVRLATRDDVPRAVRTLAAAFADYPATRHTVDPDRHIERVTELQELFLTRVGLDIGKVWVADDGAAVAVWTTPESVEAGAVFAEIGPRMAELSGSRLAAQQQMEGLLAPHRPKEPAWFLATVGVSPDHQGKGLGSAVVLPGVEAAERAGVPAFLETSAPRNLPFYERLGFTVTADVEVPEGPRTWCMTRKPGA

SEQ ID NO: 11792 - protein, 1056 aa, synthetic construct
MALPVTALLLPLALLLHAARPDIQMTQSPSSLSASVGDRVTITCRASQNVGTAVAWFQQKPGKAPKILIYSASNRYTGVPSRSTGSGSGTDFTLTISSLQPEDFATYYCQQYSTYPLTFGQGTKLEIKLEDLKNVFPPEVAVFEPSEAEISHTQKATLVCLATGFYPDHVELSWWVNGKEVHSGVSTDPQPLKEQPALNDSRYCLSSRLRVSATFWQNPRNHFRCQVQFYGLSENDEWTQDRAKPVTQIVSAEAWGRADCGSQSFGLLDPKLCYLLDGILFIYGVILTALFLRVKFSRSADAPAYQQGQNQLYNELNLGRREEYDVLDKRRGRDPEMGGKPQRRKNPQEGLYNELQKDKMAEAYSEIGMKGERRRGKGHDGLYQGLSTATKDTYDALHMQALPPRRAKRSGSGATNFSLLKQAGDVEENPGPTSMDWIWRILFLVGAATGAHSFEEVQLVESGGGLVQPGGSLRLSCAASGFTFSTYGMAWVRQTPDRRLELVATINSNGGKTYHPDSVKGRFTISRDNSKNTLYLQMNSLRAEDTAVYYCTREGLDYWGQGTLVTVSSTRIQNPDPAVYQLRDSKSSDKSVCLFTDFDSQTNVSQSKDSDVYITDKTVLDMRSMDFKSNSAVAWSNKSDFACANAFNNSIIPEDTFFPSPESSCGTKSVRFYLVVSPASASTQTSWTPRDLVSSQTQTQSCVPPTAGARQAPESPSTIPVPSQPQNSTLRPGPAAPIALVPVFCGLLVAKSLVLSALLVWWGDIWWKTMMELRSLDTQKATCHLQQVTDLPWTSVSSPVEREILYHTVARTKISDDDDEHTLRAKRSGSGVKQTLNFDLLKLAGDVESNPGPSRGHMTEYKPTVRLATRDDVPRAVRTLAAAFADYPATRHTVDPDRHIERVTELQELFLTRVGLDIGKVWVADDGAAVAVWTTPESVEAGAVFAEIGPRMAELSGSRLAAQQQMEGLLAPHRPKEPAWFLATVGVSPDHQGKGLGSAVVLPGVEAAERAGVPAFLETSAPRNLPFYERLGFTVTADVEVPEGPRTWCMTRKPGA

SEQ ID NO: 11793 - protein, 976 aa, synthetic construct
MALPVTALLLPLALLLHAARPDIQMTQSPSSLSASVGDRVTITCRASQNVGTAVAWFQQKPGKAPKILIYSASNRYTGVPSRSTGSGSGTDFTLTISSLQPEDFATYYCQQYSTYPLTFGQGTKLEIKLEDLKNVFPPEVAVFEPSEAEISHTQKATLVCLATGFYPDHVELSWWVNGKEVHSGVSTDPQPLKEQPALNDSRYCLSSRLRVSATFWQNPRNHFRCQVQFYGLSENDEWTQDRAKPVTQIVSAEAWGRADCGSQSFGLLDPKLCYLLDGILFIYGVILTALFLRVKFSRSADAPAYQQGQNQLYNELNLGRREEYDVLDKRRGRDPEMGGKPQRRKNPQEGLYNELQKDKMAEAYSEIGMKGERRRGKGHDGLYQGLSTATKDTYDALHMQALPPRRAKRSGSGATNFSLLKQAGDVEENPGPTSMDWIWRILFLVGAATGAHSFEEVQLVESGGGLVQPGGSLRLSCAASGFTFSTYGMAWVRQTPDRRLELVATINSNGGKTYHPDSVKGRFTISRDNSKNTLYLQMNSLRAEDTAVYYCTREGLDYWGQGTLVTVSSTRIQNPDPAVYQLRDSKSSDKSVCLFTDFDSQTNVSQSKDSDVYITDKTVLDMRSMDFKSNSAVAWSNKSDFACANAFNNSIIPEDTFFPSPESSCGTVVEKEHPQLGAGTVLLLRAGFYAVSFLSVAVGSTVYYQGKCLTWKGPRRQLPAVVPAPLPPPCGSSAHLLPPVPGGRAKRSGSGVKQTLNFDLLKLAGDVESNPGPSRGHMTEYKPTVRLATRDDVPRAVRTLAAAFADYPATRHTVDPDRHIERVTELQELFLTRVGLDIGKVWVADDGAAVAVWTTPESVEAGAVFAEIGPRMAELSGSRLAAQQQMEGLLAPHRPKEPAWFLATVGVSPDHQGKGLGSAVVLPGVEAAERAGVPAFLETSAPRNLPFYERLGFTVTADVEVPEGPRTWCMTRKPGA

SEQ ID NO: 11794 - protein, 947 aa, synthetic construct
MALPVTALLLPLALLLHAARPDIQMTQSPSSLSASVGDRVTITCRASQNVGTAVAWFQQKPGKAPKILIYSASNRYTGVPSRSTGSGSGTDFTLTISSLQPEDFATYYCQQYSTYPLTFGQGTKLEIKLEGQPKANPTVTLFPPSSEELQANKATLVCLISDFYPGAVTVAWKADGSPVKAGVETTKPSKQSNNKYAASSYLSLTPEQWKSHRSYSCQVTHEGSTVEKTVAPTECSGSQSFGLLDPKLCYLLDGILFIYGVILTALFLRVKFSRSADAPAYQQGQNQLYNELNLGRREEYDVLDKRRGRDPEMGGKPQRRKNPQEGLYNELQKDKMAEAYSEIGMKGERRRGKGHDGLYQGLSTATKDTYDALHMQALPPRRAKRSGSGATNFSLLKQAGDVEENPGPTSMDWIWRILFLVGAATGAHSFEEVQLVESGGGLVQPGGSLRLSCAASGFTFSTYGMAWVRQTPDRRLELVATINSNGGKTYHPDSVKGRFTISRDNSKNTLYLQMNSLRAEDTAVYYCTREGLDYWGQGTLVTVSSTRASTKGPSVFPLAPSSKSTSGGTAALGCLVKDYFPEPVTVSWNSGALTSGVHTFPAVLQSSGLYSLSSVVTVPSSSLGTQTYICNVNHKPSNTKVDKRVEPKSCGTITQGLAVSTISSFFPPGYQVSFCLVMVLLFAVDTGLYFSVKTNIRSSTRDWKDHKFKWRKDPQDKRAKRSGSGATNFSLLKQAGDVEENPGPSRGHMTEYKPTVRLATRDDVPRAVRTLAAAFADYPATRHTVDPDRHIERVTELQELFLTRVGLDIGKVWVADDGAAVAVWTTPESVEAGAVFAEIGPRMAELSGSRLAAQQQMEGLLAPHRPKEPAWFLATVGVSPDHQGKGLGSAVVLPGVEAAERAGVPAFLETSAPRNLPFYERLGFTVTADVEVPEGPRTWCMTRKPGA

SEQ ID NO: 11795 - protein, 962 aa, synthetic construct
MALPVTALLLPLALLLHAARPDIQMTQSPSSLSASVGDRVTITCRASQNVGTAVAWFQQKPGKAPKILIYSASNRYTGVPSRSTGSGSGTDFTLTISSLQPEDFATYYCQQYSTYPLTFGQGTKLEIKLEDLKNVFPPEVAVFEPSEAEISHTQKATLVCLATGFYPDHVELSWWVNGKEVHSGVSTDPQPLKEQPALNDSRYCLSSRLRVSATFWQNPRNHFRCQVQFYGLSENDEWTQDRAKPVTQIVSAEAWGRADCGSQSFGLLDPKLCYLLDGILFIYGVILTALFLRVKFSRSADAPAYQQGQNQLYNELNLGRREEYDVLDKRRGRDPEMGGKPQRRKNPQEGLYNELQKDKMAEAYSEIGMKGERRRGKGHDGLYQGLSTATKDTYDALHMQALPPRRAKRSGSGATNFSLLKQAGDVEENPGPTSMDWIWRILFLVGAATGAHSFEEVQLVESGGGLVQPGGSLRLSCAASGFTFSTYGMAWVRQTPDRRLELVATINSNGGKTYHPDSVKGRFTISRDNSKNTLYLQMNSLRAEDTAVYYCTREGLDYWGQGTLVTVSSTRIQNPDPAVYQLRDSKSSDKSVCLFTDFDSQTNVSQSKDSDVYITDKTVLDMRSMDFKSNSAVAWSNKSDFACANAFNNSIIPEDTFFPSPESSCGTITQGLAVSTISSFFPPGYQVSFCLVMVLLFAVDTGLYFSVKTNIRSSTRDWKDHKFKWRKDPQDKRAKRSGSGATNFSLLKQAGDVEENPGPSRGHMTEYKPTVRLATRDDVPRAVRTLAAAFADYPATRHTVDPDRHIERVTELQELFLTRVGLDIGKVWVADDGAAVAVWTTPESVEAGAVFAEIGPRMAELSGSRLAAQQQMEGLLAPHRPKEPAWFLATVGVSPDHQGKGLGSAVVLPGVEAAERAGVPAFLETSAPRNLPFYERLGFTVTADVEVPEGPRTWCMTRKPGA

SEQ ID NO: 11796 - protein, 645 aa, synthetic construct
MALPVTALLLPLALLLHAARPDIQMTQSPSSLSASVGDRVTITCRASQNVGTAVAWFQQKPGKAPKILIYSASNRYTGVPSRSTGSGSGTDFTLTISSLQPEDFATYYCQQYSTYPLTFGQGTKLEIKLEGQPKANPTVTLFPPSSEELQANKATLVCLISDFYPGAVTVAWKADGSPVKAGVETTKPSKQSNNKYAASSYLSLTPEQWKSHRSYSCQVTHEGSTVEKTVAPTECSGSLGEPQLCYILDAILFLYGIVLTLLYCRLKIQVRKAAITSYEKSDGVYTGLSTRNQETYETLKHEKPPQRAKRSGSGATNFSLLKQAGDVEENPGPTSMDWIWRILFLVGAATGAHSFEEVQLVESGGGLVQPGGSLRLSCAASGFTFSTYGMAWVRQTPDRRLELVATINSNGGKTYHPDSVKGRFTISRDNSKNTLYLQMNSLRAEDTAVYYCTREGLDYWGQGTLVTVSSTRASTKGPSVFPLAPSSKSTSGGTAALGCLVKDYFPEPVTVSWNSGALTSGVHTFPAVLQSSGLYSLSSVVTVPSSSLGTQTYICNVNHKPSNTKVDKRVEPKSCGTLGEPQLCYILDAILFLYGIVLTLLYCRLKIQVRKAAITSYEKSDGVYTGLSTRNQETYETLKHEKPPQ

SEQ ID NO: 11797 - protein, 489 aa, synthetic construct
MALPVTALLLPLALLLHAARPDIVLTQSQKFMSTSVGDRVSIICRASQSVGTAVAWYQLKAGQSPKLLIYSASNRFTGVPDRFTGSGSGTDFTLTISNVQSEDLADYFCQQYSTYPLAFGAGTKLELKGGGGSGGGGSGGGGSEVQLVESGGGIVQPGGSLKLSCAASGFTFNDFGMSWIRQTPDKRLELVATINTNGGTTHYPDSVKGRFSISRDNAKKFVYLQMSSLKSDDTAIYYCPREGLDYWGQGTTLTVSSTREQKLISEEDLKIEVMYPPPYLDNEKSNGTIIHVKGKHLCPSPLFPGPSKPFWVLVVVGGVLACYSLLVTVAFIIFWVRSKRSRLLHSDYMNMTPRRPGPTRKHYQPYAPPRDFAAYRSRVKFSRSADAPAYQQGQNQLYNELNLGRREEYDVLDKRRGRDPEMGGKPRRKNPQEGLYNELQKDKMAEAYSEIGMKGERRRGKGHDGLYQGLSTATKDTYDALHMQALPPR

SEQ ID NO: 11798 - protein, 495 aa, synthetic construct
MALPVTALLLPLALLLHAARPDIVLTQSQKFMSTSVGDRVSIICRASQSVGTAVAWYQLKAGQSPKLLIYSASNRFTGVPDRFTGSGSGTDFTLTISNVQSEDLADYFCQQYSTYPLAFGAGTKLELKGGGGSGGGGSGGGGSEVQLVESGGGIVQPGGSLKLSCAASGFTFNDFGMSWIRQTPDKRLELVATINTNGGTTHYPDSVKGRFSISRDNAKKFVYLQMSSLKSDDTAIYYCPREGLDYWGQGTTLTVSSTREQKLISEEDLAKPTTTPAPRPPTPAPTIASQPLSLRPEACRPAAGGAVHTRGLDFACDIYIWAPLAGTCGVLLLSLVITLYCKRGRKKLLYIFKQPFMRPVQTTQEEDGCSCRFPEEEEGGCELRVKFSRSADAPAYQQGQNQLYNELNLGRREEYDVLDKRRGRDPEMGGKPRRKNPQEGLYNELQKDKMAEAYSEIGMKGERRRGKGHDGLYQGLSTATKDTYDALHMQALPPR

SEQ ID NO: 11799 - protein, 495 aa, synthetic construct
MALPVTALLLPLALLLHAARPEVQLVESGGGIVQPGGSLKLSCAASGFTFNDFGMSWIRQTPDKRLELVATINTNGGTTHYPDSVKGRFSISRDNAKKFVYLQMSSLKSDDTAIYYCPREGLDYWGQGTTLTVSSGGGGSGGGGSGGGGSDIVLTQSQKFMSTSVGDRVSIICRASQSVGTAVAWYQLKAGQSPKLLIYSASNRFTGVPDRFTGSGSGTDFTLTISNVQSEDLADYFCQQYSTYPLAFGAGTKLELKTREQKLISEEDLAKPTTTPAPRPPTPAPTIASQPLSLRPEACRPAAGGAVHTRGLDFACDIYIWAPLAGTCGVLLLSLVITLYCKRGRKKLLYIFKQPFMRPVQTTQEEDGCSCRFPEEEEGGCELRVKFSRSADAPAYQQGQNQLYNELNLGRREEYDVLDKRRGRDPEMGGKPRRKNPQEGLYNELQKDKMAEAYSEIGMKGERRRGKGHDGLYQGLSTATKDTYDALHMQALPPR

SEQ ID NO: 11800 - protein, 908 aa, synthetic construct
MALPVTALLLPLALLLHAARPDIVLTQSQKFMSTSVGDRVSIICRASQSVGTAVAWYQLKAGQSPKLLIYSASNRFTGVPDRFTGSGSGTDFTLTISNVQSEDLADYFCQQYSTYPLAFGAGTKLELKGGGGSGGGGSGGGGSEVQLVESGGGIVQPGGSLKLSCAASGFTFNDFGMSWIRQTPDKRLELVATINTNGGTTHYPDSVKGRFSISRDNAKKFVYLQMSSLKSDDTAIYYCPREGLDYWGQGTTLTVSSTREQKLISEEDLAKPTTTPAPRPPTPAPTIASQPLSLRPEACRPAAGGAVHTRGLDFACDIYIWAPLAGTCGVLLLSLVITLYCGRARVKFSRSADAPAYQQGQNQLYNELNLGRREEYDVLDKRRGRDPEMGGKPRRKNPQEGLYNELQKDKMAEAYSEIGMKGERRRGKGHDGLYQGLSTATKDTYDALHMQALPPRSRGSGATNFSLLKQAGDVEENPGPGIHMATYEVLCEVARKLGTDDREVVLFLLNVFIPQPTLAQLIGALRALKEEGRLTFPLLAECLFRAGRRDLLRDLLHLDPRFLERHLAGTMSYFSPYQLTVLHVDGELCARDIRSLIFLSKDTIGSRSTPQTFLHWVYCMENLDLLGPTDVDALMSMLRSLSRVDLQRQVQTLMGLHLSGPSHSQHYRHTPLETDFYDYKDDDDKTSGSGEGRGSLLTCGDVEENPGPHMTEYKPTVRLATRDDVPRAVRTLAAAFADYPATRHTVDPDRHIERVTELQELFLTRVGLDIGKVWVADDGAAVAVWTTPESVEAGAVFAEIGPRMAELSGSRLAAQQQMEGLLAPHRPKEPAWFLATVGVSPDHQGKGLGSAVVLPGVEAAERAGVPAFLETSAPRNLPFYERLGFTVTADVEVPEGPRTWCMTRKPGA

SEQ ID NO: 11801 - protein, 848 aa, synthetic construct
MALPVTALLLPLALLLHAARPDIVLTQSQKFMSTSVGDRVSIICRASQSVGTAVAWYQLKAGQSPKLLIYSASNRFTGVPDRFTGSGSGTDFTLTISNVQSEDLADYFCQQYSTYPLAFGAGTKLELKLEIQNPDPAVYQLRDSKSSDKSVCLFTDFDSQTNVSQSKDSDVYITDKCVLDMRSMDFKSNSAVAWSNKSDFACANAFNNSIIPEDTFFPSSDVPCDVKLVEKSFETDTNLNFQNLSVIGFRILLLKVAGFNLLMTLRLWSSRAKRSGSGVKQTLNFDLLKLAGDVESNPGPTSMDWIWRILFLVGAATGAHSFEEVQLVESGGGIVQPGGSLKLSCAASGFTFNDFGMSWIRQTPDKRLELVATINTNGGTTHYPDSVKGRFSISRDNAKKFVYLQMSSLKSDDTAIYYCPREGLDYWGQGTTLTVSSTREDLKNVFPPEVAVFEPSKAEIAHTQKATLVCLATGFYPDHVELSWWVNGKEVHSGVCTDPQPLKEQPALNDSRYCLSSRLRVSATFWQNPRNHFRCQVQFYGLSENDEWTQDRAKPVTQIVSAEAWGRADCGITSASYHQGVLSATILYEILLGKATLYAVLVSALVLMAMVKRKDSRGRAKRSGSGATNFSLLKQAGDVEENPGPSRGHMTEYKPTVRLATRDDVPRAVRTLAAAFADYPATRHTVDPDRHIERVTELQELFLTRVGLDIGKVWVADDGAAVAVWTTPESVEAGAVFAEIGPRMAELSGSRLAAQQQMEGLLAPHRPKEPAWFLATVGVSPDHQGKGLGSAVVLPGVEAAERAGVPAFLETSAPRNLPFYERLGFTVTADVEVPEGPRTWCMTRKPGA

SEQ ID NO: 11802 - protein, 847 aa, synthetic construct
MALPVTALLLPLALLLHAARPDIVLTQSQKFMSTSVGDRVSIICRASQSVGTAVAWYQLKAGQSPKLLIYSASNRFTGVPDRFTGSGSGTDFTLTISNVQSEDLADYFCQQYSTYPLAFGAGTKLELKLEDLKNVFPPEVAVFEPSKAEIAHTQKATLVCLATGFYPDHVELSWWVNGKEVHSGVCTDPQPLKEQPALNDSRYCLSSRLRVSATFWQNPRNHFRCQVQFYGLSENDEWTQDRAKPVTQIVSAEAWGRADCGITSASYHQGVLSATILYEILLGKATLYAVLVSALVLMAMVKRKDSRGRAKRSGSGATNFSLLKQAGDVEENPGPTSMDWIWRILFLVGAATGAHSFEEVQLVESGGGIVQPGGSLKLSCAASGFTFNDFGMSWIRQTPDKRLELVATINTNGGTTHYPDSVKGRFSISRDNAKKFVYLQMSSLKSDDTAIYYCPREGLDYWGQGTTLTVSSTRIQNPDPAVYQLRDSKSSDKSVCLFTDFDSQTNVSQSKDSDVYITDKCVLDMRSMDFKSNSAVAWSNKSDFACANAFNNSIIPEDTFFPSSDVPCDVKLVEKSFETDTNLNFQNLSVIGFRILLLKVAGFNLLMTLRLWSSRAKRSGSGVKQTLNFDLLKLAGDVESNPGPSRGHMTEYKPTVRLATRDDVPRAVRTLAAAFADYPATRHTVDPDRHIERVTELQELFLTRVGLDIGKVWVADDGAAVAVWTTPESVEAGAVFAEIGPRMAELSGSRLAAQQQMEGLLAPHRPKEPAWFLATVGVSPDHQGKGLGSAVVLPGVEAAERAGVPAFLETSAPRNLPFYERLGFTVTADVEVPEGPRTWCMTRKPGA

SEQ ID NO: 11803 - protein, 614 aa, synthetic construct
MALPVTALLLPLALLLHAARPDIVLTQSQKFMSTSVGDRVSIICRASQSVGTAVAWYQLKAGQSPKLLIYSASNRFTGVPDRFTGSGSGTDFTLTISNVQSEDLADYFCQQYSTYPLAFGAGTKLELKLEDLKNVFPPEVAVFEPSEAEISHTQKATLVCLATGFYPDHVELSWWVNGKEVHSGVCTDPQPLKEQPALNDSRYCLSSRLRVSATFWQNPRNHFRCQVQFYGLSENDEWTQDRAKPVTQIVSAEAWGRADCGFTSESYQQGVLSATILYEILLGKATLYAVLVSALVLMAMVKRKDSRGRAKRSGSGATNFSLLKQAGDVEENPGPTSMDWIWRILFLVGAATGAHSFEEVQLVESGGGIVQPGGSLKLSCAASGFTFNDFGMSWIRQTPDKRLELVATINTNGGTTHYPDSVKGRFSISRDNAKKFVYLQMSSLKSDDTAIYYCPREGLDYWGQGTTLTVSSTRIQNPDPAVYQLRDSKSSDKSVCLFTDFDSQTNVSQSKDSDVYITDKCVLDMRSMDFKSNSAVAWSNKSDFACANAFNNSIIPEDTFFPSPESSCDVKLVEKSFETDTNLNFQNLSVIGFRILLLKVAGFNLLMTLRLWSS

SEQ ID NO: 11804 - protein, 839 aa, synthetic construct
MALPVTALLLPLALLLHAARPDIVLTQSQKFMSTSVGDRVSIICRASQSVGTAVAWYQLKAGQSPKLLIYSASNRFTGVPDRFTGSGSGTDFTLTISNVQSEDLADYFCQQYSTYPLAFGAGTKLELKLEDLKNVFPPEVAVFEPSEAEISHTQKATLVCLATGFYPDHVELSWWVNGKEVHSGVCTDPQPLKEQPALNDSRYCLSSRLRVSATFWQNPRNHFRCQVQFYGLSENDEWTQDRAKPVTQIVSAEAWGRADCGFTSESYQQGVLSATILYEILLGKATLYAVLVSALVLMAMVKRKDSRGRAKRSGSGATNFSLLKQAGDVEENPGPTSMDWIWRILFLVGAATGAHSFEEVQLVESGGGIVQPGGSLKLSCAASGFTFNDFGMSWIRQTPDKRLELVATINTNGGTTHYPDSVKGRFSISRDNAKKFVYLQMSSLKSDDTAIYYCPREGLDYWGQGTTLTVSSTRIQNPDPAVYQLRDSKSSDKSVCLFTDFDSQTNVSQSKDSDVYITDKCVLDMRSMDFKSNSAVAWSNKSDFACANAFNNSIIPEDTFFPSPESSCDVKLVEKSFETDTNLNFQNLSVIGFRILLLKVAGFNLLMTLRLWSSRAKRSGSGVKQTLNFDLLKLAGDVESNPGPSRGGIHTMATYEVLCEVARKLGTDDREVVLFLLNVFIPQPTLAQLIGALRALKEEGRLTFPLLAECLFRAGRRDLLRDLLHLDPRFLERHLAGTMSYFSPYQLTVLHVDGELCARDIRSLIFLSKDTIGSRSTPQTFLHWVYCMENLDLLGPTDVDALMSMLRSLSRVDLQRQVQTLMGLHLSGPSHSQHYRHTP

SEQ ID NO: 11805 - protein, 618 aa, synthetic construct
MALPVTALLLPLALLLHAARPDIVLTQSQKFMSTSVGDRVSIICRASQSVGTAVAWYQLKAGQSPKLLIYSASNRFTGVPDRFTGSGSGTDFTLTISNVQSEDLADYFCQQYSTYPLAFGAGTKLELKLEIQNPDPAVYQLRDSKSSDKSVCLFTDFDSQTNVSQSKDSDVYITDKCVLDMRSMDFKSNSAVAWSNKSDFACANAFNNSIIPEDTFFPSPESSCDVKLVEKSFETDTNLNFQNLSVIGFRILLLKVAGFNLLMTLRLWSSRAKRSGSGVKQTLNFDLLKLAGDVESNPGPTSMDWIWRILFLVGAATGAHSFEEVQLVESGGGIVQPGGSLKLSCAASGFTFNDFGMSWIRQTPDKRLELVATINTNGGTTHYPDSVKGRFSISRDNAKKFVYLQMSSLKSDDTAIYYCPREGLDYWGQGTTLTVSSTREDLKNVFPPEVAVFEPSEAEISHTQKATLVCLATGFYPDHVELSWWVNGKEVHSGVCTDPQPLKEQPALNDSRYCLSSRLRVSATFWQNPRNHFRCQVQFYGLSENDEWTQDRAKPVTQIVSAEAWGRADCGFTSESYQQGVLSATILYEILLGKATLYAVLVSALVLMAMVKRKDSRG

SEQ ID NO: 11806 - protein, 840 aa, synthetic construct
MALPVTALLLPLALLLHAARPDIVLTQSQKFMSTSVGDRVSIICRASQSVGTAVAWYQLKAGQSPKLLIYSASNRFTGVPDRFTGSGSGTDFTLTISNVQSEDLADYFCQQYSTYPLAFGAGTKLELKLEIQNPDPAVYQLRDSKSSDKSVCLFTDFDSQTNVSQSKDSDVYITDKCVLDMRSMDFKSNSAVAWSNKSDFACANAFNNSIIPEDTFFPSPESSCDVKLVEKSFETDTNLNFQNLSVIGFRILLLKVAGFNLLMTLRLWSSRAKRSGSGVKQTLNFDLLKLAGDVESNPGPTSMDWIWRILFLVGAATGAHSFEEVQLVESGGGIVQPGGSLKLSCAASGFTFNDFGMSWIRQTPDKRLELVATINTNGGTTHYPDSVKGRFSISRDNAKKFVYLQMSSLKSDDTAIYYCPREGLDYWGQGTTLTVSSTREDLKNVFPPEVAVFEPSEAEISHTQKATLVCLATGFYPDHVELSWWVNGKEVHSGVCTDPQPLKEQPALNDSRYCLSSRLRVSATFWQNPRNHFRCQVQFYGLSENDEWTQDRAKPVTQIVSAEAWGRADCGFTSESYQQGVLSATILYEILLGKATLYAVLVSALVLMAMVKRKDSRGRAKRSGSGATNFSLLKQAGDVEENPGPSRGGIHTMATYEVLCEVARKLGTDDREVVLFLLNVFIPQPTLAQLIGALRALKEEGRLTFPLLAECLFRAGRRDLLRDLLHLDPRFLERHLAGTMSYFSPYQLTVLHVDGELCARDIRSLIFLSKDTIGSRSTPQTFLHWVYCMENLDLLGPTDVDALMSMLRSLSRVDLQRQVQTLMGLHLSGPSHSQHYRHTP

SEQ ID NO: 11807 - protein, 892 aa, synthetic construct
MALPVTALLLPLALLLHAARPLEGKPIPNPLLGLDSTGSGEDLKNVFPPEVAVFEPSKAEIAHTQKATLVCLATGFYPDHVELSWWVNGKEVHSGVCTDPQPLKEQPALNDSRYCLSSRLRVSATFWQNPRNHFRCQVQFYGLSENDEWTQDRAKPVTQIVSAEAWGRADCGITSASYHQGVLSATILYEILLGKATLYAVLVSALVLMAMVKRKDSRGRAKRSGSGATNFSLLKQAGDVEENPGPTSMALPVTALLLPLALLLHAARPDIVLTQSQKFMSTSVGDRVSIICRASQSVGTAVAWYQLKAGQSPKLLIYSASNRFTGVPDRFTGSGSGTDFTLTISNVQSEDLADYFCQQYSTYPLAFGAGTKLELKGGGGSGGGGSGGGGSEVQLVESGGGIVQPGGSLKLSCAASGFTFNDFGMSWIRQTPDKRLELVATINTNGGTTHYPDSVKGRFSISRDNAKKFVYLQMSSLKSDDTAIYYCPREGLDYWGQGTTLTVSSTREQKLISEEDGSGIQNPDPAVYQLRDSKSSDKSVCLFTDFDSQTNVSQSKDSDVYITDKCVLDMRSMDFKSNSAVAWSNKSDFACANAFNNSIIPEDTFFPSSDVPCDVKLVEKSFETDTNLNFQNLSVIGFRILLLKVAGFNLLMTLRLWSSRAKRSGSGVKQTLNFDLLKLAGDVESNPGPSRGHMTEYKPTVRLATRDDVPRAVRTLAAAFADYPATRHTVDPDRHIERVTELQELFLTRVGLDIGKVWVADDGAAVAVWTTPESVEAGAVFAEIGPRMAELSGSRLAAQQQMEGLLAPHRPKEPAWFLATVGVSPDHQGKGLGSAVVLPGVEAAERAGVPAFLETSAPRNLPFYERLGFTVTADVEVPEGPRTWCMTRKPGA

SEQ ID NO: 11808 - protein, 893 aa, synthetic construct
MALPVTALLLPLALLLHAARPLEQKLISEEDLGSGDRPDPAVYQLRDSKSSDKSVCLFTDFDSQTNVSQSKDSDVYITDKCVLDMRSMDFKSNSAVAWSNKSDFACANAFNNSIIPEDTFFPSPESSCDVKLVEKSFETDTNLNFQNLSVIGFRILLLKVAGFNLLMTLRLWSSSSRAKRSGSGVKQTLNFDLLKLAGDVESNPGPTSMALPVTALLLPLALLLHAARPDIVLTQSQKFMSTSVGDRVSIICRASQSVGTAVAWYQLKAGQSPKLLIYSASNRFTGVPDRFTGSGSGTDFTLTISNVQSEDLADYFCQQYSTYPLAFGAGTKLELKGGGGSGGGGSGGGGSEVQLVESGGGIVQPGGSLKLSCAASGFTFNDFGMSWIRQTPDKRLELVATINTNGGTTHYPDSVKGRFSISRDNAKKFVYLQMSSLKSDDTAIYYCPREGLDYWGQGTTLTVSSTRGKPIPNPLLGLDSTGSGEDLKNVFPPEVAVFEPSEAEISHTQKATLVCLATGFYPDHVELSWWVNGKEVHSGVCTDPQPLKEQPALNDSRYCLSSRLRVSATFWQNPRNHFRCQVQFYGLSENDEWTQDRAKPVTQIVSAEAWGRADCGFTSESYQQGVLSATILYEILLGKATLYAVLVSALVLMAMVKRKDSRGRAKRSGSGATNFSLLKQAGDVEENPGPSRGHMTEYKPTVRLATRDDVPRAVRTLAAAFADYPATRHTVDPDRHIERVTELQELFLTRVGLDIGKVWVADDGAAVAVWTTPESVEAGAVFAEIGPRMAELSGSRLAAQQQMEGLLAPHRPKEPAWFLATVGVSPDHQGKGLGSAVVLPGVEAAERAGVPAFLETSAPRNLPFYERLGFTVTADVEVPEGPRTWCMTRKPGA

SEQ ID NO: 11809 - protein, 847 aa, synthetic construct
MALPVTALLLPLALLLHAARPDIVLTQSQKFMSTSVGDRVSIICRASQSVGTAVAWYQLKAGQSPKLLIYSASNRFTGVPDRFTGSGSGTDFTLTISNVQSEDLADYFCQQYSTYPLAFGAGTKLELKLEDLKNVFPPEVAVFEPSEAEISHTQKATLVCLATGFYPDHVELSWWVNGKEVHSGVSTDPQPLKEQPALNDSRYCLSSRLRVSATFWQNPRNHFRCQVQFYGLSENDEWTQDRAKPVTQIVSAEAWGRADCGFTSESYQQGVLSATILYEILLGKATLYAVLVSALVLMAMVKRKDSRGRAKRSGSGATNFSLLKQAGDVEENPGPTSMDWIWRILFLVGAATGAHSFEEVQLVESGGGIVQPGGSLKLSCAASGFTFNDFGMSWIRQTPDKRLELVATINTNGGTTHYPDSVKGRFSISRDNAKKFVYLQMSSLKSDDTAIYYCPREGLDYWGQGTTLTVSSTRIQNPDPAVYQLRDSKSSDKSVCLFTDFDSQTNVSQSKDSDVYITDKTVLDMRSMDFKSNSAVAWSNKSDFACANAFNNSIIPEDTFFPSPESSCDVKLVEKSFETDTNLNFQNLSVIGFRILLLKVAGFNLLMTLRLWSSRAKRSGSGVKQTLNFDLLKLAGDVESNPGPSRGHMTEYKPTVRLATRDDVPRAVRTLAAAFADYPATRHTVDPDRHIERVTELQELFLTRVGLDIGKVWVADDGAAVAVWTTPESVEAGAVFAEIGPRMAELSGSRLAAQQQMEGLLAPHRPKEPAWFLATVGVSPDHQGKGLGSAVVLPGVEAAERAGVPAFLETSAPRNLPFYERLGFTVTADVEVPEGPRTWCMTRKPGA

SEQ ID NO: 11810 - protein, 929 aa, synthetic construct
MALPVTALLLPLALLLHAARPDIVLTQSQKFMSTSVGDRVSIICRASQSVGTAVAWYQLKAGQSPKLLIYSASNRFTGVPDRFTGSGSGTDFTLTISNVQSEDLADYFCQQYSTYPLAFGAGTKLELKLEDLKNVFPPEVAVFEPSEAEISHTQKATLVCLATGFYPDHVELSWWVNGKEVHSGVSTDPQPLKEQPALNDSRYCLSSRLRVSATFWQNPRNHFRCQVQFYGLSENDEWTQDRAKPVTQIVSAEAWGRADCGFTSESYQQGVLSATILYEILLGKATLYAVLVSALVLMAMVKRKDSRGRAKRSGSGATNFSLLKQAGDVEENPGPTSMDWIWRILFLVGAATGAHSFEEVQLVESGGGIVQPGGSLKLSCAASGFTFNDFGMSWIRQTPDKRLELVATINTNGGTTHYPDSVKGRFSISRDNAKKFVYLQMSSLKSDDTAIYYCPREGLDYWGQGTTLTVSSTREQKLISEEDGSGTPFPSLAPPIMLLVDGKQQMVVVCLVLDVAPPGLDSPIWFSAGNGSALDAFTYGPSPATDGTWTNLAHLSLPSEELASWEPLVCHTGPGAEGHSRSTQPMHLSGEASTARTCPQEPLRGTPGGALWLGVLRLLLFKLLLFDLLLTCSCLCDPAGPLPSPATTTRLRALGSHRLHPATETGGREATSSPRPQPRDRRWGDTPPGRKPGSPVRAKRSGSGVKQTLNFDLLKLAGDVESNPGPSRGHMTEYKPTVRLATRDDVPRAVRTLAAAFADYPATRHTVDPDRHIERVTELQELFLTRVGLDIGKVWVADDGAAVAVWTTPESVEAGAVFAEIGPRMAELSGSRLAAQQQMEGLLAPHRPKEPAWFLATVGVSPDHQGKGLGSAVVLPGVEAAERAGVPAFLETSAPRNLPFYERLGFTVTADVEVPEGPRTWCMTRKPGA

SEQ ID NO: 11811 - protein, 947 aa, synthetic construct
MALPVTALLLPLALLLHAARPLEDLKNVFPPEVAVFEPSEAEISHTQKATLVCLATGFYPDHVELSWWVNGKEVHSGVSTDPQPLKEQPALNDSRYCLSSRLRVSATFWQNPRNHFRCQVQFYGLSENDEWTQDRAKPVTQIVSAEAWGRADCGFTSESYQQGVLSATILYEILLGKATLYAVLVSALVLMAMVKRKDSRGRAKRSGSGATNFSLLKQAGDVEENPGPTSMALPVTALLLPLALLLHAARPDIVLTQSQKFMSTSVGDRVSIICRASQSVGTAVAWYQLKAGQSPKLLIYSASNRFTGVPDRFTGSGSGTDFTLTISNVQSEDLADYFCQQYSTYPLAFGAGTKLELKGGGGSGGGGSGGGGSEVQLVESGGGIVQPGGSLKLSCAASGFTFNDFGMSWIRQTPDKRLELVATINTNGGTTHYPDSVKGRFSISRDNAKKFVYLQMSSLKSDDTAIYYCPREGLDYWGQGTTLTVSSTREQKLISEEDLGSGTPFPSLAPPIMLLVDGKQQMVVVCLVLDVAPPGLDSPIWFSAGNGSALDAFTYGPSPATDGTWTNLAHLSLPSEELASWEPLVCHTGPGAEGHSRSTQPMHLSGEASTARTCPQEPLRGTPGGALWLGVLRLLLFKLLLFDLLLTCSCLCDPAGPLPSPATTTRLRALGSHRLHPATETGGREATSSPRPQPRDRRWGDTPPGRKPGSPVRAKRSGSGVKQTLNFDLLKLAGDVESNPGPSRSRGHMTEYKPTVRLATRDDVPRAVRTLAAAFADYPATRHTVDPDRHIERVTELQELFLTRVGLDIGKVWVADDGAAVAVWTTPESVEAGAVFAEIGPRMAELSGSRLAAQQQMEGLLAPHRPKEPAWFLATVGVSPDHQGKGLGSAVVLPGVEAAERAGVPAFLETSAPRNLPFYERLGFTVTADVEVPEGPRTWCMTRKPGA

SEQ ID NO: 11812 - protein, 884 aa, synthetic construct
MALPVTALLLPLALLLHAARPDIVLTQSQKFMSTSVGDRVSIICRASQSVGTAVAWYQLKAGQSPKLLIYSASNRFTGVPDRFTGSGSGTDFTLTISNVQSEDLADYFCQQYSTYPLAFGAGTKLELKLEGKPIPNPLLGLDSTGSGDKQLDADVSPKPTIFLPSIAETKLQKAGTYLCLLEKFFPDVIKIHWQEKKSNTILGSQEGNTMKTNDTYMKFSWLTVPEKSLDKEHRCIVRHENNKNGVDQEIIFPPIKTDVITMDPKDNCSKDANDTLLLQLTNTSAYYMYLLLLLKSVVYFAIITCCLLRRTAFCCNGEKSRAKRSGSGATNFSLLKQAGDVEENPGPTSMDWIWRILFLVGAATGAHSFEEVQLVESGGGIVQPGGSLKLSCAASGFTFNDFGMSWIRQTPDKRLELVATINTNGGTTHYPDSVKGRFSISRDNAKKFVYLQMSSLKSDDTAIYYCPREGLDYWGQGTTLTVSSTREQKLISEEDGSGSQPHTKPSVFVMKNGTNVACLVKEFYPKDIRINLVSSKKITEFDPAIVISPSGKYNAVKLGKYEDSNSVTCSVQHDNKTVHSTDFEVKTDSTDHVKPKETENTKQPSKSCHKPKAIVHTEKVNMMSLTVLGLRMLFAKTVAVNFLLTAKLFFLRAKRSGSGVKQTLNFDLLKLAGDVESNPGPSRGHMTEYKPTVRLATRDDVPRAVRTLAAAFADYPATRHTVDPDRHIERVTELQELFLTRVGLDIGKVWVADDGAAVAVWTTPESVEAGAVFAEIGPRMAELSGSRLAAQQQMEGLLAPHRPKEPAWFLATVGVSPDHQGKGLGSAVVLPGVEAAERAGVPAFLETSAPRNLPFYERLGFTVTADVEVPEGPRTWCMTRKPGA

SEQ ID NO: 11813 - protein, 622 aa, synthetic construct
MALPVTALLLPLALLLHAARPDIVLTQSQKFMSTSVGDRVSIICRASQSVGTAVAWYQLKAGQSPKLLIYSASNRFTGVPDRFTGSGSGTDFTLTISNVQSEDLADYFCQQYSTYPLAFGAGTKLELKLESQPHTKPSVFVMKNGTNVACLVKEFYPKDIRINLVSSKKITEFDPAIVISPSGKYNAVKLGKYEDSNSVTCSVQHDNKTVHSTDFEVKTDSTDHVKPKETENTKQPSKSCHKPKAIVHTEKVNMMSLTVLGLRMLFAKTVAVNFLLTAKLFFLRAKRSGSGATNFSLLKQAGDVEENPGPTSMDWIWRILFLVGAATGAHSFEEVQLVESGGGIVQPGGSLKLSCAASGFTFNDFGMSWIRQTPDKRLELVATINTNGGTTHYPDSVKGRFSISRDNAKKFVYLQMSSLKSDDTAIYYCPREGLDYWGQGTTLTVSSTRDKQLDADVSPKPTIFLPSIAETKLQKAGTYLCLLEKFFPDVIKIHWQEKKSNTILGSQEGNTMKTNDTYMKFSWLTVPEKSLDKEHRCIVRHENNKNGVDQEIIFPPIKTDVITMDPKDNCSKDANDTLLLQLTNTSAYYMYLLLLLKSVVYFAIITCCLLRRTAFCCNGEKS

SEQ ID NO: 11814 - protein, 899 aa, synthetic construct
MALPVTALLLPLALLLHAARPLEGKPIPNPLLGLDSTGSGDKQLDADVSPKPTIFLPSIAETKLQKAGTYLCLLEKFFPDVIKIHWQEKKSNTILGSQEGNTMKTNDTYMKFSWLTVPEKSLDKEHRCIVRHENNKNGVDQEIIFPPIKTDVITMDPKDNCSKDANDTLLLQLTNTSAYYMYLLLLLKSVVYFAIITCCLLRRTAFCCNGEKSRAKRSGSGATNFSLLKQAGDVEENPGPTSMALPVTALLLPLALLLHAARPDIVLTQSQKFMSTSVGDRVSIICRASQSVGTAVAWYQLKAGQSPKLLIYSASNRFTGVPDRFTGSGSGTDFTLTISNVQSEDLADYFCQQYSTYPLAFGAGTKLELKGGGGSGGGGSGGGGSEVQLVESGGGIVQPGGSLKLSCAASGFTFNDFGMSWIRQTPDKRLELVATINTNGGTTHYPDSVKGRFSISRDNAKKFVYLQMSSLKSDDTAIYYCPREGLDYWGQGTTLTVSSTREQKLISEEDGSGSQPHTKPSVFVMKNGTNVACLVKEFYPKDIRINLVSSKKITEFDPAIVISPSGKYNAVKLGKYEDSNSVTCSVQHDNKTVHSTDFEVKTDSTDHVKPKETENTKQPSKSCHKPKAIVHTEKVNMMSLTVLGLRMLFAKTVAVNFLLTAKLFFLRAKRSGSGVKQTLNFDLLKLAGDVESNPGPSRGHMTEYKPTVRLATRDDVPRAVRTLAAAFADYPATRHTVDPDRHIERVTELQELFLTRVGLDIGKVWVADDGAAVAVWTTPESVEAGAVFAEIGPRMAELSGSRLAAQQQMEGLLAPHRPKEPAWFLATVGVSPDHQGKGLGSAVVLPGVEAAERAGVPAFLETSAPRNLPFYERLGFTVTADVEVPEGPRTWCMTRKPGA

SEQ ID NO: 11815 - protein, 1024 aa, synthetic construct
MALPVTALLLPLALLLHAARPDIVLTQSQKFMSTSVGDRVSIICRASQSVGTAVAWYQLKAGQSPKLLIYSASNRFTGVPDRFTGSGSGTDFTLTISNVQSEDLADYFCQQYSTYPLAFGAGTKLELKGQPKANPTVTLFPPSSEELQANKATLVCLISDFYPGAVTVAWKADGSPVKAGVETTKPSKQSNNKYAASSYLSLTPEQWKSHRSYSCQVTHEGSTVEKTVAPTECSGSQSFGLLDPKLCYLLDGILFIYGVILTALFLRVKFSRSADAPAYQQGQNQLYNELNLGRREEYDVLDKRRGRDPEMGGKPQRRKNPQEGLYNELQKDKMAEAYSEIGMKGERRRGKGHDGLYQGLSTATKDTYDALHMQALPPRRAKRSGSGATNFSLLKQAGDVEENPGPTSMDWIWRILFLVGAATGAHSFEEVQLVESGGGIVQPGGSLKLSCAASGFTFNDFGMSWIRQTPDKRLELVATINTNGGTTHYPDSVKGRFSISRDNAKKFVYLQMSSLKSDDTAIYYCPREGLDYWGQGTTLTVSSASTKGPSVFPLAPSSKSTSGGTAALGCLVKDYFPEPVTVSWNSGALTSGVHTFPAVLQSSGLYSLSSVVTVPSSSLGTQTYICNVNHKPSNTKVDKRVEPKSCGTQSFGLLDPKLCYLLDGILFIYGVILTALFLRVKFSRSADAPAYQQGQNQLYNELNLGRREEYDVLDKRRGRDPEMGGKPQRRKNPQEGLYNELQKDKMAEAYSEIGMKGERRRGKGHDGLYQGLSTATKDTYDALHMQALPPRRAKRSGSGVKQTLNFDLLKLAGDVESNPGPSRGHMTEYKPTVRLATRDDVPRAVRTLAAAFADYPATRHTVDPDRHIERVTELQELFLTRVGLDIGKVWVADDGAAVAVWTTPESVEAGAVFAEIGPRMAELSGSRLAAQQQMEGLLAPHRPKEPAWFLATVGVSPDHQGKGLGSAVVLPGVEAAERAGVPAFLETSAPRNLPFYERLGFTVTADVEVPEGPRTWCMTRKPGA

SEQ ID NO: 11816 - protein, 810 aa, synthetic construct
MALPVTALLLPLALLLHAARPDIVLTQSQKFMSTSVGDRVSIICRASQSVGTAVAWYQLKAGQSPKLLIYSASNRFTGVPDRFTGSGSGTDFTLTISNVQSEDLADYFCQQYSTYPLAFGAGTKLELKLEDLKNVFPPEVAVFEPSEAEISHTQKATLVCLATGFYPDHVELSWWVNGKEVHSGVSTDPQPLKEQPALNDSRYCLSSRLRVSATFWQNPRNHFRCQVQFYGLSENDEWTQDRAKPVTQIVSAEAWGRADCGSQSFGLLDPKLCYLLDGILFIYGVILTALFLRVKFSRSADAPAYQQGQNQLYNELNLGRREEYDVLDKRRGRDPEMGGKPQRRKNPQEGLYNELQKDKMAEAYSEIGMKGERRRGKGHDGLYQGLSTATKDTYDALHMQALPPRRAKRSGSGATNFSLLKQAGDVEENPGPTSMDWIWRILFLVGAATGAHSFEEVQLVESGGGIVQPGGSLKLSCAASGFTFNDFGMSWIRQTPDKRLELVATINTNGGTTHYPDSVKGRFSISRDNAKKFVYLQMSSLKSDDTAIYYCPREGLDYWGQGTTLTVSSTRIQNPDPAVYQLRDSKSSDKSVCLFTDFDSQTNVSQSKDSDVYITDKTVLDMRSMDFKSNSAVAWSNKSDFACANAFNNSIIPEDTFFPSPESSCGTQSFGLLDPKLCYLLDGILFIYGVILTALFLRVKFSRSADAPAYQQGQNQLYNELNLGRREEYDVLDKRRGRDPEMGGKPQRRKNPQEGLYNELQKDKMAEAYSEIGMKGERRRGKGHDGLYQGLSTATKDTYDALHMQALPPR

SEQ ID NO: 11817 - protein, 810 aa, synthetic construct
MALPVTALLLPLALLLHAARPDIVLTQSQKFMSTSVGDRVSIICRASQSVGTAVAWYQLKAGQSPKLLIYSASNRFTGVPDRFTGSGSGTDFTLTISNVQSEDLADYFCQQYSTYPLAFGAGTKLELKLEDLKNVFPPEVAVFEPSKAEIAHTQKATLVCLATGFYPDHVELSWWVNGKEVHSGVCTDPQPLKEQPALNDSRYCLSSRLRVSATFWQNPRNHFRCQVQFYGLSENDEWTQDRAKPVTQIVSAEAWGRADCGSQSFGLLDPKLCYLLDGILFIYGVILTALFLRVKFSRSADAPAYQQGQNQLYNELNLGRREEYDVLDKRRGRDPEMGGKPQRRKNPQEGLYNELQKDKMAEAYSEIGMKGERRRGKGHDGLYQGLSTATKDTYDALHMQALPPRRAKRSGSGATNFSLLKQAGDVEENPGPTSMDWIWRILFLVGAATGAHSFEEVQLVESGGGIVQPGGSLKLSCAASGFTFNDFGMSWIRQTPDKRLELVATINTNGGTTHYPDSVKGRFSISRDNAKKFVYLQMSSLKSDDTAIYYCPREGLDYWGQGTTLTVSSTRIQNPDPAVYQLRDSKSSDKSVCLFTDFDSQTNVSQSKDSDVYITDKCVLDMRSMDFKSNSAVAWSNKSDFACANAFNNSIIPEDTFFPSSDVPCGTQSFGLLDPKLCYLLDGILFIYGVILTALFLRVKFSRSADAPAYQQGQNQLYNELNLGRREEYDVLDKRRGRDPEMGGKPQRRKNPQEGLYNELQKDKMAEAYSEIGMKGERRRGKGHDGLYQGLSTATKDTYDALHMQALPPR

SEQ ID NO: 11818 - protein, 881 aa, synthetic construct
MALPVTALLLPLALLLHAARPDIVLTQSQKFMSTSVGDRVSIICRASQSVGTAVAWYQLKAGQSPKLLIYSASNRFTGVPDRFTGSGSGTDFTLTISNVQSEDLADYFCQQYSTYPLAFGAGTKLELKLEGKPIPNPLLGLDSTGSGEDLKNVFPPEVAVFEPSEAEISHTQKATLVCLATGFYPDHVELSWWVNGKEVHSGVSTDPQPLKEQPALNDSRYCLSSRLRVSATFWQNPRNHFRCQVQFYGLSENDEWTQDRAKPVTQIVSAEAWGRADCGSQSFGLLDPKLCYLLDGILFIYGVILTALFLRVKFSRSADAPAYQQGQNQLYNELNLGRREEYDVLDKRRGRDPEMGGKPQRRKNPQEGLYNELQKDKMAEAYSEIGMKGERRRGKGHDGLYQGLSTATKDTYDALHMQALPPRRAKRSGSGATNFSLLKQAGDVEENPGPTSMDWIWRILFLVGAATGAHSFEEVQLVESGGGIVQPGGSLKLSCAASGFTFNDFGMSWIRQTPDKRLELVATINTNGGTTHYPDSVKGRFSISRDNAKKFVYLQMSSLKSDDTAIYYCPREGLDYWGQGTTLTVSSTREQKLISEEDGSGIQNPDPAVYQLRDSKSSDKSVCLFTDFDSQTNVSQSKDSDVYITDKTVLDMRSMDFKSNSAVAWSNKSDFACANAFNNSIIPEDTFFPSPESSCGTQSFGLLDPKLCYLLDGILFIYGVILTALFLRSKRSRLLHSDYMNMTPRRPGPTRKHYQPYAPPRDFAAYRSRVKFSRSADAPAYQQGQNQLYNELNLGRREEYDVLDKRRGRDPEMGGKPQRRKNPQEGLYNELQKDKMAEAYSEIGMKGERRRGKGHDGLYQGLSTATKDTYDALHMQALPPR

SEQ ID NO: 11819 - protein, 922 aa, synthetic construct
MALPVTALLLPLALLLHAARPDIVLTQSQKFMSTSVGDRVSIICRASQSVGTAVAWYQLKAGQSPKLLIYSASNRFTGVPDRFTGSGSGTDFTLTISNVQSEDLADYFCQQYSTYPLAFGAGTKLELKLEGKPIPNPLLGLDSTGSGEDLKNVFPPEVAVFEPSEAEISHTQKATLVCLATGFYPDHVELSWWVNGKEVHSGVSTDPQPLKEQPALNDSRYCLSSRLRVSATFWQNPRNHFRCQVQFYGLSENDEWTQDRAKPVTQIVSAEAWGRADCGSQSFGLLDPKLCYLLDGILFIYGVILTALFLRSKRSRLLHSDYMNMTPRRPGPTRKHYQPYAPPRDFAAYRSRVKFSRSADAPAYQQGQNQLYNELNLGRREEYDVLDKRRGRDPEMGGKPQRRKNPQEGLYNELQKDKMAEAYSEIGMKGERRRGKGHDGLYQGLSTATKDTYDALHMQALPPRRAKRSGSGATNFSLLKQAGDVEENPGPTSMDWIWRILFLVGAATGAHSFEEVQLVESGGGIVQPGGSLKLSCAASGFTFNDFGMSWIRQTPDKRLELVATINTNGGTTHYPDSVKGRFSISRDNAKKFVYLQMSSLKSDDTAIYYCPREGLDYWGQGTTLTVSSTREQKLISEEDGSGIQNPDPAVYQLRDSKSSDKSVCLFTDFDSQTNVSQSKDSDVYITDKTVLDMRSMDFKSNSAVAWSNKSDFACANAFNNSIIPEDTFFPSPESSCGTQSFGLLDPKLCYLLDGILFIYGVILTALFLRSKRSRLLHSDYMNMTPRRPGPTRKHYQPYAPPRDFAAYRSRVKFSRSADAPAYQQGQNQLYNELNLGRREEYDVLDKRRGRDPEMGGKPQRRKNPQEGLYNELQKDKMAEAYSEIGMKGERRRGKGHDGLYQGLSTATKDTYDALHMQALPPR

SEQ ID NO: 11820 - protein, 883 aa, synthetic construct
MALPVTALLLPLALLLHAARPDIVLTQSQKFMSTSVGDRVSIICRASQSVGTAVAWYQLKAGQSPKLLIYSASNRFTGVPDRFTGSGSGTDFTLTISNVQSEDLADYFCQQYSTYPLAFGAGTKLELKLEGKPIPNPLLGLDSTGSGEDLKNVFPPEVAVFEPSEAEISHTQKATLVCLATGFYPDHVELSWWVNGKEVHSGVSTDPQPLKEQPALNDSRYCLSSRLRVSATFWQNPRNHFRCQVQFYGLSENDEWTQDRAKPVTQIVSAEAWGRADCGSQSFGLLDPKLCYLLDGILFIYGVILTALFLRVKFSRSADAPAYQQGQNQLYNELNLGRREEYDVLDKRRGRDPEMGGKPQRRKNPQEGLYNELQKDKMAEAYSEIGMKGERRRGKGHDGLYQGLSTATKDTYDALHMQALPPRRAKRSGSGATNFSLLKQAGDVEENPGPTSMDWIWRILFLVGAATGAHSFEEVQLVESGGGIVQPGGSLKLSCAASGFTFNDFGMSWIRQTPDKRLELVATINTNGGTTHYPDSVKGRFSISRDNAKKFVYLQMSSLKSDDTAIYYCPREGLDYWGQGTTLTVSSTREQKLISEEDLGSGIQNPDPAVYQLRDSKSSDKSVCLFTDFDSQTNVSQSKDSDVYITDKTVLDMRSMDFKSNSAVAWSNKSDFACANAFNNSIIPEDTFFPSPESSCGTQSFGLLDPKLCYLLDGILFIYGVILTALFLKRGRKKLLYIFKQPFMRPVQTTQEEDGCSCRFPEEEEGGCELRVKFSRSADAPAYQQGQNQLYNELNLGRREEYDVLDKRRGRDPEMGGKPQRRKNPQEGLYNELQKDKMAEAYSEIGMKGERRRGKGHDGLYQGLSTATKDTYDALHMQALPPR

SEQ ID NO: 11821 - protein, 925 aa, synthetic construct
MALPVTALLLPLALLLHAARPDIVLTQSQKFMSTSVGDRVSIICRASQSVGTAVAWYQLKAGQSPKLLIYSASNRFTGVPDRFTGSGSGTDFTLTISNVQSEDLADYFCQQYSTYPLAFGAGTKLELKLEGKPIPNPLLGLDSTGSGEDLKNVFPPEVAVFEPSEAEISHTQKATLVCLATGFYPDHVELSWWVNGKEVHSGVSTDPQPLKEQPALNDSRYCLSSRLRVSATFWQNPRNHFRCQVQFYGLSENDEWTQDRAKPVTQIVSAEAWGRADCGSQSFGLLDPKLCYLLDGILFIYGVILTALFLKRGRKKLLYIFKQPFMRPVQTTQEEDGCSCRFPEEEEGGCELRVKFSRSADAPAYQQGQNQLYNELNLGRREEYDVLDKRRGRDPEMGGKPQRRKNPQEGLYNELQKDKMAEAYSEIGMKGERRRGKGHDGLYQGLSTATKDTYDALHMQALPPRRAKRSGSGATNFSLLKQAGDVEENPGPTSMDWIWRILFLVGAATGAHSFEEVQLVESGGGIVQPGGSLKLSCAASGFTFNDFGMSWIRQTPDKRLELVATINTNGGTTHYPDSVKGRFSISRDNAKKFVYLQMSSLKSDDTAIYYCPREGLDYWGQGTTLTVSSTREQKLISEEDLGSGIQNPDPAVYQLRDSKSSDKSVCLFTDFDSQTNVSQSKDSDVYITDKTVLDMRSMDFKSNSAVAWSNKSDFACANAFNNSIIPEDTFFPSPESSCGTQSFGLLDPKLCYLLDGILFIYGVILTALFLKRGRKKLLYIFKQPFMRPVQTTQEEDGCSCRFPEEEEGGCELRVKFSRSADAPAYQQGQNQLYNELNLGRREEYDVLDKRRGRDPEMGGKPQRRKNPQEGLYNELQKDKMAEAYSEIGMKGERRRGKGHDGLYQGLSTATKDTYDALHMQALPPR

SEQ ID NO: 11822 - protein, 815 aa, synthetic construct
MALPVTALLLPLALLLHAARPDIVLTQSQKFMSTSVGDRVSIICRASQSVGTAVAWYQLKAGQSPKLLIYSASNRFTGVPDRFTGSGSGTDFTLTISNVQSEDLADYFCQQYSTYPLAFGAGTKLELKLEQSFGLLDPKLCYLLDGILFIYGVILTALFLRVKFSRSADAPAYQQGQNQLYNELNLGRREEYDVLDKRRGRDPEMGGKPQRRKNPQEGLYNELQKDKMAEAYSEIGMKGERRRGKGHDGLYQGLSTATKDTYDALHMQALPPRRAKRSGSGATNFSLLKQAGDVEENPGPTSMDWIWRILFLVGAATGAHSFEEVQLVESGGGIVQPGGSLKLSCAASGFTFNDFGMSWIRQTPDKRLELVATINTNGGTTHYPDSVKGRFSISRDNAKKFVYLQMSSLKSDDTAIYYCPREGLDYWGQGTTLTVSSTRQSFGLLDPKLCYLLDGILFIYGVILTALFLRVKFSRSADAPAYQQGQNQLYNELNLGRREEYDVLDKRRGRDPEMGGKPQRRKNPQEGLYNELQKDKMAEAYSEIGMKGERRRGKGHDGLYQGLSTATKDTYDALHMQALPPRRAKRSGSGVKQTLNFDLLKLAGDVESNPGPSRGHMTEYKPTVRLATRDDVPRAVRTLAAAFADYPATRHTVDPDRHIERVTELQELFLTRVGLDIGKVWVADDGAAVAVWTTPESVEAGAVFAEIGPRMAELSGSRLAAQQQMEGLLAPHRPKEPAWFLATVGVSPDHQGKGLGSAVVLPGVEAAERAGVPAFLETSAPRNLPFYERLGFTVTADVEVPEGPRTWCMTRKPGA

SEQ ID NO: 11823 - protein, 640 aa, synthetic construct
MALPVTALLLPLALLLHAARPDIVLTQSQKFMSTSVGDRVSIICRASQSVGTAVAWYQLKAGQSPKLLIYSASNRFTGVPDRFTGSGSGTDFTLTISNVQSEDLADYFCQQYSTYPLAFGAGTKLELKLEGQPKANPTVTLFPPSSEELQANKATLVCLISDFYPGAVTVAWKADGSPVKAGVETTKPSKQSNNKYAASSYLSLTPEQWKSHRSYSCQVTHEGSTVEKTVAPTECSPIKTDVITMDPKDNCSKDANDTLLLQLTNTSAYYMYLLLLLKSVVYFAIITCCLLRRTAFCCNGEKSRAKRSGSGATNFSLLKQAGDVEENPGPTSMDWIWRILFLVGAATGAHSFEEVQLVESGGGIVQPGGSLKLSCAASGFTFNDFGMSWIRQTPDKRLELVATINTNGGTTHYPDSVKGRFSISRDNAKKFVYLQMSSLKSDDTAIYYCPREGLDYWGQGTTLTVSSTRASTKGPSVFPLAPSSKSTSGGTAALGCLVKDYFPEPVTVSWNSGALTSGVHTFPAVLQSSGLYSLSSVVTVPSSSLGTQTYICNVNHKPSNTKVDKRVEPKSCEVKTDSTDHVKPKETENTKQPSKSCHKPKAIVHTEKVNMMSLTVLGLRMLFAKTVAVNFLLTAKLFFL

SEQ ID NO: 11824 - protein, 618 aa, synthetic construct
MALPVTALLLPLALLLHAARPDIVLTQSQKFMSTSVGDRVSIICRASQSVGTAVAWYQLKAGQSPKLLIYSASNRFTGVPDRFTGSGSGTDFTLTISNVQSEDLADYFCQQYSTYPLAFGAGTKLELKLEGQPKANPTVTLFPPSSEELQANKATLVCLISDFYPGAVTVAWKADGSPVKAGVETTKPSKQSNNKYAASSYLSLTPEQWKSHRSYSCQVTHEGSTVEKTVAPTECSGRADCGITSASYHQGVLSATILYEILLGKATLYAVLVSALVLMAMVKRKDSRGRAKRSGSGATNFSLLKQAGDVEENPGPTSMDWIWRILFLVGAATGAHSFEEVQLVESGGGIVQPGGSLKLSCAASGFTFNDFGMSWIRQTPDKRLELVATINTNGGTTHYPDSVKGRFSISRDNAKKFVYLQMSSLKSDDTAIYYCPREGLDYWGQGTTLTVSSTRASTKGPSVFPLAPSSKSTSGGTAALGCLVKDYFPEPVTVSWNSGALTSGVHTFPAVLQSSGLYSLSSVVTVPSSSLGTQTYICNVNHKPSNTKVDKRVEPKSCIPEDTFFPSSDVPCDVKLVEKSFETDTNLNFQNLSVIGFRILLLKVAGFNLLMTLRLWSS

SEQ ID NO: 11825 - protein, 618 aa, synthetic construct
MALPVTALLLPLALLLHAARPDIVLTQSQKFMSTSVGDRVSIICRASQSVGTAVAWYQLKAGQSPKLLIYSASNRFTGVPDRFTGSGSGTDFTLTISNVQSEDLADYFCQQYSTYPLAFGAGTKLELKLEGQPKANPTVTLFPPSSEELQANKATLVCLISDFYPGAVTVAWKADGSPVKAGVETTKPSKQSNNKYAASSYLSLTPEQWKSHRSYSCQVTHEGSTVEKTVAPTECSGRADCGFTSESYQQGVLSATILYEILLGKATLYAVLVSALVLMAMVKRKDSRGRAKRSGSGATNFSLLKQAGDVEENPGPTSMDWIWRILFLVGAATGAHSFEEVQLVESGGGIVQPGGSLKLSCAASGFTFNDFGMSWIRQTPDKRLELVATINTNGGTTHYPDSVKGRFSISRDNAKKFVYLQMSSLKSDDTAIYYCPREGLDYWGQGTTLTVSSTRASTKGPSVFPLAPSSKSTSGGTAALGCLVKDYFPEPVTVSWNSGALTSGVHTFPAVLQSSGLYSLSSVVTVPSSSLGTQTYICNVNHKPSNTKVDKRVEPKSCIPEDTFFPSPESSCDVKLVEKSFETDTNLNFQNLSVIGFRILLLKVAGFNLLMTLRLWSS

SEQ ID NO: 11826 - protein, 444 aa, synthetic construct
MALPVTALLLPLALLLHAARPDIVLTQSQKFMSTSVGDRVSIICRASQSVGTAVAWYQLKAGQSPKLLIYSASNRFTGVPDRFTGSGSGTDFTLTISNVQSEDLADYFCQQYSTYPLAFGAGTKLELKGGGGSGGGGSGGGGSEVQLVESGGGIVQPGGSLKLSCAASGFTFNDFGMSWIRQTPDKRLELVATINTNGGTTHYPDSVKGRFSISRDNAKKFVYLQMSSLKSDDTAIYYCPREGLDYWGQGTTLTVSSTRDGNEEMGGITQTPYKVSISGTTVILTCPQYPGSEILWQHNDKNIGGDEDDKNIGSDEDHLSLKEFSELEQSGYYVCYPRGSKPEDANFYLYLRARVCENCMEMDVMSVATIVIVDICITGGLLLLVYYWSKNRKAKAKPVTRGAGAGGRQRGQNKERPPPVPNPDYEPIRKGQRDLYSGLNQRRI

SEQ ID NO: 11827 - protein, 409 aa, synthetic construct
MALPVTALLLPLALLLHAARPDIVLTQSQKFMSTSVGDRVSIICRASQSVGTAVAWYQLKAGQSPKLLIYSASNRFTGVPDRFTGSGSGTDFTLTISNVQSEDLADYFCQQYSTYPLAFGAGTKLELKGGGGSGGGGSGGGGSEVQLVESGGGIVQPGGSLKLSCAASGFTFNDFGMSWIRQTPDKRLELVATINTNGGTTHYPDSVKGRFSISRDNAKKFVYLQMSSLKSDDTAIYYCPREGLDYWGQGTTLTVSSTRFKIPIEELEDRVFVNCNTSITWVEGTVGTLLSDITRLDLGKRILDPRGIYRCNGTDIYKDKESTVQVHYRMCQSCVELDPATVAGIIVTDVIATLLLALGVFCFAGHETGRLSGAADTQALLRNDQVYQPLRDRDDAQYSHLGGNWARNK

SEQ ID NO: 11828 - protein, 419 aa, synthetic construct
MALPVTALLLPLALLLHAARPDIVLTQSQKFMSTSVGDRVSIICRASQSVGTAVAWYQLKAGQSPKLLIYSASNRFTGVPDRFTGSGSGTDFTLTISNVQSEDLADYFCQQYSTYPLAFGAGTKLELKGGGGSGGGGSGGGGSEVQLVESGGGIVQPGGSLKLSCAASGFTFNDFGMSWIRQTPDKRLELVATINTNGGTTHYPDSVKGRFSISRDNAKKFVYLQMSSLKSDDTAIYYCPREGLDYWGQGTTLTVSSTRQSIKGNHLVKVYDYQEDGSVLLTCDAEAKNITWFKDGKMIGFLTEDKKKWNLGSNAKDPRGMYQCKGSQNKSKPLQVYYRMCQNCIELNAATISGFLFAEIVSIFVLAVGVYFIAGQDGVRQSRASDKQTLLPNDQLYQPLKDREDDQYSHLQGNQLRRN

SEQ ID NO: 11829 - protein, 402 aa, synthetic construct
MALPVTALLLPLALLLHAARPDIVLTQSQKFMSTSVGDRVSIICRASQSVGTAVAWYQLKAGQSPKLLIYSASNRFTGVPDRFTGSGSGTDFTLTISNVQSEDLADYFCQQYSTYPLAFGAGTKLELKGGGGSGGGGSGGGGSEVQLVESGGGIVQPGGSLKLSCAASGFTFNDFGMSWIRQTPDKRLELVATINTNGGTTHYPDSVKGRFSISRDNAKKFVYLQMSSLKSDDTAIYYCPREGLDYWGQGTTLTVSSTRQSFGLLDPKLCYLLDGILFIYGVILTALFLRVKFSRSADAPAYQQGQNQLYNELNLGRREEYDVLDKRRGRDPEMGGKPQRRKNPQEGLYNELQKDKMAEAYSEIGMKGERRRGKGHDGLYQGLSTATKDTYDALHMQALPPR

SEQ ID NO: 11830 - protein, 444 aa, synthetic construct
MALPVTALLLPLALLLHAARPEVQLVESGGGIVQPGGSLKLSCAASGFTFNDFGMSWIRQTPDKRLELVATINTNGGTTHYPDSVKGRFSISRDNAKKFVYLQMSSLKSDDTAIYYCPREGLDYWGQGTTLTVSSGGGGSGGGGSGGGGSDIVLTQSQKFMSTSVGDRVSIICRASQSVGTAVAWYQLKAGQSPKLLIYSASNRFTGVPDRFTGSGSGTDFTLTISNVQSEDLADYFCQQYSTYPLAFGAGTKLELKTRDGNEEMGGITQTPYKVSISGTTVILTCPQYPGSEILWQHNDKNIGGDEDDKNIGSDEDHLSLKEFSELEQSGYYVCYPRGSKPEDANFYLYLRARVCENCMEMDVMSVATIVIVDICITGGLLLLVYYWSKNRKAKAKPVTRGAGAGGRQRGQNKERPPPVPNPDYEPIRKGQRDLYSGLNQRRI

SEQ ID NO: 11831 - protein, 409 aa, synthetic construct
MALPVTALLLPLALLLHAARPEVQLVESGGGIVQPGGSLKLSCAASGFTFNDFGMSWIRQTPDKRLELVATINTNGGTTHYPDSVKGRFSISRDNAKKFVYLQMSSLKSDDTAIYYCPREGLDYWGQGTTLTVSSGGGGSGGGGSGGGGSDIVLTQSQKFMSTSVGDRVSIICRASQSVGTAVAWYQLKAGQSPKLLIYSASNRFTGVPDRFTGSGSGTDFTLTISNVQSEDLADYFCQQYSTYPLAFGAGTKLELKTRFKIPIEELEDRVFVNCNTSITWVEGTVGTLLSDITRLDLGKRILDPRGIYRCNGTDIYKDKESTVQVHYRMCQSCVELDPATVAGIIVTDVIATLLLALGVFCFAGHETGRLSGAADTQALLRNDQVYQPLRDRDDAQYSHLGGNWARNK

SEQ ID NO: 11832 - protein, 419 aa, synthetic construct
MALPVTALLLPLALLLHAARPEVQLVESGGGIVQPGGSLKLSCAASGFTFNDFGMSWIRQTPDKRLELVATINTNGGTTHYPDSVKGRFSISRDNAKKFVYLQMSSLKSDDTAIYYCPREGLDYWGQGTTLTVSSGGGGSGGGGSGGGGSDIVLTQSQKFMSTSVGDRVSIICRASQSVGTAVAWYQLKAGQSPKLLIYSASNRFTGVPDRFTGSGSGTDFTLTISNVQSEDLADYFCQQYSTYPLAFGAGTKLELKTRQSIKGNHLVKVYDYQEDGSVLLTCDAEAKNITWFKDGKMIGFLTEDKKKWNLGSNAKDPRGMYQCKGSQNKSKPLQVYYRMCQNCIELNAATISGFLFAEIVSIFVLAVGVYFIAGQDGVRQSRASDKQTLLPNDQLYQPLKDREDDQYSHLQGNQLRRN

SEQ ID NO: 11833 - protein, 402 aa, synthetic construct
MALPVTALLLPLALLLHAARPEVQLVESGGGIVQPGGSLKLSCAASGFTFNDFGMSWIRQTPDKRLELVATINTNGGTTHYPDSVKGRFSISRDNAKKFVYLQMSSLKSDDTAIYYCPREGLDYWGQGTTLTVSSGGGGSGGGGSGGGGSDIVLTQSQKFMSTSVGDRVSIICRASQSVGTAVAWYQLKAGQSPKLLIYSASNRFTGVPDRFTGSGSGTDFTLTISNVQSEDLADYFCQQYSTYPLAFGAGTKLELKTRQSFGLLDPKLCYLLDGILFIYGVILTALFLRVKFSRSADAPAYQQGQNQLYNELNLGRREEYDVLDKRRGRDPEMGGKPQRRKNPQEGLYNELQKDKMAEAYSEIGMKGERRRGKGHDGLYQGLSTATKDTYDALHMQALPPR

SEQ ID NO: 11834 - protein, 497 aa, synthetic construct
MALPVTALLLPLALLLHAARPDIVLTQSQKFMSTSVGDRVSIICRASQSVGTAVAWYQLKAGQSPKLLIYSASNRFTGVPDRFTGSGSGTDFTLTISNVQSEDLADYFCQQYSTYPLAFGAGTKLELKGGGGSGGGGSGGGGSEVQLVESGGGIVQPGGSLKLSCAASGFTFNDFGMSWIRQTPDKRLELVATINTNGGTTHYPDSVKGRFSISRDNAKKFVYLQMSSLKSDDTAIYYCPREGLDYWGQGTTLTVSSTRGMRTEDLPKAVVFLEPQWYRVLEKDSVTLKCQGAYSPEDNSTQWFHNESLISSQASSYFIDAATVDDSGEYRCQTNLSTLSDPVQLEVHIGWLLLQAPRWVFKEEDPIHLRCHSWKNTALHKVTYLQNGKGRKYFHHNSDFYIPKATLKDSGSYFCRGLVGSKNVSSETVNITITQGLAVPTISSFFPPGYQVSFCLVMVLLFAVDTGLYFSVKTNIRSSTRDWKDHKFKWRKDPQDK

SEQ ID NO: 11835 - protein, 779 aa, synthetic construct
MALPVTALLLPLALLLHAARPDIVLTQSQKFMSTSVGDRVSIICRASQSVGTAVAWYQLKAGQSPKLLIYSASNRFTGVPDRFTGSGSGTDFTLTISNVQSEDLADYFCQQYSTYPLAFGAGTKLELKGGGGSGGGGSGGGGSEVQLVESGGGIVQPGGSLKLSCAASGFTFNDFGMSWIRQTPDKRLELVATINTNGGTTHYPDSVKGRFSISRDNAKKFVYLQMSSLKSDDTAIYYCPREGLDYWGQGTTLTVSSTRGGSGQQQTLPKPFIWAEPHFMVPKEKQVTICCQGNYGAVEYQLHFEGSLFAVDRPKPPERINKVQFYIPDMNSRMAGQYSCIYRVGELWSEPSNLLDLVVTEMYDTPTLSVHPGPEVISGEKVTFYCRLDTATSMFLLLKEGRSSHVQRGYGKVQAEFPLGPVTTAHRGTYRCFGSYNNHAWSFPSEPVKLLVTGDIENTSLAPEDPTFPADTWGTYLLTTETGLQKDHALWDHTAQNLLRMGLAFLVLVALVWFLVEDWLSRKRTRERASRASTWEGRRRLNTQTLRAKRSGSGVKQTLNFDLLKLAGDVESNPGPSRGHMTEYKPTVRLATRDDVPRAVRTLAAAFADYPATRHTVDPDRHIERVTELQELFLTRVGLDIGKVWVADDGAAVAVWTTPESVEAGAVFAEIGPRMAELSGSRLAAQQQMEGLLAPHRPKEPAWFLATVGVSPDHQGKGLGSAVVLPGVEAAERAGVPAFLETSAPRNLPFYERLGFTVTADVEVPEGPRTWCMTRKPGA

SEQ ID NO: 11836 - protein, 612 aa, synthetic construct
MALPVTALLLPLALLLHAARPDIVLTQSQKFMSTSVGDRVSIICRASQSVGTAVAWYQLKAGQSPKLLIYSASNRFTGVPDRFTGSGSGTDFTLTISNVQSEDLADYFCQQYSTYPLAFGAGTKLELKGGGGSGGGGSGGGGSEVQLVESGGGIVQPGGSLKLSCAASGFTFNDFGMSWIRQTPDKRLELVATINTNGGTTHYPDSVKGRFSISRDNAKKFVYLQMSSLKSDDTAIYYCPREGLDYWGQGTTLTVSSTRKIEVMYPPPYLDNEKSNGTIIHVKGARGDIENTSLAPEDPTFPADTWGTYLLTTETGLQKDHALWDHTAQNLLRMGLAFLVLVALVWFLVEDWLSRKRTRERASRASTWEGRRRLNTQTLRAKRSGSGVKQTLNFDLLKLAGDVESNPGPSRGHMTEYKPTVRLATRDDVPRAVRTLAAAFADYPATRHTVDPDRHIERVTELQELFLTRVGLDIGKVWVADDGAAVAVWTTPESVEAGAVFAEIGPRMAELSGSRLAAQQQMEGLLAPHRPKEPAWFLATVGVSPDHQGKGLGSAVVLPGVEAAERAGVPAFLETSAPRNLPFYERLGFTVTADVEVPEGPRTWCMTRKPGA

SEQ ID NO: 11837 - protein, 699 aa, synthetic construct
MALPVTALLLPLALLLHAARPDIVLTQSQKFMSTSVGDRVSIICRASQSVGTAVAWYQLKAGQSPKLLIYSASNRFTGVPDRFTGSGSGTDFTLTISNVQSEDLADYFCQQYSTYPLAFGAGTKLELKGGGGSGGGGSGGGGSEVQLVESGGGIVQPGGSLKLSCAASGFTFNDFGMSWIRQTPDKRLELVATINTNGGTTHYPDSVKGRFSISRDNAKKFVYLQMSSLKSDDTAIYYCPREGLDYWGQGTTLTVSSTRLWVSQPPEIRTLEGSSAFLPCSFNASQGRLAIGSVTWFRDEVVPGKEVRNGTPEFRGRLAPLASSRFLHDHQAELHIRDVRGHDASIYVCRVEVLGLGVGTGNGTRLVVEKEHPQLGAGTVLLLRAGFYAVSFLSVAVGSTVYYQGKCLTWKGPRRQLPAVVPAPLPPPCGSSAHLLPPVPGGRAKRSGSGVKQTLNFDLLKLAGDVESNPGPSRMYRMQLLSCIALSLALVTNSAPTSSSTKKTQLQLEHLLLDLQMILNGINNYKNPKLTEMLTAKFYMPKKATELKHLQCLEEELKPLEEVLNLAQSKNFHLRPRDLISNINVIVLELKGSETTFMCEYADETATIVEFLNRWITFCQSIISTLTKIEVMYPPPYLDNEKSNGTIIHVKGKHLCPSPLFPGPSKPFWVLVVVGGVLACYSLLVTVAFIIFWVRSKRS

SEQ ID NO: 11838 - protein, 675 aa, synthetic construct
MALPVTALLLPLALLLHAARPDIVLTQSQKFMSTSVGDRVSIICRASQSVGTAVAWYQLKAGQSPKLLIYSASNRFTGVPDRFTGSGSGTDFTLTISNVQSEDLADYFCQQYSTYPLAFGAGTKLELKGGGGSGGGGSGGGGSEVQLVESGGGIVQPGGSLKLSCAASGFTFNDFGMSWIRQTPDKRLELVATINTNGGTTHYPDSVKGRFSISRDNAKKFVYLQMSSLKSDDTAIYYCPREGLDYWGQGTTLTVSSTRLWVSQPPEIRTLEGSSAFLPCSFNASQGRLAIGSVTWFRDEVVPGKEVRNGTPEFRGRLAPLASSRFLHDHQAELHIRDVRGHDASIYVCRVEVLGLGVGTGNGTRLVVEKEHPQLGAGTVLLLRAGFYAVSFLSVAVGSTVYYQGKCLTWKGPRRQLPAVVPAPLPPPCGSSAHLLPPVPGGRAKRSGSGVKQTLNFDLLKLAGDVESNPGPSRGHMTEYKPTVRLATRDDVPRAVRTLAAAFADYPATRHTVDPDRHIERVTELQELFLTRVGLDIGKVWVADDGAAVAVWTTPESVEAGAVFAEIGPRMAELSGSRLAAQQQMEGLLAPHRPKEPAWFLATVGVSPDHQGKGLGSAVVLPGVEAAERAGVPAFLETSAPRNLPFYERLGFTVTADVEVPEGPRTWCMTRKPGA

SEQ ID NO: 11839 - protein, 351 aa, synthetic construct
MALPVTALLLPLALLLHAARPDIVLTQSQKFMSTSVGDRVSIICRASQSVGTAVAWYQLKAGQSPKLLIYSASNRFTGVPDRFTGSGSGTDFTLTISNVQSEDLADYFCQQYSTYPLAFGAGTKLELKGGGGSGGGGSGGGGSEVQLVESGGGIVQPGGSLKLSCAASGFTFNDFGMSWIRQTPDKRLELVATINTNGGTTHYPDSVKGRFSISRDNAKKFVYLQMSSLKSDDTAIYYCPREGLDYWGQGTTLTVSSTRKIEVMYPPPYLDNEKSNGTIIHVKGARITQGLAVSTISSFFPPGYQVSFCLVMVLLFAVDTGLYFSVKTNIRSSTRDWKDHKFKWRKDPQDK

SEQ ID NO: 11840 - protein, 351 aa, synthetic construct
MALPVTALLLPLALLLHAARPDIVLTQSQKFMSTSVGDRVSIICRASQSVGTAVAWYQLKAGQSPKLLIYSASNRFTGVPDRFTGSGSGTDFTLTISNVQSEDLADYFCQQYSTYPLAFGAGTKLELKGGGGSGGGGSGGGGSEVQLVESGGGIVQPGGSLKLSCAASGFTFNDFGMSWIRQTPDKRLELVATINTNGGTTHYPDSVKGRFSISRDNAKKFVYLQMSSLKSDDTAIYYCPREGLDYWGQGTTLTVSSTRKIEVMYPPPYLDNEKSNGTIIHVKGARITQGLAVPTISSFFPPGYQVSFCLVMVLLFAVDTGLYFSVKTNIRSSTRDWKDHKFKWRKDPQDK

SEQ ID NO: 11841 - protein, 330 aa, synthetic construct
MALPVTALLLPLALLLHAARPDIVLTQSQKFMSTSVGDRVSIICRASQSVGTAVAWYQLKAGQSPKLLIYSASNRFTGVPDRFTGSGSGTDFTLTISNVQSEDLADYFCQQYSTYPLAFGAGTKLELKGGGGSGGGGSGGGGSEVQLVESGGGIVQPGGSLKLSCAASGFTFNDFGMSWIRQTPDKRLELVATINTNGGTTHYPDSVKGRFSISRDNAKKFVYLQMSSLKSDDTAIYYCPREGLDYWGQGTTLTVSSTRKIEVMYPPPYLDNEKSNGTIIHVKGARITQGLAVSTISSFSPPGYQVSFCLVMVLLFAVDTGLYFSVKTNI

SEQ ID NO: 11842 - protein, 361 aa, synthetic construct
MALPVTALLLPLALLLHAARPDIVLTQSQKFMSTSVGDRVSIICRASQSVGTAVAWYQLKAGQSPKLLIYSASNRFTGVPDRFTGSGSGTDFTLTISNVQSEDLADYFCQQYSTYPLAFGAGTKLELKGGGGSGGGGSGGGGSEVQLVESGGGIVQPGGSLKLSCAASGFTFNDFGMSWIRQTPDKRLELVATINTNGGTTHYPDSVKGRFSISRDNAKKFVYLQMSSLKSDDTAIYYCPREGLDYWGQGTTLTVSSTRKIEVMYPPPYLDNEKSNGTIIHVKGARVEKEHPQLGAGTVLLLRAGFYAVSFLSVAVGSTVYYQGKCLTWKGPRRQLPAVVPAPLPPPCGSSAHLLPPVPGG

SEQ ID NO: 11843 - protein, 442 aa, synthetic construct
MALPVTALLLPLALLLHAARPDIVLTQSQKFMSTSVGDRVSIICRASQSVGTAVAWYQLKAGQSPKLLIYSASNRFTGVPDRFTGSGSGTDFTLTISNVQSEDLADYFCQQYSTYPLAFGAGTKLELKGGGGSGGGGSGGGGSEVQLVESGGGIVQPGGSLKLSCAASGFTFNDFGMSWIRQTPDKRLELVATINTNGGTTHYPDSVKGRFSISRDNAKKFVYLQMSSLKSDDTAIYYCPREGLDYWGQGTTLTVSSTRKIEVMYPPPYLDNEKSNGTIIHVKGARKSVRFYLVVSPASASTQTSWTPRDLVSSQTQTQSCVPPTAGARQAPESPSTIPVPSQPQNSTLRPGPAAPIALVPVFCGLLVAKSLVLSALLVWWGDIWWKTMMELRSLDTQKATCHLQQVTDLPWTSVSSPVEREILYHTVARTKISDDDDEHTL

SEQ ID NO: 11844 - protein, 379 aa, synthetic construct
MALPVTALLLPLALLLHAARPDIVLTQSQKFMSTSVGDRVSIICRASQSVGTAVAWYQLKAGQSPKLLIYSASNRFTGVPDRFTGSGSGTDFTLTISNVQSEDLADYFCQQYSTYPLAFGAGTKLELKGGGGSGGGGSGGGGSEVQLVESGGGIVQPGGSLKLSCAASGFTFNDFGMSWIRQTPDKRLELVATINTNGGTTHYPDSVKGRFSISRDNAKKFVYLQMSSLKSDDTAIYYCPREGLDYWGQGTTLTVSSTRKIEVMYPPPYLDNEKSNGTIIHVKGARGDIENTSLAPEDPTFPADTWGTYLLTTETGLQKDHALWDHTAQNLLRMGLAFLVLVALVWFLVEDWLSRKRTRERASRASTWEGRRRLNTQTL

SEQ ID NO: 11845 - protein, 975 aa, synthetic construct
MALPVTALLLPLALLLHAARPDIVLTQSQKFMSTSVGDRVSIICRASQSVGTAVAWYQLKAGQSPKLLIYSASNRFTGVPDRFTGSGSGTDFTLTISNVQSEDLADYFCQQYSTYPLAFGAGTKLELKLEGQPKANPTVTLFPPSSEELQANKATLVCLISDFYPGAVTVAWKADGSPVKAGVETTKPSKQSNNKYAASSYLSLTPEQWKSHRSYSCQVTHEGSTVEKTVAPTECSGSQSFGLLDPKLCYLLDGILFIYGVILTALFLRVKFSRSADAPAYQQGQNQLYNELNLGRREEYDVLDKRRGRDPEMGGKPQRRKNPQEGLYNELQKDKMAEAYSEIGMKGERRRGKGHDGLYQGLSTATKDTYDALHMQALPPRRAKRSGSGATNFSLLKQAGDVEENPGPTSMDWIWRILFLVGAATGAHSFEEVQLVESGGGIVQPGGSLKLSCAASGFTFNDFGMSWIRQTPDKRLELVATINTNGGTTHYPDSVKGRFSISRDNAKKFVYLQMSSLKSDDTAIYYCPREGLDYWGQGTTLTVSSTRASTKGPSVFPLAPSSKSTSGGTAALGCLVKDYFPEPVTVSWNSGALTSGVHTFPAVLQSSGLYSLSSVVTVPSSSLGTQTYICNVNHKPSNTKVDKRVEPKSCGTGDIENTSLAPEDPTFPADTWGTYLLTTETGLQKDHALWDHTAQNLLRMGLAFLVLVALVWFLVEDWLSRKRTRERASRASTWEGRRRLNTQTLRAKRSGSGATNFSLLKQAGDVEENPGPSRGHMTEYKPTVRLATRDDVPRAVRTLAAAFADYPATRHTVDPDRHIERVTELQELFLTRVGLDIGKVWVADDGAAVAVWTTPESVEAGAVFAEIGPRMAELSGSRLAAQQQMEGLLAPHRPKEPAWFLATVGVSPDHQGKGLGSAVVLPGVEAAERAGVPAFLETSAPRNLPFYERLGFTVTADVEVPEGPRTWCMTRKPGA

SEQ ID NO: 11846 - protein, 1041 aa, synthetic construct
MALPVTALLLPLALLLHAARPDIVLTQSQKFMSTSVGDRVSIICRASQSVGTAVAWYQLKAGQSPKLLIYSASNRFTGVPDRFTGSGSGTDFTLTISNVQSEDLADYFCQQYSTYPLAFGAGTKLELKLEGQPKANPTVTLFPPSSEELQANKATLVCLISDFYPGAVTVAWKADGSPVKAGVETTKPSKQSNNKYAASSYLSLTPEQWKSHRSYSCQVTHEGSTVEKTVAPTECSGSQSFGLLDPKLCYLLDGILFIYGVILTALFLRVKFSRSADAPAYQQGQNQLYNELNLGRREEYDVLDKRRGRDPEMGGKPQRRKNPQEGLYNELQKDKMAEAYSEIGMKGERRRGKGHDGLYQGLSTATKDTYDALHMQALPPRRAKRSGSGATNFSLLKQAGDVEENPGPTSMDWIWRILFLVGAATGAHSFEEVQLVESGGGIVQPGGSLKLSCAASGFTFNDFGMSWIRQTPDKRLELVATINTNGGTTHYPDSVKGRFSISRDNAKKFVYLQMSSLKSDDTAIYYCPREGLDYWGQGTTLTVSSTRASTKGPSVFPLAPSSKSTSGGTAALGCLVKDYFPEPVTVSWNSGALTSGVHTFPAVLQSSGLYSLSSVVTVPSSSLGTQTYICNVNHKPSNTKVDKRVEPKSCGTKSVRFYLVVSPASASTQTSWTPRDLVSSQTQTQSCVPPTAGARQAPESPSTIPVPSQPQNSTLRPGPAAPIALVPVFCGLLVAKSLVLSALLVWWGDIWWKTMMELRSLDTQKATCHLQQVTDLPWTSVSSPVEREILYHTVARTKISDDDDEHTLRAKRSGSGVKQTLNFDLLKLAGDVESNPGPSRGHMTEYKPTVRLATRDDVPRAVRTLAAAFADYPATRHTVDPDRHIERVTELQELFLTRVGLDIGKVWVADDGAAVAVWTTPESVEAGAVFAEIGPRMAELSGSRLAAQQQMEGLLAPHRPKEPAWFLATVGVSPDHQGKGLGSAVVLPGVEAAERAGVPAFLETSAPRNLPFYERLGFTVTADVEVPEGPRTWCMTRKPGA

SEQ ID NO: 11847 - protein, 961 aa, synthetic construct
MALPVTALLLPLALLLHAARPDIVLTQSQKFMSTSVGDRVSIICRASQSVGTAVAWYQLKAGQSPKLLIYSASNRFTGVPDRFTGSGSGTDFTLTISNVQSEDLADYFCQQYSTYPLAFGAGTKLELKLEGQPKANPTVTLFPPSSEELQANKATLVCLISDFYPGAVTVAWKADGSPVKAGVETTKPSKQSNNKYAASSYLSLTPEQWKSHRSYSCQVTHEGSTVEKTVAPTECSGSQSFGLLDPKLCYLLDGILFIYGVILTALFLRVKFSRSADAPAYQQGQNQLYNELNLGRREEYDVLDKRRGRDPEMGGKPQRRKNPQEGLYNELQKDKMAEAYSEIGMKGERRRGKGHDGLYQGLSTATKDTYDALHMQALPPRRAKRSGSGATNFSLLKQAGDVEENPGPTSMDWIWRILFLVGAATGAHSFEEVQLVESGGGIVQPGGSLKLSCAASGFTFNDFGMSWIRQTPDKRLELVATINTNGGTTHYPDSVKGRFSISRDNAKKFVYLQMSSLKSDDTAIYYCPREGLDYWGQGTTLTVSSTRASTKGPSVFPLAPSSKSTSGGTAALGCLVKDYFPEPVTVSWNSGALTSGVHTFPAVLQSSGLYSLSSVVTVPSSSLGTQTYICNVNHKPSNTKVDKRVEPKSCGTVVEKEHPQLGAGTVLLLRAGFYAVSFLSVAVGSTVYYQGKCLTWKGPRRQLPAVVPAPLPPPCGSSAHLLPPVPGGRAKRSGSGVKQTLNFDLLKLAGDVESNPGPSRGHMTEYKPTVRLATRDDVPRAVRTLAAAFADYPATRHTVDPDRHIERVTELQELFLTRVGLDIGKVWVADDGAAVAVWTTPESVEAGAVFAEIGPRMAELSGSRLAAQQQMEGLLAPHRPKEPAWFLATVGVSPDHQGKGLGSAVVLPGVEAAERAGVPAFLETSAPRNLPFYERLGFTVTADVEVPEGPRTWCMTRKPGA

SEQ ID NO: 11848 - protein, 990 aa, synthetic construct
MALPVTALLLPLALLLHAARPDIVLTQSQKFMSTSVGDRVSIICRASQSVGTAVAWYQLKAGQSPKLLIYSASNRFTGVPDRFTGSGSGTDFTLTISNVQSEDLADYFCQQYSTYPLAFGAGTKLELKLEDLKNVFPPEVAVFEPSEAEISHTQKATLVCLATGFYPDHVELSWWVNGKEVHSGVSTDPQPLKEQPALNDSRYCLSSRLRVSATFWQNPRNHFRCQVQFYGLSENDEWTQDRAKPVTQIVSAEAWGRADCGSQSFGLLDPKLCYLLDGILFIYGVILTALFLRVKFSRSADAPAYQQGQNQLYNELNLGRREEYDVLDKRRGRDPEMGGKPQRRKNPQEGLYNELQKDKMAEAYSEIGMKGERRRGKGHDGLYQGLSTATKDTYDALHMQALPPRRAKRSGSGATNFSLLKQAGDVEENPGPTSMDWIWRILFLVGAATGAHSFEEVQLVESGGGIVQPGGSLKLSCAASGFTFNDFGMSWIRQTPDKRLELVATINTNGGTTHYPDSVKGRFSISRDNAKKFVYLQMSSLKSDDTAIYYCPREGLDYWGQGTTLTVSSTRIQNPDPAVYQLRDSKSSDKSVCLFTDFDSQTNVSQSKDSDVYITDKTVLDMRSMDFKSNSAVAWSNKSDFACANAFNNSIIPEDTFFPSPESSCGTGDIENTSLAPEDPTFPADTWGTYLLTTETGLQKDHALWDHTAQNLLRMGLAFLVLVALVWFLVEDWLSRKRTRERASRASTWEGRRRLNTQTLRAKRSGSGATNFSLLKQAGDVEENPGPSRGHMTEYKPTVRLATRDDVPRAVRTLAAAFADYPATRHTVDPDRHIERVTELQELFLTRVGLDIGKVWVADDGAAVAVWTTPESVEAGAVFAEIGPRMAELSGSRLAAQQQMEGLLAPHRPKEPAWFLATVGVSPDHQGKGLGSAVVLPGVEAAERAGVPAFLETSAPRNLPFYERLGFTVTADVEVPEGPRTWCMTRKPGA

SEQ ID NO: 11849 - protein, 1056 aa, synthetic construct
MALPVTALLLPLALLLHAARPDIVLTQSQKFMSTSVGDRVSIICRASQSVGTAVAWYQLKAGQSPKLLIYSASNRFTGVPDRFTGSGSGTDFTLTISNVQSEDLADYFCQQYSTYPLAFGAGTKLELKLEDLKNVFPPEVAVFEPSEAEISHTQKATLVCLATGFYPDHVELSWWVNGKEVHSGVSTDPQPLKEQPALNDSRYCLSSRLRVSATFWQNPRNHFRCQVQFYGLSENDEWTQDRAKPVTQIVSAEAWGRADCGSQSFGLLDPKLCYLLDGILFIYGVILTALFLRVKFSRSADAPAYQQGQNQLYNELNLGRREEYDVLDKRRGRDPEMGGKPQRRKNPQEGLYNELQKDKMAEAYSEIGMKGERRRGKGHDGLYQGLSTATKDTYDALHMQALPPRRAKRSGSGATNFSLLKQAGDVEENPGPTSMDWIWRILFLVGAATGAHSFEEVQLVESGGGIVQPGGSLKLSCAASGFTFNDFGMSWIRQTPDKRLELVATINTNGGTTHYPDSVKGRFSISRDNAKKFVYLQMSSLKSDDTAIYYCPREGLDYWGQGTTLTVSSTRIQNPDPAVYQLRDSKSSDKSVCLFTDFDSQTNVSQSKDSDVYITDKTVLDMRSMDFKSNSAVAWSNKSDFACANAFNNSIIPEDTFFPSPESSCGTKSVRFYLVVSPASASTQTSWTPRDLVSSQTQTQSCVPPTAGARQAPESPSTIPVPSQPQNSTLRPGPAAPIALVPVFCGLLVAKSLVLSALLVWWGDIWWKTMMELRSLDTQKATCHLQQVTDLPWTSVSSPVEREILYHTVARTKISDDDDEHTLRAKRSGSGVKQTLNFDLLKLAGDVESNPGPSRGHMTEYKPTVRLATRDDVPRAVRTLAAAFADYPATRHTVDPDRHIERVTELQELFLTRVGLDIGKVWVADDGAAVAVWTTPESVEAGAVFAEIGPRMAELSGSRLAAQQQMEGLLAPHRPKEPAWFLATVGVSPDHQGKGLGSAVVLPGVEAAERAGVPAFLETSAPRNLPFYERLGFTVTADVEVPEGPRTWCMTRKPGA

SEQ ID NO: 11850 - protein, 976 aa, synthetic construct
MALPVTALLLPLALLLHAARPDIVLTQSQKFMSTSVGDRVSIICRASQSVGTAVAWYQLKAGQSPKLLIYSASNRFTGVPDRFTGSGSGTDFTLTISNVQSEDLADYFCQQYSTYPLAFGAGTKLELKLEDLKNVFPPEVAVFEPSEAEISHTQKATLVCLATGFYPDHVELSWWVNGKEVHSGVSTDPQPLKEQPALNDSRYCLSSRLRVSATFWQNPRNHFRCQVQFYGLSENDEWTQDRAKPVTQIVSAEAWGRADCGSQSFGLLDPKLCYLLDGILFIYGVILTALFLRVKFSRSADAPAYQQGQNQLYNELNLGRREEYDVLDKRRGRDPEMGGKPQRRKNPQEGLYNELQKDKMAEAYSEIGMKGERRRGKGHDGLYQGLSTATKDTYDALHMQALPPRRAKRSGSGATNFSLLKQAGDVEENPGPTSMDWIWRILFLVGAATGAHSFEEVQLVESGGGIVQPGGSLKLSCAASGFTFNDFGMSWIRQTPDKRLELVATINTNGGTTHYPDSVKGRFSISRDNAKKFVYLQMSSLKSDDTAIYYCPREGLDYWGQGTTLTVSSTRIQNPDPAVYQLRDSKSSDKSVCLFTDFDSQTNVSQSKDSDVYITDKTVLDMRSMDFKSNSAVAWSNKSDFACANAFNNSIIPEDTFFPSPESSCGTVVEKEHPQLGAGTVLLLRAGFYAVSFLSVAVGSTVYYQGKCLTWKGPRRQLPAVVPAPLPPPCGSSAHLLPPVPGGRAKRSGSGVKQTLNFDLLKLAGDVESNPGPSRGHMTEYKPTVRLATRDDVPRAVRTLAAAFADYPATRHTVDPDRHIERVTELQELFLTRVGLDIGKVWVADDGAAVAVWTTPESVEAGAVFAEIGPRMAELSGSRLAAQQQMEGLLAPHRPKEPAWFLATVGVSPDHQGKGLGSAVVLPGVEAAERAGVPAFLETSAPRNLPFYERLGFTVTADVEVPEGPRTWCMTRKPGA

SEQ ID NO: 11851 - protein, 947 aa, synthetic construct
MALPVTALLLPLALLLHAARPDIVLTQSQKFMSTSVGDRVSIICRASQSVGTAVAWYQLKAGQSPKLLIYSASNRFTGVPDRFTGSGSGTDFTLTISNVQSEDLADYFCQQYSTYPLAFGAGTKLELKLEGQPKANPTVTLFPPSSEELQANKATLVCLISDFYPGAVTVAWKADGSPVKAGVETTKPSKQSNNKYAASSYLSLTPEQWKSHRSYSCQVTHEGSTVEKTVAPTECSGSQSFGLLDPKLCYLLDGILFIYGVILTALFLRVKFSRSADAPAYQQGQNQLYNELNLGRREEYDVLDKRRGRDPEMGGKPQRRKNPQEGLYNELQKDKMAEAYSEIGMKGERRRGKGHDGLYQGLSTATKDTYDALHMQALPPRRAKRSGSGATNFSLLKQAGDVEENPGPTSMDWIWRILFLVGAATGAHSFEEVQLVESGGGIVQPGGSLKLSCAASGFTFNDFGMSWIRQTPDKRLELVATINTNGGTTHYPDSVKGRFSISRDNAKKFVYLQMSSLKSDDTAIYYCPREGLDYWGQGTTLTVSSTRASTKGPSVFPLAPSSKSTSGGTAALGCLVKDYFPEPVTVSWNSGALTSGVHTFPAVLQSSGLYSLSSVVTVPSSSLGTQTYICNVNHKPSNTKVDKRVEPKSCGTITQGLAVSTISSFFPPGYQVSFCLVMVLLFAVDTGLYFSVKTNIRSSTRDWKDHKFKWRKDPQDKRAKRSGSGATNFSLLKQAGDVEENPGPSRGHMTEYKPTVRLATRDDVPRAVRTLAAAFADYPATRHTVDPDRHIERVTELQELFLTRVGLDIGKVWVADDGAAVAVWTTPESVEAGAVFAEIGPRMAELSGSRLAAQQQMEGLLAPHRPKEPAWFLATVGVSPDHQGKGLGSAVVLPGVEAAERAGVPAFLETSAPRNLPFYERLGFTVTADVEVPEGPRTWCMTRKPGA

SEQ ID NO: 11852 - protein, 962 aa, synthetic construct
MALPVTALLLPLALLLHAARPDIVLTQSQKFMSTSVGDRVSIICRASQSVGTAVAWYQLKAGQSPKLLIYSASNRFTGVPDRFTGSGSGTDFTLTISNVQSEDLADYFCQQYSTYPLAFGAGTKLELKLEDLKNVFPPEVAVFEPSEAEISHTQKATLVCLATGFYPDHVELSWWVNGKEVHSGVSTDPQPLKEQPALNDSRYCLSSRLRVSATFWQNPRNHFRCQVQFYGLSENDEWTQDRAKPVTQIVSAEAWGRADCGSQSFGLLDPKLCYLLDGILFIYGVILTALFLRVKFSRSADAPAYQQGQNQLYNELNLGRREEYDVLDKRRGRDPEMGGKPQRRKNPQEGLYNELQKDKMAEAYSEIGMKGERRRGKGHDGLYQGLSTATKDTYDALHMQALPPRRAKRSGSGATNFSLLKQAGDVEENPGPTSMDWIWRILFLVGAATGAHSFEEVQLVESGGGIVQPGGSLKLSCAASGFTFNDFGMSWIRQTPDKRLELVATINTNGGTTHYPDSVKGRFSISRDNAKKFVYLQMSSLKSDDTAIYYCPREGLDYWGQGTTLTVSSTRIQNPDPAVYQLRDSKSSDKSVCLFTDFDSQTNVSQSKDSDVYITDKTVLDMRSMDFKSNSAVAWSNKSDFACANAFNNSIIPEDTFFPSPESSCGTITQGLAVSTISSFFPPGYQVSFCLVMVLLFAVDTGLYFSVKTNIRSSTRDWKDHKFKWRKDPQDKRAKRSGSGATNFSLLKQAGDVEENPGPSRGHMTEYKPTVRLATRDDVPRAVRTLAAAFADYPATRHTVDPDRHIERVTELQELFLTRVGLDIGKVWVADDGAAVAVWTTPESVEAGAVFAEIGPRMAELSGSRLAAQQQMEGLLAPHRPKEPAWFLATVGVSPDHQGKGLGSAVVLPGVEAAERAGVPAFLETSAPRNLPFYERLGFTVTADVEVPEGPRTWCMTRKPGA

SEQ ID NO: 11853 - protein, 645 aa, synthetic construct
MALPVTALLLPLALLLHAARPDIVLTQSQKFMSTSVGDRVSIICRASQSVGTAVAWYQLKAGQSPKLLIYSASNRFTGVPDRFTGSGSGTDFTLTISNVQSEDLADYFCQQYSTYPLAFGAGTKLELKLEGQPKANPTVTLFPPSSEELQANKATLVCLISDFYPGAVTVAWKADGSPVKAGVETTKPSKQSNNKYAASSYLSLTPEQWKSHRSYSCQVTHEGSTVEKTVAPTECSGSLGEPQLCYILDAILFLYGIVLTLLYCRLKIQVRKAAITSYEKSDGVYTGLSTRNQETYETLKHEKPPQRAKRSGSGATNFSLLKQAGDVEENPGPTSMDWIWRILFLVGAATGAHSFEEVQLVESGGGIVQPGGSLKLSCAASGFTFNDFGMSWIRQTPDKRLELVATINTNGGTTHYPDSVKGRFSISRDNAKKFVYLQMSSLKSDDTAIYYCPREGLDYWGQGTTLTVSSTRASTKGPSVFPLAPSSKSTSGGTAALGCLVKDYFPEPVTVSWNSGALTSGVHTFPAVLQSSGLYSLSSVVTVPSSSLGTQTYICNVNHKPSNTKVDKRVEPKSCGTLGEPQLCYILDAILFLYGIVLTLLYCRLKIQVRKAAITSYEKSDGVYTGLSTRNQETYETLKHEKPPQ

SEQ ID NO: 11854 - protein, 859 aa, synthetic construct; identical to SEQ ID NO: 11687

SEQ ID NO: 11855 - protein, 859 aa, synthetic construct; identical to SEQ ID NO: 11687

SEQ ID NO: 11856 - protein, 859 aa, synthetic construct; identical to SEQ ID NO: 11687

SEQ ID NO: 11857 - protein, 859 aa, synthetic construct; identical to SEQ ID NO: 11687

SEQ ID NO: 11858 - protein, 859 aa, synthetic construct; identical to SEQ ID NO: 11687

SEQ ID NO: 11859 - protein, 859 aa, synthetic construct; identical to SEQ ID NO: 11687

SEQ ID NO: 11860 - protein, 859 aa, synthetic construct; identical to SEQ ID NO: 11687

SEQ ID NO: 11861 - protein, 859 aa, synthetic construct; identical to SEQ ID NO: 11687

SEQ ID NO: 11862 - protein, 859 aa, synthetic construct; identical to SEQ ID NO: 11687

SEQ ID NO: 11863 - protein, 859 aa, synthetic construct; identical to SEQ ID NO: 11687

SEQ ID NO: 11864 - protein, 859 aa, synthetic construct; identical to SEQ ID NO: 11687

SEQ ID NO: 11865 - protein, 859 aa, synthetic construct; identical to SEQ ID NO: 11687

SEQ ID NO: 11866 - protein, 859 aa, synthetic construct; identical to SEQ ID NO: 11687

SEQ ID NO: 11867 - protein, 859 aa, synthetic construct; identical to SEQ ID NO: 11687

SEQ ID NO: 11868 - protein, 859 aa, synthetic construct; identical to SEQ ID NO: 11687

SEQ ID NO: 11869 - protein, 859 aa, synthetic construct; identical to SEQ ID NO: 11687

SEQ ID NO: 11870 - protein, 859 aa, synthetic construct; identical to SEQ ID NO: 11687

SEQ ID NO: 11871 - protein, 859 aa, synthetic construct; identical to SEQ ID NO: 11687

SEQ ID NO: 11872 - protein, 859 aa, synthetic construct; identical to SEQ ID NO: 11687

SEQ ID NO: 11873 - protein, 859 aa, synthetic construct; identical to SEQ ID NO: 11687

SEQ ID NO: 11874 - protein, 859 aa, synthetic construct; identical to SEQ ID NO: 11687

SEQ ID NO: 11875 - protein, 859 aa, synthetic construct; identical to SEQ ID NO: 11687

SEQ ID NO: 11876 - protein, 859 aa, synthetic construct; identical to SEQ ID NO: 11687

SEQ ID NO: 11877 - protein, 859 aa, synthetic construct; identical to SEQ ID NO: 11687

SEQ ID NO: 11878 - protein, 859 aa, synthetic construct; identical to SEQ ID NO: 11687

SEQ ID NO: 11879 - protein, 859 aa, synthetic construct; identical to SEQ ID NO: 11687

SEQ ID NO: 11880 - protein, 859 aa, synthetic construct; identical to SEQ ID NO: 11687

SEQ ID NO: 11881 - protein, 859 aa, synthetic construct; identical to SEQ ID NO: 11687

SEQ ID NO: 11882 - protein, 859 aa, synthetic construct; identical to SEQ ID NO: 11687

SEQ ID NO: 11883 - protein, 859 aa, synthetic construct; identical to SEQ ID NO: 11687

SEQ ID NO: 11884 - protein, 859 aa, synthetic construct; identical to SEQ ID NO: 11687

SEQ ID NO: 11885 - protein, 859 aa, synthetic construct; identical to SEQ ID NO: 11687

SEQ ID NO: 11886 - protein, 859 aa, synthetic construct; identical to SEQ ID NO: 11687

SEQ ID NO: 11887 - protein, 859 aa, synthetic construct; identical to SEQ ID NO: 11687

SEQ ID NO: 11888 - protein, 859 aa, synthetic construct; identical to SEQ ID NO: 11687

SEQ ID NO: 11889 - protein, 859 aa, synthetic construct; identical to SEQ ID NO: 11687

SEQ ID NO: 11890 - protein, 859 aa, synthetic construct; identical to SEQ ID NO: 11687

SEQ ID NO: 11891 - protein, 859 aa, synthetic construct; identical to SEQ ID NO: 11687

SEQ ID NO: 11892 - protein, 859 aa, synthetic construct; identical to SEQ ID NO: 11687

SEQ ID NO: 11893 - protein, 859 aa, synthetic construct; identical to SEQ ID NO: 11687

SEQ ID NO: 11894 - protein, 859 aa, synthetic construct; identical to SEQ ID NO: 11687

SEQ ID NO: 11895 - protein, 859 aa, synthetic construct; identical to SEQ ID NO: 11687

SEQ ID NO: 11896 - protein, 859 aa, synthetic construct; identical to SEQ ID NO: 11687

SEQ ID NO: 11897 - protein, 859 aa, synthetic construct; identical to SEQ ID NO: 11687

SEQ ID NO: 11898 - protein, 859 aa, synthetic construct; identical to SEQ ID NO: 11687

SEQ ID NO: 11899 - protein, 859 aa, synthetic construct; identical to SEQ ID NO: 11687

SEQ ID NO: 11900 - protein, 859 aa, synthetic construct; identical to SEQ ID NO: 11687

SEQ ID NO: 11901 - protein, 859 aa, synthetic construct; identical to SEQ ID NO: 11687

SEQ ID NO: 11902 - protein, 859 aa, synthetic construct; identical to SEQ ID NO: 11687

SEQ ID NO: 11903 - protein, 859 aa, synthetic construct; identical to SEQ ID NO: 11687

SEQ ID NO: 11904 - protein, 859 aa, synthetic construct; identical to SEQ ID NO: 11687

SEQ ID NO: 11905 - protein, 859 aa, synthetic construct; identical to SEQ ID NO: 11687

SEQ ID NO: 11906 - protein, 859 aa, synthetic construct; identical to SEQ ID NO: 11687

SEQ ID NO: 11907 - protein, 859 aa, synthetic construct; identical to SEQ ID NO: 11687

SEQ ID NO: 11908 - protein, 859 aa, synthetic construct; identical to SEQ ID NO: 11687

SEQ ID NO: 11909 - protein, 859 aa, synthetic construct; identical to SEQ ID NO: 11687

SEQ ID NO: 11910 - protein, 859 aa, synthetic construct; identical to SEQ ID NO: 11687

SEQ ID NO: 11911 - protein, 859 aa, synthetic construct; identical to SEQ ID NO: 11687

SEQ ID NO: 11912 - protein, 859 aa, synthetic construct; identical to SEQ ID NO: 11687

SEQ ID NO: 11913 - protein, 859 aa, synthetic construct; identical to SEQ ID NO: 11687

SEQ ID NO: 11914 - protein, 859 aa, synthetic construct; identical to SEQ ID NO: 11687

SEQ ID NO: 11915 - protein, 859 aa, synthetic construct; identical to SEQ ID NO: 11687

SEQ ID NO: 11916 - protein, 859 aa, synthetic construct; identical to SEQ ID NO: 11687

SEQ ID NO: 11917 - protein, 859 aa, synthetic construct; identical to SEQ ID NO: 11687

SEQ ID NO: 11918 - protein, 859 aa, synthetic construct; identical to SEQ ID NO: 11687

SEQ ID NO: 11919 - protein, 859 aa, synthetic construct; identical to SEQ ID NO: 11687

SEQ ID NO: 11920 - protein, 859 aa, synthetic construct; identical to SEQ ID NO: 11687

SEQ ID NO: 11921 - protein, 859 aa, synthetic construct; identical to SEQ ID NO: 11687

SEQ ID NO: 11922 - protein, 859 aa, synthetic construct; identical to SEQ ID NO: 11687

SEQ ID NO: 11923 - protein, 859 aa, synthetic construct; identical to SEQ ID NO: 11687

SEQ ID NO: 11924 - protein, 859 aa, synthetic construct; identical to SEQ ID NO: 11687

SEQ ID NO: 11925 - protein, 859 aa, synthetic construct; identical to SEQ ID NO: 11687

SEQ ID NO: 11926 - protein, 859 aa, synthetic construct; identical to SEQ ID NO: 11687

SEQ ID NO: 11927 - protein, 859 aa, synthetic construct; identical to SEQ ID NO: 11687

SEQ ID NO: 11928 - protein, 859 aa, synthetic construct; identical to SEQ ID NO: 11687

SEQ ID NO: 11929 - protein, 859 aa, synthetic construct; identical to SEQ ID NO: 11687

SEQ ID NO: 11930 - protein, 859 aa, synthetic construct; identical to SEQ ID NO: 11687

SEQ ID NO: 11931 - protein, 859 aa, synthetic construct; identical to SEQ ID NO: 11687

SEQ ID NO: 11932 - protein, 859 aa, synthetic construct; identical to SEQ ID NO: 11687

SEQ ID NO: 11933 - protein, 859 aa, synthetic construct; identical to SEQ ID NO: 11687

SEQ ID NO: 11934 - protein, 859 aa, synthetic construct; identical to SEQ ID NO: 11687

SEQ ID NO: 11935 - protein, 859 aa, synthetic construct; identical to SEQ ID NO: 11687

SEQ ID NO: 11936 - protein, 859 aa, synthetic construct; identical to SEQ ID NO: 11687

SEQ ID NO: 11937 - protein, 859 aa, synthetic construct; identical to SEQ ID NO: 11687

SEQ ID NO: 11938 - protein, 859 aa, synthetic construct; identical to SEQ ID NO: 11687

SEQ ID NO: 11939 - protein, 859 aa, synthetic construct; identical to SEQ ID NO: 11687

SEQ ID NO: 11940 - protein, 859 aa, synthetic construct; identical to SEQ ID NO: 11687

SEQ ID NO: 11941 - protein, 859 aa, synthetic construct; identical to SEQ ID NO: 11687

SEQ ID NO: 11942 - protein, 859 aa, synthetic construct; identical to SEQ ID NO: 11687

SEQ ID NO: 11943 - protein, 859 aa, synthetic construct; identical to SEQ ID NO: 11687

SEQ ID NO: 11944 - protein, 859 aa, synthetic construct; identical to SEQ ID NO: 11687

SEQ ID NO: 11945 - protein, 859 aa, synthetic construct; identical to SEQ ID NO: 11687

SEQ ID NO: 11946 - protein, 859 aa, synthetic construct; identical to SEQ ID NO: 11687

SEQ ID NO: 11947 - protein, 859 aa, synthetic construct; identical to SEQ ID NO: 11687

SEQ ID NO: 11948 - protein, 859 aa, synthetic construct; identical to SEQ ID NO: 11687

SEQ ID NO: 11949 - protein, 859 aa, synthetic construct; identical to SEQ ID NO: 11687

SEQ ID NO: 11950 - protein, 859 aa, synthetic construct; identical to SEQ ID NO: 11687

SEQ ID NO: 11951 - protein, 859 aa, synthetic construct; identical to SEQ ID NO: 11687

SEQ ID NO: 11952 - protein, 859 aa, synthetic construct; identical to SEQ ID NO: 11687

SEQ ID NO: 11953 - protein, 859 aa, synthetic construct; identical to SEQ ID NO: 11687

SEQ ID NO: 11954 - protein, 859 aa, synthetic construct; identical to SEQ ID NO: 11687

SEQ ID NO: 11955 - protein, 859 aa, synthetic construct; identical to SEQ ID NO: 11687

SEQ ID NO: 11956 - protein, 859 aa, synthetic construct; identical to SEQ ID NO: 11687

SEQ ID NO: 11957 - protein, 859 aa, synthetic construct; identical to SEQ ID NO: 11687

SEQ ID NO: 11958 - protein, 859 aa, synthetic construct; identical to SEQ ID NO: 11687

SEQ ID NO: 11959 - protein, 859 aa, synthetic construct; identical to SEQ ID NO: 11687

SEQ ID NO: 11960 - protein, 859 aa, synthetic construct; identical to SEQ ID NO: 11687

SEQ ID NO: 11961 - protein, 859 aa, synthetic construct; identical to SEQ ID NO: 11687

SEQ ID NO: 11962 - protein, 859 aa, synthetic construct; identical to SEQ ID NO: 11687

SEQ ID NO: 11963 - protein, 859 aa, synthetic construct; identical to SEQ ID NO: 11687

SEQ ID NO: 11964 - protein, 859 aa, synthetic construct; identical to SEQ ID NO: 11687

SEQ ID NO: 11965 - protein, 859 aa, synthetic construct; identical to SEQ ID NO: 11687

SEQ ID NO: 11966 - protein, 859 aa, synthetic construct; identical to SEQ ID NO: 11687

SEQ ID NO: 11967 - protein, 859 aa, synthetic construct; identical to SEQ ID NO: 11687

SEQ ID NO: 11968 - protein, 501 aa, synthetic construct
MALPVTALLLPLALLLHAARPQPVLTQSSSASASLGSSVKLTCTLSSGHSSYIIAWHQQQPGKAPRYLMKVEGSGSYNKGSGIPERFSGSSSGADRYLTISNLQSEDEADYYCETWDSNTHVFGTGTKVTVLGGGGSGGGGSGGGGSEVQLVQSGAEVKKPGASVKVSCKASGYTFTSYYMHWVRQAPGQGLEWMGIINPSGGRTSYAQKFQGRVTMTRDTSTGTVYMELSSLRSEDTAVYYCARSHCSGGSCYSIDYWGQGTLVTVSSTREQKLISEEDLKIEVMYPPPYLDNEKSNGTIIHVKGKHLCPSPLFPGPSKPFWVLVVVGGVLACYSLLVTVAFIIFWVRSKRSRLLHSDYMNMTPRRPGPTRKHYQPYAPPRDFAAYRSRVKFSRSADAPAYQQGQNQLYNELNLGRREEYDVLDKRRGRDPEMGGKPRRKNPQEGLYNELQKDKMAEAYSEIGMKGERRRGKGHDGLYQGLSTATKDTYDALHMQALPPR

SEQ ID NO: 11969 - protein, 507 aa, synthetic construct
MALPVTALLLPLALLLHAARPQPVLTQSSSASASLGSSVKLTCTLSSGHSSYIIAWHQQQPGKAPRYLMKVEGSGSYNKGSGIPERFSGSSSGADRYLTISNLQSEDEADYYCETWDSNTHVFGTGTKVTVLGGGGSGGGGSGGGGSEVQLVQSGAEVKKPGASVKVSCKASGYTFTSYYMHWVRQAPGQGLEWMGIINPSGGRTSYAQKFQGRVTMTRDTSTGTVYMELSSLRSEDTAVYYCARSHCSGGSCYSIDYWGQGTLVTVSSTREQKLISEEDLAKPTTTPAPRPPTPAPTIASQPLSLRPEACRPAAGGAVHTRGLDFACDIYIWAPLAGTCGVLLLSLVITLYCKRGRKKLLYIFKQPFMRPVQTTQEEDGCSCRFPEEEEGGCELRVKFSRSADAPAYQQGQNQLYNELNLGRREEYDVLDKRRGRDPEMGGKPRRKNPQEGLYNELQKDKMAEAYSEIGMKGERRRGKGHDGLYQGLSTATKDTYDALHMQALPPR

SEQ ID NO: 11970 - protein, 507 aa, synthetic construct
MALPVTALLLPLALLLHAARPEVQLVQSGAEVKKPGASVKVSCKASGYTFTSYYMHWVRQAPGQGLEWMGIINPSGGRTSYAQKFQGRVTMTRDTSTGTVYMELSSLRSEDTAVYYCARSHCSGGSCYSIDYWGQGTLVTVSSGGGGSGGGGSGGGGSQPVLTQSSSASASLGSSVKLTCTLSSGHSSYIIAWHQQQPGKAPRYLMKVEGSGSYNKGSGIPERFSGSSSGADRYLTISNLQSEDEADYYCETWDSNTHVFGTGTKVTVLTREQKLISEEDLAKPTTTPAPRPPTPAPTIASQPLSLRPEACRPAAGGAVHTRGLDFACDIYIWAPLAGTCGVLLLSLVITLYCKRGRKKLLYIFKQPFMRPVQTTQEEDGCSCRFPEEEEGGCELRVKFSRSADAPAYQQGQNQLYNELNLGRREEYDVLDKRRGRDPEMGGKPRRKNPQEGLYNELQKDKMAEAYSEIGMKGERRRGKGHDGLYQGLSTATKDTYDALHMQALPPR

SEQ ID NO: 11971 - protein, 920 aa, synthetic construct
MALPVTALLLPLALLLHAARPQPVLTQSSSASASLGSSVKLTCTLSSGHSSYIIAWHQQQPGKAPRYLMKVEGSGSYNKGSGIPERFSGSSSGADRYLTISNLQSEDEADYYCETWDSNTHVFGTGTKVTVLGGGGSGGGGSGGGGSEVQLVQSGAEVKKPGASVKVSCKASGYTFTSYYMHWVRQAPGQGLEWMGIINPSGGRTSYAQKFQGRVTMTRDTSTGTVYMELSSLRSEDTAVYYCARSHCSGGSCYSIDYWGQGTLVTVSSTREQKLISEEDLAKPTTTPAPRPPTPAPTIASQPLSLRPEACRPAAGGAVHTRGLDFACDIYIWAPLAGTCGVLLLSLVITLYCGRARVKFSRSADAPAYQQGQNQLYNELNLGRREEYDVLDKRRGRDPEMGGKPRRKNPQEGLYNELQKDKMAEAYSEIGMKGERRRGKGHDGLYQGLSTATKDTYDALHMQALPPRSRGSGATNFSLLKQAGDVEENPGPGIHMATYEVLCEVARKLGTDDREVVLFLLNVFIPQPTLAQLIGALRALKEEGRLTFPLLAECLFRAGRRDLLRDLLHLDPRFLERHLAGTMSYFSPYQLTVLHVDGELCARDIRSLIFLSKDTIGSRSTPQTFLHWVYCMENLDLLGPTDVDALMSMLRSLSRVDLQRQVQTLMGLHLSGPSHSQHYRHTPLETDFYDYKDDDDKTSGSGEGRGSLLTCGDVEENPGPHMTEYKPTVRLATRDDVPRAVRTLAAAFADYPATRHTVDPDRHIERVTELQELFLTRVGLDIGKVWVADDGAAVAVWTTPESVEAGAVFAEIGPRMAELSGSRLAAQQQMEGLLAPHRPKEPAWFLATVGVSPDHQGKGLGSAVVLPGVEAAERAGVPAFLETSAPRNLPFYERLGFTVTADVEVPEGPRTWCMTRKPGA

SEQ ID NO: 11972 - protein, 860 aa, synthetic construct
MALPVTALLLPLALLLHAARPQPVLTQSSSASASLGSSVKLTCTLSSGHSSYIIAWHQQQPGKAPRYLMKVEGSGSYNKGSGIPERFSGSSSGADRYLTISNLQSEDEADYYCETWDSNTHVFGTGTKVTVLLEIQNPDPAVYQLRDSKSSDKSVCLFTDFDSQTNVSQSKDSDVYITDKCVLDMRSMDFKSNSAVAWSNKSDFACANAFNNSIIPEDTFFPSSDVPCDVKLVEKSFETDTNLNFQNLSVIGFRILLLKVAGFNLLMTLRLWSSRAKRSGSGVKQTLNFDLLKLAGDVESNPGPTSMDWIWRILFLVGAATGAHSFEEVQLVQSGAEVKKPGASVKVSCKASGYTFTSYYMHWVRQAPGQGLEWMGIINPSGGRTSYAQKFQGRVTMTRDTSTGTVYMELSSLRSEDTAVYYCARSHCSGGSCYSIDYWGQGTLVTVSSTREDLKNVFPPEVAVFEPSKAEIAHTQKATLVCLATGFYPDHVELSWWVNGKEVHSGVCTDPQPLKEQPALNDSRYCLSSRLRVSATFWQNPRNHFRCQVQFYGLSENDEWTQDRAKPVTQIVSAEAWGRADCGITSASYHQGVLSATILYEILLGKATLYAVLVSALVLMAMVKRKDSRGRAKRSGSGATNFSLLKQAGDVEENPGPSRGHMTEYKPTVRLATRDDVPRAVRTLAAAFADYPATRHTVDPDRHIERVTELQELFLTRVGLDIGKVWVADDGAAVAVWTTPESVEAGAVFAEIGPRMAELSGSRLAAQQQMEGLLAPHRPKEPAWFLATVGVSPDHQGKGLGSAVVLPGVEAAERAGVPAFLETSAPRNLPFYERLGFTVTADVEVPEGPRTWCMTRKPGA

SEQ ID NO: 11973 - protein, 859 aa, synthetic construct
MALPVTALLLPLALLLHAARPQPVLTQSSSASASLGSSVKLTCTLSSGHSSYIIAWHQQQPGKAPRYLMKVEGSGSYNKGSGIPERFSGSSSGADRYLTISNLQSEDEADYYCETWDSNTHVFGTGTKVTVLLEDLKNVFPPEVAVFEPSKAEIAHTQKATLVCLATGFYPDHVELSWWVNGKEVHSGVCTDPQPLKEQPALNDSRYCLSSRLRVSATFWQNPRNHFRCQVQFYGLSENDEWTQDRAKPVTQIVSAEAWGRADCGITSASYHQGVLSATILYEILLGKATLYAVLVSALVLMAMVKRKDSRGRAKRSGSGATNFSLLKQAGDVEENPGPTSMDWIWRILFLVGAATGAHSFEEVQLVQSGAEVKKPGASVKVSCKASGYTFTSYYMHWVRQAPGQGLEWMGIINPSGGRTSYAQKFQGRVTMTRDTSTGTVYMELSSLRSEDTAVYYCARSHCSGGSCYSIDYWGQGTLVTVSSTRIQNPDPAVYQLRDSKSSDKSVCLFTDFDSQTNVSQSKDSDVYITDKCVLDMRSMDFKSNSAVAWSNKSDFACANAFNNSIIPEDTFFPSSDVPCDVKLVEKSFETDTNLNFQNLSVIGFRILLLKVAGFNLLMTLRLWSSRAKRSGSGVKQTLNFDLLKLAGDVESNPGPSRGHMTEYKPTVRLATRDDVPRAVRTLAAAFADYPATRHTVDPDRHIERVTELQELFLTRVGLDIGKVWVADDGAAVAVWTTPESVEAGAVFAEIGPRMAELSGSRLAAQQQMEGLLAPHRPKEPAWFLATVGVSPDHQGKGLGSAVVLPGVEAAERAGVPAFLETSAPRNLPFYERLGFTVTADVEVPEGPRTWCMTRKPGA

SEQ ID NO: 11974 - protein, 626 aa, synthetic construct
MALPVTALLLPLALLLHAARPQPVLTQSSSASASLGSSVKLTCTLSSGHSSYIIAWHQQQPGKAPRYLMKVEGSGSYNKGSGIPERFSGSSSGADRYLTISNLQSEDEADYYCETWDSNTHVFGTGTKVTVLLEDLKNVFPPEVAVFEPSEAEISHTQKATLVCLATGFYPDHVELSWWVNGKEVHSGVCTDPQPLKEQPALNDSRYCLSSRLRVSATFWQNPRNHFRCQVQFYGLSENDEWTQDRAKPVTQIVSAEAWGRADCGFTSESYQQGVLSATILYEILLGKATLYAVLVSALVLMAMVKRKDSRGRAKRSGSGATNFSLLKQAGDVEENPGPTSMDWIWRILFLVGAATGAHSFEEVQLVQSGAEVKKPGASVKVSCKASGYTFTSYYMHWVRQAPGQGLEWMGIINPSGGRTSYAQKFQGRVTMTRDTSTGTVYMELSSLRSEDTAVYYCARSHCSGGSCYSIDYWGQGTLVTVSSTRIQNPDPAVYQLRDSKSSDKSVCLFTDFDSQTNVSQSKDSDVYITDKCVLDMRSMDFKSNSAVAWSNKSDFACANAFNNSIIPEDTFFPSPESSCDVKLVEKSFETDTNLNFQNLSVIGFRILLLKVAGFNLLMTLRLWSS

SEQ ID NO: 11975 - protein, 851 aa, synthetic construct
MALPVTALLLPLALLLHAARPQPVLTQSSSASASLGSSVKLTCTLSSGHSSYIIAWHQQQPGKAPRYLMKVEGSGSYNKGSGIPERFSGSSSGADRYLTISNLQSEDEADYYCETWDSNTHVFGTGTKVTVLLEDLKNVFPPEVAVFEPSEAEISHTQKATLVCLATGFYPDHVELSWWVNGKEVHSGVCTDPQPLKEQPALNDSRYCLSSRLRVSATFWQNPRNHFRCQVQFYGLSENDEWTQDRAKPVTQIVSAEAWGRADCGFTSESYQQGVLSATILYEILLGKATLYAVLVSALVLMAMVKRKDSRGRAKRSGSGATNFSLLKQAGDVEENPGPTSMDWIWRILFLVGAATGAHSFEEVQLVQSGAEVKKPGASVKVSCKASGYTFTSYYMHWVRQAPGQGLEWMGIINPSGGRTSYAQKFQGRVTMTRDTSTGTVYMELSSLRSEDTAVYYCARSHCSGGSCYSIDYWGQGTLVTVSSTRIQNPDPAVYQLRDSKSSDKSVCLFTDFDSQTNVSQSKDSDVYITDKCVLDMRSMDFKSNSAVAWSNKSDFACANAFNNSIIPEDTFFPSPESSCDVKLVEKSFETDTNLNFQNLSVIGFRILLLKVAGFNLLMTLRLWSSRAKRSGSGVKQTLNFDLLKLAGDVESNPGPSRGGIHTMATYEVLCEVARKLGTDDREVVLFLLNVFIPQPTLAQLIGALRALKEEGRLTFPLLAECLFRAGRRDLLRDLLHLDPRFLERHLAGTMSYFSPYQLTVLHVDGELCARDIRSLIFLSKDTIGSRSTPQTFLHWVYCMENLDLLGPTDVDALMSMLRSLSRVDLQRQVQTLMGLHLSGPSHSQHYRHTP

SEQ ID NO: 11976 - protein, 630 aa, synthetic construct
MALPVTALLLPLALLLHAARPQPVLTQSSSASASLGSSVKLTCTLSSGHSSYIIAWHQQQPGKAPRYLMKVEGSGSYNKGSGIPERFSGSSSGADRYLTISNLQSEDEADYYCETWDSNTHVFGTGTKVTVLLEIQNPDPAVYQLRDSKSSDKSVCLFTDFDSQTNVSQSKDSDVYITDKCVLDMRSMDFKSNSAVAWSNKSDFACANAFNNSIIPEDTFFPSPESSCDVKLVEKSFETDTNLNFQNLSVIGFRILLLKVAGFNLLMTLRLWSSRAKRSGSGVKQTLNFDLLKLAGDVESNPGPTSMDWIWRILFLVGAATGAHSFEEVQLVQSGAEVKKPGASVKVSCKASGYTFTSYYMHWVRQAPGQGLEWMGIINPSGGRTSYAQKFQGRVTMTRDTSTGTVYMELSSLRSEDTAVYYCARSHCSGGSCYSIDYWGQGTLVTVSSTREDLKNVFPPEVAVFEPSEAEISHTQKATLVCLATGFYPDHVELSWWVNGKEVHSGVCTDPQPLKEQPALNDSRYCLSSRLRVSATFWQNPRNHFRCQVQFYGLSENDEWTQDRAKPVTQIVSAEAWGRADCGFTSESYQQGVLSATILYEILLGKATLYAVLVSALVLMAMVKRKDSRG

SEQ ID NO: 11977 - protein, 852 aa, synthetic construct
MALPVTALLLPLALLLHAARPQPVLTQSSSASASLGSSVKLTCTLSSGHSSYIIAWHQQQPGKAPRYLMKVEGSGSYNKGSGIPERFSGSSSGADRYLTISNLQSEDEADYYCETWDSNTHVFGTGTKVTVLLEIQNPDPAVYQLRDSKSSDKSVCLFTDFDSQTNVSQSKDSDVYITDKCVLDMRSMDFKSNSAVAWSNKSDFACANAFNNSIIPEDTFFPSPESSCDVKLVEKSFETDTNLNFQNLSVIGFRILLLKVAGFNLLMTLRLWSSRAKRSGSGVKQTLNFDLLKLAGDVESNPGPTSMDWIWRILFLVGAATGAHSFEEVQLVQSGAEVKKPGASVKVSCKASGYTFTSYYMHWVRQAPGQGLEWMGIINPSGGRTSYAQKFQGRVTMTRDTSTGTVYMELSSLRSEDTAVYYCARSHCSGGSCYSIDYWGQGTLVTVSSTREDLKNVFPPEVAVFEPSEAEISHTQKATLVCLATGFYPDHVELSWWVNGKEVHSGVCTDPQPLKEQPALNDSRYCLSSRLRVSATFWQNPRNHFRCQVQFYGLSENDEWTQDRAKPVTQIVSAEAWGRADCGFTSESYQQGVLSATILYEILLGKATLYAVLVSALVLMAMVKRKDSRGRAKRSGSGATNFSLLKQAGDVEENPGPSRGGIHTMATYEVLCEVARKLGTDDREVVLFLLNVFIPQPTLAQLIGALRALKEEGRLTFPLLAECLFRAGRRDLLRDLLHLDPRFLERHLAGTMSYFSPYQLTVLHVDGELCARDIRSLIFLSKDTIGSRSTPQTFLHWVYCMENLDLLGPTDVDALMSMLRSLSRVDLQRQVQTLMGLHLSGPSHSQHYRHTP

SEQ ID NO: 11978 - protein, 904 aa, synthetic construct
MALPVTALLLPLALLLHAARPLEGKPIPNPLLGLDSTGSGEDLKNVFPPEVAVFEPSKAEIAHTQKATLVCLATGFYPDHVELSWWVNGKEVHSGVCTDPQPLKEQPALNDSRYCLSSRLRVSATFWQNPRNHFRCQVQFYGLSENDEWTQDRAKPVTQIVSAEAWGRADCGITSASYHQGVLSATILYEILLGKATLYAVLVSALVLMAMVKRKDSRGRAKRSGSGATNFSLLKQAGDVEENPGPTSMALPVTALLLPLALLLHAARPQPVLTQSSSASASLGSSVKLTCTLSSGHSSYIIAWHQQQPGKAPRYLMKVEGSGSYNKGSGIPERFSGSSSGADRYLTISNLQSEDEADYYCETWDSNTHVFGTGTKVTVLGGGGSGGGGSGGGGSEVQLVQSGAEVKKPGASVKVSCKASGYTFTSYYMHWVRQAPGQGLEWMGIINPSGGRTSYAQKFQGRVTMTRDTSTGTVYMELSSLRSEDTAVYYCARSHCSGGSCYSIDYWGQGTLVTVSSTREQKLISEEDGSGIQNPDPAVYQLRDSKSSDKSVCLFTDFDSQTNVSQSKDSDVYITDKCVLDMRSMDFKSNSAVAWSNKSDFACANAFNNSIIPEDTFFPSSDVPCDVKLVEKSFETDTNLNFQNLSVIGFRILLLKVAGFNLLMTLRLWSSRAKRSGSGVKQTLNFDLLKLAGDVESNPGPSRGHMTEYKPTVRLATRDDVPRAVRTLAAAFADYPATRHTVDPDRHIERVTELQELFLTRVGLDIGKVWVADDGAAVAVWTTPESVEAGAVFAEIGPRMAELSGSRLAAQQQMEGLLAPHRPKEPAWFLATVGVSPDHQGKGLGSAVVLPGVEAAERAGVPAFLETSAPRNLPFYERLGFTVTADVEVPEGPRTWCMTRKPGA

SEQ ID NO: 11979 - protein, 905 aa, synthetic construct
MALPVTALLLPLALLLHAARPLEQKLISEEDLGSGDRPDPAVYQLRDSKSSDKSVCLFTDFDSQTNVSQSKDSDVYITDKCVLDMRSMDFKSNSAVAWSNKSDFACANAFNNSIIPEDTFFPSPESSCDVKLVEKSFETDTNLNFQNLSVIGFRILLLKVAGFNLLMTLRLWSSSSRAKRSGSGVKQTLNFDLLKLAGDVESNPGPTSMALPVTALLLPLALLLHAARPQPVLTQSSSASASLGSSVKLTCTLSSGHSSYIIAWHQQQPGKAPRYLMKVEGSGSYNKGSGIPERFSGSSSGADRYLTISNLQSEDEADYYCETWDSNTHVFGTGTKVTVLGGGGSGGGGSGGGGSEVQLVQSGAEVKKPGASVKVSCKASGYTFTSYYMHWVRQAPGQGLEWMGIINPSGGRTSYAQKFQGRVTMTRDTSTGTVYMELSSLRSEDTAVYYCARSHCSGGSCYSIDYWGQGTLVTVSSTRGKPIPNPLLGLDSTGSGEDLKNVFPPEVAVFEPSEAEISHTQKATLVCLATGFYPDHVELSWWVNGKEVHSGVCTDPQPLKEQPALNDSRYCLSSRLRVSATFWQNPRNHFRCQVQFYGLSENDEWTQDRAKPVTQIVSAEAWGRADCGFTSESYQQGVLSATILYEILLGKATLYAVLVSALVLMAMVKRKDSRGRAKRSGSGATNFSLLKQAGDVEENPGPSRGHMTEYKPTVRLATRDDVPRAVRTLAAAFADYPATRHTVDPDRHIERVTELQELFLTRVGLDIGKVWVADDGAAVAVWTTPESVEAGAVFAEIGPRMAELSGSRLAAQQQMEGLLAPHRPKEPAWFLATVGVSPDHQGKGLGSAVVLPGVEAAERAGVPAFLETSAPRNLPFYERLGFTVTADVEVPEGPRTWCMTRKPGA

SEQ ID NO: 11980 - protein, 859 aa, synthetic construct
MALPVTALLLPLALLLHAARPQPVLTQSSSASASLGSSVKLTCTLSSGHSSYIIAWHQQQPGKAPRYLMKVEGSGSYNKGSGIPERFSGSSSGADRYLTISNLQSEDEADYYCETWDSNTHVFGTGTKVTVLLEDLKNVFPPEVAVFEPSEAEISHTQKATLVCLATGFYPDHVELSWWVNGKEVHSGVSTDPQPLKEQPALNDSRYCLSSRLRVSATFWQNPRNHFRCQVQFYGLSENDEWTQDRAKPVTQIVSAEAWGRADCGFTSESYQQGVLSATILYEILLGKATLYAVLVSALVLMAMVKRKDSRGRAKRSGSGATNFSLLKQAGDVEENPGPTSMDWIWRILFLVGAATGAHSFEEVQLVQSGAEVKKPGASVKVSCKASGYTFTSYYMHWVRQAPGQGLEWMGIINPSGGRTSYAQKFQGRVTMTRDTSTGTVYMELSSLRSEDTAVYYCARSHCSGGSCYSIDYWGQGTLVTVSSTRIQNPDPAVYQLRDSKSSDKSVCLFTDFDSQTNVSQSKDSDVYITDKTVLDMRSMDFKSNSAVAWSNKSDFACANAFNNSIIPEDTFFPSPESSCDVKLVEKSFETDTNLNFQNLSVIGFRILLLKVAGFNLLMTLRLWSSRAKRSGSGVKQTLNFDLLKLAGDVESNPGPSRGHMTEYKPTVRLATRDDVPRAVRTLAAAFADYPATRHTVDPDRHIERVTELQELFLTRVGLDIGKVWVADDGAAVAVWTTPESVEAGAVFAEIGPRMAELSGSRLAAQQQMEGLLAPHRPKEPAWFLATVGVSPDHQGKGLGSAVVLPGVEAAERAGVPAFLETSAPRNLPFYERLGFTVTADVEVPEGPRTWCMTRKPGA

SEQ ID NO: 11981 - protein, 941 aa, synthetic construct
MALPVTALLLPLALLLHAARPQPVLTQSSSASASLGSSVKLTCTLSSGHSSYIIAWHQQQPGKAPRYLMKVEGSGSYNKGSGIPERFSGSSSGADRYLTISNLQSEDEADYYCETWDSNTHVFGTGTKVTVLLEDLKNVFPPEVAVFEPSEAEISHTQKATLVCLATGFYPDHVELSWWVNGKEVHSGVSTDPQPLKEQPALNDSRYCLSSRLRVSATFWQNPRNHFRCQVQFYGLSENDEWTQDRAKPVTQIVSAEAWGRADCGFTSESYQQGVLSATILYEILLGKATLYAVLVSALVLMAMVKRKDSRGRAKRSGSGATNFSLLKQAGDVEENPGPTSMDWIWRILFLVGAATGAHSFEEVQLVQSGAEVKKPGASVKVSCKASGYTFTSYYMHWVRQAPGQGLEWMGIINPSGGRTSYAQKFQGRVTMTRDTSTGTVYMELSSLRSEDTAVYYCARSHCSGGSCYSIDYWGQGTLVTVSSTREQKLISEEDGSGTPFPSLAPPIMLLVDGKQQMVVVCLVLDVAPPGLDSPIWFSAGNGSALDAFTYGPSPATDGTWTNLAHLSLPSEELASWEPLVCHTGPGAEGHSRSTQPMHLSGEASTARTCPQEPLRGTPGGALWLGVLRLLLFKLLLFDLLLTCSCLCDPAGPLPSPATTTRLRALGSHRLHPATETGGREATSSPRPQPRDRRWGDTPPGRKPGSPVRAKRSGSGVKQTLNFDLLKLAGDVESNPGPSRGHMTEYKPTVRLATRDDVPRAVRTLAAAFADYPATRHTVDPDRHIERVTELQELFLTRVGLDIGKVWVADDGAAVAVWTTPESVEAGAVFAEIGPRMAELSGSRLAAQQQMEGLLAPHRPKEPAWFLATVGVSPDHQGKGLGSAVVLPGVEAAERAGVPAFLETSAPRNLPFYERLGFTVTADVEVPEGPRTWCMTRKPGA

SEQ ID NO: 11982 - protein, 959 aa, synthetic construct
MALPVTALLLPLALLLHAARPLEDLKNVFPPEVAVFEPSEAEISHTQKATLVCLATGFYPDHVELSWWVNGKEVHSGVSTDPQPLKEQPALNDSRYCLSSRLRVSATFWQNPRNHFRCQVQFYGLSENDEWTQDRAKPVTQIVSAEAWGRADCGFTSESYQQGVLSATILYEILLGKATLYAVLVSALVLMAMVKRKDSRGRAKRSGSGATNFSLLKQAGDVEENPGPTSMALPVTALLLPLALLLHAARPQPVLTQSSSASASLGSSVKLTCTLSSGHSSYIIAWHQQQPGKAPRYLMKVEGSGSYNKGSGIPERFSGSSSGADRYLTISNLQSEDEADYYCETWDSNTHVFGTGTKVTVLGGGGSGGGGSGGGGSEVQLVQSGAEVKKPGASVKVSCKASGYTFTSYYMHWVRQAPGQGLEWMGIINPSGGRTSYAQKFQGRVTMTRDTSTGTVYMELSSLRSEDTAVYYCARSHCSGGSCYSIDYWGQGTLVTVSSTREQKLISEEDLGSGTPFPSLAPPIMLLVDGKQQMVVVCLVLDVAPPGLDSPIWFSAGNGSALDAFTYGPSPATDGTWTNLAHLSLPSEELASWEPLVCHTGPGAEGHSRSTQPMHLSGEASTARTCPQEPLRGTPGGALWLGVLRLLLFKLLLFDLLLTCSCLCDPAGPLPSPATTTRLRALGSHRLHPATETGGREATSSPRPQPRDRRWGDTPPGRKPGSPVRAKRSGSGVKQTLNFDLLKLAGDVESNPGPSRSRGHMTEYKPTVRLATRDDVPRAVRTLAAAFADYPATRHTVDPDRHIERVTELQELFLTRVGLDIGKVWVADDGAAVAVWTTPESVEAGAVFAEIGPRMAELSGSRLAAQQQMEGLLAPHRPKEPAWFLATVGVSPDHQGKGLGSAVVLPGVEAAERAGVPAFLETSAPRNLPFYERLGFTVTADVEVPEGPRTWCMTRKPGA

SEQ ID NO: 11983 - protein, 896 aa, synthetic construct
MALPVTALLLPLALLLHAARPQPVLTQSSSASASLGSSVKLTCTLSSGHSSYIIAWHQQQPGKAPRYLMKVEGSGSYNKGSGIPERFSGSSSGADRYLTISNLQSEDEADYYCETWDSNTHVFGTGTKVTVLLEGKPIPNPLLGLDSTGSGDKQLDADVSPKPTIFLPSIAETKLQKAGTYLCLLEKFFPDVIKIHWQEKKSNTILGSQEGNTMKTNDTYMKFSWLTVPEKSLDKEHRCIVRHENNKNGVDQEIIFPPIKTDVITMDPKDNCSKDANDTLLLQLTNTSAYYMYLLLLLKSVVYFAIITCCLLRRTAFCCNGEKSRAKRSGSGATNFSLLKQAGDVEENPGPTSMDWIWRILFLVGAATGAHSFEEVQLVQSGAEVKKPGASVKVSCKASGYTFTSYYMHWVRQAPGQGLEWMGIINPSGGRTSYAQKFQGRVTMTRDTSTGTVYMELSSLRSEDTAVYYCARSHCSGGSCYSIDYWGQGTLVTVSSTREQKLISEEDGSGSQPHTKPSVFVMKNGTNVACLVKEFYPKDIRINLVSSKKITEFDPAIVISPSGKYNAVKLGKYEDSNSVTCSVQHDNKTVHSTDFEVKTDSTDHVKPKETENTKQPSKSCHKPKAIVHTEKVNMMSLTVLGLRMLFAKTVAVNFLLTAKLFFLRAKRSGSGVKQTLNFDLLKLAGDVESNPGPSRGHMTEYKPTVRLATRDDVPRAVRTLAAAFADYPATRHTVDPDRHIERVTELQELFLTRVGLDIGKVWVADDGAAVAVWTTPESVEAGAVFAEIGPRMAELSGSRLAAQQQMEGLLAPHRPKEPAWFLATVGVSPDHQGKGLGSAVVLPGVEAAERAGVPAFLETSAPRNLPFYERLGFTVTADVEVPEGPRTWCMTRKPGA

SEQ ID NO: 11984 - protein, 634 aa, synthetic construct
MALPVTALLLPLALLLHAARPQPVLTQSSSASASLGSSVKLTCTLSSGHSSYIIAWHQQQPGKAPRYLMKVEGSGSYNKGSGIPERFSGSSSGADRYLTISNLQSEDEADYYCETWDSNTHVFGTGTKVTVLLESQPHTKPSVFVMKNGTNVACLVKEFYPKDIRINLVSSKKITEFDPAIVISPSGKYNAVKLGKYEDSNSVTCSVQHDNKTVHSTDFEVKTDSTDHVKPKETENTKQPSKSCHKPKAIVHTEKVNMMSLTVLGLRMLFAKTVAVNFLLTAKLFFLRAKRSGSGATNFSLLKQAGDVEENPGPTSMDWIWRILFLVGAATGAHSFEEVQLVQSGAEVKKPGASVKVSCKASGYTFTSYYMHWVRQAPGQGLEWMGIINPSGGRTSYAQKFQGRVTMTRDTSTGTVYMELSSLRSEDTAVYYCARSHCSGGSCYSIDYWGQGTLVTVSSTRDKQLDADVSPKPTIFLPSIAETKLQKAGTYLCLLEKFFPDVIKIHWQEKKSNTILGSQEGNTMKTNDTYMKFSWLTVPEKSLDKEHRCIVRHENNKNGVDQEIIFPPIKTDVITMDPKDNCSKDANDTLLLQLTNTSAYYMYLLLLLKSVVYFAIITCCLLRRTAFCCNGEKS

SEQ ID NO: 11985 - protein, 911 aa, synthetic construct
MALPVTALLLPLALLLHAARPLEGKPIPNPLLGLDSTGSGDKQLDADVSPKPTIFLPSIAETKLQKAGTYLCLLEKFFPDVIKIHWQEKKSNTILGSQEGNTMKTNDTYMKFSWLTVPEKSLDKEHRCIVRHENNKNGVDQEIIFPPIKTDVITMDPKDNCSKDANDTLLLQLTNTSAYYMYLLLLLKSVVYFAIITCCLLRRTAFCCNGEKSRAKRSGSGATNFSLLKQAGDVEENPGPTSMALPVTALLLPLALLLHAARPQPVLTQSSSASASLGSSVKLTCTLSSGHSSYIIAWHQQQPGKAPRYLMKVEGSGSYNKGSGIPERFSGSSSGADRYLTISNLQSEDEADYYCETWDSNTHVFGTGTKVTVLGGGGSGGGGSGGGGSEVQLVQSGAEVKKPGASVKVSCKASGYTFTSYYMHWVRQAPGQGLEWMGIINPSGGRTSYAQKFQGRVTMTRDTSTGTVYMELSSLRSEDTAVYYCARSHCSGGSCYSIDYWGQGTLVTVSSTREQKLISEEDGSGSQPHTKPSVFVMKNGTNVACLVKEFYPKDIRINLVSSKKITEFDPAIVISPSGKYNAVKLGKYEDSNSVTCSVQHDNKTVHSTDFEVKTDSTDHVKPKETENTKQPSKSCHKPKAIVHTEKVNMMSLTVLGLRMLFAKTVAVNFLLTAKLFFLRAKRSGSGVKQTLNFDLLKLAGDVESNPGPSRGHMTEYKPTVRLATRDDVPRAVRTLAAAFADYPATRHTVDPDRHIERVTELQELFLTRVGLDIGKVWVADDGAAVAVWTTPESVEAGAVFAEIGPRMAELSGSRLAAQQQMEGLLAPHRPKEPAWFLATVGVSPDHQGKGLGSAVVLPGVEAAERAGVPAFLETSAPRNLPFYERLGFTVTADVEVPEGPRTWCMTRKPGA

SEQ ID NO: 11986 - protein, 1036 aa, synthetic construct
MALPVTALLLPLALLLHAARPQPVLTQSSSASASLGSSVKLTCTLSSGHSSYIIAWHQQQPGKAPRYLMKVEGSGSYNKGSGIPERFSGSSSGADRYLTISNLQSEDEADYYCETWDSNTHVFGTGTKVTVLGQPKANPTVTLFPPSSEELQANKATLVCLISDFYPGAVTVAWKADGSPVKAGVETTKPSKQSNNKYAASSYLSLTPEQWKSHRSYSCQVTHEGSTVEKTVAPTECSGSQSFGLLDPKLCYLLDGILFIYGVILTALFLRVKFSRSADAPAYQQGQNQLYNELNLGRREEYDVLDKRRGRDPEMGGKPQRRKNPQEGLYNELQKDKMAEAYSEIGMKGERRRGKGHDGLYQGLSTATKDTYDALHMQALPPRRAKRSGSGATNFSLLKQAGDVEENPGPTSMDWIWRILFLVGAATGAHSFEEVQLVQSGAEVKKPGASVKVSCKASGYTFTSYYMHWVRQAPGQGLEWMGIINPSGGRTSYAQKFQGRVTMTRDTSTGTVYMELSSLRSEDTAVYYCARSHCSGGSCYSIDYWGQGTLVTVSSASTKGPSVFPLAPSSKSTSGGTAALGCLVKDYFPEPVTVSWNSGALTSGVHTFPAVLQSSGLYSLSSVVTVPSSSLGTQTYICNVNHKPSNTKVDKRVEPKSCGTQSFGLLDPKLCYLLDGILFIYGVILTALFLRVKFSRSADAPAYQQGQNQLYNELNLGRREEYDVLDKRRGRDPEMGGKPQRRKNPQEGLYNELQKDKMAEAYSEIGMKGERRRGKGHDGLYQGLSTATKDTYDALHMQALPPRRAKRSGSGVKQTLNFDLLKLAGDVESNPGPSRGHMTEYKPTVRLATRDDVPRAVRTLAAAFADYPATRHTVDPDRHIERVTELQELFLTRVGLDIGKVWVADDGAAVAVWTTPESVEAGAVFAEIGPRMAELSGSRLAAQQQMEGLLAPHRPKEPAWFLATVGVSPDHQGKGLGSAVVLPGVEAAERAGVPAFLETSAPRNLPFYERLGFTVTADVEVPEGPRTWCMTRKPGA

SEQ ID NO: 11987 - protein, 822 aa, synthetic construct
MALPVTALLLPLALLLHAARPQPVLTQSSSASASLGSSVKLTCTLSSGHSSYIIAWHQQQPGKAPRYLMKVEGSGSYNKGSGIPERFSGSSSGADRYLTISNLQSEDEADYYCETWDSNTHVFGTGTKVTVLLEDLKNVFPPEVAVFEPSEAEISHTQKATLVCLATGFYPDHVELSWWVNGKEVHSGVSTDPQPLKEQPALNDSRYCLSSRLRVSATFWQNPRNHFRCQVQFYGLSENDEWTQDRAKPVTQIVSAEAWGRADCGSQSFGLLDPKLCYLLDGILFIYGVILTALFLRVKFSRSADAPAYQQGQNQLYNELNLGRREEYDVLDKRRGRDPEMGGKPQRRKNPQEGLYNELQKDKMAEAYSEIGMKGERRRGKGHDGLYQGLSTATKDTYDALHMQALPPRRAKRSGSGATNFSLLKQAGDVEENPGPTSMDWIWRILFLVGAATGAHSFEEVQLVQSGAEVKKPGASVKVSCKASGYTFTSYYMHWVRQAPGQGLEWMGIINPSGGRTSYAQKFQGRVTMTRDTSTGTVYMELSSLRSEDTAVYYCARSHCSGGSCYSIDYWGQGTLVTVSSTRIQNPDPAVYQLRDSKSSDKSVCLFTDFDSQTNVSQSKDSDVYITDKTVLDMRSMDFKSNSAVAWSNKSDFACANAFNNSIIPEDTFFPSPESSCGTQSFGLLDPKLCYLLDGILFIYGVILTALFLRVKFSRSADAPAYQQGQNQLYNELNLGRREEYDVLDKRRGRDPEMGGKPQRRKNPQEGLYNELQKDKMAEAYSEIGMKGERRRGKGHDGLYQGLSTATKDTYDALHMQALPPR

SEQ ID NO: 11988 - protein, 822 aa, synthetic construct
MALPVTALLLPLALLLHAARPQPVLTQSSSASASLGSSVKLTCTLSSGHSSYIIAWHQQQPGKAPRYLMKVEGSGSYNKGSGIPERFSGSSSGADRYLTISNLQSEDEADYYCETWDSNTHVFGTGTKVTVLLEDLKNVFPPEVAVFEPSKAEIAHTQKATLVCLATGFYPDHVELSWWVNGKEVHSGVCTDPQPLKEQPALNDSRYCLSSRLRVSATFWQNPRNHFRCQVQFYGLSENDEWTQDRAKPVTQIVSAEAWGRADCGSQSFGLLDPKLCYLLDGILFIYGVILTALFLRVKFSRSADAPAYQQGQNQLYNELNLGRREEYDVLDKRRGRDPEMGGKPQRRKNPQEGLYNELQKDKMAEAYSEIGMKGERRRGKGHDGLYQGLSTATKDTYDALHMQALPPRRAKRSGSGATNFSLLKQAGDVEENPGPTSMDWIWRILFLVGAATGAHSFEEVQLVQSGAEVKKPGASVKVSCKASGYTFTSYYMHWVRQAPGQGLEWMGIINPSGGRTSYAQKFQGRVTMTRDTSTGTVYMELSSLRSEDTAVYYCARSHCSGGSCYSIDYWGQGTLVTVSSTRIQNPDPAVYQLRDSKSSDKSVCLFTDFDSQTNVSQSKDSDVYITDKCVLDMRSMDFKSNSAVAWSNKSDFACANAFNNSIIPEDTFFPSSDVPCGTQSFGLLDPKLCYLLDGILFIYGVILTALFLRVKFSRSADAPAYQQGQNQLYNELNLGRREEYDVLDKRRGRDPEMGGKPQRRKNPQEGLYNELQKDKMAEAYSEIGMKGERRRGKGHDGLYQGLSTATKDTYDALHMQALPPR

SEQ ID NO: 11989 - protein, 893 aa, synthetic construct
MALPVTALLLPLALLLHAARPQPVLTQSSSASASLGSSVKLTCTLSSGHSSYIIAWHQQQPGKAPRYLMKVEGSGSYNKGSGIPERFSGSSSGADRYLTISNLQSEDEADYYCETWDSNTHVFGTGTKVTVLLEGKPIPNPLLGLDSTGSGEDLKNVFPPEVAVFEPSEAEISHTQKATLVCLATGFYPDHVELSWWVNGKEVHSGVSTDPQPLKEQPALNDSRYCLSSRLRVSATFWQNPRNHFRCQVQFYGLSENDEWTQDRAKPVTQIVSAEAWGRADCGSQSFGLLDPKLCYLLDGILFIYGVILTALFLRVKFSRSADAPAYQQGQNQLYNELNLGRREEYDVLDKRRGRDPEMGGKPQRRKNPQEGLYNELQKDKMAEAYSEIGMKGERRRGKGHDGLYQGLSTATKDTYDALHMQALPPRRAKRSGSGATNFSLLKQAGDVEENPGPTSMDWIWRILFLVGAATGAHSFEEVQLVQSGAEVKKPGASVKVSCKASGYTFTSYYMHWVRQAPGQGLEWMGIINPSGGRTSYAQKFQGRVTMTRDTSTGTVYMELSSLRSEDTAVYYCARSHCSGGSCYSIDYWGQGTLVTVSSTREQKLISEEDGSGIQNPDPAVYQLRDSKSSDKSVCLFTDFDSQTNVSQSKDSDVYITDKTVLDMRSMDFKSNSAVAWSNKSDFACANAFNNSIIPEDTFFPSPESSCGTQSFGLLDPKLCYLLDGILFIYGVILTALFLRSKRSRLLHSDYMNMTPRRPGPTRKHYQPYAPPRDFAAYRSRVKFSRSADAPAYQQGQNQLYNELNLGRREEYDVLDKRRGRDPEMGGKPQRRKNPQEGLYNELQKDKMAEAYSEIGMKGERRRGKGHDGLYQGLSTATKDTYDALHMQALPPR

SEQ ID NO: 11990 - protein, 934 aa, synthetic construct
MALPVTALLLPLALLLHAARPQPVLTQSSSASASLGSSVKLTCTLSSGHSSYIIAWHQQQPGKAPRYLMKVEGSGSYNKGSGIPERFSGSSSGADRYLTISNLQSEDEADYYCETWDSNTHVFGTGTKVTVLLEGKPIPNPLLGLDSTGSGEDLKNVFPPEVAVFEPSEAEISHTQKATLVCLATGFYPDHVELSWWVNGKEVHSGVSTDPQPLKEQPALNDSRYCLSSRLRVSATFWQNPRNHFRCQVQFYGLSENDEWTQDRAKPVTQIVSAEAWGRADCGSQSFGLLDPKLCYLLDGILFIYGVILTALFLRSKRSRLLHSDYMNMTPRRPGPTRKHYQPYAPPRDFAAYRSRVKFSRSADAPAYQQGQNQLYNELNLGRREEYDVLDKRRGRDPEMGGKPQRRKNPQEGLYNELQKDKMAEAYSEIGMKGERRRGKGHDGLYQGLSTATKDTYDALHMQALPPRRAKRSGSGATNFSLLKQAGDVEENPGPTSMDWIWRILFLVGAATGAHSFEEVQLVQSGAEVKKPGASVKVSCKASGYTFTSYYMHWVRQAPGQGLEWMGIINPSGGRTSYAQKFQGRVTMTRDTSTGTVYMELSSLRSEDTAVYYCARSHCSGGSCYSIDYWGQGTLVTVSSTREQKLISEEDGSGIQNPDPAVYQLRDSKSSDKSVCLFTDFDSQTNVSQSKDSDVYITDKTVLDMRSMDFKSNSAVAWSNKSDFACANAFNNSIIPEDTFFPSPESSCGTQSFGLLDPKLCYLLDGILFIYGVILTALFLRSKRSRLLHSDYMNMTPRRPGPTRKHYQPYAPPRDFAAYRSRVKFSRSADAPAYQQGQNQLYNELNLGRREEYDVLDKRRGRDPEMGGKPQRRKNPQEGLYNELQKDKMAEAYSEIGMKGERRRGKGHDGLYQGLSTATKDTYDALHMQALPPR

SEQ ID NO: 11991 - protein, 895 aa, synthetic construct
MALPVTALLLPLALLLHAARPQPVLTQSSSASASLGSSVKLTCTLSSGHSSYIIAWHQQQPGKAPRYLMKVEGSGSYNKGSGIPERFSGSSSGADRYLTISNLQSEDEADYYCETWDSNTHVFGTGTKVTVLLEGKPIPNPLLGLDSTGSGEDLKNVFPPEVAVFEPSEAEISHTQKATLVCLATGFYPDHVELSWWVNGKEVHSGVSTDPQPLKEQPALNDSRYCLSSRLRVSATFWQNPRNHFRCQVQFYGLSENDEWTQDRAKPVTQIVSAEAWGRADCGSQSFGLLDPKLCYLLDGILFIYGVILTALFLRVKFSRSADAPAYQQGQNQLYNELNLGRREEYDVLDKRRGRDPEMGGKPQRRKNPQEGLYNELQKDKMAEAYSEIGMKGERRRGKGHDGLYQGLSTATKDTYDALHMQALPPRRAKRSGSGATNFSLLKQAGDVEENPGPTSMDWIWRILFLVGAATGAHSFEEVQLVQSGAEVKKPGASVKVSCKASGYTFTSYYMHWVRQAPGQGLEWMGIINPSGGRTSYAQKFQGRVTMTRDTSTGTVYMELSSLRSEDTAVYYCARSHCSGGSCYSIDYWGQGTLVTVSSTREQKLISEEDLGSGIQNPDPAVYQLRDSKSSDKSVCLFTDFDSQTNVSQSKDSDVYITDKTVLDMRSMDFKSNSAVAWSNKSDFACANAFNNSIIPEDTFFPSPESSCGTQSFGLLDPKLCYLLDGILFIYGVILTALFLKRGRKKLLYIFKQPFMRPVQTTQEEDGCSCRFPEEEEGGCELRVKFSRSADAPAYQQGQNQLYNELNLGRREEYDVLDKRRGRDPEMGGKPQRRKNPQEGLYNELQKDKMAEAYSEIGMKGERRRGKGHDGLYQGLSTATKDTYDALHMQALPPR

SEQ ID NO: 11992 - protein, 937 aa, synthetic construct
MALPVTALLLPLALLLHAARPQPVLTQSSSASASLGSSVKLTCTLSSGHSSYIIAWHQQQPGKAPRYLMKVEGSGSYNKGSGIPERFSGSSSGADRYLTISNLQSEDEADYYCETWDSNTHVFGTGTKVTVLLEGKPIPNPLLGLDSTGSGEDLKNVFPPEVAVFEPSEAEISHTQKATLVCLATGFYPDHVELSWWVNGKEVHSGVSTDPQPLKEQPALNDSRYCLSSRLRVSATFWQNPRNHFRCQVQFYGLSENDEWTQDRAKPVTQIVSAEAWGRADCGSQSFGLLDPKLCYLLDGILFIYGVILTALFLKRGRKKLLYIFKQPFMRPVQTTQEEDGCSCRFPEEEEGGCELRVKFSRSADAPAYQQGQNQLYNELNLGRREEYDVLDKRRGRDPEMGGKPQRRKNPQEGLYNELQKDKMAEAYSEIGMKGERRRGKGHDGLYQGLSTATKDTYDALHMQALPPRRAKRSGSGATNFSLLKQAGDVEENPGPTSMDWIWRILFLVGAATGAHSFEEVQLVQSGAEVKKPGASVKVSCKASGYTFTSYYMHWVRQAPGQGLEWMGIINPSGGRTSYAQKFQGRVTMTRDTSTGTVYMELSSLRSEDTAVYYCARSHCSGGSCYSIDYWGQGTLVTVSSTREQKLISEEDLGSGIQNPDPAVYQLRDSKSSDKSVCLFTDFDSQTNVSQSKDSDVYITDKTVLDMRSMDFKSNSAVAWSNKSDFACANAFNNSIIPEDTFFPSPESSCGTQSFGLLDPKLCYLLDGILFIYGVILTALFLKRGRKKLLYIFKQPFMRPVQTTQEEDGCSCRFPEEEEGGCELRVKFSRSADAPAYQQGQNQLYNELNLGRREEYDVLDKRRGRDPEMGGKPQRRKNPQEGLYNELQKDKMAEAYSEIGMKGERRRGKGHDGLYQGLSTATKDTYDALHMQALPPR

SEQ ID NO: 11993 - protein, 827 aa, synthetic construct
MALPVTALLLPLALLLHAARPQPVLTQSSSASASLGSSVKLTCTLSSGHSSYIIAWHQQQPGKAPRYLMKVEGSGSYNKGSGIPERFSGSSSGADRYLTISNLQSEDEADYYCETWDSNTHVFGTGTKVTVLLEQSFGLLDPKLCYLLDGILFIYGVILTALFLRVKFSRSADAPAYQQGQNQLYNELNLGRREEYDVLDKRRGRDPEMGGKPQRRKNPQEGLYNELQKDKMAEAYSEIGMKGERRRGKGHDGLYQGLSTATKDTYDALHMQALPPRRAKRSGSGATNFSLLKQAGDVEENPGPTSMDWIWRILFLVGAATGAHSFEEVQLVQSGAEVKKPGASVKVSCKASGYTFTSYYMHWVRQAPGQGLEWMGIINPSGGRTSYAQKFQGRVTMTRDTSTGTVYMELSSLRSEDTAVYYCARSHCSGGSCYSIDYWGQGTLVTVSSTRQSFGLLDPKLCYLLDGILFIYGVILTALFLRVKFSRSADAPAYQQGQNQLYNELNLGRREEYDVLDKRRGRDPEMGGKPQRRKNPQEGLYNELQKDKMAEAYSEIGMKGERRRGKGHDGLYQGLSTATKDTYDALHMQALPPRRAKRSGSGVKQTLNFDLLKLAGDVESNPGPSRGHMTEYKPTVRLATRDDVPRAVRTLAAAFADYPATRHTVDPDRHIERVTELQELFLTRVGLDIGKVWVADDGAAVAVWTTPESVEAGAVFAEIGPRMAELSGSRLAAQQQMEGLLAPHRPKEPAWFLATVGVSPDHQGKGLGSAVVLPGVEAAERAGVPAFLETSAPRNLPFYERLGFTVTADVEVPEGPRTWCMTRKPGA

SEQ ID NO: 11994 - protein, 652 aa, synthetic construct
MALPVTALLLPLALLLHAARPQPVLTQSSSASASLGSSVKLTCTLSSGHSSYIIAWHQQQPGKAPRYLMKVEGSGSYNKGSGIPERFSGSSSGADRYLTISNLQSEDEADYYCETWDSNTHVFGTGTKVTVLLEGQPKANPTVTLFPPSSEELQANKATLVCLISDFYPGAVTVAWKADGSPVKAGVETTKPSKQSNNKYAASSYLSLTPEQWKSHRSYSCQVTHEGSTVEKTVAPTECSPIKTDVITMDPKDNCSKDANDTLLLQLTNTSAYYMYLLLLLKSVVYFAIITCCLLRRTAFCCNGEKSRAKRSGSGATNFSLLKQAGDVEENPGPTSMDWIWRILFLVGAATGAHSFEEVQLVQSGAEVKKPGASVKVSCKASGYTFTSYYMHWVRQAPGQGLEWMGIINPSGGRTSYAQKFQGRVTMTRDTSTGTVYMELSSLRSEDTAVYYCARSHCSGGSCYSIDYWGQGTLVTVSSTRASTKGPSVFPLAPSSKSTSGGTAALGCLVKDYFPEPVTVSWNSGALTSGVHTFPAVLQSSGLYSLSSVVTVPSSSLGTQTYICNVNHKPSNTKVDKRVEPKSCEVKTDSTDHVKPKETENTKQPSKSCHKPKAIVHTEKVNMMSLTVLGLRMLFAKTVAVNFLLTAKLFFL

SEQ ID NO: 11995 - protein, 630 aa, synthetic construct
MALPVTALLLPLALLLHAARPQPVLTQSSSASASLGSSVKLTCTLSSGHSSYIIAWHQQQPGKAPRYLMKVEGSGSYNKGSGIPERFSGSSSGADRYLTISNLQSEDEADYYCETWDSNTHVFGTGTKVTVLLEGQPKANPTVTLFPPSSEELQANKATLVCLISDFYPGAVTVAWKADGSPVKAGVETTKPSKQSNNKYAASSYLSLTPEQWKSHRSYSCQVTHEGSTVEKTVAPTECSGRADCGITSASYHQGVLSATILYEILLGKATLYAVLVSALVLMAMVKRKDSRGRAKRSGSGATNFSLLKQAGDVEENPGPTSMDWIWRILFLVGAATGAHSFEEVQLVQSGAEVKKPGASVKVSCKASGYTFTSYYMHWVRQAPGQGLEWMGIINPSGGRTSYAQKFQGRVTMTRDTSTGTVYMELSSLRSEDTAVYYCARSHCSGGSCYSIDYWGQGTLVTVSSTRASTKGPSVFPLAPSSKSTSGGTAALGCLVKDYFPEPVTVSWNSGALTSGVHTFPAVLQSSGLYSLSSVVTVPSSSLGTQTYICNVNHKPSNTKVDKRVEPKSCIPEDTFFPSSDVPCDVKLVEKSFETDTNLNFQNLSVIGFRILLLKVAGFNLLMTLRLWSS

SEQ ID NO: 11996 - protein, 630 aa, synthetic construct
MALPVTALLLPLALLLHAARPQPVLTQSSSASASLGSSVKLTCTLSSGHSSYIIAWHQQQPGKAPRYLMKVEGSGSYNKGSGIPERFSGSSSGADRYLTISNLQSEDEADYYCETWDSNTHVFGTGTKVTVLLEGQPKANPTVTLFPPSSEELQANKATLVCLISDFYPGAVTVAWKADGSPVKAGVETTKPSKQSNNKYAASSYLSLTPEQWKSHRSYSCQVTHEGSTVEKTVAPTECSGRADCGFTSESYQQGVLSATILYEILLGKATLYAVLVSALVLMAMVKRKDSRGRAKRSGSGATNFSLLKQAGDVEENPGPTSMDWIWRILFLVGAATGAHSFEEVQLVQSGAEVKKPGASVKVSCKASGYTFTSYYMHWVRQAPGQGLEWMGIINPSGGRTSYAQKFQGRVTMTRDTSTGTVYMELSSLRSEDTAVYYCARSHCSGGSCYSIDYWGQGTLVTVSSTRASTKGPSVFPLAPSSKSTSGGTAALGCLVKDYFPEPVTVSWNSGALTSGVHTFPAVLQSSGLYSLSSVVTVPSSSLGTQTYICNVNHKPSNTKVDKRVEPKSCIPEDTFFPSPESSCDVKLVEKSFETDTNLNFQNLSVIGFRILLLKVAGFNLLMTLRLWSS

SEQ ID NO: 11997 - protein, 456 aa, synthetic construct
MALPVTALLLPLALLLHAARPQPVLTQSSSASASLGSSVKLTCTLSSGHSSYIIAWHQQQPGKAPRYLMKVEGSGSYNKGSGIPERFSGSSSGADRYLTISNLQSEDEADYYCETWDSNTHVFGTGTKVTVLGGGGSGGGGSGGGGSEVQLVQSGAEVKKPGASVKVSCKASGYTFTSYYMHWVRQAPGQGLEWMGIINPSGGRTSYAQKFQGRVTMTRDTSTGTVYMELSSLRSEDTAVYYCARSHCSGGSCYSIDYWGQGTLVTVSSTRDGNEEMGGITQTPYKVSISGTTVILTCPQYPGSEILWQHNDKNIGGDEDDKNIGSDEDHLSLKEFSELEQSGYYVCYPRGSKPEDANFYLYLRARVCENCMEMDVMSVATIVIVDICITGGLLLLVYYWSKNRKAKAKPVTRGAGAGGRQRGQNKERPPPVPNPDYEPIRKGQRDLYSGLNQRRI

SEQ ID NO: 11998 - protein, 421 aa, synthetic construct
MALPVTALLLPLALLLHAARPQPVLTQSSSASASLGSSVKLTCTLSSGHSSYIIAWHQQQPGKAPRYLMKVEGSGSYNKGSGIPERFSGSSSGADRYLTISNLQSEDEADYYCETWDSNTHVFGTGTKVTVLGGGGSGGGGSGGGGSEVQLVQSGAEVKKPGASVKVSCKASGYTFTSYYMHWVRQAPGQGLEWMGIINPSGGRTSYAQKFQGRVTMTRDTSTGTVYMELSSLRSEDTAVYYCARSHCSGGSCYSIDYWGQGTLVTVSSTRFKIPIEELEDRVFVNCNTSITWVEGTVGTLLSDITRLDLGKRILDPRGIYRCNGTDIYKDKESTVQVHYRMCQSCVELDPATVAGIIVTDVIATLLLALGVFCFAGHETGRLSGAADTQALLRNDQVYQPLRDRDDAQYSHLGGNWARNK

SEQ ID NO: 11999 - protein, 431 aa, synthetic construct
MALPVTALLLPLALLLHAARPQPVLTQSSSASASLGSSVKLTCTLSSGHSSYIIAWHQQQPGKAPRYLMKVEGSGSYNKGSGIPERFSGSSSGADRYLTISNLQSEDEADYYCETWDSNTHVFGTGTKVTVLGGGGSGGGGSGGGGSEVQLVQSGAEVKKPGASVKVSCKASGYTFTSYYMHWVRQAPGQGLEWMGIINPSGGRTSYAQKFQGRVTMTRDTSTGTVYMELSSLRSEDTAVYYCARSHCSGGSCYSIDYWGQGTLVTVSSTRQSIKGNHLVKVYDYQEDGSVLLTCDAEAKNITWFKDGKMIGFLTEDKKKWNLGSNAKDPRGMYQCKGSQNKSKPLQVYYRMCQNCIELNAATISGFLFAEIVSIFVLAVGVYFIAGQDGVRQSRASDKQTLLPNDQLYQPLKDREDDQYSHLQGNQLRRN

SEQ ID NO: 12000 - protein, 414 aa, synthetic construct
MALPVTALLLPLALLLHAARPQPVLTQSSSASASLGSSVKLTCTLSSGHSSYIIAWHQQQPGKAPRYLMKVEGSGSYNKGSGIPERFSGSSSGADRYLTISNLQSEDEADYYCETWDSNTHVFGTGTKVTVLGGGGSGGGGSGGGGSEVQLVQSGAEVKKPGASVKVSCKASGYTFTSYYMHWVRQAPGQGLEWMGIINPSGGRTSYAQKFQGRVTMTRDTSTGTVYMELSSLRSEDTAVYYCARSHCSGGSCYSIDYWGQGTLVTVSSTRQSFGLLDPKLCYLLDGILFIYGVILTALFLRVKFSRSADAPAYQQGQNQLYNELNLGRREEYDVLDKRRGRDPEMGGKPQRRKNPQEGLYNELQKDKMAEAYSEIGMKGERRRGKGHDGLYQGLSTATKDTYDALHMQALPPR

SEQ ID NO: 12001 - protein, 456 aa, synthetic construct
MALPVTALLLPLALLLHAARPEVQLVQSGAEVKKPGASVKVSCKASGYTFTSYYMHWVRQAPGQGLEWMGIINPSGGRTSYAQKFQGRVTMTRDTSTGTVYMELSSLRSEDTAVYYCARSHCSGGSCYSIDYWGQGTLVTVSSGGGGSGGGGSGGGGSQPVLTQSSSASASLGSSVKLTCTLSSGHSSYIIAWHQQQPGKAPRYLMKVEGSGSYNKGSGIPERFSGSSSGADRYLTISNLQSEDEADYYCETWDSNTHVFGTGTKVTVLTRDGNEEMGGITQTPYKVSISGTTVILTCPQYPGSEILWQHNDKNIGGDEDDKNIGSDEDHLSLKEFSELEQSGYYVCYPRGSKPEDANFYLYLRARVCENCMEMDVMSVATIVIVDICITGGLLLLVYYWSKNRKAKAKPVTRGAGAGGRQRGQNKERPPPVPNPDYEPIRKGQRDLYSGLNQRRI

SEQ ID NO: 12002 - protein, 421 aa, synthetic construct
MALPVTALLLPLALLLHAARPEVQLVQSGAEVKKPGASVKVSCKASGYTFTSYYMHWVRQAPGQGLEWMGIINPSGGRTSYAQKFQGRVTMTRDTSTGTVYMELSSLRSEDTAVYYCARSHCSGGSCYSIDYWGQGTLVTVSSGGGGSGGGGSGGGGSQPVLTQSSSASASLGSSVKLTCTLSSGHSSYIIAWHQQQPGKAPRYLMKVEGSGSYNKGSGIPERFSGSSSGADRYLTISNLQSEDEADYYCETWDSNTHVFGTGTKVTVLTRFKIPIEELEDRVFVNCNTSITWVEGTVGTLLSDITRLDLGKRILDPRGIYRCNGTDIYKDKESTVQVHYRMCQSCVELDPATVAGIIVTDVIATLLLALGVFCFAGHETGRLSGAADTQALLRNDQVYQPLRDRDDAQYSHLGGNWARNK

SEQ ID NO: 12003 - protein, 431 aa, synthetic construct
MALPVTALLLPLALLLHAARPEVQLVQSGAEVKKPGASVKVSCKASGYTFTSYYMHWVRQAPGQGLEWMGIINPSGGRTSYAQKFQGRVTMTRDTSTGTVYMELSSLRSEDTAVYYCARSHCSGGSCYSIDYWGQGTLVTVSSGGGGSGGGGSGGGGSQPVLTQSSSASASLGSSVKLTCTLSSGHSSYIIAWHQQQPGKAPRYLMKVEGSGSYNKGSGIPERFSGSSSGADRYLTISNLQSEDEADYYCETWDSNTHVFGTGTKVTVLTRQSIKGNHLVKVYDYQEDGSVLLTCDAEAKNITWFKDGKMIGFLTEDKKKWNLGSNAKDPRGMYQCKGSQNKSKPLQVYYRMCQNCIELNAATISGFLFAEIVSIFVLAVGVYFIAGQDGVRQSRASDKQTLLPNDQLYQPLKDREDDQYSHLQGNQLRRN

SEQ ID NO: 12004 - protein, 414 aa, synthetic construct
MALPVTALLLPLALLLHAARPEVQLVQSGAEVKKPGASVKVSCKASGYTFTSYYMHWVRQAPGQGLEWMGIINPSGGRTSYAQKFQGRVTMTRDTSTGTVYMELSSLRSEDTAVYYCARSHCSGGSCYSIDYWGQGTLVTVSSGGGGSGGGGSGGGGSQPVLTQSSSASASLGSSVKLTCTLSSGHSSYIIAWHQQQPGKAPRYLMKVEGSGSYNKGSGIPERFSGSSSGADRYLTISNLQSEDEADYYCETWDSNTHVFGTGTKVTVLTRQSFGLLDPKLCYLLDGILFIYGVILTALFLRVKFSRSADAPAYQQGQNQLYNELNLGRREEYDVLDKRRGRDPEMGGKPQRRKNPQEGLYNELQKDKMAEAYSEIGMKGERRRGKGHDGLYQGLSTATKDTYDALHMQALPPR

SEQ ID NO: 12005 - protein, 509 aa, synthetic construct
MALPVTALLLPLALLLHAARPQPVLTQSSSASASLGSSVKLTCTLSSGHSSYIIAWHQQQPGKAPRYLMKVEGSGSYNKGSGIPERFSGSSSGADRYLTISNLQSEDEADYYCETWDSNTHVFGTGTKVTVLGGGGSGGGGSGGGGSEVQLVQSGAEVKKPGASVKVSCKASGYTFTSYYMHWVRQAPGQGLEWMGIINPSGGRTSYAQKFQGRVTMTRDTSTGTVYMELSSLRSEDTAVYYCARSHCSGGSCYSIDYWGQGTLVTVSSTRGMRTEDLPKAVVFLEPQWYRVLEKDSVTLKCQGAYSPEDNSTQWFHNESLISSQASSYFIDAATVDDSGEYRCQTNLSTLSDPVQLEVHIGWLLLQAPRWVFKEEDPIHLRCHSWKNTALHKVTYLQNGKGRKYFHHNSDFYIPKATLKDSGSYFCRGLVGSKNVSSETVNITITQGLAVPTISSFFPPGYQVSFCLVMVLLFAVDTGLYFSVKTNIRSSTRDWKDHKFKWRKDPQDK

SEQ ID NO: 12006 - protein, 791 aa, synthetic construct
MALPVTALLLPLALLLHAARPQPVLTQSSSASASLGSSVKLTCTLSSGHSSYIIAWHQQQPGKAPRYLMKVEGSGSYNKGSGIPERFSGSSSGADRYLTISNLQSEDEADYYCETWDSNTHVFGTGTKVTVLGGGGSGGGGSGGGGSEVQLVQSGAEVKKPGASVKVSCKASGYTFTSYYMHWVRQAPGQGLEWMGIINPSGGRTSYAQKFQGRVTMTRDTSTGTVYMELSSLRSEDTAVYYCARSHCSGGSCYSIDYWGQGTLVTVSSTRGGSGQQQTLPKPFIWAEPHFMVPKEKQVTICCQGNYGAVEYQLHFEGSLFAVDRPKPPERINKVQFYIPDMNSRMAGQYSCIYRVGELWSEPSNLLDLVVTEMYDTPTLSVHPGPEVISGEKVTFYCRLDTATSMFLLLKEGRSSHVQRGYGKVQAEFPLGPVTTAHRGTYRCFGSYNNHAWSFPSEPVKLLVTGDIENTSLAPEDPTFPADTWGTYLLTTETGLQKDHALWDHTAQNLLRMGLAFLVLVALVWFLVEDWLSRKRTRERASRASTWEGRRRLNTQTLRAKRSGSGVKQTLNFDLLKLAGDVESNPGPSRGHMTEYKPTVRLATRDDVPRAVRTLAAAFADYPATRHTVDPDRHIERVTELQELFLTRVGLDIGKVWVADDGAAVAVWTTPESVEAGAVFAEIGPRMAELSGSRLAAQQQMEGLLAPHRPKEPAWFLATVGVSPDHQGKGLGSAVVLPGVEAAERAGVPAFLETSAPRNLPFYERLGFTVTADVEVPEGPRTWCMTRKPGA

SEQ ID NO: 12007 - protein, 624 aa, synthetic construct
MALPVTALLLPLALLLHAARPQPVLTQSSSASASLGSSVKLTCTLSSGHSSYIIAWHQQQPGKAPRYLMKVEGSGSYNKGSGIPERFSGSSSGADRYLTISNLQSEDEADYYCETWDSNTHVFGTGTKVTVLGGGGSGGGGSGGGGSEVQLVQSGAEVKKPGASVKVSCKASGYTFTSYYMHWVRQAPGQGLEWMGIINPSGGRTSYAQKFQGRVTMTRDTSTGTVYMELSSLRSEDTAVYYCARSHCSGGSCYSIDYWGQGTLVTVSSTRKIEVMYPPPYLDNEKSNGTIIHVKGARGDIENTSLAPEDPTFPADTWGTYLLTTETGLQKDHALWDHTAQNLLRMGLAFLVLVALVWFLVEDWLSRKRTRERASRASTWEGRRRLNTQTLRAKRSGSGVKQTLNFDLLKLAGDVESNPGPSRGHMTEYKPTVRLATRDDVPRAVRTLAAAFADYPATRHTVDPDRHIERVTELQELFLTRVGLDIGKVWVADDGAAVAVWTTPESVEAGAVFAEIGPRMAELSGSRLAAQQQMEGLLAPHRPKEPAWFLATVGVSPDHQGKGLGSAVVLPGVEAAERAGVPAFLETSAPRNLPFYERLGFTVTADVEVPEGPRTWCMTRKPGA

SEQ ID NO: 12008 - protein, 711 aa, synthetic construct
MALPVTALLLPLALLLHAARPQPVLTQSSSASASLGSSVKLTCTLSSGHSSYIIAWHQQQPGKAPRYLMKVEGSGSYNKGSGIPERFSGSSSGADRYLTISNLQSEDEADYYCETWDSNTHVFGTGTKVTVLGGGGSGGGGSGGGGSEVQLVQSGAEVKKPGASVKVSCKASGYTFTSYYMHWVRQAPGQGLEWMGIINPSGGRTSYAQKFQGRVTMTRDTSTGTVYMELSSLRSEDTAVYYCARSHCSGGSCYSIDYWGQGTLVTVSSTRLWVSQPPEIRTLEGSSAFLPCSFNASQGRLAIGSVTWFRDEVVPGKEVRNGTPEFRGRLAPLASSRFLHDHQAELHIRDVRGHDASIYVCRVEVLGLGVGTGNGTRLVVEKEHPQLGAGTVLLLRAGFYAVSFLSVAVGSTVYYQGKCLTWKGPRRQLPAVVPAPLPPPCGSSAHLLPPVPGGRAKRSGSGVKQTLNFDLLKLAGDVESNPGPSRMYRMQLLSCIALSLALVTNSAPTSSSTKKTQLQLEHLLLDLQMILNGINNYKNPKLTEMLTAKFYMPKKATELKHLQCLEEELKPLEEVLNLAQSKNFHLRPRDLISNINVIVLELKGSETTFMCEYADETATIVEFLNRWITFCQSIISTLTKIEVMYPPPYLDNEKSNGTIIHVKGKHLCPSPLFPGPSKPFWVLVVVGGVLACYSLLVTVAFIIFWVRSKRS

SEQ ID NO: 12009 - protein, 687 aa, synthetic construct
MALPVTALLLPLALLLHAARPQPVLTQSSSASASLGSSVKLTCTLSSGHSSYIIAWHQQQPGKAPRYLMKVEGSGSYNKGSGIPERFSGSSSGADRYLTISNLQSEDEADYYCETWDSNTHVFGTGTKVTVLGGGGSGGGGSGGGGSEVQLVQSGAEVKKPGASVKVSCKASGYTFTSYYMHWVRQAPGQGLEWMGIINPSGGRTSYAQKFQGRVTMTRDTSTGTVYMELSSLRSEDTAVYYCARSHCSGGSCYSIDYWGQGTLVTVSSTRLWVSQPPEIRTLEGSSAFLPCSFNASQGRLAIGSVTWFRDEVVPGKEVRNGTPEFRGRLAPLASSRFLHDHQAELHIRDVRGHDASIYVCRVEVLGLGVGTGNGTRLVVEKEHPQLGAGTVLLLRAGFYAVSFLSVAVGSTVYYQGKCLTWKGPRRQLPAVVPAPLPPPCGSSAHLLPPVPGGRAKRSGSGVKQTLNFDLLKLAGDVESNPGPSRGHMTEYKPTVRLATRDDVPRAVRTLAAAFADYPATRHTVDPDRHIERVTELQELFLTRVGLDIGKVWVADDGAAVAVWTTPESVEAGAVFAEIGPRMAELSGSRLAAQQQMEGLLAPHRPKEPAWFLATVGVSPDHQGKGLGSAVVLPGVEAAERAGVPAFLETSAPRNLPFYERLGFTVTADVEVPEGPRTWCMTRKPGA

SEQ ID NO: 12010 - protein, 363 aa, synthetic construct
MALPVTALLLPLALLLHAARPQPVLTQSSSASASLGSSVKLTCTLSSGHSSYIIAWHQQQPGKAPRYLMKVEGSGSYNKGSGIPERFSGSSSGADRYLTISNLQSEDEADYYCETWDSNTHVFGTGTKVTVLGGGGSGGGGSGGGGSEVQLVQSGAEVKKPGASVKVSCKASGYTFTSYYMHWVRQAPGQGLEWMGIINPSGGRTSYAQKFQGRVTMTRDTSTGTVYMELSSLRSEDTAVYYCARSHCSGGSCYSIDYWGQGTLVTVSSTRKIEVMYPPPYLDNEKSNGTIIHVKGARITQGLAVSTISSFFPPGYQVSFCLVMVLLFAVDTGLYFSVKTNIRSSTRDWKDHKFKWRKDPQDK

SEQ ID NO: 12011 - protein, 363 aa, synthetic construct
MALPVTALLLPLALLLHAARPQPVLTQSSSASASLGSSVKLTCTLSSGHSSYIIAWHQQQPGKAPRYLMKVEGSGSYNKGSGIPERFSGSSSGADRYLTISNLQSEDEADYYCETWDSNTHVFGTGTKVTVLGGGGSGGGGSGGGGSEVQLVQSGAEVKKPGASVKVSCKASGYTFTSYYMHWVRQAPGQGLEWMGIINPSGGRTSYAQKFQGRVTMTRDTSTGTVYMELSSLRSEDTAVYYCARSHCSGGSCYSIDYWGQGTLVTVSSTRKIEVMYPPPYLDNEKSNGTIIHVKGARITQGLAVPTISSFFPPGYQVSFCLVMVLLFAVDTGLYFSVKTNIRSSTRDWKDHKFKWRKDPQDK

SEQ ID NO: 12012 - protein, 342 aa, synthetic construct
MALPVTALLLPLALLLHAARPQPVLTQSSSASASLGSSVKLTCTLSSGHSSYIIAWHQQQPGKAPRYLMKVEGSGSYNKGSGIPERFSGSSSGADRYLTISNLQSEDEADYYCETWDSNTHVFGTGTKVTVLGGGGSGGGGSGGGGSEVQLVQSGAEVKKPGASVKVSCKASGYTFTSYYMHWVRQAPGQGLEWMGIINPSGGRTSYAQKFQGRVTMTRDTSTGTVYMELSSLRSEDTAVYYCARSHCSGGSCYSIDYWGQGTLVTVSSTRKIEVMYPPPYLDNEKSNGTIIHVKGARITQGLAVSTISSFSPPGYQVSFCLVMVLLFAVDTGLYFSVKTNI

SEQ ID NO: 12013 - protein, 373 aa, synthetic construct
MALPVTALLLPLALLLHAARPQPVLTQSSSASASLGSSVKLTCTLSSGHSSYIIAWHQQQPGKAPRYLMKVEGSGSYNKGSGIPERFSGSSSGADRYLTISNLQSEDEADYYCETWDSNTHVFGTGTKVTVLGGGGSGGGGSGGGGSEVQLVQSGAEVKKPGASVKVSCKASGYTFTSYYMHWVRQAPGQGLEWMGIINPSGGRTSYAQKFQGRVTMTRDTSTGTVYMELSSLRSEDTAVYYCARSHCSGGSCYSIDYWGQGTLVTVSSTRKIEVMYPPPYLDNEKSNGTIIHVKGARVEKEHPQLGAGTVLLLRAGFYAVSFLSVAVGSTVYYQGKCLTWKGPRRQLPAVVPAPLPPPCGSSAHLLPPVPGG

SEQ ID NO: 12014 - protein, 454 aa, synthetic construct
MALPVTALLLPLALLLHAARPQPVLTQSSSASASLGSSVKLTCTLSSGHSSYIIAWHQQQPGKAPRYLMKVEGSGSYNKGSGIPERFSGSSSGADRYLTISNLQSEDEADYYCETWDSNTHVFGTGTKVTVLGGGGSGGGGSGGGGSEVQLVQSGAEVKKPGASVKVSCKASGYTFTSYYMHWVRQAPGQGLEWMGIINPSGGRTSYAQKFQGRVTMTRDTSTGTVYMELSSLRSEDTAVYYCARSHCSGGSCYSIDYWGQGTLVTVSSTRKIEVMYPPPYLDNEKSNGTIIHVKGARKSVRFYLVVSPASASTQTSWTPRDLVSSQTQTQSCVPPTAGARQAPESPSTIPVPSQPQNSTLRPGPAAPIALVPVFCGLLVAKSLVLSALLVWWGDIWWKTMMELRSLDTQKATCHLQQVTDLPWTSVSSPVEREILYHTVARTKISDDDDEHTL

SEQ ID NO: 12015 - protein, 391 aa, synthetic construct
MALPVTALLLPLALLLHAARPQPVLTQSSSASASLGSSVKLTCTLSSGHSSYIIAWHQQQPGKAPRYLMKVEGSGSYNKGSGIPERFSGSSSGADRYLTISNLQSEDEADYYCETWDSNTHVFGTGTKVTVLGGGGSGGGGSGGGGSEVQLVQSGAEVKKPGASVKVSCKASGYTFTSYYMHWVRQAPGQGLEWMGIINPSGGRTSYAQKFQGRVTMTRDTSTGTVYMELSSLRSEDTAVYYCARSHCSGGSCYSIDYWGQGTLVTVSSTRKIEVMYPPPYLDNEKSNGTIIHVKGARGDIENTSLAPEDPTFPADTWGTYLLTTETGLQKDHALWDHTAQNLLRMGLAFLVLVALVWFLVEDWLSRKRTRERASRASTWEGRRRLNTQTL

SEQ ID NO: 12016 - protein, 987 aa, synthetic construct
MALPVTALLLPLALLLHAARPQPVLTQSSSASASLGSSVKLTCTLSSGHSSYIIAWHQQQPGKAPRYLMKVEGSGSYNKGSGIPERFSGSSSGADRYLTISNLQSEDEADYYCETWDSNTHVFGTGTKVTVLLEGQPKANPTVTLFPPSSEELQANKATLVCLISDFYPGAVTVAWKADGSPVKAGVETTKPSKQSNNKYAASSYLSLTPEQWKSHRSYSCQVTHEGSTVEKTVAPTECSGSQSFGLLDPKLCYLLDGILFIYGVILTALFLRVKFSRSADAPAYQQGQNQLYNELNLGRREEYDVLDKRRGRDPEMGGKPQRRKNPQEGLYNELQKDKMAEAYSEIGMKGERRRGKGHDGLYQGLSTATKDTYDALHMQALPPRRAKRSGSGATNFSLLKQAGDVEENPGPTSMDWIWRILFLVGAATGAHSFEEVQLVQSGAEVKKPGASVKVSCKASGYTFTSYYMHWVRQAPGQGLEWMGIINPSGGRTSYAQKFQGRVTMTRDTSTGTVYMELSSLRSEDTAVYYCARSHCSGGSCYSIDYWGQGTLVTVSSTRASTKGPSVFPLAPSSKSTSGGTAALGCLVKDYFPEPVTVSWNSGALTSGVHTFPAVLQSSGLYSLSSVVTVPSSSLGTQTYICNVNHKPSNTKVDKRVEPKSCGTGDIENTSLAPEDPTFPADTWGTYLLTTETGLQKDHALWDHTAQNLLRMGLAFLVLVALVWFLVEDWLSRKRTRERASRASTWEGRRRLNTQTLRAKRSGSGATNFSLLKQAGDVEENPGPSRGHMTEYKPTVRLATRDDVPRAVRTLAAAFADYPATRHTVDPDRHIERVTELQELFLTRVGLDIGKVWVADDGAAVAVWTTPESVEAGAVFAEIGPRMAELSGSRLAAQQQMEGLLAPHRPKEPAWFLATVGVSPDHQGKGLGSAVVLPGVEAAERAGVPAFLETSAPRNLPFYERLGFTVTADVEVPEGPRTWCMTRKPGA

SEQ ID NO: 12017 - protein, 1053 aa, synthetic construct
MALPVTALLLPLALLLHAARPQPVLTQSSSASASLGSSVKLTCTLSSGHSSYIIAWHQQQPGKAPRYLMKVEGSGSYNKGSGIPERFSGSSSGADRYLTISNLQSEDEADYYCETWDSNTHVFGTGTKVTVLLEGQPKANPTVTLFPPSSEELQANKATLVCLISDFYPGAVTVAWKADGSPVKAGVETTKPSKQSNNKYAASSYLSLTPEQWKSHRSYSCQVTHEGSTVEKTVAPTECSGSQSFGLLDPKLCYLLDGILFIYGVILTALFLRVKFSRSADAPAYQQGQNQLYNELNLGRREEYDVLDKRRGRDPEMGGKPQRRKNPQEGLYNELQKDKMAEAYSEIGMKGERRRGKGHDGLYQGLSTATKDTYDALHMQALPPRRAKRSGSGATNFSLLKQAGDVEENPGPTSMDWIWRILFLVGAATGAHSFEEVQLVQSGAEVKKPGASVKVSCKASGYTFTSYYMHWVRQAPGQGLEWMGIINPSGGRTSYAQKFQGRVTMTRDTSTGTVYMELSSLRSEDTAVYYCARSHCSGGSCYSIDYWGQGTLVTVSSTRASTKGPSVFPLAPSSKSTSGGTAALGCLVKDYFPEPVTVSWNSGALTSGVHTFPAVLQSSGLYSLSSVVTVPSSSLGTQTYICNVNHKPSNTKVDKRVEPKSCGTKSVRFYLVVSPASASTQTSWTPRDLVSSQTQTQSCVPPTAGARQAPESPSTIPVPSQPQNSTLRPGPAAPIALVPVFCGLLVAKSLVLSALLVWWGDIWWKTMMELRSLDTQKATCHLQQVTDLPWTSVSSPVEREILYHTVARTKISDDDDEHTLRAKRSGSGVKQTLNFDLLKLAGDVESNPGPSRGHMTEYKPTVRLATRDDVPRAVRTLAAAFADYPATRHTVDPDRHIERVTELQELFLTRVGLDIGKVWVADDGAAVAVWTTPESVEAGAVFAEIGPRMAELSGSRLAAQQQMEGLLAPHRPKEPAWFLATVGVSPDHQGKGLGSAVVLPGVEAAERAGVPAFLETSAPRNLPFYERLGFTVTADVEVPEGPRTWCMTRKPGA

SEQ ID NO: 12018 - protein, 973 aa, synthetic construct
MALPVTALLLPLALLLHAARPQPVLTQSSSASASLGSSVKLTCTLSSGHSSYIIAWHQQQPGKAPRYLMKVEGSGSYNKGSGIPERFSGSSSGADRYLTISNLQSEDEADYYCETWDSNTHVFGTGTKVTVLLEGQPKANPTVTLFPPSSEELQANKATLVCLISDFYPGAVTVAWKADGSPVKAGVETTKPSKQSNNKYAASSYLSLTPEQWKSHRSYSCQVTHEGSTVEKTVAPTECSGSQSFGLLDPKLCYLLDGILFIYGVILTALFLRVKFSRSADAPAYQQGQNQLYNELNLGRREEYDVLDKRRGRDPEMGGKPQRRKNPQEGLYNELQKDKMAEAYSEIGMKGERRRGKGHDGLYQGLSTATKDTYDALHMQALPPRRAKRSGSGATNFSLLKQAGDVEENPGPTSMDWIWRILFLVGAATGAHSFEEVQLVQSGAEVKKPGASVKVSCKASGYTFTSYYMHWVRQAPGQGLEWMGIINPSGGRTSYAQKFQGRVTMTRDTSTGTVYMELSSLRSEDTAVYYCARSHCSGGSCYSIDYWGQGTLVTVSSTRASTKGPSVFPLAPSSKSTSGGTAALGCLVKDYFPEPVTVSWNSGALTSGVHTFPAVLQSSGLYSLSSVVTVPSSSLGTQTYICNVNHKPSNTKVDKRVEPKSCGTVVEKEHPQLGAGTVLLLRAGFYAVSFLSVAVGSTVYYQGKCLTWKGPRRQLPAVVPAPLPPPCGSSAHLLPPVPGGRAKRSGSGVKQTLNFDLLKLAGDVESNPGPSRGHMTEYKPTVRLATRDDVPRAVRTLAAAFADYPATRHTVDPDRHIERVTELQELFLTRVGLDIGKVWVADDGAAVAVWTTPESVEAGAVFAEIGPRMAELSGSRLAAQQQMEGLLAPHRPKEPAWFLATVGVSPDHQGKGLGSAVVLPGVEAAERAGVPAFLETSAPRNLPFYERLGFTVTADVEVPEGPRTWCMTRKPGA

SEQ ID NO: 12019 - protein, 1002 aa, synthetic construct
MALPVTALLLPLALLLHAARPQPVLTQSSSASASLGSSVKLTCTLSSGHSSYIIAWHQQQPGKAPRYLMKVEGSGSYNKGSGIPERFSGSSSGADRYLTISNLQSEDEADYYCETWDSNTHVFGTGTKVTVLLEDLKNVFPPEVAVFEPSEAEISHTQKATLVCLATGFYPDHVELSWWVNGKEVHSGVSTDPQPLKEQPALNDSRYCLSSRLRVSATFWQNPRNHFRCQVQFYGLSENDEWTQDRAKPVTQIVSAEAWGRADCGSQSFGLLDPKLCYLLDGILFIYGVILTALFLRVKFSRSADAPAYQQGQNQLYNELNLGRREEYDVLDKRRGRDPEMGGKPQRRKNPQEGLYNELQKDKMAEAYSEIGMKGERRRGKGHDGLYQGLSTATKDTYDALHMQALPPRRAKRSGSGATNFSLLKQAGDVEENPGPTSMDWIWRILFLVGAATGAHSFEEVQLVQSGAEVKKPGASVKVSCKASGYTFTSYYMHWVRQAPGQGLEWMGIINPSGGRTSYAQKFQGRVTMTRDTSTGTVYMELSSLRSEDTAVYYCARSHCSGGSCYSIDYWGQGTLVTVSSTRIQNPDPAVYQLRDSKSSDKSVCLFTDFDSQTNVSQSKDSDVYITDKTVLDMRSMDFKSNSAVAWSNKSDFACANAFNNSIIPEDTFFPSPESSCGTGDIENTSLAPEDPTFPADTWGTYLLTTETGLQKDHALWDHTAQNLLRMGLAFLVLVALVWFLVEDWLSRKRTRERASRASTWEGRRRLNTQTLRAKRSGSGATNFSLLKQAGDVEENPGPSRGHMTEYKPTVRLATRDDVPRAVRTLAAAFADYPATRHTVDPDRHIERVTELQELFLTRVGLDIGKVWVADDGAAVAVWTTPESVEAGAVFAEIGPRMAELSGSRLAAQQQMEGLLAPHRPKEPAWFLATVGVSPDHQGKGLGSAVVLPGVEAAERAGVPAFLETSAPRNLPFYERLGFTVTADVEVPEGPRTWCMTRKPGA

SEQ ID NO: 12020 - protein, 1068 aa, synthetic construct
MALPVTALLLPLALLLHAARPQPVLTQSSSASASLGSSVKLTCTLSSGHSSYIIAWHQQQPGKAPRYLMKVEGSGSYNKGSGIPERFSGSSSGADRYLTISNLQSEDEADYYCETWDSNTHVFGTGTKVTVLLEDLKNVFPPEVAVFEPSEAEISHTQKATLVCLATGFYPDHVELSWWVNGKEVHSGVSTDPQPLKEQPALNDSRYCLSSRLRVSATFWQNPRNHFRCQVQFYGLSENDEWTQDRAKPVTQIVSAEAWGRADCGSQSFGLLDPKLCYLLDGILFIYGVILTALFLRVKFSRSADAPAYQQGQNQLYNELNLGRREEYDVLDKRRGRDPEMGGKPQRRKNPQEGLYNELQKDKMAEAYSEIGMKGERRRGKGHDGLYQGLSTATKDTYDALHMQALPPRRAKRSGSGATNFSLLKQAGDVEENPGPTSMDWIWRILFLVGAATGAHSFEEVQLVQSGAEVKKPGASVKVSCKASGYTFTSYYMHWVRQAPGQGLEWMGIINPSGGRTSYAQKFQGRVTMTRDTSTGTVYMELSSLRSEDTAVYYCARSHCSGGSCYSIDYWGQGTLVTVSSTRIQNPDPAVYQLRDSKSSDKSVCLFTDFDSQTNVSQSKDSDVYITDKTVLDMRSMDFKSNSAVAWSNKSDFACANAFNNSIIPEDTFFPSPESSCGTKSVRFYLVVSPASASTQTSWTPRDLVSSQTQTQSCVPPTAGARQAPESPSTIPVPSQPQNSTLRPGPAAPIALVPVFCGLLVAKSLVLSALLVWWGDIWWKTMMELRSLDTQKATCHLQQVTDLPWTSVSSPVEREILYHTVARTKISDDDDEHTLRAKRSGSGVKQTLNFDLLKLAGDVESNPGPSRGHMTEYKPTVRLATRDDVPRAVRTLAAAFADYPATRHTVDPDRHIERVTELQELFLTRVGLDIGKVWVADDGAAVAVWTTPESVEAGAVFAEIGPRMAELSGSRLAAQQQMEGLLAPHRPKEPAWFLATVGVSPDHQGKGLGSAVVLPGVEAAERAGVPAFLETSAPRNLPFYERLGFTVTADVEVPEGPRTWCMTRKPGA

SEQ ID NO: 12021 - protein, 988 aa, synthetic construct
MALPVTALLLPLALLLHAARPQPVLTQSSSASASLGSSVKLTCTLSSGHSSYIIAWHQQQPGKAPRYLMKVEGSGSYNKGSGIPERFSGSSSGADRYLTISNLQSEDEADYYCETWDSNTHVFGTGTKVTVLLEDLKNVFPPEVAVFEPSEAEISHTQKATLVCLATGFYPDHVELSWWVNGKEVHSGVSTDPQPLKEQPALNDSRYCLSSRLRVSATFWQNPRNHFRCQVQFYGLSENDEWTQDRAKPVTQIVSAEAWGRADCGSQSFGLLDPKLCYLLDGILFIYGVILTALFLRVKFSRSADAPAYQQGQNQLYNELNLGRREEYDVLDKRRGRDPEMGGKPQRRKNPQEGLYNELQKDKMAEAYSEIGMKGERRRGKGHDGLYQGLSTATKDTYDALHMQALPPRRAKRSGSGATNFSLLKQAGDVEENPGPTSMDWIWRILFLVGAATGAHSFEEVQLVQSGAEVKKPGASVKVSCKASGYTFTSYYMHWVRQAPGQGLEWMGIINPSGGRTSYAQKFQGRVTMTRDTSTGTVYMELSSLRSEDTAVYYCARSHCSGGSCYSIDYWGQGTLVTVSSTRIQNPDPAVYQLRDSKSSDKSVCLFTDFDSQTNVSQSKDSDVYITDKTVLDMRSMDFKSNSAVAWSNKSDFACANAFNNSIIPEDTFFPSPESSCGTVVEKEHPQLGAGTVLLLRAGFYAVSFLSVAVGSTVYYQGKCLTWKGPRRQLPAVVPAPLPPPCGSSAHLLPPVPGGRAKRSGSGVKQTLNFDLLKLAGDVESNPGPSRGHMTEYKPTVRLATRDDVPRAVRTLAAAFADYPATRHTVDPDRHIERVTELQELFLTRVGLDIGKVWVADDGAAVAVWTTPESVEAGAVFAEIGPRMAELSGSRLAAQQQMEGLLAPHRPKEPAWFLATVGVSPDHQGKGLGSAVVLPGVEAAERAGVPAFLETSAPRNLPFYERLGFTVTADVEVPEGPRTWCMTRKPGA

SEQ ID NO: 12022 - protein, 959 aa, synthetic construct
MALPVTALLLPLALLLHAARPQPVLTQSSSASASLGSSVKLTCTLSSGHSSYIIAWHQQQPGKAPRYLMKVEGSGSYNKGSGIPERFSGSSSGADRYLTISNLQSEDEADYYCETWDSNTHVFGTGTKVTVLLEGQPKANPTVTLFPPSSEELQANKATLVCLISDFYPGAVTVAWKADGSPVKAGVETTKPSKQSNNKYAASSYLSLTPEQWKSHRSYSCQVTHEGSTVEKTVAPTECSGSQSFGLLDPKLCYLLDGILFIYGVILTALFLRVKFSRSADAPAYQQGQNQLYNELNLGRREEYDVLDKRRGRDPEMGGKPQRRKNPQEGLYNELQKDKMAEAYSEIGMKGERRRGKGHDGLYQGLSTATKDTYDALHMQALPPRRAKRSGSGATNFSLLKQAGDVEENPGPTSMDWIWRILFLVGAATGAHSFEEVQLVQSGAEVKKPGASVKVSCKASGYTFTSYYMHWVRQAPGQGLEWMGIINPSGGRTSYAQKFQGRVTMTRDTSTGTVYMELSSLRSEDTAVYYCARSHCSGGSCYSIDYWGQGTLVTVSSTRASTKGPSVFPLAPSSKSTSGGTAALGCLVKDYFPEPVTVSWNSGALTSGVHTFPAVLQSSGLYSLSSVVTVPSSSLGTQTYICNVNHKPSNTKVDKRVEPKSCGTITQGLAVSTISSFFPPGYQVSFCLVMVLLFAVDTGLYFSVKTNIRSSTRDWKDHKFKWRKDPQDKRAKRSGSGATNFSLLKQAGDVEENPGPSRGHMTEYKPTVRLATRDDVPRAVRTLAAAFADYPATRHTVDPDRHIERVTELQELFLTRVGLDIGKVWVADDGAAVAVWTTPESVEAGAVFAEIGPRMAELSGSRLAAQQQMEGLLAPHRPKEPAWFLATVGVSPDHQGKGLGSAVVLPGVEAAERAGVPAFLETSAPRNLPFYERLGFTVTADVEVPEGPRTWCMTRKPGA

SEQ ID NO: 12023 - protein, 974 aa, synthetic construct
MALPVTALLLPLALLLHAARPQPVLTQSSSASASLGSSVKLTCTLSSGHSSYIIAWHQQQPGKAPRYLMKVEGSGSYNKGSGIPERFSGSSSGADRYLTISNLQSEDEADYYCETWDSNTHVFGTGTKVTVLLEDLKNVFPPEVAVFEPSEAEISHTQKATLVCLATGFYPDHVELSWWVNGKEVHSGVSTDPQPLKEQPALNDSRYCLSSRLRVSATFWQNPRNHFRCQVQFYGLSENDEWTQDRAKPVTQIVSAEAWGRADCGSQSFGLLDPKLCYLLDGILFIYGVILTALFLRVKFSRSADAPAYQQGQNQLYNELNLGRREEYDVLDKRRGRDPEMGGKPQRRKNPQEGLYNELQKDKMAEAYSEIGMKGERRRGKGHDGLYQGLSTATKDTYDALHMQALPPRRAKRSGSGATNFSLLKQAGDVEENPGPTSMDWIWRILFLVGAATGAHSFEEVQLVQSGAEVKKPGASVKVSCKASGYTFTSYYMHWVRQAPGQGLEWMGIINPSGGRTSYAQKFQGRVTMTRDTSTGTVYMELSSLRSEDTAVYYCARSHCSGGSCYSIDYWGQGTLVTVSSTRIQNPDPAVYQLRDSKSSDKSVCLFTDFDSQTNVSQSKDSDVYITDKTVLDMRSMDFKSNSAVAWSNKSDFACANAFNNSIIPEDTFFPSPESSCGTITQGLAVSTISSFFPPGYQVSFCLVMVLLFAVDTGLYFSVKTNIRSSTRDWKDHKFKWRKDPQDKRAKRSGSGATNFSLLKQAGDVEENPGPSRGHMTEYKPTVRLATRDDVPRAVRTLAAAFADYPATRHTVDPDRHIERVTELQELFLTRVGLDIGKVWVADDGAAVAVWTTPESVEAGAVFAEIGPRMAELSGSRLAAQQQMEGLLAPHRPKEPAWFLATVGVSPDHQGKGLGSAVVLPGVEAAERAGVPAFLETSAPRNLPFYERLGFTVTADVEVPEGPRTWCMTRKPGA

SEQ ID NO: 12024 - protein, 657 aa, synthetic construct
MALPVTALLLPLALLLHAARPQPVLTQSSSASASLGSSVKLTCTLSSGHSSYIIAWHQQQPGKAPRYLMKVEGSGSYNKGSGIPERFSGSSSGADRYLTISNLQSEDEADYYCETWDSNTHVFGTGTKVTVLLEGQPKANPTVTLFPPSSEELQANKATLVCLISDFYPGAVTVAWKADGSPVKAGVETTKPSKQSNNKYAASSYLSLTPEQWKSHRSYSCQVTHEGSTVEKTVAPTECSGSLGEPQLCYILDAILFLYGIVLTLLYCRLKIQVRKAAITSYEKSDGVYTGLSTRNQETYETLKHEKPPQRAKRSGSGATNFSLLKQAGDVEENPGPTSMDWIWRILFLVGAATGAHSFEEVQLVQSGAEVKKPGASVKVSCKASGYTFTSYYMHWVRQAPGQGLEWMGIINPSGGRTSYAQKFQGRVTMTRDTSTGTVYMELSSLRSEDTAVYYCARSHCSGGSCYSIDYWGQGTLVTVSSTRASTKGPSVFPLAPSSKSTSGGTAALGCLVKDYFPEPVTVSWNSGALTSGVHTFPAVLQSSGLYSLSSVVTVPSSSLGTQTYICNVNHKPSNTKVDKRVEPKSCGTLGEPQLCYILDAILFLYGIVLTLLYCRLKIQVRKAAITSYEKSDGVYTGLSTRNQETYETLKHEKPPQ

SEQ ID NO: 12025 - protein, 499 aa, synthetic construct
MALPVTALLLPLALLLHAARPDIVMTQSPSSLTVTAGEKVTMSCKSSQSLLNSGNQKNYLTWYQQKPGQPPKLLIYWASTRESGVPDRFTGSGSGTDFTLTISSVQAEDLAVYYCQNDYSYPLTFGAGTKLELKGGGGSGGGGSGGGGSQIQLVQSGPELKKPGETVKISCKASGYTFTNYGMNWVKQAPGKGLKWMGWINTNTGEPTYAEEFKGRFAFSLETSASTAYLQINNLKNEDTATYFCARLGFGNAMDYWGQGTSVTVSSTREQKLISEEDLKIEVMYPPPYLDNEKSNGTIIHVKGKHLCPSPLFPGPSKPFWVLVVVGGVLACYSLLVTVAFIIFWVRSKRSRLLHSDYMNMTPRRPGPTRKHYQPYAPPRDFAAYRSRVKFSRSADAPAYQQGQNQLYNELNLGRREEYDVLDKRRGRDPEMGGKPRRKNPQEGLYNELQKDKMAEAYSEIGMKGERRRGKGHDGLYQGLSTATKDTYDALHMQALPPR

SEQ ID NO: 12026 - protein, 505 aa, synthetic construct
MALPVTALLLPLALLLHAARPDIVMTQSPSSLTVTAGEKVTMSCKSSQSLLNSGNQKNYLTWYQQKPGQPPKLLIYWASTRESGVPDRFTGSGSGTDFTLTISSVQAEDLAVYYCQNDYSYPLTFGAGTKLELKGGGGSGGGGSGGGGSQIQLVQSGPELKKPGETVKISCKASGYTFTNYGMNWVKQAPGKGLKWMGWINTNTGEPTYAEEFKGRFAFSLETSASTAYLQINNLKNEDTATYFCARLGFGNAMDYWGQGTSVTVSSTREQKLISEEDLAKPTTTPAPRPPTPAPTIASQPLSLRPEACRPAAGGAVHTRGLDFACDIYIWAPLAGTCGVLLLSLVITLYCKRGRKKLLYIFKQPFMRPVQTTQEEDGCSCRFPEEEEGGCELRVKFSRSADAPAYQQGQNQLYNELNLGRREEYDVLDKRRGRDPEMGGKPRRKNPQEGLYNELQKDKMAEAYSEIGMKGERRRGKGHDGLYQGLSTATKDTYDALHMQALPPR

SEQ ID NO: 12027 - protein, 505 aa, synthetic construct
MALPVTALLLPLALLLHAARPQIQLVQSGPELKKPGETVKISCKASGYTFTNYGMNWVKQAPGKGLKWMGWINTNTGEPTYAEEFKGRFAFSLETSASTAYLQINNLKNEDTATYFCARLGFGNAMDYWGQGTSVTVSSGGGGSGGGGSGGGGSDIVMTQSPSSLTVTAGEKVTMSCKSSQSLLNSGNQKNYLTWYQQKPGQPPKLLIYWASTRESGVPDRFTGSGSGTDFTLTISSVQAEDLAVYYCQNDYSYPLTFGAGTKLELKTREQKLISEEDLAKPTTTPAPRPPTPAPTIASQPLSLRPEACRPAAGGAVHTRGLDFACDIYIWAPLAGTCGVLLLSLVITLYCKRGRKKLLYIFKQPFMRPVQTTQEEDGCSCRFPEEEEGGCELRVKFSRSADAPAYQQGQNQLYNELNLGRREEYDVLDKRRGRDPEMGGKPRRKNPQEGLYNELQKDKMAEAYSEIGMKGERRRGKGHDGLYQGLSTATKDTYDALHMQALPPR

SEQ ID NO: 12028 - protein, 918 aa, synthetic construct
MALPVTALLLPLALLLHAARPDIVMTQSPSSLTVTAGEKVTMSCKSSQSLLNSGNQKNYLTWYQQKPGQPPKLLIYWASTRESGVPDRFTGSGSGTDFTLTISSVQAEDLAVYYCQNDYSYPLTFGAGTKLELKGGGGSGGGGSGGGGSQIQLVQSGPELKKPGETVKISCKASGYTFTNYGMNWVKQAPGKGLKWMGWINTNTGEPTYAEEFKGRFAFSLETSASTAYLQINNLKNEDTATYFCARLGFGNAMDYWGQGTSVTVSSTREQKLISEEDLAKPTTTPAPRPPTPAPTIASQPLSLRPEACRPAAGGAVHTRGLDFACDIYIWAPLAGTCGVLLLSLVITLYCGRARVKFSRSADAPAYQQGQNQLYNELNLGRREEYDVLDKRRGRDPEMGGKPRRKNPQEGLYNELQKDKMAEAYSEIGMKGERRRGKGHDGLYQGLSTATKDTYDALHMQALPPRSRGSGATNFSLLKQAGDVEENPGPGIHMATYEVLCEVARKLGTDDREVVLFLLNVFIPQPTLAQLIGALRALKEEGRLTFPLLAECLFRAGRRDLLRDLLHLDPRFLERHLAGTMSYFSPYQLTVLHVDGELCARDIRSLIFLSKDTIGSRSTPQTFLHWVYCMENLDLLGPTDVDALMSMLRSLSRVDLQRQVQTLMGLHLSGPSHSQHYRHTPLETDFYDYKDDDDKTSGSGEGRGSLLTCGDVEENPGPHMTEYKPTVRLATRDDVPRAVRTLAAAFADYPATRHTVDPDRHIERVTELQELFLTRVGLDIGKVWVADDGAAVAVWTTPESVEAGAVFAEIGPRMAELSGSRLAAQQQMEGLLAPHRPKEPAWFLATVGVSPDHQGKGLGSAVVLPGVEAAERAGVPAFLETSAPRNLPFYERLGFTVTADVEVPEGPRTWCMTRKPGA

SEQ ID NO: 12029 - protein, 858 aa, synthetic construct
MALPVTALLLPLALLLHAARPDIVMTQSPSSLTVTAGEKVTMSCKSSQSLLNSGNQKNYLTWYQQKPGQPPKLLIYWASTRESGVPDRFTGSGSGTDFTLTISSVQAEDLAVYYCQNDYSYPLTFGAGTKLELKLEIQNPDPAVYQLRDSKSSDKSVCLFTDFDSQTNVSQSKDSDVYITDKCVLDMRSMDFKSNSAVAWSNKSDFACANAFNNSIIPEDTFFPSSDVPCDVKLVEKSFETDTNLNFQNLSVIGFRILLLKVAGFNLLMTLRLWSSRAKRSGSGVKQTLNFDLLKLAGDVESNPGPTSMDWIWRILFLVGAATGAHSFEQIQLVQSGPELKKPGETVKISCKASGYTFTNYGMNWVKQAPGKGLKWMGWINTNTGEPTYAEEFKGRFAFSLETSASTAYLQINNLKNEDTATYFCARLGFGNAMDYWGQGTSVTVSSTREDLKNVFPPEVAVFEPSKAEIAHTQKATLVCLATGFYPDHVELSWWVNGKEVHSGVCTDPQPLKEQPALNDSRYCLSSRLRVSATFWQNPRNHFRCQVQFYGLSENDEWTQDRAKPVTQIVSAEAWGRADCGITSASYHQGVLSATILYEILLGKATLYAVLVSALVLMAMVKRKDSRGRAKRSGSGATNFSLLKQAGDVEENPGPSRGHMTEYKPTVRLATRDDVPRAVRTLAAAFADYPATRHTVDPDRHIERVTELQELFLTRVGLDIGKVWVADDGAAVAVWTTPESVEAGAVFAEIGPRMAELSGSRLAAQQQMEGLLAPHRPKEPAWFLATVGVSPDHQGKGLGSAVVLPGVEAAERAGVPAFLETSAPRNLPFYERLGFTVTADVEVPEGPRTWCMTRKPGA

SEQ ID NO: 12030 - protein, 857 aa, synthetic construct
MALPVTALLLPLALLLHAARPDIVMTQSPSSLTVTAGEKVTMSCKSSQSLLNSGNQKNYLTWYQQKPGQPPKLLIYWASTRESGVPDRFTGSGSGTDFTLTISSVQAEDLAVYYCQNDYSYPLTFGAGTKLELKLEDLKNVFPPEVAVFEPSKAEIAHTQKATLVCLATGFYPDHVELSWWVNGKEVHSGVCTDPQPLKEQPALNDSRYCLSSRLRVSATFWQNPRNHFRCQVQFYGLSENDEWTQDRAKPVTQIVSAEAWGRADCGITSASYHQGVLSATILYEILLGKATLYAVLVSALVLMAMVKRKDSRGRAKRSGSGATNFSLLKQAGDVEENPGPTSMDWIWRILFLVGAATGAHSFEQIQLVQSGPELKKPGETVKISCKASGYTFTNYGMNWVKQAPGKGLKWMGWINTNTGEPTYAEEFKGRFAFSLETSASTAYLQINNLKNEDTATYFCARLGFGNAMDYWGQGTSVTVSSTRIQNPDPAVYQLRDSKSSDKSVCLFTDFDSQTNVSQSKDSDVYITDKCVLDMRSMDFKSNSAVAWSNKSDFACANAFNNSIIPEDTFFPSSDVPCDVKLVEKSFETDTNLNFQNLSVIGFRILLLKVAGFNLLMTLRLWSSRAKRSGSGVKQTLNFDLLKLAGDVESNPGPSRGHMTEYKPTVRLATRDDVPRAVRTLAAAFADYPATRHTVDPDRHIERVTELQELFLTRVGLDIGKVWVADDGAAVAVWTTPESVEAGAVFAEIGPRMAELSGSRLAAQQQMEGLLAPHRPKEPAWFLATVGVSPDHQGKGLGSAVVLPGVEAAERAGVPAFLETSAPRNLPFYERLGFTVTADVEVPEGPRTWCMTRKPGA

SEQ ID NO: 12031 - protein, 624 aa, synthetic construct
MALPVTALLLPLALLLHAARPDIVMTQSPSSLTVTAGEKVTMSCKSSQSLLNSGNQKNYLTWYQQKPGQPPKLLIYWASTRESGVPDRFTGSGSGTDFTLTISSVQAEDLAVYYCQNDYSYPLTFGAGTKLELKLEDLKNVFPPEVAVFEPSEAEISHTQKATLVCLATGFYPDHVELSWWVNGKEVHSGVCTDPQPLKEQPALNDSRYCLSSRLRVSATFWQNPRNHFRCQVQFYGLSENDEWTQDRAKPVTQIVSAEAWGRADCGFTSESYQQGVLSATILYEILLGKATLYAVLVSALVLMAMVKRKDSRGRAKRSGSGATNFSLLKQAGDVEENPGPTSMDWIWRILFLVGAATGAHSFEQIQLVQSGPELKKPGETVKISCKASGYTFTNYGMNWVKQAPGKGLKWMGWINTNTGEPTYAEEFKGRFAFSLETSASTAYLQINNLKNEDTATYFCARLGFGNAMDYWGQGTSVTVSSTRIQNPDPAVYQLRDSKSSDKSVCLFTDFDSQTNVSQSKDSDVYITDKCVLDMRSMDFKSNSAVAWSNKSDFACANAFNNSIIPEDTFFPSPESSCDVKLVEKSFETDTNLNFQNLSVIGFRILLLKVAGFNLLMTLRLWSS

SEQ ID NO: 12032 - protein, 849 aa, synthetic construct
MALPVTALLLPLALLLHAARPDIVMTQSPSSLTVTAGEKVTMSCKSSQSLLNSGNQKNYLTWYQQKPGQPPKLLIYWASTRESGVPDRFTGSGSGTDFTLTISSVQAEDLAVYYCQNDYSYPLTFGAGTKLELKLEDLKNVFPPEVAVFEPSEAEISHTQKATLVCLATGFYPDHVELSWWVNGKEVHSGVCTDPQPLKEQPALNDSRYCLSSRLRVSATFWQNPRNHFRCQVQFYGLSENDEWTQDRAKPVTQIVSAEAWGRADCGFTSESYQQGVLSATILYEILLGKATLYAVLVSALVLMAMVKRKDSRGRAKRSGSGATNFSLLKQAGDVEENPGPTSMDWIWRILFLVGAATGAHSFEQIQLVQSGPELKKPGETVKISCKASGYTFTNYGMNWVKQAPGKGLKWMGWINTNTGEPTYAEEFKGRFAFSLETSASTAYLQINNLKNEDTATYFCARLGFGNAMDYWGQGTSVTVSSTRIQNPDPAVYQLRDSKSSDKSVCLFTDFDSQTNVSQSKDSDVYITDKCVLDMRSMDFKSNSAVAWSNKSDFACANAFNNSIIPEDTFFPSPESSCDVKLVEKSFETDTNLNFQNLSVIGFRILLLKVAGFNLLMTLRLWSSRAKRSGSGVKQTLNFDLLKLAGDVESNPGPSRGGIHTMATYEVLCEVARKLGTDDREVVLFLLNVFIPQPTLAQLIGALRALKEEGRLTFPLLAECLFRAGRRDLLRDLLHLDPRFLERHLAGTMSYFSPYQLTVLHVDGELCARDIRSLIFLSKDTIGSRSTPQTFLHWVYCMENLDLLGPTDVDALMSMLRSLSRVDLQRQVQTLMGLHLSGPSHSQHYRHTP

SEQ ID NO: 12033 - protein, 628 aa, synthetic construct
MALPVTALLLPLALLLHAARPDIVMTQSPSSLTVTAGEKVTMSCKSSQSLLNSGNQKNYLTWYQQKPGQPPKLLIYWASTRESGVPDRFTGSGSGTDFTLTISSVQAEDLAVYYCQNDYSYPLTFGAGTKLELKLEIQNPDPAVYQLRDSKSSDKSVCLFTDFDSQTNVSQSKDSDVYITDKCVLDMRSMDFKSNSAVAWSNKSDFACANAFNNSIIPEDTFFPSPESSCDVKLVEKSFETDTNLNFQNLSVIGFRILLLKVAGFNLLMTLRLWSSRAKRSGSGVKQTLNFDLLKLAGDVESNPGPTSMDWIWRILFLVGAATGAHSFEQIQLVQSGPELKKPGETVKISCKASGYTFTNYGMNWVKQAPGKGLKWMGWINTNTGEPTYAEEFKGRFAFSLETSASTAYLQINNLKNEDTATYFCARLGFGNAMDYWGQGTSVTVSSTREDLKNVFPPEVAVFEPSEAEISHTQKATLVCLATGFYPDHVELSWWVNGKEVHSGVCTDPQPLKEQPALNDSRYCLSSRLRVSATFWQNPRNHFRCQVQFYGLSENDEWTQDRAKPVTQIVSAEAWGRADCGFTSESYQQGVLSATILYEILLGKATLYAVLVSALVLMAMVKRKDSRG

SEQ ID NO: 12034 - protein, 850 aa, synthetic construct
MALPVTALLLPLALLLHAARPDIVMTQSPSSLTVTAGEKVTMSCKSSQSLLNSGNQKNYLTWYQQKPGQPPKLLIYWASTRESGVPDRFTGSGSGTDFTLTISSVQAEDLAVYYCQNDYSYPLTFGAGTKLELKLEIQNPDPAVYQLRDSKSSDKSVCLFTDFDSQTNVSQSKDSDVYITDKCVLDMRSMDFKSNSAVAWSNKSDFACANAFNNSIIPEDTFFPSPESSCDVKLVEKSFETDTNLNFQNLSVIGFRILLLKVAGFNLLMTLRLWSSRAKRSGSGVKQTLNFDLLKLAGDVESNPGPTSMDWIWRILFLVGAATGAHSFEQIQLVQSGPELKKPGETVKISCKASGYTFTNYGMNWVKQAPGKGLKWMGWINTNTGEPTYAEEFKGRFAFSLETSASTAYLQINNLKNEDTATYFCARLGFGNAMDYWGQGTSVTVSSTREDLKNVFPPEVAVFEPSEAEISHTQKATLVCLATGFYPDHVELSWWVNGKEVHSGVCTDPQPLKEQPALNDSRYCLSSRLRVSATFWQNPRNHFRCQVQFYGLSENDEWTQDRAKPVTQIVSAEAWGRADCGFTSESYQQGVLSATILYEILLGKATLYAVLVSALVLMAMVKRKDSRGRAKRSGSGATNFSLLKQAGDVEENPGPSRGGIHTMATYEVLCEVARKLGTDDREVVLFLLNVFIPQPTLAQLIGALRALKEEGRLTFPLLAECLFRAGRRDLLRDLLHLDPRFLERHLAGTMSYFSPYQLTVLHVDGELCARDIRSLIFLSKDTIGSRSTPQTFLHWVYCMENLDLLGPTDVDALMSMLRSLSRVDLQRQVQTLMGLHLSGPSHSQHYRHTP

SEQ ID NO: 12035 - protein, 902 aa, synthetic construct
MALPVTALLLPLALLLHAARPLEGKPIPNPLLGLDSTGSGEDLKNVFPPEVAVFEPSKAEIAHTQKATLVCLATGFYPDHVELSWWVNGKEVHSGVCTDPQPLKEQPALNDSRYCLSSRLRVSATFWQNPRNHFRCQVQFYGLSENDEWTQDRAKPVTQIVSAEAWGRADCGITSASYHQGVLSATILYEILLGKATLYAVLVSALVLMAMVKRKDSRGRAKRSGSGATNFSLLKQAGDVEENPGPTSMALPVTALLLPLALLLHAARPDIVMTQSPSSLTVTAGEKVTMSCKSSQSLLNSGNQKNYLTWYQQKPGQPPKLLIYWASTRESGVPDRFTGSGSGTDFTLTISSVQAEDLAVYYCQNDYSYPLTFGAGTKLELKGGGGSGGGGSGGGGSQIQLVQSGPELKKPGETVKISCKASGYTFTNYGMNWVKQAPGKGLKWMGWINTNTGEPTYAEEFKGRFAFSLETSASTAYLQINNLKNEDTATYFCARLGFGNAMDYWGQGTSVTVSSTREQKLISEEDGSGIQNPDPAVYQLRDSKSSDKSVCLFTDFDSQTNVSQSKDSDVYITDKCVLDMRSMDFKSNSAVAWSNKSDFACANAFNNSIIPEDTFFPSSDVPCDVKLVEKSFETDTNLNFQNLSVIGFRILLLKVAGFNLLMTLRLWSSRAKRSGSGVKQTLNFDLLKLAGDVESNPGPSRGHMTEYKPTVRLATRDDVPRAVRTLAAAFADYPATRHTVDPDRHIERVTELQELFLTRVGLDIGKVWVADDGAAVAVWTTPESVEAGAVFAEIGPRMAELSGSRLAAQQQMEGLLAPHRPKEPAWFLATVGVSPDHQGKGLGSAVVLPGVEAAERAGVPAFLETSAPRNLPFYERLGFTVTADVEVPEGPRTWCMTRKPGA

SEQ ID NO: 12036 - protein, 903 aa, synthetic construct
MALPVTALLLPLALLLHAARPLEQKLISEEDLGSGDRPDPAVYQLRDSKSSDKSVCLFTDFDSQTNVSQSKDSDVYITDKCVLDMRSMDFKSNSAVAWSNKSDFACANAFNNSIIPEDTFFPSPESSCDVKLVEKSFETDTNLNFQNLSVIGFRILLLKVAGFNLLMTLRLWSSSSRAKRSGSGVKQTLNFDLLKLAGDVESNPGPTSMALPVTALLLPLALLLHAARPDIVMTQSPSSLTVTAGEKVTMSCKSSQSLLNSGNQKNYLTWYQQKPGQPPKLLIYWASTRESGVPDRFTGSGSGTDFTLTISSVQAEDLAVYYCQNDYSYPLTFGAGTKLELKGGGGSGGGGSGGGGSQIQLVQSGPELKKPGETVKISCKASGYTFTNYGMNWVKQAPGKGLKWMGWINTNTGEPTYAEEFKGRFAFSLETSASTAYLQINNLKNEDTATYFCARLGFGNAMDYWGQGTSVTVSSTRGKPIPNPLLGLDSTGSGEDLKNVFPPEVAVFEPSEAEISHTQKATLVCLATGFYPDHVELSWWVNGKEVHSGVCTDPQPLKEQPALNDSRYCLSSRLRVSATFWQNPRNHFRCQVQFYGLSENDEWTQDRAKPVTQIVSAEAWGRADCGFTSESYQQGVLSATILYEILLGKATLYAVLVSALVLMAMVKRKDSRGRAKRSGSGATNFSLLKQAGDVEENPGPSRGHMTEYKPTVRLATRDDVPRAVRTLAAAFADYPATRHTVDPDRHIERVTELQELFLTRVGLDIGKVWVADDGAAVAVWTTPESVEAGAVFAEIGPRMAELSGSRLAAQQQMEGLLAPHRPKEPAWFLATVGVSPDHQGKGLGSAVVLPGVEAAERAGVPAFLETSAPRNLPFYERLGFTVTADVEVPEGPRTWCMTRKPGA

SEQ ID NO: 12037 - protein, 857 aa, synthetic construct
MALPVTALLLPLALLLHAARPDIVMTQSPSSLTVTAGEKVTMSCKSSQSLLNSGNQKNYLTWYQQKPGQPPKLLIYWASTRESGVPDRFTGSGSGTDFTLTISSVQAEDLAVYYCQNDYSYPLTFGAGTKLELKLEDLKNVFPPEVAVFEPSEAEISHTQKATLVCLATGFYPDHVELSWWVNGKEVHSGVSTDPQPLKEQPALNDSRYCLSSRLRVSATFWQNPRNHFRCQVQFYGLSENDEWTQDRAKPVTQIVSAEAWGRADCGFTSESYQQGVLSATILYEILLGKATLYAVLVSALVLMAMVKRKDSRGRAKRSGSGATNFSLLKQAGDVEENPGPTSMDWIWRILFLVGAATGAHSFEQIQLVQSGPELKKPGETVKISCKASGYTFTNYGMNWVKQAPGKGLKWMGWINTNTGEPTYAEEFKGRFAFSLETSASTAYLQINNLKNEDTATYFCARLGFGNAMDYWGQGTSVTVSSTRIQNPDPAVYQLRDSKSSDKSVCLFTDFDSQTNVSQSKDSDVYITDKTVLDMRSMDFKSNSAVAWSNKSDFACANAFNNSIIPEDTFFPSPESSCDVKLVEKSFETDTNLNFQNLSVIGFRILLLKVAGFNLLMTLRLWSSRAKRSGSGVKQTLNFDLLKLAGDVESNPGPSRGHMTEYKPTVRLATRDDVPRAVRTLAAAFADYPATRHTVDPDRHIERVTELQELFLTRVGLDIGKVWVADDGAAVAVWTTPESVEAGAVFAEIGPRMAELSGSRLAAQQQMEGLLAPHRPKEPAWFLATVGVSPDHQGKGLGSAVVLPGVEAAERAGVPAFLETSAPRNLPFYERLGFTVTADVEVPEGPRTWCMTRKPGA

SEQ ID NO: 12038 - protein, 939 aa, synthetic construct
MALPVTALLLPLALLLHAARPDIVMTQSPSSLTVTAGEKVTMSCKSSQSLLNSGNQKNYLTWYQQKPGQPPKLLIYWASTRESGVPDRFTGSGSGTDFTLTISSVQAEDLAVYYCQNDYSYPLTFGAGTKLELKLEDLKNVFPPEVAVFEPSEAEISHTQKATLVCLATGFYPDHVELSWWVNGKEVHSGVSTDPQPLKEQPALNDSRYCLSSRLRVSATFWQNPRNHFRCQVQFYGLSENDEWTQDRAKPVTQIVSAEAWGRADCGFTSESYQQGVLSATILYEILLGKATLYAVLVSALVLMAMVKRKDSRGRAKRSGSGATNFSLLKQAGDVEENPGPTSMDWIWRILFLVGAATGAHSFEQIQLVQSGPELKKPGETVKISCKASGYTFTNYGMNWVKQAPGKGLKWMGWINTNTGEPTYAEEFKGRFAFSLETSASTAYLQINNLKNEDTATYFCARLGFGNAMDYWGQGTSVTVSSTREQKLISEEDGSGTPFPSLAPPIMLLVDGKQQMVVVCLVLDVAPPGLDSPIWFSAGNGSALDAFTYGPSPATDGTWTNLAHLSLPSEELASWEPLVCHTGPGAEGHSRSTQPMHLSGEASTARTCPQEPLRGTPGGALWLGVLRLLLFKLLLFDLLLTCSCLCDPAGPLPSPATTTRLRALGSHRLHPATETGGREATSSPRPQPRDRRWGDTPPGRKPGSPVRAKRSGSGVKQTLNFDLLKLAGDVESNPGPSRGHMTEYKPTVRLATRDDVPRAVRTLAAAFADYPATRHTVDPDRHIERVTELQELFLTRVGLDIGKVWVADDGAAVAVWTTPESVEAGAVFAEIGPRMAELSGSRLAAQQQMEGLLAPHRPKEPAWFLATVGVSPDHQGKGLGSAVVLPGVEAAERAGVPAFLETSAPRNLPFYERLGFTVTADVEVPEGPRTWCMTRKPGA

SEQ ID NO: 12039 - protein, 957 aa, synthetic construct
MALPVTALLLPLALLLHAARPLEDLKNVFPPEVAVFEPSEAEISHTQKATLVCLATGFYPDHVELSWWVNGKEVHSGVSTDPQPLKEQPALNDSRYCLSSRLRVSATFWQNPRNHFRCQVQFYGLSENDEWTQDRAKPVTQIVSAEAWGRADCGFTSESYQQGVLSATILYEILLGKATLYAVLVSALVLMAMVKRKDSRGRAKRSGSGATNFSLLKQAGDVEENPGPTSMALPVTALLLPLALLLHAARPDIVMTQSPSSLTVTAGEKVTMSCKSSQSLLNSGNQKNYLTWYQQKPGQPPKLLIYWASTRESGVPDRFTGSGSGTDFTLTISSVQAEDLAVYYCQNDYSYPLTFGAGTKLELKGGGGSGGGGSGGGGSQIQLVQSGPELKKPGETVKISCKASGYTFTNYGMNWVKQAPGKGLKWMGWINTNTGEPTYAEEFKGRFAFSLETSASTAYLQINNLKNEDTATYFCARLGFGNAMDYWGQGTSVTVSSTREQKLISEEDLGSGTPFPSLAPPIMLLVDGKQQMVVVCLVLDVAPPGLDSPIWFSAGNGSALDAFTYGPSPATDGTWTNLAHLSLPSEELASWEPLVCHTGPGAEGHSRSTQPMHLSGEASTARTCPQEPLRGTPGGALWLGVLRLLLFKLLLFDLLLTCSCLCDPAGPLPSPATTTRLRALGSHRLHPATETGGREATSSPRPQPRDRRWGDTPPGRKPGSPVRAKRSGSGVKQTLNFDLLKLAGDVESNPGPSRSRGHMTEYKPTVRLATRDDVPRAVRTLAAAFADYPATRHTVDPDRHIERVTELQELFLTRVGLDIGKVWVADDGAAVAVWTTPESVEAGAVFAEIGPRMAELSGSRLAAQQQMEGLLAPHRPKEPAWFLATVGVSPDHQGKGLGSAVVLPGVEAAERAGVPAFLETSAPRNLPFYERLGFTVTADVEVPEGPRTWCMTRKPGA

SEQ ID NO: 12040 - protein, 894 aa, synthetic construct
MALPVTALLLPLALLLHAARPDIVMTQSPSSLTVTAGEKVTMSCKSSQSLLNSGNQKNYLTWYQQKPGQPPKLLIYWASTRESGVPDRFTGSGSGTDFTLTISSVQAEDLAVYYCQNDYSYPLTFGAGTKLELKLEGKPIPNPLLGLDSTGSGDKQLDADVSPKPTIFLPSIAETKLQKAGTYLCLLEKFFPDVIKIHWQEKKSNTILGSQEGNTMKTNDTYMKFSWLTVPEKSLDKEHRCIVRHENNKNGVDQEIIFPPIKTDVITMDPKDNCSKDANDTLLLQLTNTSAYYMYLLLLLKSVVYFAIITCCLLRRTAFCCNGEKSRAKRSGSGATNFSLLKQAGDVEENPGPTSMDWIWRILFLVGAATGAHSFEQIQLVQSGPELKKPGETVKISCKASGYTFTNYGMNWVKQAPGKGLKWMGWINTNTGEPTYAEEFKGRFAFSLETSASTAYLQINNLKNEDTATYFCARLGFGNAMDYWGQGTSVTVSSTREQKLISEEDGSGSQPHTKPSVFVMKNGTNVACLVKEFYPKDIRINLVSSKKITEFDPAIVISPSGKYNAVKLGKYEDSNSVTCSVQHDNKTVHSTDFEVKTDSTDHVKPKETENTKQPSKSCHKPKAIVHTEKVNMMSLTVLGLRMLFAKTVAVNFLLTAKLFFLRAKRSGSGVKQTLNFDLLKLAGDVESNPGPSRGHMTEYKPTVRLATRDDVPRAVRTLAAAFADYPATRHTVDPDRHIERVTELQELFLTRVGLDIGKVWVADDGAAVAVWTTPESVEAGAVFAEIGPRMAELSGSRLAAQQQMEGLLAPHRPKEPAWFLATVGVSPDHQGKGLGSAVVLPGVEAAERAGVPAFLETSAPRNLPFYERLGFTVTADVEVPEGPRTWCMTRKPGA

SEQ ID NO: 12041 - protein, 632 aa, synthetic construct
MALPVTALLLPLALLLHAARPDIVMTQSPSSLTVTAGEKVTMSCKSSQSLLNSGNQKNYLTWYQQKPGQPPKLLIYWASTRESGVPDRFTGSGSGTDFTLTISSVQAEDLAVYYCQNDYSYPLTFGAGTKLELKLESQPHTKPSVFVMKNGTNVACLVKEFYPKDIRINLVSSKKITEFDPAIVISPSGKYNAVKLGKYEDSNSVTCSVQHDNKTVHSTDFEVKTDSTDHVKPKETENTKQPSKSCHKPKAIVHTEKVNMMSLTVLGLRMLFAKTVAVNFLLTAKLFFLRAKRSGSGATNFSLLKQAGDVEENPGPTSMDWIWRILFLVGAATGAHSFEQIQLVQSGPELKKPGETVKISCKASGYTFTNYGMNWVKQAPGKGLKWMGWINTNTGEPTYAEEFKGRFAFSLETSASTAYLQINNLKNEDTATYFCARLGFGNAMDYWGQGTSVTVSSTRDKQLDADVSPKPTIFLPSIAETKLQKAGTYLCLLEKFFPDVIKIHWQEKKSNTILGSQEGNTMKTNDTYMKFSWLTVPEKSLDKEHRCIVRHENNKNGVDQEIIFPPIKTDVITMDPKDNCSKDANDTLLLQLTNTSAYYMYLLLLLKSVVYFAIITCCLLRRTAFCCNGEKS

SEQ ID NO: 12042 - protein, 909 aa, synthetic construct
MALPVTALLLPLALLLHAARPLEGKPIPNPLLGLDSTGSGDKQLDADVSPKPTIFLPSIAETKLQKAGTYLCLLEKFFPDVIKIHWQEKKSNTILGSQEGNTMKTNDTYMKFSWLTVPEKSLDKEHRCIVRHENNKNGVDQEIIFPPIKTDVITMDPKDNCSKDANDTLLLQLTNTSAYYMYLLLLLKSVVYFAIITCCLLRRTAFCCNGEKSRAKRSGSGATNFSLLKQAGDVEENPGPTSMALPVTALLLPLALLLHAARPDIVMTQSPSSLTVTAGEKVTMSCKSSQSLLNSGNQKNYLTWYQQKPGQPPKLLIYWASTRESGVPDRFTGSGSGTDFTLTISSVQAEDLAVYYCQNDYSYPLTFGAGTKLELKGGGGSGGGGSGGGGSQIQLVQSGPELKKPGETVKISCKASGYTFTNYGMNWVKQAPGKGLKWMGWINTNTGEPTYAEEFKGRFAFSLETSASTAYLQINNLKNEDTATYFCARLGFGNAMDYWGQGTSVTVSSTREQKLISEEDGSGSQPHTKPSVFVMKNGTNVACLVKEFYPKDIRINLVSSKKITEFDPAIVISPSGKYNAVKLGKYEDSNSVTCSVQHDNKTVHSTDFEVKTDSTDHVKPKETENTKQPSKSCHKPKAIVHTEKVNMMSLTVLGLRMLFAKTVAVNFLLTAKLFFLRAKRSGSGVKQTLNFDLLKLAGDVESNPGPSRGHMTEYKPTVRLATRDDVPRAVRTLAAAFADYPATRHTVDPDRHIERVTELQELFLTRVGLDIGKVWVADDGAAVAVWTTPESVEAGAVFAEIGPRMAELSGSRLAAQQQMEGLLAPHRPKEPAWFLATVGVSPDHQGKGLGSAVVLPGVEAAERAGVPAFLETSAPRNLPFYERLGFTVTADVEVPEGPRTWCMTRKPGA

SEQ ID NO: 12043 - protein, 1034 aa, synthetic construct
MALPVTALLLPLALLLHAARPDIVMTQSPSSLTVTAGEKVTMSCKSSQSLLNSGNQKNYLTWYQQKPGQPPKLLIYWASTRESGVPDRFTGSGSGTDFTLTISSVQAEDLAVYYCQNDYSYPLTFGAGTKLELKGQPKANPTVTLFPPSSEELQANKATLVCLISDFYPGAVTVAWKADGSPVKAGVETTKPSKQSNNKYAASSYLSLTPEQWKSHRSYSCQVTHEGSTVEKTVAPTECSGSQSFGLLDPKLCYLLDGILFIYGVILTALFLRVKFSRSADAPAYQQGQNQLYNELNLGRREEYDVLDKRRGRDPEMGGKPQRRKNPQEGLYNELQKDKMAEAYSEIGMKGERRRGKGHDGLYQGLSTATKDTYDALHMQALPPRRAKRSGSGATNFSLLKQAGDVEENPGPTSMDWIWRILFLVGAATGAHSFEQIQLVQSGPELKKPGETVKISCKASGYTFTNYGMNWVKQAPGKGLKWMGWINTNTGEPTYAEEFKGRFAFSLETSASTAYLQINNLKNEDTATYFCARLGFGNAMDYWGQGTSVTVSSASTKGPSVFPLAPSSKSTSGGTAALGCLVKDYFPEPVTVSWNSGALTSGVHTFPAVLQSSGLYSLSSVVTVPSSSLGTQTYICNVNHKPSNTKVDKRVEPKSCGTQSFGLLDPKLCYLLDGILFIYGVILTALFLRVKFSRSADAPAYQQGQNQLYNELNLGRREEYDVLDKRRGRDPEMGGKPQRRKNPQEGLYNELQKDKMAEAYSEIGMKGERRRGKGHDGLYQGLSTATKDTYDALHMQALPPRRAKRSGSGVKQTLNFDLLKLAGDVESNPGPSRGHMTEYKPTVRLATRDDVPRAVRTLAAAFADYPATRHTVDPDRHIERVTELQELFLTRVGLDIGKVWVADDGAAVAVWTTPESVEAGAVFAEIGPRMAELSGSRLAAQQQMEGLLAPHRPKEPAWFLATVGVSPDHQGKGLGSAVVLPGVEAAERAGVPAFLETSAPRNLPFYERLGFTVTADVEVPEGPRTWCMTRKPGA

SEQ ID NO: 12044 - protein, 820 aa, synthetic construct
MALPVTALLLPLALLLHAARPDIVMTQSPSSLTVTAGEKVTMSCKSSQSLLNSGNQKNYLTWYQQKPGQPPKLLIYWASTRESGVPDRFTGSGSGTDFTLTISSVQAEDLAVYYCQNDYSYPLTFGAGTKLELKLEDLKNVFPPEVAVFEPSEAEISHTQKATLVCLATGFYPDHVELSWWVNGKEVHSGVSTDPQPLKEQPALNDSRYCLSSRLRVSATFWQNPRNHFRCQVQFYGLSENDEWTQDRAKPVTQIVSAEAWGRADCGSQSFGLLDPKLCYLLDGILFIYGVILTALFLRVKFSRSADAPAYQQGQNQLYNELNLGRREEYDVLDKRRGRDPEMGGKPQRRKNPQEGLYNELQKDKMAEAYSEIGMKGERRRGKGHDGLYQGLSTATKDTYDALHMQALPPRRAKRSGSGATNFSLLKQAGDVEENPGPTSMDWIWRILFLVGAATGAHSFEQIQLVQSGPELKKPGETVKISCKASGYTFTNYGMNWVKQAPGKGLKWMGWINTNTGEPTYAEEFKGRFAFSLETSASTAYLQINNLKNEDTATYFCARLGFGNAMDYWGQGTSVTVSSTRIQNPDPAVYQLRDSKSSDKSVCLFTDFDSQTNVSQSKDSDVYITDKTVLDMRSMDFKSNSAVAWSNKSDFACANAFNNSIIPEDTFFPSPESSCGTQSFGLLDPKLCYLLDGILFIYGVILTALFLRVKFSRSADAPAYQQGQNQLYNELNLGRREEYDVLDKRRGRDPEMGGKPQRRKNPQEGLYNELQKDKMAEAYSEIGMKGERRRGKGHDGLYQGLSTATKDTYDALHMQALPPR

SEQ ID NO: 12045 - protein, 820 aa, synthetic construct
MALPVTALLLPLALLLHAARPDIVMTQSPSSLTVTAGEKVTMSCKSSQSLLNSGNQKNYLTWYQQKPGQPPKLLIYWASTRESGVPDRFTGSGSGTDFTLTISSVQAEDLAVYYCQNDYSYPLTFGAGTKLELKLEDLKNVFPPEVAVFEPSKAEIAHTQKATLVCLATGFYPDHVELSWWVNGKEVHSGVCTDPQPLKEQPALNDSRYCLSSRLRVSATFWQNPRNHFRCQVQFYGLSENDEWTQDRAKPVTQIVSAEAWGRADCGSQSFGLLDPKLCYLLDGILFIYGVILTALFLRVKFSRSADAPAYQQGQNQLYNELNLGRREEYDVLDKRRGRDPEMGGKPQRRKNPQEGLYNELQKDKMAEAYSEIGMKGERRRGKGHDGLYQGLSTATKDTYDALHMQALPPRRAKRSGSGATNFSLLKQAGDVEENPGPTSMDWIWRILFLVGAATGAHSFEQIQLVQSGPELKKPGETVKISCKASGYTFTNYGMNWVKQAPGKGLKWMGWINTNTGEPTYAEEFKGRFAFSLETSASTAYLQINNLKNEDTATYFCARLGFGNAMDYWGQGTSVTVSSTRIQNPDPAVYQLRDSKSSDKSVCLFTDFDSQTNVSQSKDSDVYITDKCVLDMRSMDFKSNSAVAWSNKSDFACANAFNNSIIPEDTFFPSSDVPCGTQSFGLLDPKLCYLLDGILFIYGVILTALFLRVKFSRSADAPAYQQGQNQLYNELNLGRREEYDVLDKRRGRDPEMGGKPQRRKNPQEGLYNELQKDKMAEAYSEIGMKGERRRGKGHDGLYQGLSTATKDTYDALHMQALPPR

SEQ ID NO: 12046 - protein, 891 aa, synthetic construct
MALPVTALLLPLALLLHAARPDIVMTQSPSSLTVTAGEKVTMSCKSSQSLLNSGNQKNYLTWYQQKPGQPPKLLIYWASTRESGVPDRFTGSGSGTDFTLTISSVQAEDLAVYYCQNDYSYPLTFGAGTKLELKLEGKPIPNPLLGLDSTGSGEDLKNVFPPEVAVFEPSEAEISHTQKATLVCLATGFYPDHVELSWWVNGKEVHSGVSTDPQPLKEQPALNDSRYCLSSRLRVSATFWQNPRNHFRCQVQFYGLSENDEWTQDRAKPVTQIVSAEAWGRADCGSQSFGLLDPKLCYLLDGILFIYGVILTALFLRVKFSRSADAPAYQQGQNQLYNELNLGRREEYDVLDKRRGRDPEMGGKPQRRKNPQEGLYNELQKDKMAEAYSEIGMKGERRRGKGHDGLYQGLSTATKDTYDALHMQALPPRRAKRSGSGATNFSLLKQAGDVEENPGPTSMDWIWRILFLVGAATGAHSFEQIQLVQSGPELKKPGETVKISCKASGYTFTNYGMNWVKQAPGKGLKWMGWINTNTGEPTYAEEFKGRFAFSLETSASTAYLQINNLKNEDTATYFCARLGFGNAMDYWGQGTSVTVSSTREQKLISEEDGSGIQNPDPAVYQLRDSKSSDKSVCLFTDFDSQTNVSQSKDSDVYITDKTVLDMRSMDFKSNSAVAWSNKSDFACANAFNNSIIPEDTFFPSPESSCGTQSFGLLDPKLCYLLDGILFIYGVILTALFLRSKRSRLLHSDYMNMTPRRPGPTRKHYQPYAPPRDFAAYRSRVKFSRSADAPAYQQGQNQLYNELNLGRREEYDVLDKRRGRDPEMGGKPQRRKNPQEGLYNELQKDKMAEAYSEIGMKGERRRGKGHDGLYQGLSTATKDTYDALHMQALPPR

SEQ ID NO: 12047 - protein, 932 aa, synthetic construct
MALPVTALLLPLALLLHAARPDIVMTQSPSSLTVTAGEKVTMSCKSSQSLLNSGNQKNYLTWYQQKPGQPPKLLIYWASTRESGVPDRFTGSGSGTDFTLTISSVQAEDLAVYYCQNDYSYPLTFGAGTKLELKLEGKPIPNPLLGLDSTGSGEDLKNVFPPEVAVFEPSEAEISHTQKATLVCLATGFYPDHVELSWWVNGKEVHSGVSTDPQPLKEQPALNDSRYCLSSRLRVSATFWQNPRNHFRCQVQFYGLSENDEWTQDRAKPVTQIVSAEAWGRADCGSQSFGLLDPKLCYLLDGILFIYGVILTALFLRSKRSRLLHSDYMNMTPRRPGPTRKHYQPYAPPRDFAAYRSRVKFSRSADAPAYQQGQNQLYNELNLGRREEYDVLDKRRGRDPEMGGKPQRRKNPQEGLYNELQKDKMAEAYSEIGMKGERRRGKGHDGLYQGLSTATKDTYDALHMQALPPRRAKRSGSGATNFSLLKQAGDVEENPGPTSMDWIWRILFLVGAATGAHSFEQIQLVQSGPELKKPGETVKISCKASGYTFTNYGMNWVKQAPGKGLKWMGWINTNTGEPTYAEEFKGRFAFSLETSASTAYLQINNLKNEDTATYFCARLGFGNAMDYWGQGTSVTVSSTREQKLISEEDGSGIQNPDPAVYQLRDSKSSDKSVCLFTDFDSQTNVSQSKDSDVYITDKTVLDMRSMDFKSNSAVAWSNKSDFACANAFNNSIIPEDTFFPSPESSCGTQSFGLLDPKLCYLLDGILFIYGVILTALFLRSKRSRLLHSDYMNMTPRRPGPTRKHYQPYAPPRDFAAYRSRVKFSRSADAPAYQQGQNQLYNELNLGRREEYDVLDKRRGRDPEMGGKPQRRKNPQEGLYNELQKDKMAEAYSEIGMKGERRRGKGHDGLYQGLSTATKDTYDALHMQALPPR

SEQ ID NO: 12048 - protein, 893 aa, synthetic construct
MALPVTALLLPLALLLHAARPDIVMTQSPSSLTVTAGEKVTMSCKSSQSLLNSGNQKNYLTWYQQKPGQPPKLLIYWASTRESGVPDRFTGSGSGTDFTLTISSVQAEDLAVYYCQNDYSYPLTFGAGTKLELKLEGKPIPNPLLGLDSTGSGEDLKNVFPPEVAVFEPSEAEISHTQKATLVCLATGFYPDHVELSWWVNGKEVHSGVSTDPQPLKEQPALNDSRYCLSSRLRVSATFWQNPRNHFRCQVQFYGLSENDEWTQDRAKPVTQIVSAEAWGRADCGSQSFGLLDPKLCYLLDGILFIYGVILTALFLRVKFSRSADAPAYQQGQNQLYNELNLGRREEYDVLDKRRGRDPEMGGKPQRRKNPQEGLYNELQKDKMAEAYSEIGMKGERRRGKGHDGLYQGLSTATKDTYDALHMQALPPRRAKRSGSGATNFSLLKQAGDVEENPGPTSMDWIWRILFLVGAATGAHSFEQIQLVQSGPELKKPGETVKISCKASGYTFTNYGMNWVKQAPGKGLKWMGWINTNTGEPTYAEEFKGRFAFSLETSASTAYLQINNLKNEDTATYFCARLGFGNAMDYWGQGTSVTVSSTREQKLISEEDLGSGIQNPDPAVYQLRDSKSSDKSVCLFTDFDSQTNVSQSKDSDVYITDKTVLDMRSMDFKSNSAVAWSNKSDFACANAFNNSIIPEDTFFPSPESSCGTQSFGLLDPKLCYLLDGILFIYGVILTALFLKRGRKKLLYIFKQPFMRPVQTTQEEDGCSCRFPEEEEGGCELRVKFSRSADAPAYQQGQNQLYNELNLGRREEYDVLDKRRGRDPEMGGKPQRRKNPQEGLYNELQKDKMAEAYSEIGMKGERRRGKGHDGLYQGLSTATKDTYDALHMQALPPR

SEQ ID NO: 12049 - protein, 935 aa, synthetic construct
MALPVTALLLPLALLLHAARPDIVMTQSPSSLTVTAGEKVTMSCKSSQSLLNSGNQKNYLTWYQQKPGQPPKLLIYWASTRESGVPDRFTGSGSGTDFTLTISSVQAEDLAVYYCQNDYSYPLTFGAGTKLELKLEGKPIPNPLLGLDSTGSGEDLKNVFPPEVAVFEPSEAEISHTQKATLVCLATGFYPDHVELSWWVNGKEVHSGVSTDPQPLKEQPALNDSRYCLSSRLRVSATFWQNPRNHFRCQVQFYGLSENDEWTQDRAKPVTQIVSAEAWGRADCGSQSFGLLDPKLCYLLDGILFIYGVILTALFLKRGRKKLLYIFKQPFMRPVQTTQEEDGCSCRFPEEEEGGCELRVKFSRSADAPAYQQGQNQLYNELNLGRREEYDVLDKRRGRDPEMGGKPQRRKNPQEGLYNELQKDKMAEAYSEIGMKGERRRGKGHDGLYQGLSTATKDTYDALHMQALPPRRAKRSGSGATNFSLLKQAGDVEENPGPTSMDWIWRILFLVGAATGAHSFEQIQLVQSGPELKKPGETVKISCKASGYTFTNYGMNWVKQAPGKGLKWMGWINTNTGEPTYAEEFKGRFAFSLETSASTAYLQINNLKNEDTATYFCARLGFGNAMDYWGQGTSVTVSSTREQKLISEEDLGSGIQNPDPAVYQLRDSKSSDKSVCLFTDFDSQTNVSQSKDSDVYITDKTVLDMRSMDFKSNSAVAWSNKSDFACANAFNNSIIPEDTFFPSPESSCGTQSFGLLDPKLCYLLDGILFIYGVILTALFLKRGRKKLLYIFKQPFMRPVQTTQEEDGCSCRFPEEEEGGCELRVKFSRSADAPAYQQGQNQLYNELNLGRREEYDVLDKRRGRDPEMGGKPQRRKNPQEGLYNELQKDKMAEAYSEIGMKGERRRGKGHDGLYQGLSTATKDTYDALHMQALPPR

SEQ ID NO: 12050 - protein, 825 aa, synthetic construct
MALPVTALLLPLALLLHAARPDIVMTQSPSSLTVTAGEKVTMSCKSSQSLLNSGNQKNYLTWYQQKPGQPPKLLIYWASTRESGVPDRFTGSGSGTDFTLTISSVQAEDLAVYYCQNDYSYPLTFGAGTKLELKLEQSFGLLDPKLCYLLDGILFIYGVILTALFLRVKFSRSADAPAYQQGQNQLYNELNLGRREEYDVLDKRRGRDPEMGGKPQRRKNPQEGLYNELQKDKMAEAYSEIGMKGERRRGKGHDGLYQGLSTATKDTYDALHMQALPPRRAKRSGSGATNFSLLKQAGDVEENPGPTSMDWIWRILFLVGAATGAHSFEQIQLVQSGPELKKPGETVKISCKASGYTFTNYGMNWVKQAPGKGLKWMGWINTNTGEPTYAEEFKGRFAFSLETSASTAYLQINNLKNEDTATYFCARLGFGNAMDYWGQGTSVTVSSTRQSFGLLDPKLCYLLDGILFIYGVILTALFLRVKFSRSADAPAYQQGQNQLYNELNLGRREEYDVLDKRRGRDPEMGGKPQRRKNPQEGLYNELQKDKMAEAYSEIGMKGERRRGKGHDGLYQGLSTATKDTYDALHMQALPPRRAKRSGSGVKQTLNFDLLKLAGDVESNPGPSRGHMTEYKPTVRLATRDDVPRAVRTLAAAFADYPATRHTVDPDRHIERVTELQELFLTRVGLDIGKVWVADDGAAVAVWTTPESVEAGAVFAEIGPRMAELSGSRLAAQQQMEGLLAPHRPKEPAWFLATVGVSPDHQGKGLGSAVVLPGVEAAERAGVPAFLETSAPRNLPFYERLGFTVTADVEVPEGPRTWCMTRKPGA

SEQ ID NO: 12051 - protein, 650 aa, synthetic construct
MALPVTALLLPLALLLHAARPDIVMTQSPSSLTVTAGEKVTMSCKSSQSLLNSGNQKNYLTWYQQKPGQPPKLLIYWASTRESGVPDRFTGSGSGTDFTLTISSVQAEDLAVYYCQNDYSYPLTFGAGTKLELKLEGQPKANPTVTLFPPSSEELQANKATLVCLISDFYPGAVTVAWKADGSPVKAGVETTKPSKQSNNKYAASSYLSLTPEQWKSHRSYSCQVTHEGSTVEKTVAPTECSPIKTDVITMDPKDNCSKDANDTLLLQLTNTSAYYMYLLLLLKSVVYFAIITCCLLRRTAFCCNGEKSRAKRSGSGATNFSLLKQAGDVEENPGPTSMDWIWRILFLVGAATGAHSFEQIQLVQSGPELKKPGETVKISCKASGYTFTNYGMNWVKQAPGKGLKWMGWINTNTGEPTYAEEFKGRFAFSLETSASTAYLQINNLKNEDTATYFCARLGFGNAMDYWGQGTSVTVSSTRASTKGPSVFPLAPSSKSTSGGTAALGCLVKDYFPEPVTVSWNSGALTSGVHTFPAVLQSSGLYSLSSVVTVPSSSLGTQTYICNVNHKPSNTKVDKRVEPKSCEVKTDSTDHVKPKETENTKQPSKSCHKPKAIVHTEKVNMMSLTVLGLRMLFAKTVAVNFLLTAKLFFL

SEQ ID NO: 12052 - protein, 628 aa, synthetic construct
MALPVTALLLPLALLLHAARPDIVMTQSPSSLTVTAGEKVTMSCKSSQSLLNSGNQKNYLTWYQQKPGQPPKLLIYWASTRESGVPDRFTGSGSGTDFTLTISSVQAEDLAVYYCQNDYSYPLTFGAGTKLELKLEGQPKANPTVTLFPPSSEELQANKATLVCLISDFYPGAVTVAWKADGSPVKAGVETTKPSKQSNNKYAASSYLSLTPEQWKSHRSYSCQVTHEGSTVEKTVAPTECSGRADCGITSASYHQGVLSATILYEILLGKATLYAVLVSALVLMAMVKRKDSRGRAKRSGSGATNFSLLKQAGDVEENPGPTSMDWIWRILFLVGAATGAHSFEQIQLVQSGPELKKPGETVKISCKASGYTFTNYGMNWVKQAPGKGLKWMGWINTNTGEPTYAEEFKGRFAFSLETSASTAYLQINNLKNEDTATYFCARLGFGNAMDYWGQGTSVTVSSTRASTKGPSVFPLAPSSKSTSGGTAALGCLVKDYFPEPVTVSWNSGALTSGVHTFPAVLQSSGLYSLSSVVTVPSSSLGTQTYICNVNHKPSNTKVDKRVEPKSCIPEDTFFPSSDVPCDVKLVEKSFETDTNLNFQNLSVIGFRILLLKVAGFNLLMTLRLWSS

SEQ ID NO: 12053 - protein, 628 aa, synthetic construct
MALPVTALLLPLALLLHAARPDIVMTQSPSSLTVTAGEKVTMSCKSSQSLLNSGNQKNYLTWYQQKPGQPPKLLIYWASTRESGVPDRFTGSGSGTDFTLTISSVQAEDLAVYYCQNDYSYPLTFGAGTKLELKLEGQPKANPTVTLFPPSSEELQANKATLVCLISDFYPGAVTVAWKADGSPVKAGVETTKPSKQSNNKYAASSYLSLTPEQWKSHRSYSCQVTHEGSTVEKTVAPTECSGRADCGFTSESYQQGVLSATILYEILLGKATLYAVLVSALVLMAMVKRKDSRGRAKRSGSGATNFSLLKQAGDVEENPGPTSMDWIWRILFLVGAATGAHSFEQIQLVQSGPELKKPGETVKISCKASGYTFTNYGMNWVKQAPGKGLKWMGWINTNTGEPTYAEEFKGRFAFSLETSASTAYLQINNLKNEDTATYFCARLGFGNAMDYWGQGTSVTVSSTRASTKGPSVFPLAPSSKSTSGGTAALGCLVKDYFPEPVTVSWNSGALTSGVHTFPAVLQSSGLYSLSSVVTVPSSSLGTQTYICNVNHKPSNTKVDKRVEPKSCIPEDTFFPSPESSCDVKLVEKSFETDTNLNFQNLSVIGFRILLLKVAGFNLLMTLRLWSS

SEQ ID NO: 12054 - protein, 454 aa, synthetic construct
MALPVTALLLPLALLLHAARPDIVMTQSPSSLTVTAGEKVTMSCKSSQSLLNSGNQKNYLTWYQQKPGQPPKLLIYWASTRESGVPDRFTGSGSGTDFTLTISSVQAEDLAVYYCQNDYSYPLTFGAGTKLELKGGGGSGGGGSGGGGSQIQLVQSGPELKKPGETVKISCKASGYTFTNYGMNWVKQAPGKGLKWMGWINTNTGEPTYAEEFKGRFAFSLETSASTAYLQINNLKNEDTATYFCARLGFGNAMDYWGQGTSVTVSSTRDGNEEMGGITQTPYKVSISGTTVILTCPQYPGSEILWQHNDKNIGGDEDDKNIGSDEDHLSLKEFSELEQSGYYVCYPRGSKPEDANFYLYLRARVCENCMEMDVMSVATIVIVDICITGGLLLLVYYWSKNRKAKAKPVTRGAGAGGRQRGQNKERPPPVPNPDYEPIRKGQRDLYSGLNQRRI

SEQ ID NO: 12055 - protein, 419 aa, synthetic construct
MALPVTALLLPLALLLHAARPDIVMTQSPSSLTVTAGEKVTMSCKSSQSLLNSGNQKNYLTWYQQKPGQPPKLLIYWASTRESGVPDRFTGSGSGTDFTLTISSVQAEDLAVYYCQNDYSYPLTFGAGTKLELKGGGGSGGGGSGGGGSQIQLVQSGPELKKPGETVKISCKASGYTFTNYGMNWVKQAPGKGLKWMGWINTNTGEPTYAEEFKGRFAFSLETSASTAYLQINNLKNEDTATYFCARLGFGNAMDYWGQGTSVTVSSTRFKIPIEELEDRVFVNCNTSITWVEGTVGTLLSDITRLDLGKRILDPRGIYRCNGTDIYKDKESTVQVHYRMCQSCVELDPATVAGIIVTDVIATLLLALGVFCFAGHETGRLSGAADTQALLRNDQVYQPLRDRDDAQYSHLGGNWARNK

SEQ ID NO: 12056 - protein, 429 aa, synthetic construct
MALPVTALLLPLALLLHAARPDIVMTQSPSSLTVTAGEKVTMSCKSSQSLLNSGNQKNYLTWYQQKPGQPPKLLIYWASTRESGVPDRFTGSGSGTDFTLTISSVQAEDLAVYYCQNDYSYPLTFGAGTKLELKGGGGSGGGGSGGGGSQIQLVQSGPELKKPGETVKISCKASGYTFTNYGMNWVKQAPGKGLKWMGWINTNTGEPTYAEEFKGRFAFSLETSASTAYLQINNLKNEDTATYFCARLGFGNAMDYWGQGTSVTVSSTRQSIKGNHLVKVYDYQEDGSVLLTCDAEAKNITWFKDGKMIGFLTEDKKKWNLGSNAKDPRGMYQCKGSQNKSKPLQVYYRMCQNCIELNAATISGFLFAEIVSIFVLAVGVYFIAGQDGVRQSRASDKQTLLPNDQLYQPLKDREDDQYSHLQGNQLRRN

SEQ ID NO: 12057 - protein, 412 aa, synthetic construct
MALPVTALLLPLALLLHAARPDIVMTQSPSSLTVTAGEKVTMSCKSSQSLLNSGNQKNYLTWYQQKPGQPPKLLIYWASTRESGVPDRFTGSGSGTDFTLTISSVQAEDLAVYYCQNDYSYPLTFGAGTKLELKGGGGSGGGGSGGGGSQIQLVQSGPELKKPGETVKISCKASGYTFTNYGMNWVKQAPGKGLKWMGWINTNTGEPTYAEEFKGRFAFSLETSASTAYLQINNLKNEDTATYFCARLGFGNAMDYWGQGTSVTVSSTRQSFGLLDPKLCYLLDGILFIYGVILTALFLRVKFSRSADAPAYQQGQNQLYNELNLGRREEYDVLDKRRGRDPEMGGKPQRRKNPQEGLYNELQKDKMAEAYSEIGMKGERRRGKGHDGLYQGLSTATKDTYDALHMQALPPR

SEQ ID NO: 12058 - protein, 454 aa, synthetic construct
MALPVTALLLPLALLLHAARPQIQLVQSGPELKKPGETVKISCKASGYTFTNYGMNWVKQAPGKGLKWMGWINTNTGEPTYAEEFKGRFAFSLETSASTAYLQINNLKNEDTATYFCARLGFGNAMDYWGQGTSVTVSSGGGGSGGGGSGGGGSDIVMTQSPSSLTVTAGEKVTMSCKSSQSLLNSGNQKNYLTWYQQKPGQPPKLLIYWASTRESGVPDRFTGSGSGTDFTLTISSVQAEDLAVYYCQNDYSYPLTFGAGTKLELKTRDGNEEMGGITQTPYKVSISGTTVILTCPQYPGSEILWQHNDKNIGGDEDDKNIGSDEDHLSLKEFSELEQSGYYVCYPRGSKPEDANFYLYLRARVCENCMEMDVMSVATIVIVDICITGGLLLLVYYWSKNRKAKAKPVTRGAGAGGRQRGQNKERPPPVPNPDYEPIRKGQRDLYSGLNQRRI

SEQ ID NO: 12059 - protein, 419 aa, synthetic construct
MALPVTALLLPLALLLHAARPQIQLVQSGPELKKPGETVKISCKASGYTFTNYGMNWVKQAPGKGLKWMGWINTNTGEPTYAEEFKGRFAFSLETSASTAYLQINNLKNEDTATYFCARLGFGNAMDYWGQGTSVTVSSGGGGSGGGGSGGGGSDIVMTQSPSSLTVTAGEKVTMSCKSSQSLLNSGNQKNYLTWYQQKPGQPPKLLIYWASTRESGVPDRFTGSGSGTDFTLTISSVQAEDLAVYYCQNDYSYPLTFGAGTKLELKTRFKIPIEELEDRVFVNCNTSITWVEGTVGTLLSDITRLDLGKRILDPRGIYRCNGTDIYKDKESTVQVHYRMCQSCVELDPATVAGIIVTDVIATLLLALGVFCFAGHETGRLSGAADTQALLRNDQVYQPLRDRDDAQYSHLGGNWARNK

SEQ ID NO: 12060 - protein, 429 aa, synthetic construct
MALPVTALLLPLALLLHAARPQIQLVQSGPELKKPGETVKISCKASGYTFTNYGMNWVKQAPGKGLKWMGWINTNTGEPTYAEEFKGRFAFSLETSASTAYLQINNLKNEDTATYFCARLGFGNAMDYWGQGTSVTVSSGGGGSGGGGSGGGGSDIVMTQSPSSLTVTAGEKVTMSCKSSQSLLNSGNQKNYLTWYQQKPGQPPKLLIYWASTRESGVPDRFTGSGSGTDFTLTISSVQAEDLAVYYCQNDYSYPLTFGAGTKLELKTRQSIKGNHLVKVYDYQEDGSVLLTCDAEAKNITWFKDGKMIGFLTEDKKKWNLGSNAKDPRGMYQCKGSQNKSKPLQVYYRMCQNCIELNAATISGFLFAEIVSIFVLAVGVYFIAGQDGVRQSRASDKQTLLPNDQLYQPLKDREDDQYSHLQGNQLRRN

SEQ ID NO: 12061 - protein, 412 aa, synthetic construct
MALPVTALLLPLALLLHAARPQIQLVQSGPELKKPGETVKISCKASGYTFTNYGMNWVKQAPGKGLKWMGWINTNTGEPTYAEEFKGRFAFSLETSASTAYLQINNLKNEDTATYFCARLGFGNAMDYWGQGTSVTVSSGGGGSGGGGSGGGGSDIVMTQSPSSLTVTAGEKVTMSCKSSQSLLNSGNQKNYLTWYQQKPGQPPKLLIYWASTRESGVPDRFTGSGSGTDFTLTISSVQAEDLAVYYCQNDYSYPLTFGAGTKLELKTRQSFGLLDPKLCYLLDGILFIYGVILTALFLRVKFSRSADAPAYQQGQNQLYNELNLGRREEYDVLDKRRGRDPEMGGKPQRRKNPQEGLYNELQKDKMAEAYSEIGMKGERRRGKGHDGLYQGLSTATKDTYDALHMQALPPR

SEQ ID NO: 12062 - protein, 507 aa, synthetic construct
MALPVTALLLPLALLLHAARPDIVMTQSPSSLTVTAGEKVTMSCKSSQSLLNSGNQKNYLTWYQQKPGQPPKLLIYWASTRESGVPDRFTGSGSGTDFTLTISSVQAEDLAVYYCQNDYSYPLTFGAGTKLELKGGGGSGGGGSGGGGSQIQLVQSGPELKKPGETVKISCKASGYTFTNYGMNWVKQAPGKGLKWMGWINTNTGEPTYAEEFKGRFAFSLETSASTAYLQINNLKNEDTATYFCARLGFGNAMDYWGQGTSVTVSSTRGMRTEDLPKAVVFLEPQWYRVLEKDSVTLKCQGAYSPEDNSTQWFHNESLISSQASSYFIDAATVDDSGEYRCQTNLSTLSDPVQLEVHIGWLLLQAPRWVFKEEDPIHLRCHSWKNTALHKVTYLQNGKGRKYFHHNSDFYIPKATLKDSGSYFCRGLVGSKNVSSETVNITITQGLAVPTISSFFPPGYQVSFCLVMVLLFAVDTGLYFSVKTNIRSSTRDWKDHKFKWRKDPQDK

SEQ ID NO: 12063 - protein, 789 aa, synthetic construct
MALPVTALLLPLALLLHAARPDIVMTQSPSSLTVTAGEKVTMSCKSSQSLLNSGNQKNYLTWYQQKPGQPPKLLIYWASTRESGVPDRFTGSGSGTDFTLTISSVQAEDLAVYYCQNDYSYPLTFGAGTKLELKGGGGSGGGGSGGGGSQIQLVQSGPELKKPGETVKISCKASGYTFTNYGMNWVKQAPGKGLKWMGWINTNTGEPTYAEEFKGRFAFSLETSASTAYLQINNLKNEDTATYFCARLGFGNAMDYWGQGTSVTVSSTRGGSGQQQTLPKPFIWAEPHFMVPKEKQVTICCQGNYGAVEYQLHFEGSLFAVDRPKPPERINKVQFYIPDMNSRMAGQYSCIYRVGELWSEPSNLLDLVVTEMYDTPTLSVHPGPEVISGEKVTFYCRLDTATSMFLLLKEGRSSHVQRGYGKVQAEFPLGPVTTAHRGTYRCFGSYNNHAWSFPSEPVKLLVTGDIENTSLAPEDPTFPADTWGTYLLTTETGLQKDHALWDHTAQNLLRMGLAFLVLVALVWFLVEDWLSRKRTRERASRASTWEGRRRLNTQTLRAKRSGSGVKQTLNFDLLKLAGDVESNPGPSRGHMTEYKPTVRLATRDDVPRAVRTLAAAFADYPATRHTVDPDRHIERVTELQELFLTRVGLDIGKVWVADDGAAVAVWTTPESVEAGAVFAEIGPRMAELSGSRLAAQQQMEGLLAPHRPKEPAWFLATVGVSPDHQGKGLGSAVVLPGVEAAERAGVPAFLETSAPRNLPFYERLGFTVTADVEVPEGPRTWCMTRKPGA

SEQ ID NO: 12064 - protein, 622 aa, synthetic construct
MALPVTALLLPLALLLHAARPDIVMTQSPSSLTVTAGEKVTMSCKSSQSLLNSGNQKNYLTWYQQKPGQPPKLLIYWASTRESGVPDRFTGSGSGTDFTLTISSVQAEDLAVYYCQNDYSYPLTFGAGTKLELKGGGGSGGGGSGGGGSQIQLVQSGPELKKPGETVKISCKASGYTFTNYGMNWVKQAPGKGLKWMGWINTNTGEPTYAEEFKGRFAFSLETSASTAYLQINNLKNEDTATYFCARLGFGNAMDYWGQGTSVTVSSTRKIEVMYPPPYLDNEKSNGTIIHVKGARGDIENTSLAPEDPTFPADTWGTYLLTTETGLQKDHALWDHTAQNLLRMGLAFLVLVALVWFLVEDWLSRKRTRERASRASTWEGRRRLNTQTLRAKRSGSGVKQTLNFDLLKLAGDVESNPGPSRGHMTEYKPTVRLATRDDVPRAVRTLAAAFADYPATRHTVDPDRHIERVTELQELFLTRVGLDIGKVWVADDGAAVAVWTTPESVEAGAVFAEIGPRMAELSGSRLAAQQQMEGLLAPHRPKEPAWFLATVGVSPDHQGKGLGSAVVLPGVEAAERAGVPAFLETSAPRNLPFYERLGFTVTADVEVPEGPRTWCMTRKPGA

SEQ ID NO: 12065 - protein, 709 aa, synthetic construct
MALPVTALLLPLALLLHAARPDIVMTQSPSSLTVTAGEKVTMSCKSSQSLLNSGNQKNYLTWYQQKPGQPPKLLIYWASTRESGVPDRFTGSGSGTDFTLTISSVQAEDLAVYYCQNDYSYPLTFGAGTKLELKGGGGSGGGGSGGGGSQIQLVQSGPELKKPGETVKISCKASGYTFTNYGMNWVKQAPGKGLKWMGWINTNTGEPTYAEEFKGRFAFSLETSASTAYLQINNLKNEDTATYFCARLGFGNAMDYWGQGTSVTVSSTRLWVSQPPEIRTLEGSSAFLPCSFNASQGRLAIGSVTWFRDEVVPGKEVRNGTPEFRGRLAPLASSRFLHDHQAELHIRDVRGHDASIYVCRVEVLGLGVGTGNGTRLVVEKEHPQLGAGTVLLLRAGFYAVSFLSVAVGSTVYYQGKCLTWKGPRRQLPAVVPAPLPPPCGSSAHLLPPVPGGRAKRSGSGVKQTLNFDLLKLAGDVESNPGPSRMYRMQLLSCIALSLALVTNSAPTSSSTKKTQLQLEHLLLDLQMILNGINNYKNPKLTEMLTAKFYMPKKATELKHLQCLEEELKPLEEVLNLAQSKNFHLRPRDLISNINVIVLELKGSETTFMCEYADETATIVEFLNRWITFCQSIISTLTKIEVMYPPPYLDNEKSNGTIIHVKGKHLCPSPLFPGPSKPFWVLVVVGGVLACYSLLVTVAFIIFWVRSKRS

SEQ ID NO: 12066 - protein, 685 aa, synthetic construct
MALPVTALLLPLALLLHAARPDIVMTQSPSSLTVTAGEKVTMSCKSSQSLLNSGNQKNYLTWYQQKPGQPPKLLIYWASTRESGVPDRFTGSGSGTDFTLTISSVQAEDLAVYYCQNDYSYPLTFGAGTKLELKGGGGSGGGGSGGGGSQIQLVQSGPELKKPGETVKISCKASGYTFTNYGMNWVKQAPGKGLKWMGWINTNTGEPTYAEEFKGRFAFSLETSASTAYLQINNLKNEDTATYFCARLGFGNAMDYWGQGTSVTVSSTRLWVSQPPEIRTLEGSSAFLPCSFNASQGRLAIGSVTWFRDEVVPGKEVRNGTPEFRGRLAPLASSRFLHDHQAELHIRDVRGHDASIYVCRVEVLGLGVGTGNGTRLVVEKEHPQLGAGTVLLLRAGFYAVSFLSVAVGSTVYYQGKCLTWKGPRRQLPAVVPAPLPPPCGSSAHLLPPVPGGRAKRSGSGVKQTLNFDLLKLAGDVESNPGPSRGHMTEYKPTVRLATRDDVPRAVRTLAAAFADYPATRHTVDPDRHIERVTELQELFLTRVGLDIGKVWVADDGAAVAVWTTPESVEAGAVFAEIGPRMAELSGSRLAAQQQMEGLLAPHRPKEPAWFLATVGVSPDHQGKGLGSAVVLPGVEAAERAGVPAFLETSAPRNLPFYERLGFTVTADVEVPEGPRTWCMTRKPGA

SEQ ID NO: 12067 - protein, 361 aa, synthetic construct
MALPVTALLLPLALLLHAARPDIVMTQSPSSLTVTAGEKVTMSCKSSQSLLNSGNQKNYLTWYQQKPGQPPKLLIYWASTRESGVPDRFTGSGSGTDFTLTISSVQAEDLAVYYCQNDYSYPLTFGAGTKLELKGGGGSGGGGSGGGGSQIQLVQSGPELKKPGETVKISCKASGYTFTNYGMNWVKQAPGKGLKWMGWINTNTGEPTYAEEFKGRFAFSLETSASTAYLQINNLKNEDTATYFCARLGFGNAMDYWGQGTSVTVSSTRKIEVMYPPPYLDNEKSNGTIIHVKGARITQGLAVSTISSFFPPGYQVSFCLVMVLLFAVDTGLYFSVKTNIRSSTRDWKDHKFKWRKDPQDK

SEQ ID NO: 12068 - protein, 361 aa, synthetic construct
MALPVTALLLPLALLLHAARPDIVMTQSPSSLTVTAGEKVTMSCKSSQSLLNSGNQKNYLTWYQQKPGQPPKLLIYWASTRESGVPDRFTGSGSGTDFTLTISSVQAEDLAVYYCQNDYSYPLTFGAGTKLELKGGGGSGGGGSGGGGSQIQLVQSGPELKKPGETVKISCKASGYTFTNYGMNWVKQAPGKGLKWMGWINTNTGEPTYAEEFKGRFAFSLETSASTAYLQINNLKNEDTATYFCARLGFGNAMDYWGQGTSVTVSSTRKIEVMYPPPYLDNEKSNGTIIHVKGARITQGLAVPTISSFFPPGYQVSFCLVMVLLFAVDTGLYFSVKTNIRSSTRDWKDHKFKWRKDPQDK

SEQ ID NO: 12069 - protein, 340 aa, synthetic construct
MALPVTALLLPLALLLHAARPDIVMTQSPSSLTVTAGEKVTMSCKSSQSLLNSGNQKNYLTWYQQKPGQPPKLLIYWASTRESGVPDRFTGSGSGTDFTLTISSVQAEDLAVYYCQNDYSYPLTFGAGTKLELKGGGGSGGGGSGGGGSQIQLVQSGPELKKPGETVKISCKASGYTFTNYGMNWVKQAPGKGLKWMGWINTNTGEPTYAEEFKGRFAFSLETSASTAYLQINNLKNEDTATYFCARLGFGNAMDYWGQGTSVTVSSTRKIEVMYPPPYLDNEKSNGTIIHVKGARITQGLAVSTISSFSPPGYQVSFCLVMVLLFAVDTGLYFSVKTNI

SEQ ID NO: 12070 - protein, 371 aa, synthetic construct
MALPVTALLLPLALLLHAARPDIVMTQSPSSLTVTAGEKVTMSCKSSQSLLNSGNQKNYLTWYQQKPGQPPKLLIYWASTRESGVPDRFTGSGSGTDFTLTISSVQAEDLAVYYCQNDYSYPLTFGAGTKLELKGGGGSGGGGSGGGGSQIQLVQSGPELKKPGETVKISCKASGYTFTNYGMNWVKQAPGKGLKWMGWINTNTGEPTYAEEFKGRFAFSLETSASTAYLQINNLKNEDTATYFCARLGFGNAMDYWGQGTSVTVSSTRKIEVMYPPPYLDNEKSNGTIIHVKGARVEKEHPQLGAGTVLLLRAGFYAVSFLSVAVGSTVYYQGKCLTWKGPRRQLPAVVPAPLPPPCGSSAHLLPPVPGG

SEQ ID NO: 12071 - protein, 452 aa, synthetic construct
MALPVTALLLPLALLLHAARPDIVMTQSPSSLTVTAGEKVTMSCKSSQSLLNSGNQKNYLTWYQQKPGQPPKLLIYWASTRESGVPDRFTGSGSGTDFTLTISSVQAEDLAVYYCQNDYSYPLTFGAGTKLELKGGGGSGGGGSGGGGSQIQLVQSGPELKKPGETVKISCKASGYTFTNYGMNWVKQAPGKGLKWMGWINTNTGEPTYAEEFKGRFAFSLETSASTAYLQINNLKNEDTATYFCARLGFGNAMDYWGQGTSVTVSSTRKIEVMYPPPYLDNEKSNGTIIHVKGARKSVRFYLVVSPASASTQTSWTPRDLVSSQTQTQSCVPPTAGARQAPESPSTIPVPSQPQNSTLRPGPAAPIALVPVFCGLLVAKSLVLSALLVWWGDIWWKTMMELRSLDTQKATCHLQQVTDLPWTSVSSPVEREILYHTVARTKISDDDDEHTL

SEQ ID NO: 12072 - protein, 389 aa, synthetic construct
MALPVTALLLPLALLLHAARPDIVMTQSPSSLTVTAGEKVTMSCKSSQSLLNSGNQKNYLTWYQQKPGQPPKLLIYWASTRESGVPDRFTGSGSGTDFTLTISSVQAEDLAVYYCQNDYSYPLTFGAGTKLELKGGGGSGGGGSGGGGSQIQLVQSGPELKKPGETVKISCKASGYTFTNYGMNWVKQAPGKGLKWMGWINTNTGEPTYAEEFKGRFAFSLETSASTAYLQINNLKNEDTATYFCARLGFGNAMDYWGQGTSVTVSSTRKIEVMYPPPYLDNEKSNGTIIHVKGARGDIENTSLAPEDPTFPADTWGTYLLTTETGLQKDHALWDHTAQNLLRMGLAFLVLVALVWFLVEDWLSRKRTRERASRASTWEGRRRLNTQTL

SEQ ID NO: 12073 - protein, 985 aa, synthetic construct
MALPVTALLLPLALLLHAARPDIVMTQSPSSLTVTAGEKVTMSCKSSQSLLNSGNQKNYLTWYQQKPGQPPKLLIYWASTRESGVPDRFTGSGSGTDFTLTISSVQAEDLAVYYCQNDYSYPLTFGAGTKLELKLEGQPKANPTVTLFPPSSEELQANKATLVCLISDFYPGAVTVAWKADGSPVKAGVETTKPSKQSNNKYAASSYLSLTPEQWKSHRSYSCQVTHEGSTVEKTVAPTECSGSQSFGLLDPKLCYLLDGILFIYGVILTALFLRVKFSRSADAPAYQQGQNQLYNELNLGRREEYDVLDKRRGRDPEMGGKPQRRKNPQEGLYNELQKDKMAEAYSEIGMKGERRRGKGHDGLYQGLSTATKDTYDALHMQALPPRRAKRSGSGATNFSLLKQAGDVEENPGPTSMDWIWRILFLVGAATGAHSFEQIQLVQSGPELKKPGETVKISCKASGYTFTNYGMNWVKQAPGKGLKWMGWINTNTGEPTYAEEFKGRFAFSLETSASTAYLQINNLKNEDTATYFCARLGFGNAMDYWGQGTSVTVSSTRASTKGPSVFPLAPSSKSTSGGTAALGCLVKDYFPEPVTVSWNSGALTSGVHTFPAVLQSSGLYSLSSVVTVPSSSLGTQTYICNVNHKPSNTKVDKRVEPKSCGTGDIENTSLAPEDPTFPADTWGTYLLTTETGLQKDHALWDHTAQNLLRMGLAFLVLVALVWFLVEDWLSRKRTRERASRASTWEGRRRLNTQTLRAKRSGSGATNFSLLKQAGDVEENPGPSRGHMTEYKPTVRLATRDDVPRAVRTLAAAFADYPATRHTVDPDRHIERVTELQELFLTRVGLDIGKVWVADDGAAVAVWTTPESVEAGAVFAEIGPRMAELSGSRLAAQQQMEGLLAPHRPKEPAWFLATVGVSPDHQGKGLGSAVVLPGVEAAERAGVPAFLETSAPRNLPFYERLGFTVTADVEVPEGPRTWCMTRKPGA

SEQ ID NO: 12074 - protein, 1051 aa, synthetic construct
MALPVTALLLPLALLLHAARPDIVMTQSPSSLTVTAGEKVTMSCKSSQSLLNSGNQKNYLTWYQQKPGQPPKLLIYWASTRESGVPDRFTGSGSGTDFTLTISSVQAEDLAVYYCQNDYSYPLTFGAGTKLELKLEGQPKANPTVTLFPPSSEELQANKATLVCLISDFYPGAVTVAWKADGSPVKAGVETTKPSKQSNNKYAASSYLSLTPEQWKSHRSYSCQVTHEGSTVEKTVAPTECSGSQSFGLLDPKLCYLLDGILFIYGVILTALFLRVKFSRSADAPAYQQGQNQLYNELNLGRREEYDVLDKRRGRDPEMGGKPQRRKNPQEGLYNELQKDKMAEAYSEIGMKGERRRGKGHDGLYQGLSTATKDTYDALHMQALPPRRAKRSGSGATNFSLLKQAGDVEENPGPTSMDWIWRILFLVGAATGAHSFEQIQLVQSGPELKKPGETVKISCKASGYTFTNYGMNWVKQAPGKGLKWMGWINTNTGEPTYAEEFKGRFAFSLETSASTAYLQINNLKNEDTATYFCARLGFGNAMDYWGQGTSVTVSSTRASTKGPSVFPLAPSSKSTSGGTAALGCLVKDYFPEPVTVSWNSGALTSGVHTFPAVLQSSGLYSLSSVVTVPSSSLGTQTYICNVNHKPSNTKVDKRVEPKSCGTKSVRFYLVVSPASASTQTSWTPRDLVSSQTQTQSCVPPTAGARQAPESPSTIPVPSQPQNSTLRPGPAAPIALVPVFCGLLVAKSLVLSALLVWWGDIWWKTMMELRSLDTQKATCHLQQVTDLPWTSVSSPVEREILYHTVARTKISDDDDEHTLRAKRSGSGVKQTLNFDLLKLAGDVESNPGPSRGHMTEYKPTVRLATRDDVPRAVRTLAAAFADYPATRHTVDPDRHIERVTELQELFLTRVGLDIGKVWVADDGAAVAVWTTPESVEAGAVFAEIGPRMAELSGSRLAAQQQMEGLLAPHRPKEPAWFLATVGVSPDHQGKGLGSAVVLPGVEAAERAGVPAFLETSAPRNLPFYERLGFTVTADVEVPEGPRTWCMTRKPGA

SEQ ID NO: 12075 - protein, 971 aa, synthetic construct
MALPVTALLLPLALLLHAARPDIVMTQSPSSLTVTAGEKVTMSCKSSQSLLNSGNQKNYLTWYQQKPGQPPKLLIYWASTRESGVPDRFTGSGSGTDFTLTISSVQAEDLAVYYCQNDYSYPLTFGAGTKLELKLEGQPKANPTVTLFPPSSEELQANKATLVCLISDFYPGAVTVAWKADGSPVKAGVETTKPSKQSNNKYAASSYLSLTPEQWKSHRSYSCQVTHEGSTVEKTVAPTECSGSQSFGLLDPKLCYLLDGILFIYGVILTALFLRVKFSRSADAPAYQQGQNQLYNELNLGRREEYDVLDKRRGRDPEMGGKPQRRKNPQEGLYNELQKDKMAEAYSEIGMKGERRRGKGHDGLYQGLSTATKDTYDALHMQALPPRRAKRSGSGATNFSLLKQAGDVEENPGPTSMDWIWRILFLVGAATGAHSFEQIQLVQSGPELKKPGETVKISCKASGYTFTNYGMNWVKQAPGKGLKWMGWINTNTGEPTYAEEFKGRFAFSLETSASTAYLQINNLKNEDTATYFCARLGFGNAMDYWGQGTSVTVSSTRASTKGPSVFPLAPSSKSTSGGTAALGCLVKDYFPEPVTVSWNSGALTSGVHTFPAVLQSSGLYSLSSVVTVPSSSLGTQTYICNVNHKPSNTKVDKRVEPKSCGTVVEKEHPQLGAGTVLLLRAGFYAVSFLSVAVGSTVYYQGKCLTWKGPRRQLPAVVPAPLPPPCGSSAHLLPPVPGGRAKRSGSGVKQTLNFDLLKLAGDVESNPGPSRGHMTEYKPTVRLATRDDVPRAVRTLAAAFADYPATRHTVDPDRHIERVTELQELFLTRVGLDIGKVWVADDGAAVAVWTTPESVEAGAVFAEIGPRMAELSGSRLAAQQQMEGLLAPHRPKEPAWFLATVGVSPDHQGKGLGSAVVLPGVEAAERAGVPAFLETSAPRNLPFYERLGFTVTADVEVPEGPRTWCMTRKPGA

SEQ ID NO: 12076 - protein, 1000 aa, synthetic construct
MALPVTALLLPLALLLHAARPDIVMTQSPSSLTVTAGEKVTMSCKSSQSLLNSGNQKNYLTWYQQKPGQPPKLLIYWASTRESGVPDRFTGSGSGTDFTLTISSVQAEDLAVYYCQNDYSYPLTFGAGTKLELKLEDLKNVFPPEVAVFEPSEAEISHTQKATLVCLATGFYPDHVELSWWVNGKEVHSGVSTDPQPLKEQPALNDSRYCLSSRLRVSATFWQNPRNHFRCQVQFYGLSENDEWTQDRAKPVTQIVSAEAWGRADCGSQSFGLLDPKLCYLLDGILFIYGVILTALFLRVKFSRSADAPAYQQGQNQLYNELNLGRREEYDVLDKRRGRDPEMGGKPQRRKNPQEGLYNELQKDKMAEAYSEIGMKGERRRGKGHDGLYQGLSTATKDTYDALHMQALPPRRAKRSGSGATNFSLLKQAGDVEENPGPTSMDWIWRILFLVGAATGAHSFEQIQLVQSGPELKKPGETVKISCKASGYTFTNYGMNWVKQAPGKGLKWMGWINTNTGEPTYAEEFKGRFAFSLETSASTAYLQINNLKNEDTATYFCARLGFGNAMDYWGQGTSVTVSSTRIQNPDPAVYQLRDSKSSDKSVCLFTDFDSQTNVSQSKDSDVYITDKTVLDMRSMDFKSNSAVAWSNKSDFACANAFNNSIIPEDTFFPSPESSCGTGDIENTSLAPEDPTFPADTWGTYLLTTETGLQKDHALWDHTAQNLLRMGLAFLVLVALVWFLVEDWLSRKRTRERASRASTWEGRRRLNTQTLRAKRSGSGATNFSLLKQAGDVEENPGPSRGHMTEYKPTVRLATRDDVPRAVRTLAAAFADYPATRHTVDPDRHIERVTELQELFLTRVGLDIGKVWVADDGAAVAVWTTPESVEAGAVFAEIGPRMAELSGSRLAAQQQMEGLLAPHRPKEPAWFLATVGVSPDHQGKGLGSAVVLPGVEAAERAGVPAFLETSAPRNLPFYERLGFTVTADVEVPEGPRTWCMTRKPGA

SEQ ID NO: 12077 - protein, 1066 aa, synthetic construct
MALPVTALLLPLALLLHAARPDIVMTQSPSSLTVTAGEKVTMSCKSSQSLLNSGNQKNYLTWYQQKPGQPPKLLIYWASTRESGVPDRFTGSGSGTDFTLTISSVQAEDLAVYYCQNDYSYPLTFGAGTKLELKLEDLKNVFPPEVAVFEPSEAEISHTQKATLVCLATGFYPDHVELSWWVNGKEVHSGVSTDPQPLKEQPALNDSRYCLSSRLRVSATFWQNPRNHFRCQVQFYGLSENDEWTQDRAKPVTQIVSAEAWGRADCGSQSFGLLDPKLCYLLDGILFIYGVILTALFLRVKFSRSADAPAYQQGQNQLYNELNLGRREEYDVLDKRRGRDPEMGGKPQRRKNPQEGLYNELQKDKMAEAYSEIGMKGERRRGKGHDGLYQGLSTATKDTYDALHMQALPPRRAKRSGSGATNFSLLKQAGDVEENPGPTSMDWIWRILFLVGAATGAHSFEQIQLVQSGPELKKPGETVKISCKASGYTFTNYGMNWVKQAPGKGLKWMGWINTNTGEPTYAEEFKGRFAFSLETSASTAYLQINNLKNEDTATYFCARLGFGNAMDYWGQGTSVTVSSTRIQNPDPAVYQLRDSKSSDKSVCLFTDFDSQTNVSQSKDSDVYITDKTVLDMRSMDFKSNSAVAWSNKSDFACANAFNNSIIPEDTFFPSPESSCGTKSVRFYLVVSPASASTQTSWTPRDLVSSQTQTQSCVPPTAGARQAPESPSTIPVPSQPQNSTLRPGPAAPIALVPVFCGLLVAKSLVLSALLVWWGDIWWKTMMELRSLDTQKATCHLQQVTDLPWTSVSSPVEREILYHTVARTKISDDDDEHTLRAKRSGSGVKQTLNFDLLKLAGDVESNPGPSRGHMTEYKPTVRLATRDDVPRAVRTLAAAFADYPATRHTVDPDRHIERVTELQELFLTRVGLDIGKVWVADDGAAVAVWTTPESVEAGAVFAEIGPRMAELSGSRLAAQQQMEGLLAPHRPKEPAWFLATVGVSPDHQGKGLGSAVVLPGVEAAERAGVPAFLETSAPRNLPFYERLGFTVTADVEVPEGPRTWCMTRKPGA

SEQ ID NO: 12078 - protein, 986 aa, synthetic construct
MALPVTALLLPLALLLHAARPDIVMTQSPSSLTVTAGEKVTMSCKSSQSLLNSGNQKNYLTWYQQKPGQPPKLLIYWASTRESGVPDRFTGSGSGTDFTLTISSVQAEDLAVYYCQNDYSYPLTFGAGTKLELKLEDLKNVFPPEVAVFEPSEAEISHTQKATLVCLATGFYPDHVELSWWVNGKEVHSGVSTDPQPLKEQPALNDSRYCLSSRLRVSATFWQNPRNHFRCQVQFYGLSENDEWTQDRAKPVTQIVSAEAWGRADCGSQSFGLLDPKLCYLLDGILFIYGVILTALFLRVKFSRSADAPAYQQGQNQLYNELNLGRREEYDVLDKRRGRDPEMGGKPQRRKNPQEGLYNELQKDKMAEAYSEIGMKGERRRGKGHDGLYQGLSTATKDTYDALHMQALPPRRAKRSGSGATNFSLLKQAGDVEENPGPTSMDWIWRILFLVGAATGAHSFEQIQLVQSGPELKKPGETVKISCKASGYTFTNYGMNWVKQAPGKGLKWMGWINTNTGEPTYAEEFKGRFAFSLETSASTAYLQINNLKNEDTATYFCARLGFGNAMDYWGQGTSVTVSSTRIQNPDPAVYQLRDSKSSDKSVCLFTDFDSQTNVSQSKDSDVYITDKTVLDMRSMDFKSNSAVAWSNKSDFACANAFNNSIIPEDTFFPSPESSCGTVVEKEHPQLGAGTVLLLRAGFYAVSFLSVAVGSTVYYQGKCLTWKGPRRQLPAVVPAPLPPPCGSSAHLLPPVPGGRAKRSGSGVKQTLNFDLLKLAGDVESNPGPSRGHMTEYKPTVRLATRDDVPRAVRTLAAAFADYPATRHTVDPDRHIERVTELQELFLTRVGLDIGKVWVADDGAAVAVWTTPESVEAGAVFAEIGPRMAELSGSRLAAQQQMEGLLAPHRPKEPAWFLATVGVSPDHQGKGLGSAVVLPGVEAAERAGVPAFLETSAPRNLPFYERLGFTVTADVEVPEGPRTWCMTRKPGA

SEQ ID NO: 12079 - protein, 957 aa, synthetic construct
MALPVTALLLPLALLLHAARPDIVMTQSPSSLTVTAGEKVTMSCKSSQSLLNSGNQKNYLTWYQQKPGQPPKLLIYWASTRESGVPDRFTGSGSGTDFTLTISSVQAEDLAVYYCQNDYSYPLTFGAGTKLELKLEGQPKANPTVTLFPPSSEELQANKATLVCLISDFYPGAVTVAWKADGSPVKAGVETTKPSKQSNNKYAASSYLSLTPEQWKSHRSYSCQVTHEGSTVEKTVAPTECSGSQSFGLLDPKLCYLLDGILFIYGVILTALFLRVKFSRSADAPAYQQGQNQLYNELNLGRREEYDVLDKRRGRDPEMGGKPQRRKNPQEGLYNELQKDKMAEAYSEIGMKGERRRGKGHDGLYQGLSTATKDTYDALHMQALPPRRAKRSGSGATNFSLLKQAGDVEENPGPTSMDWIWRILFLVGAATGAHSFEQIQLVQSGPELKKPGETVKISCKASGYTFTNYGMNWVKQAPGKGLKWMGWINTNTGEPTYAEEFKGRFAFSLETSASTAYLQINNLKNEDTATYFCARLGFGNAMDYWGQGTSVTVSSTRASTKGPSVFPLAPSSKSTSGGTAALGCLVKDYFPEPVTVSWNSGALTSGVHTFPAVLQSSGLYSLSSVVTVPSSSLGTQTYICNVNHKPSNTKVDKRVEPKSCGTITQGLAVSTISSFFPPGYQVSFCLVMVLLFAVDTGLYFSVKTNIRSSTRDWKDHKFKWRKDPQDKRAKRSGSGATNFSLLKQAGDVEENPGPSRGHMTEYKPTVRLATRDDVPRAVRTLAAAFADYPATRHTVDPDRHIERVTELQELFLTRVGLDIGKVWVADDGAAVAVWTTPESVEAGAVFAEIGPRMAELSGSRLAAQQQMEGLLAPHRPKEPAWFLATVGVSPDHQGKGLGSAVVLPGVEAAERAGVPAFLETSAPRNLPFYERLGFTVTADVEVPEGPRTWCMTRKPGA

SEQ ID NO: 12080 - protein, 972 aa, synthetic construct
MALPVTALLLPLALLLHAARPDIVMTQSPSSLTVTAGEKVTMSCKSSQSLLNSGNQKNYLTWYQQKPGQPPKLLIYWASTRESGVPDRFTGSGSGTDFTLTISSVQAEDLAVYYCQNDYSYPLTFGAGTKLELKLEDLKNVFPPEVAVFEPSEAEISHTQKATLVCLATGFYPDHVELSWWVNGKEVHSGVSTDPQPLKEQPALNDSRYCLSSRLRVSATFWQNPRNHFRCQVQFYGLSENDEWTQDRAKPVTQIVSAEAWGRADCGSQSFGLLDPKLCYLLDGILFIYGVILTALFLRVKFSRSADAPAYQQGQNQLYNELNLGRREEYDVLDKRRGRDPEMGGKPQRRKNPQEGLYNELQKDKMAEAYSEIGMKGERRRGKGHDGLYQGLSTATKDTYDALHMQALPPRRAKRSGSGATNFSLLKQAGDVEENPGPTSMDWIWRILFLVGAATGAHSFEQIQLVQSGPELKKPGETVKISCKASGYTFTNYGMNWVKQAPGKGLKWMGWINTNTGEPTYAEEFKGRFAFSLETSASTAYLQINNLKNEDTATYFCARLGFGNAMDYWGQGTSVTVSSTRIQNPDPAVYQLRDSKSSDKSVCLFTDFDSQTNVSQSKDSDVYITDKTVLDMRSMDFKSNSAVAWSNKSDFACANAFNNSIIPEDTFFPSPESSCGTITQGLAVSTISSFFPPGYQVSFCLVMVLLFAVDTGLYFSVKTNIRSSTRDWKDHKFKWRKDPQDKRAKRSGSGATNFSLLKQAGDVEENPGPSRGHMTEYKPTVRLATRDDVPRAVRTLAAAFADYPATRHTVDPDRHIERVTELQELFLTRVGLDIGKVWVADDGAAVAVWTTPESVEAGAVFAEIGPRMAELSGSRLAAQQQMEGLLAPHRPKEPAWFLATVGVSPDHQGKGLGSAVVLPGVEAAERAGVPAFLETSAPRNLPFYERLGFTVTADVEVPEGPRTWCMTRKPGA

SEQ ID NO: 12081 - protein, 655 aa, synthetic construct
MALPVTALLLPLALLLHAARPDIVMTQSPSSLTVTAGEKVTMSCKSSQSLLNSGNQKNYLTWYQQKPGQPPKLLIYWASTRESGVPDRFTGSGSGTDFTLTISSVQAEDLAVYYCQNDYSYPLTFGAGTKLELKLEGQPKANPTVTLFPPSSEELQANKATLVCLISDFYPGAVTVAWKADGSPVKAGVETTKPSKQSNNKYAASSYLSLTPEQWKSHRSYSCQVTHEGSTVEKTVAPTECSGSLGEPQLCYILDAILFLYGIVLTLLYCRLKIQVRKAAITSYEKSDGVYTGLSTRNQETYETLKHEKPPQRAKRSGSGATNFSLLKQAGDVEENPGPTSMDWIWRILFLVGAATGAHSFEQIQLVQSGPELKKPGETVKISCKASGYTFTNYGMNWVKQAPGKGLKWMGWINTNTGEPTYAEEFKGRFAFSLETSASTAYLQINNLKNEDTATYFCARLGFGNAMDYWGQGTSVTVSSTRASTKGPSVFPLAPSSKSTSGGTAALGCLVKDYFPEPVTVSWNSGALTSGVHTFPAVLQSSGLYSLSSVVTVPSSSLGTQTYICNVNHKPSNTKVDKRVEPKSCGTLGEPQLCYILDAILFLYGIVLTLLYCRLKIQVRKAAITSYEKSDGVYTGLSTRNQETYETLKHEKPPQ

SEQ ID NO: 12082 - protein, 500 aa, synthetic construct
MALPVTALLLPLALLLHAARPDIVMTQSPDSLAVSLGERATINCESSQSLLNSGNQKNYLTWYQQKPGQPPKPLIYWASTRESGVPDRFSGSGSGTDFTLTISSLQAEDVAVYYCQNDYSYPYLFGQGTKLEIKRGGGGSGGGGSGGGGSQVQLVQSGSELKKPGASVKISCKASGYTFTNYGMNWVKQAPGQGLKWMGWINTYTGEPTYAEEFKGRFAFSLETSASTAYLQITSLKNEDTATYFCARLGFGNAMDYWGQGTSVTVSSTREQKLISEEDLKIEVMYPPPYLDNEKSNGTIIHVKGKHLCPSPLFPGPSKPFWVLVVVGGVLACYSLLVTVAFIIFWVRSKRSRLLHSDYMNMTPRRPGPTRKHYQPYAPPRDFAAYRSRVKFSRSADAPAYQQGQNQLYNELNLGRREEYDVLDKRRGRDPEMGGKPRRKNPQEGLYNELQKDKMAEAYSEIGMKGERRRGKGHDGLYQGLSTATKDTYDALHMQALPPR

SEQ ID NO: 12083 - protein, 506 aa, synthetic construct
MALPVTALLLPLALLLHAARPDIVMTQSPDSLAVSLGERATINCESSQSLLNSGNQKNYLTWYQQKPGQPPKPLIYWASTRESGVPDRFSGSGSGTDFTLTISSLQAEDVAVYYCQNDYSYPYLFGQGTKLEIKRGGGGSGGGGSGGGGSQVQLVQSGSELKKPGASVKISCKASGYTFTNYGMNWVKQAPGQGLKWMGWINTYTGEPTYAEEFKGRFAFSLETSASTAYLQITSLKNEDTATYFCARLGFGNAMDYWGQGTSVTVSSTREQKLISEEDLAKPTTTPAPRPPTPAPTIASQPLSLRPEACRPAAGGAVHTRGLDFACDIYIWAPLAGTCGVLLLSLVITLYCKRGRKKLLYIFKQPFMRPVQTTQEEDGCSCRFPEEEEGGCELRVKFSRSADAPAYQQGQNQLYNELNLGRREEYDVLDKRRGRDPEMGGKPRRKNPQEGLYNELQKDKMAEAYSEIGMKGERRRGKGHDGLYQGLSTATKDTYDALHMQALPPR

SEQ ID NO: 12084 - protein, 506 aa, synthetic construct
MALPVTALLLPLALLLHAARPQVQLVQSGSELKKPGASVKISCKASGYTFTNYGMNWVKQAPGQGLKWMGWINTYTGEPTYAEEFKGRFAFSLETSASTAYLQITSLKNEDTATYFCARLGFGNAMDYWGQGTSVTVSSGGGGSGGGGSGGGGSDIVMTQSPDSLAVSLGERATINCESSQSLLNSGNQKNYLTWYQQKPGQPPKPLIYWASTRESGVPDRFSGSGSGTDFTLTISSLQAEDVAVYYCQNDYSYPYLFGQGTKLEIKRTREQKLISEEDLAKPTTTPAPRPPTPAPTIASQPLSLRPEACRPAAGGAVHTRGLDFACDIYIWAPLAGTCGVLLLSLVITLYCKRGRKKLLYIFKQPFMRPVQTTQEEDGCSCRFPEEEEGGCELRVKFSRSADAPAYQQGQNQLYNELNLGRREEYDVLDKRRGRDPEMGGKPRRKNPQEGLYNELQKDKMAEAYSEIGMKGERRRGKGHDGLYQGLSTATKDTYDALHMQALPPR

SEQ ID NO: 12085 - protein, 919 aa, synthetic construct
MALPVTALLLPLALLLHAARPDIVMTQSPDSLAVSLGERATINCESSQSLLNSGNQKNYLTWYQQKPGQPPKPLIYWASTRESGVPDRFSGSGSGTDFTLTISSLQAEDVAVYYCQNDYSYPYLFGQGTKLEIKRGGGGSGGGGSGGGGSQVQLVQSGSELKKPGASVKISCKASGYTFTNYGMNWVKQAPGQGLKWMGWINTYTGEPTYAEEFKGRFAFSLETSASTAYLQITSLKNEDTATYFCARLGFGNAMDYWGQGTSVTVSSTREQKLISEEDLAKPTTTPAPRPPTPAPTIASQPLSLRPEACRPAAGGAVHTRGLDFACDIYIWAPLAGTCGVLLLSLVITLYCGRARVKFSRSADAPAYQQGQNQLYNELNLGRREEYDVLDKRRGRDPEMGGKPRRKNPQEGLYNELQKDKMAEAYSEIGMKGERRRGKGHDGLYQGLSTATKDTYDALHMQALPPRSRGSGATNFSLLKQAGDVEENPGPGIHMATYEVLCEVARKLGTDDREVVLFLLNVFIPQPTLAQLIGALRALKEEGRLTFPLLAECLFRAGRRDLLRDLLHLDPRFLERHLAGTMSYFSPYQLTVLHVDGELCARDIRSLIFLSKDTIGSRSTPQTFLHWVYCMENLDLLGPTDVDALMSMLRSLSRVDLQRQVQTLMGLHLSGPSHSQHYRHTPLETDFYDYKDDDDKTSGSGEGRGSLLTCGDVEENPGPHMTEYKPTVRLATRDDVPRAVRTLAAAFADYPATRHTVDPDRHIERVTELQELFLTRVGLDIGKVWVADDGAAVAVWTTPESVEAGAVFAEIGPRMAELSGSRLAAQQQMEGLLAPHRPKEPAWFLATVGVSPDHQGKGLGSAVVLPGVEAAERAGVPAFLETSAPRNLPFYERLGFTVTADVEVPEGPRTWCMTRKPGA

SEQ ID NO: 12086 - protein, 859 aa, synthetic construct
MALPVTALLLPLALLLHAARPDIVMTQSPDSLAVSLGERATINCESSQSLLNSGNQKNYLTWYQQKPGQPPKPLIYWASTRESGVPDRFSGSGSGTDFTLTISSLQAEDVAVYYCQNDYSYPYLFGQGTKLEIKRLEIQNPDPAVYQLRDSKSSDKSVCLFTDFDSQTNVSQSKDSDVYITDKCVLDMRSMDFKSNSAVAWSNKSDFACANAFNNSIIPEDTFFPSSDVPCDVKLVEKSFETDTNLNFQNLSVIGFRILLLKVAGFNLLMTLRLWSSRAKRSGSGVKQTLNFDLLKLAGDVESNPGPTSMDWIWRILFLVGAATGAHSFEQVQLVQSGSELKKPGASVKISCKASGYTFTNYGMNWVKQAPGQGLKWMGWINTYTGEPTYAEEFKGRFAFSLETSASTAYLQITSLKNEDTATYFCARLGFGNAMDYWGQGTSVTVSSTREDLKNVFPPEVAVFEPSKAEIAHTQKATLVCLATGFYPDHVELSWWVNGKEVHSGVCTDPQPLKEQPALNDSRYCLSSRLRVSATFWQNPRNHFRCQVQFYGLSENDEWTQDRAKPVTQIVSAEAWGRADCGITSASYHQGVLSATILYEILLGKATLYAVLVSALVLMAMVKRKDSRGRAKRSGSGATNFSLLKQAGDVEENPGPSRGHMTEYKPTVRLATRDDVPRAVRTLAAAFADYPATRHTVDPDRHIERVTELQELFLTRVGLDIGKVWVADDGAAVAVWTTPESVEAGAVFAEIGPRMAELSGSRLAAQQQMEGLLAPHRPKEPAWFLATVGVSPDHQGKGLGSAVVLPGVEAAERAGVPAFLETSAPRNLPFYERLGFTVTADVEVPEGPRTWCMTRKPGA

SEQ ID NO: 12087 - protein, 858 aa, synthetic construct
MALPVTALLLPLALLLHAARPDIVMTQSPDSLAVSLGERATINCESSQSLLNSGNQKNYLTWYQQKPGQPPKPLIYWASTRESGVPDRFSGSGSGTDFTLTISSLQAEDVAVYYCQNDYSYPYLFGQGTKLEIKRLEDLKNVFPPEVAVFEPSKAEIAHTQKATLVCLATGFYPDHVELSWWVNGKEVHSGVCTDPQPLKEQPALNDSRYCLSSRLRVSATFWQNPRNHFRCQVQFYGLSENDEWTQDRAKPVTQIVSAEAWGRADCGITSASYHQGVLSATILYEILLGKATLYAVLVSALVLMAMVKRKDSRGRAKRSGSGATNFSLLKQAGDVEENPGPTSMDWIWRILFLVGAATGAHSFEQVQLVQSGSELKKPGASVKISCKASGYTFTNYGMNWVKQAPGQGLKWMGWINTYTGEPTYAEEFKGRFAFSLETSASTAYLQITSLKNEDTATYFCARLGFGNAMDYWGQGTSVTVSSTRIQNPDPAVYQLRDSKSSDKSVCLFTDFDSQTNVSQSKDSDVYITDKCVLDMRSMDFKSNSAVAWSNKSDFACANAFNNSIIPEDTFFPSSDVPCDVKLVEKSFETDTNLNFQNLSVIGFRILLLKVAGFNLLMTLRLWSSRAKRSGSGVKQTLNFDLLKLAGDVESNPGPSRGHMTEYKPTVRLATRDDVPRAVRTLAAAFADYPATRHTVDPDRHIERVTELQELFLTRVGLDIGKVWVADDGAAVAVWTTPESVEAGAVFAEIGPRMAELSGSRLAAQQQMEGLLAPHRPKEPAWFLATVGVSPDHQGKGLGSAVVLPGVEAAERAGVPAFLETSAPRNLPFYERLGFTVTADVEVPEGPRTWCMTRKPGA

SEQ ID NO: 12088 - protein, 625 aa, synthetic construct
MALPVTALLLPLALLLHAARPDIVMTQSPDSLAVSLGERATINCESSQSLLNSGNQKNYLTWYQQKPGQPPKPLIYWASTRESGVPDRFSGSGSGTDFTLTISSLQAEDVAVYYCQNDYSYPYLFGQGTKLEIKRLEDLKNVFPPEVAVFEPSEAEISHTQKATLVCLATGFYPDHVELSWWVNGKEVHSGVCTDPQPLKEQPALNDSRYCLSSRLRVSATFWQNPRNHFRCQVQFYGLSENDEWTQDRAKPVTQIVSAEAWGRADCGFTSESYQQGVLSATILYEILLGKATLYAVLVSALVLMAMVKRKDSRGRAKRSGSGATNFSLLKQAGDVEENPGPTSMDWIWRILFLVGAATGAHSFEQVQLVQSGSELKKPGASVKISCKASGYTFTNYGMNWVKQAPGQGLKWMGWINTYTGEPTYAEEFKGRFAFSLETSASTAYLQITSLKNEDTATYFCARLGFGNAMDYWGQGTSVTVSSTRIQNPDPAVYQLRDSKSSDKSVCLFTDFDSQTNVSQSKDSDVYITDKCVLDMRSMDFKSNSAVAWSNKSDFACANAFNNSIIPEDTFFPSPESSCDVKLVEKSFETDTNLNFQNLSVIGFRILLLKVAGFNLLMTLRLWSS

SEQ ID NO: 12089 - protein, 850 aa, synthetic construct
MALPVTALLLPLALLLHAARPDIVMTQSPDSLAVSLGERATINCESSQSLLNSGNQKNYLTWYQQKPGQPPKPLIYWASTRESGVPDRFSGSGSGTDFTLTISSLQAEDVAVYYCQNDYSYPYLFGQGTKLEIKRLEDLKNVFPPEVAVFEPSEAEISHTQKATLVCLATGFYPDHVELSWWVNGKEVHSGVCTDPQPLKEQPALNDSRYCLSSRLRVSATFWQNPRNHFRCQVQFYGLSENDEWTQDRAKPVTQIVSAEAWGRADCGFTSESYQQGVLSATILYEILLGKATLYAVLVSALVLMAMVKRKDSRGRAKRSGSGATNFSLLKQAGDVEENPGPTSMDWIWRILFLVGAATGAHSFEQVQLVQSGSELKKPGASVKISCKASGYTFTNYGMNWVKQAPGQGLKWMGWINTYTGEPTYAEEFKGRFAFSLETSASTAYLQITSLKNEDTATYFCARLGFGNAMDYWGQGTSVTVSSTRIQNPDPAVYQLRDSKSSDKSVCLFTDFDSQTNVSQSKDSDVYITDKCVLDMRSMDFKSNSAVAWSNKSDFACANAFNNSIIPEDTFFPSPESSCDVKLVEKSFETDTNLNFQNLSVIGFRILLLKVAGFNLLMTLRLWSSRAKRSGSGVKQTLNFDLLKLAGDVESNPGPSRGGIHTMATYEVLCEVARKLGTDDREVVLFLLNVFIPQPTLAQLIGALRALKEEGRLTFPLLAECLFRAGRRDLLRDLLHLDPRFLERHLAGTMSYFSPYQLTVLHVDGELCARDIRSLIFLSKDTIGSRSTPQTFLHWVYCMENLDLLGPTDVDALMSMLRSLSRVDLQRQVQTLMGLHLSGPSHSQHYRHTP

SEQ ID NO: 12090 - protein, 629 aa, synthetic construct
MALPVTALLLPLALLLHAARPDIVMTQSPDSLAVSLGERATINCESSQSLLNSGNQKNYLTWYQQKPGQPPKPLIYWASTRESGVPDRFSGSGSGTDFTLTISSLQAEDVAVYYCQNDYSYPYLFGQGTKLEIKRLEIQNPDPAVYQLRDSKSSDKSVCLFTDFDSQTNVSQSKDSDVYITDKCVLDMRSMDFKSNSAVAWSNKSDFACANAFNNSIIPEDTFFPSPESSCDVKLVEKSFETDTNLNFQNLSVIGFRILLLKVAGFNLLMTLRLWSSRAKRSGSGVKQTLNFDLLKLAGDVESNPGPTSMDWIWRILFLVGAATGAHSFEQVQLVQSGSELKKPGASVKISCKASGYTFTNYGMNWVKQAPGQGLKWMGWINTYTGEPTYAEEFKGRFAFSLETSASTAYLQITSLKNEDTATYFCARLGFGNAMDYWGQGTSVTVSSTREDLKNVFPPEVAVFEPSEAEISHTQKATLVCLATGFYPDHVELSWWVNGKEVHSGVCTDPQPLKEQPALNDSRYCLSSRLRVSATFWQNPRNHFRCQVQFYGLSENDEWTQDRAKPVTQIVSAEAWGRADCGFTSESYQQGVLSATILYEILLGKATLYAVLVSALVLMAMVKRKDSRG

SEQ ID NO: 12091 - protein, 851 aa, synthetic construct
MALPVTALLLPLALLLHAARPDIVMTQSPDSLAVSLGERATINCESSQSLLNSGNQKNYLTWYQQKPGQPPKPLIYWASTRESGVPDRFSGSGSGTDFTLTISSLQAEDVAVYYCQNDYSYPYLFGQGTKLEIKRLEIQNPDPAVYQLRDSKSSDKSVCLFTDFDSQTNVSQSKDSDVYITDKCVLDMRSMDFKSNSAVAWSNKSDFACANAFNNSIIPEDTFFPSPESSCDVKLVEKSFETDTNLNFQNLSVIGFRILLLKVAGFNLLMTLRLWSSRAKRSGSGVKQTLNFDLLKLAGDVESNPGPTSMDWIWRILFLVGAATGAHSFEQVQLVQSGSELKKPGASVKISCKASGYTFTNYGMNWVKQAPGQGLKWMGWINTYTGEPTYAEEFKGRFAFSLETSASTAYLQITSLKNEDTATYFCARLGFGNAMDYWGQGTSVTVSSTREDLKNVFPPEVAVFEPSEAEISHTQKATLVCLATGFYPDHVELSWWVNGKEVHSGVCTDPQPLKEQPALNDSRYCLSSRLRVSATFWQNPRNHFRCQVQFYGLSENDEWTQDRAKPVTQIVSAEAWGRADCGFTSESYQQGVLSATILYEILLGKATLYAVLVSALVLMAMVKRKDSRGRAKRSGSGATNFSLLKQAGDVEENPGPSRGGIHTMATYEVLCEVARKLGTDDREVVLFLLNVFIPQPTLAQLIGALRALKEEGRLTFPLLAECLFRAGRRDLLRDLLHLDPRFLERHLAGTMSYFSPYQLTVLHVDGELCARDIRSLIFLSKDTIGSRSTPQTFLHWVYCMENLDLLGPTDVDALMSMLRSLSRVDLQRQVQTLMGLHLSGPSHSQHYRHTP

SEQ ID NO: 12092 - protein, 903 aa, synthetic construct
MALPVTALLLPLALLLHAARPLEGKPIPNPLLGLDSTGSGEDLKNVFPPEVAVFEPSKAEIAHTQKATLVCLATGFYPDHVELSWWVNGKEVHSGVCTDPQPLKEQPALNDSRYCLSSRLRVSATFWQNPRNHFRCQVQFYGLSENDEWTQDRAKPVTQIVSAEAWGRADCGITSASYHQGVLSATILYEILLGKATLYAVLVSALVLMAMVKRKDSRGRAKRSGSGATNFSLLKQAGDVEENPGPTSMALPVTALLLPLALLLHAARPDIVMTQSPDSLAVSLGERATINCESSQSLLNSGNQKNYLTWYQQKPGQPPKPLIYWASTRESGVPDRFSGSGSGTDFTLTISSLQAEDVAVYYCQNDYSYPYLFGQGTKLEIKRGGGGSGGGGSGGGGSQVQLVQSGSELKKPGASVKISCKASGYTFTNYGMNWVKQAPGQGLKWMGWINTYTGEPTYAEEFKGRFAFSLETSASTAYLQITSLKNEDTATYFCARLGFGNAMDYWGQGTSVTVSSTREQKLISEEDGSGIQNPDPAVYQLRDSKSSDKSVCLFTDFDSQTNVSQSKDSDVYITDKCVLDMRSMDFKSNSAVAWSNKSDFACANAFNNSIIPEDTFFPSSDVPCDVKLVEKSFETDTNLNFQNLSVIGFRILLLKVAGFNLLMTLRLWSSRAKRSGSGVKQTLNFDLLKLAGDVESNPGPSRGHMTEYKPTVRLATRDDVPRAVRTLAAAFADYPATRHTVDPDRHIERVTELQELFLTRVGLDIGKVWVADDGAAVAVWTTPESVEAGAVFAEIGPRMAELSGSRLAAQQQMEGLLAPHRPKEPAWFLATVGVSPDHQGKGLGSAVVLPGVEAAERAGVPAFLETSAPRNLPFYERLGFTVTADVEVPEGPRTWCMTRKPGA

SEQ ID NO: 12093 - protein, 904 aa, synthetic construct
MALPVTALLLPLALLLHAARPLEQKLISEEDLGSGDRPDPAVYQLRDSKSSDKSVCLFTDFDSQTNVSQSKDSDVYITDKCVLDMRSMDFKSNSAVAWSNKSDFACANAFNNSIIPEDTFFPSPESSCDVKLVEKSFETDTNLNFQNLSVIGFRILLLKVAGFNLLMTLRLWSSSSRAKRSGSGVKQTLNFDLLKLAGDVESNPGPTSMALPVTALLLPLALLLHAARPDIVMTQSPDSLAVSLGERATINCESSQSLLNSGNQKNYLTWYQQKPGQPPKPLIYWASTRESGVPDRFSGSGSGTDFTLTISSLQAEDVAVYYCQNDYSYPYLFGQGTKLEIKRGGGGSGGGGSGGGGSQVQLVQSGSELKKPGASVKISCKASGYTFTNYGMNWVKQAPGQGLKWMGWINTYTGEPTYAEEFKGRFAFSLETSASTAYLQITSLKNEDTATYFCARLGFGNAMDYWGQGTSVTVSSTRGKPIPNPLLGLDSTGSGEDLKNVFPPEVAVFEPSEAEISHTQKATLVCLATGFYPDHVELSWWVNGKEVHSGVCTDPQPLKEQPALNDSRYCLSSRLRVSATFWQNPRNHFRCQVQFYGLSENDEWTQDRAKPVTQIVSAEAWGRADCGFTSESYQQGVLSATILYEILLGKATLYAVLVSALVLMAMVKRKDSRGRAKRSGSGATNFSLLKQAGDVEENPGPSRGHMTEYKPTVRLATRDDVPRAVRTLAAAFADYPATRHTVDPDRHIERVTELQELFLTRVGLDIGKVWVADDGAAVAVWTTPESVEAGAVFAEIGPRMAELSGSRLAAQQQMEGLLAPHRPKEPAWFLATVGVSPDHQGKGLGSAVVLPGVEAAERAGVPAFLETSAPRNLPFYERLGFTVTADVEVPEGPRTWCMTRKPGA

SEQ ID NO: 12094 - protein, 858 aa, synthetic construct
MALPVTALLLPLALLLHAARPDIVMTQSPDSLAVSLGERATINCESSQSLLNSGNQKNYLTWYQQKPGQPPKPLIYWASTRESGVPDRFSGSGSGTDFTLTISSLQAEDVAVYYCQNDYSYPYLFGQGTKLEIKRLEDLKNVFPPEVAVFEPSEAEISHTQKATLVCLATGFYPDHVELSWWVNGKEVHSGVSTDPQPLKEQPALNDSRYCLSSRLRVSATFWQNPRNHFRCQVQFYGLSENDEWTQDRAKPVTQIVSAEAWGRADCGFTSESYQQGVLSATILYEILLGKATLYAVLVSALVLMAMVKRKDSRGRAKRSGSGATNFSLLKQAGDVEENPGPTSMDWIWRILFLVGAATGAHSFEQVQLVQSGSELKKPGASVKISCKASGYTFTNYGMNWVKQAPGQGLKWMGWINTYTGEPTYAEEFKGRFAFSLETSASTAYLQITSLKNEDTATYFCARLGFGNAMDYWGQGTSVTVSSTRIQNPDPAVYQLRDSKSSDKSVCLFTDFDSQTNVSQSKDSDVYITDKTVLDMRSMDFKSNSAVAWSNKSDFACANAFNNSIIPEDTFFPSPESSCDVKLVEKSFETDTNLNFQNLSVIGFRILLLKVAGFNLLMTLRLWSSRAKRSGSGVKQTLNFDLLKLAGDVESNPGPSRGHMTEYKPTVRLATRDDVPRAVRTLAAAFADYPATRHTVDPDRHIERVTELQELFLTRVGLDIGKVWVADDGAAVAVWTTPESVEAGAVFAEIGPRMAELSGSRLAAQQQMEGLLAPHRPKEPAWFLATVGVSPDHQGKGLGSAVVLPGVEAAERAGVPAFLETSAPRNLPFYERLGFTVTADVEVPEGPRTWCMTRKPGA

SEQ ID NO: 12095 - protein, 940 aa, synthetic construct
MALPVTALLLPLALLLHAARPDIVMTQSPDSLAVSLGERATINCESSQSLLNSGNQKNYLTWYQQKPGQPPKPLIYWASTRESGVPDRFSGSGSGTDFTLTISSLQAEDVAVYYCQNDYSYPYLFGQGTKLEIKRLEDLKNVFPPEVAVFEPSEAEISHTQKATLVCLATGFYPDHVELSWWVNGKEVHSGVSTDPQPLKEQPALNDSRYCLSSRLRVSATFWQNPRNHFRCQVQFYGLSENDEWTQDRAKPVTQIVSAEAWGRADCGFTSESYQQGVLSATILYEILLGKATLYAVLVSALVLMAMVKRKDSRGRAKRSGSGATNFSLLKQAGDVEENPGPTSMDWIWRILFLVGAATGAHSFEQVQLVQSGSELKKPGASVKISCKASGYTFTNYGMNWVKQAPGQGLKWMGWINTYTGEPTYAEEFKGRFAFSLETSASTAYLQITSLKNEDTATYFCARLGFGNAMDYWGQGTSVTVSSTREQKLISEEDGSGTPFPSLAPPIMLLVDGKQQMVVVCLVLDVAPPGLDSPIWFSAGNGSALDAFTYGPSPATDGTWTNLAHLSLPSEELASWEPLVCHTGPGAEGHSRSTQPMHLSGEASTARTCPQEPLRGTPGGALWLGVLRLLLFKLLLFDLLLTCSCLCDPAGPLPSPATTTRLRALGSHRLHPATETGGREATSSPRPQPRDRRWGDTPPGRKPGSPVRAKRSGSGVKQTLNFDLLKLAGDVESNPGPSRGHMTEYKPTVRLATRDDVPRAVRTLAAAFADYPATRHTVDPDRHIERVTELQELFLTRVGLDIGKVWVADDGAAVAVWTTPESVEAGAVFAEIGPRMAELSGSRLAAQQQMEGLLAPHRPKEPAWFLATVGVSPDHQGKGLGSAVVLPGVEAAERAGVPAFLETSAPRNLPFYERLGFTVTADVEVPEGPRTWCMTRKPGA

SEQ ID NO: 12096 - protein, 958 aa, synthetic construct
MALPVTALLLPLALLLHAARPLEDLKNVFPPEVAVFEPSEAEISHTQKATLVCLATGFYPDHVELSWWVNGKEVHSGVSTDPQPLKEQPALNDSRYCLSSRLRVSATFWQNPRNHFRCQVQFYGLSENDEWTQDRAKPVTQIVSAEAWGRADCGFTSESYQQGVLSATILYEILLGKATLYAVLVSALVLMAMVKRKDSRGRAKRSGSGATNFSLLKQAGDVEENPGPTSMALPVTALLLPLALLLHAARPDIVMTQSPDSLAVSLGERATINCESSQSLLNSGNQKNYLTWYQQKPGQPPKPLIYWASTRESGVPDRFSGSGSGTDFTLTISSLQAEDVAVYYCQNDYSYPYLFGQGTKLEIKRGGGGSGGGGSGGGGSQVQLVQSGSELKKPGASVKISCKASGYTFTNYGMNWVKQAPGQGLKWMGWINTYTGEPTYAEEFKGRFAFSLETSASTAYLQITSLKNEDTATYFCARLGFGNAMDYWGQGTSVTVSSTREQKLISEEDLGSGTPFPSLAPPIMLLVDGKQQMVVVCLVLDVAPPGLDSPIWFSAGNGSALDAFTYGPSPATDGTWTNLAHLSLPSEELASWEPLVCHTGPGAEGHSRSTQPMHLSGEASTARTCPQEPLRGTPGGALWLGVLRLLLFKLLLFDLLLTCSCLCDPAGPLPSPATTTRLRALGSHRLHPATETGGREATSSPRPQPRDRRWGDTPPGRKPGSPVRAKRSGSGVKQTLNFDLLKLAGDVESNPGPSRSRGHMTEYKPTVRLATRDDVPRAVRTLAAAFADYPATRHTVDPDRHIERVTELQELFLTRVGLDIGKVWVADDGAAVAVWTTPESVEAGAVFAEIGPRMAELSGSRLAAQQQMEGLLAPHRPKEPAWFLATVGVSPDHQGKGLGSAVVLPGVEAAERAGVPAFLETSAPRNLPFYERLGFTVTADVEVPEGPRTWCMTRKPGA

SEQ ID NO: 12097 - protein, 895 aa, synthetic construct
MALPVTALLLPLALLLHAARPDIVMTQSPDSLAVSLGERATINCESSQSLLNSGNQKNYLTWYQQKPGQPPKPLIYWASTRESGVPDRFSGSGSGTDFTLTISSLQAEDVAVYYCQNDYSYPYLFGQGTKLEIKRLEGKPIPNPLLGLDSTGSGDKQLDADVSPKPTIFLPSIAETKLQKAGTYLCLLEKFFPDVIKIHWQEKKSNTILGSQEGNTMKTNDTYMKFSWLTVPEKSLDKEHRCIVRHENNKNGVDQEIIFPPIKTDVITMDPKDNCSKDANDTLLLQLTNTSAYYMYLLLLLKSVVYFAIITCCLLRRTAFCCNGEKSRAKRSGSGATNFSLLKQAGDVEENPGPTSMDWIWRILFLVGAATGAHSFEQVQLVQSGSELKKPGASVKISCKASGYTFTNYGMNWVKQAPGQGLKWMGWINTYTGEPTYAEEFKGRFAFSLETSASTAYLQITSLKNEDTATYFCARLGFGNAMDYWGQGTSVTVSSTREQKLISEEDGSGSQPHTKPSVFVMKNGTNVACLVKEFYPKDIRINLVSSKKITEFDPAIVISPSGKYNAVKLGKYEDSNSVTCSVQHDNKTVHSTDFEVKTDSTDHVKPKETENTKQPSKSCHKPKAIVHTEKVNMMSLTVLGLRMLFAKTVAVNFLLTAKLFFLRAKRSGSGVKQTLNFDLLKLAGDVESNPGPSRGHMTEYKPTVRLATRDDVPRAVRTLAAAFADYPATRHTVDPDRHIERVTELQELFLTRVGLDIGKVWVADDGAAVAVWTTPESVEAGAVFAEIGPRMAELSGSRLAAQQQMEGLLAPHRPKEPAWFLATVGVSPDHQGKGLGSAVVLPGVEAAERAGVPAFLETSAPRNLPFYERLGFTVTADVEVPEGPRTWCMTRKPGA

SEQ ID NO: 12098 - protein, 633 aa, synthetic construct
MALPVTALLLPLALLLHAARPDIVMTQSPDSLAVSLGERATINCESSQSLLNSGNQKNYLTWYQQKPGQPPKPLIYWASTRESGVPDRFSGSGSGTDFTLTISSLQAEDVAVYYCQNDYSYPYLFGQGTKLEIKRLESQPHTKPSVFVMKNGTNVACLVKEFYPKDIRINLVSSKKITEFDPAIVISPSGKYNAVKLGKYEDSNSVTCSVQHDNKTVHSTDFEVKTDSTDHVKPKETENTKQPSKSCHKPKAIVHTEKVNMMSLTVLGLRMLFAKTVAVNFLLTAKLFFLRAKRSGSGATNFSLLKQAGDVEENPGPTSMDWIWRILFLVGAATGAHSFEQVQLVQSGSELKKPGASVKISCKASGYTFTNYGMNWVKQAPGQGLKWMGWINTYTGEPTYAEEFKGRFAFSLETSASTAYLQITSLKNEDTATYFCARLGFGNAMDYWGQGTSVTVSSTRDKQLDADVSPKPTIFLPSIAETKLQKAGTYLCLLEKFFPDVIKIHWQEKKSNTILGSQEGNTMKTNDTYMKFSWLTVPEKSLDKEHRCIVRHENNKNGVDQEIIFPPIKTDVITMDPKDNCSKDANDTLLLQLTNTSAYYMYLLLLLKSVVYFAIITCCLLRRTAFCCNGEKS

SEQ ID NO: 12099 - protein, 910 aa, synthetic construct
MALPVTALLLPLALLLHAARPLEGKPIPNPLLGLDSTGSGDKQLDADVSPKPTIFLPSIAETKLQKAGTYLCLLEKFFPDVIKIHWQEKKSNTILGSQEGNTMKTNDTYMKFSWLTVPEKSLDKEHRCIVRHENNKNGVDQEIIFPPIKTDVITMDPKDNCSKDANDTLLLQLTNTSAYYMYLLLLLKSVVYFAIITCCLLRRTAFCCNGEKSRAKRSGSGATNFSLLKQAGDVEENPGPTSMALPVTALLLPLALLLHAARPDIVMTQSPDSLAVSLGERATINCESSQSLLNSGNQKNYLTWYQQKPGQPPKPLIYWASTRESGVPDRFSGSGSGTDFTLTISSLQAEDVAVYYCQNDYSYPYLFGQGTKLEIKRGGGGSGGGGSGGGGSQVQLVQSGSELKKPGASVKISCKASGYTFTNYGMNWVKQAPGQGLKWMGWINTYTGEPTYAEEFKGRFAFSLETSASTAYLQITSLKNEDTATYFCARLGFGNAMDYWGQGTSVTVSSTREQKLISEEDGSGSQPHTKPSVFVMKNGTNVACLVKEFYPKDIRINLVSSKKITEFDPAIVISPSGKYNAVKLGKYEDSNSVTCSVQHDNKTVHSTDFEVKTDSTDHVKPKETENTKQPSKSCHKPKAIVHTEKVNMMSLTVLGLRMLFAKTVAVNFLLTAKLFFLRAKRSGSGVKQTLNFDLLKLAGDVESNPGPSRGHMTEYKPTVRLATRDDVPRAVRTLAAAFADYPATRHTVDPDRHIERVTELQELFLTRVGLDIGKVWVADDGAAVAVWTTPESVEAGAVFAEIGPRMAELSGSRLAAQQQMEGLLAPHRPKEPAWFLATVGVSPDHQGKGLGSAVVLPGVEAAERAGVPAFLETSAPRNLPFYERLGFTVTADVEVPEGPRTWCMTRKPGA

SEQ ID NO: 12100 - protein, 1035 aa, synthetic construct
MALPVTALLLPLALLLHAARPDIVMTQSPDSLAVSLGERATINCESSQSLLNSGNQKNYLTWYQQKPGQPPKPLIYWASTRESGVPDRFSGSGSGTDFTLTISSLQAEDVAVYYCQNDYSYPYLFGQGTKLEIKRGQPKANPTVTLFPPSSEELQANKATLVCLISDFYPGAVTVAWKADGSPVKAGVETTKPSKQSNNKYAASSYLSLTPEQWKSHRSYSCQVTHEGSTVEKTVAPTECSGSQSFGLLDPKLCYLLDGILFIYGVILTALFLRVKFSRSADAPAYQQGQNQLYNELNLGRREEYDVLDKRRGRDPEMGGKPQRRKNPQEGLYNELQKDKMAEAYSEIGMKGERRRGKGHDGLYQGLSTATKDTYDALHMQALPPRRAKRSGSGATNFSLLKQAGDVEENPGPTSMDWIWRILFLVGAATGAHSFEQVQLVQSGSELKKPGASVKISCKASGYTFTNYGMNWVKQAPGQGLKWMGWINTYTGEPTYAEEFKGRFAFSLETSASTAYLQITSLKNEDTATYFCARLGFGNAMDYWGQGTSVTVSSASTKGPSVFPLAPSSKSTSGGTAALGCLVKDYFPEPVTVSWNSGALTSGVHTFPAVLQSSGLYSLSSVVTVPSSSLGTQTYICNVNHKPSNTKVDKRVEPKSCGTQSFGLLDPKLCYLLDGILFIYGVILTALFLRVKFSRSADAPAYQQGQNQLYNELNLGRREEYDVLDKRRGRDPEMGGKPQRRKNPQEGLYNELQKDKMAEAYSEIGMKGERRRGKGHDGLYQGLSTATKDTYDALHMQALPPRRAKRSGSGVKQTLNFDLLKLAGDVESNPGPSRGHMTEYKPTVRLATRDDVPRAVRTLAAAFADYPATRHTVDPDRHIERVTELQELFLTRVGLDIGKVWVADDGAAVAVWTTPESVEAGAVFAEIGPRMAELSGSRLAAQQQMEGLLAPHRPKEPAWFLATVGVSPDHQGKGLGSAVVLPGVEAAERAGVPAFLETSAPRNLPFYERLGFTVTADVEVPEGPRTWCMTRKPGA

SEQ ID NO: 12101 - protein, 821 aa, synthetic construct
MALPVTALLLPLALLLHAARPDIVMTQSPDSLAVSLGERATINCESSQSLLNSGNQKNYLTWYQQKPGQPPKPLIYWASTRESGVPDRFSGSGSGTDFTLTISSLQAEDVAVYYCQNDYSYPYLFGQGTKLEIKRLEDLKNVFPPEVAVFEPSEAEISHTQKATLVCLATGFYPDHVELSWWVNGKEVHSGVSTDPQPLKEQPALNDSRYCLSSRLRVSATFWQNPRNHFRCQVQFYGLSENDEWTQDRAKPVTQIVSAEAWGRADCGSQSFGLLDPKLCYLLDGILFIYGVILTALFLRVKFSRSADAPAYQQGQNQLYNELNLGRREEYDVLDKRRGRDPEMGGKPQRRKNPQEGLYNELQKDKMAEAYSEIGMKGERRRGKGHDGLYQGLSTATKDTYDALHMQALPPRRAKRSGSGATNFSLLKQAGDVEENPGPTSMDWIWRILFLVGAATGAHSFEQVQLVQSGSELKKPGASVKISCKASGYTFTNYGMNWVKQAPGQGLKWMGWINTYTGEPTYAEEFKGRFAFSLETSASTAYLQITSLKNEDTATYFCARLGFGNAMDYWGQGTSVTVSSTRIQNPDPAVYQLRDSKSSDKSVCLFTDFDSQTNVSQSKDSDVYITDKTVLDMRSMDFKSNSAVAWSNKSDFACANAFNNSIIPEDTFFPSPESSCGTQSFGLLDPKLCYLLDGILFIYGVILTALFLRVKFSRSADAPAYQQGQNQLYNELNLGRREEYDVLDKRRGRDPEMGGKPQRRKNPQEGLYNELQKDKMAEAYSEIGMKGERRRGKGHDGLYQGLSTATKDTYDALHMQALPPR

SEQ ID NO: 12102 - protein, 821 aa, synthetic construct
MALPVTALLLPLALLLHAARPDIVMTQSPDSLAVSLGERATINCESSQSLLNSGNQKNYLTWYQQKPGQPPKPLIYWASTRESGVPDRFSGSGSGTDFTLTISSLQAEDVAVYYCQNDYSYPYLFGQGTKLEIKRLEDLKNVFPPEVAVFEPSKAEIAHTQKATLVCLATGFYPDHVELSWWVNGKEVHSGVCTDPQPLKEQPALNDSRYCLSSRLRVSATFWQNPRNHFRCQVQFYGLSENDEWTQDRAKPVTQIVSAEAWGRADCGSQSFGLLDPKLCYLLDGILFIYGVILTALFLRVKFSRSADAPAYQQGQNQLYNELNLGRREEYDVLDKRRGRDPEMGGKPQRRKNPQEGLYNELQKDKMAEAYSEIGMKGERRRGKGHDGLYQGLSTATKDTYDALHMQALPPRRAKRSGSGATNFSLLKQAGDVEENPGPTSMDWIWRILFLVGAATGAHSFEQVQLVQSGSELKKPGASVKISCKASGYTFTNYGMNWVKQAPGQGLKWMGWINTYTGEPTYAEEFKGRFAFSLETSASTAYLQITSLKNEDTATYFCARLGFGNAMDYWGQGTSVTVSSTRIQNPDPAVYQLRDSKSSDKSVCLFTDFDSQTNVSQSKDSDVYITDKCVLDMRSMDFKSNSAVAWSNKSDFACANAFNNSIIPEDTFFPSSDVPCGTQSFGLLDPKLCYLLDGILFIYGVILTALFLRVKFSRSADAPAYQQGQNQLYNELNLGRREEYDVLDKRRGRDPEMGGKPQRRKNPQEGLYNELQKDKMAEAYSEIGMKGERRRGKGHDGLYQGLSTATKDTYDALHMQALPPR

SEQ ID NO: 12103 - protein, 892 aa, synthetic construct
MALPVTALLLPLALLLHAARPDIVMTQSPDSLAVSLGERATINCESSQSLLNSGNQKNYLTWYQQKPGQPPKPLIYWASTRESGVPDRFSGSGSGTDFTLTISSLQAEDVAVYYCQNDYSYPYLFGQGTKLEIKRLEGKPIPNPLLGLDSTGSGEDLKNVFPPEVAVFEPSEAEISHTQKATLVCLATGFYPDHVELSWWVNGKEVHSGVSTDPQPLKEQPALNDSRYCLSSRLRVSATFWQNPRNHFRCQVQFYGLSENDEWTQDRAKPVTQIVSAEAWGRADCGSQSFGLLDPKLCYLLDGILFIYGVILTALFLRVKFSRSADAPAYQQGQNQLYNELNLGRREEYDVLDKRRGRDPEMGGKPQRRKNPQEGLYNELQKDKMAEAYSEIGMKGERRRGKGHDGLYQGLSTATKDTYDALHMQALPPRRAKRSGSGATNFSLLKQAGDVEENPGPTSMDWIWRILFLVGAATGAHSFEQVQLVQSGSELKKPGASVKISCKASGYTFTNYGMNWVKQAPGQGLKWMGWINTYTGEPTYAEEFKGRFAFSLETSASTAYLQITSLKNEDTATYFCARLGFGNAMDYWGQGTSVTVSSTREQKLISEEDGSGIQNPDPAVYQLRDSKSSDKSVCLFTDFDSQTNVSQSKDSDVYITDKTVLDMRSMDFKSNSAVAWSNKSDFACANAFNNSIIPEDTFFPSPESSCGTQSFGLLDPKLCYLLDGILFIYGVILTALFLRSKRSRLLHSDYMNMTPRRPGPTRKHYQPYAPPRDFAAYRSRVKFSRSADAPAYQQGQNQLYNELNLGRREEYDVLDKRRGRDPEMGGKPQRRKNPQEGLYNELQKDKMAEAYSEIGMKGERRRGKGHDGLYQGLSTATKDTYDALHMQALPPR

SEQ ID NO: 12104 - protein, 933 aa, synthetic construct
MALPVTALLLPLALLLHAARPDIVMTQSPDSLAVSLGERATINCESSQSLLNSGNQKNYLTWYQQKPGQPPKPLIYWASTRESGVPDRFSGSGSGTDFTLTISSLQAEDVAVYYCQNDYSYPYLFGQGTKLEIKRLEGKPIPNPLLGLDSTGSGEDLKNVFPPEVAVFEPSEAEISHTQKATLVCLATGFYPDHVELSWWVNGKEVHSGVSTDPQPLKEQPALNDSRYCLSSRLRVSATFWQNPRNHFRCQVQFYGLSENDEWTQDRAKPVTQIVSAEAWGRADCGSQSFGLLDPKLCYLLDGILFIYGVILTALFLRSKRSRLLHSDYMNMTPRRPGPTRKHYQPYAPPRDFAAYRSRVKFSRSADAPAYQQGQNQLYNELNLGRREEYDVLDKRRGRDPEMGGKPQRRKNPQEGLYNELQKDKMAEAYSEIGMKGERRRGKGHDGLYQGLSTATKDTYDALHMQALPPRRAKRSGSGATNFSLLKQAGDVEENPGPTSMDWIWRILFLVGAATGAHSFEQVQLVQSGSELKKPGASVKISCKASGYTFTNYGMNWVKQAPGQGLKWMGWINTYTGEPTYAEEFKGRFAFSLETSASTAYLQITSLKNEDTATYFCARLGFGNAMDYWGQGTSVTVSSTREQKLISEEDGSGIQNPDPAVYQLRDSKSSDKSVCLFTDFDSQTNVSQSKDSDVYITDKTVLDMRSMDFKSNSAVAWSNKSDFACANAFNNSIIPEDTFFPSPESSCGTQSFGLLDPKLCYLLDGILFIYGVILTALFLRSKRSRLLHSDYMNMTPRRPGPTRKHYQPYAPPRDFAAYRSRVKFSRSADAPAYQQGQNQLYNELNLGRREEYDVLDKRRGRDPEMGGKPQRRKNPQEGLYNELQKDKMAEAYSEIGMKGERRRGKGHDGLYQGLSTATKDTYDALHMQALPPR

SEQ ID NO: 12105 - protein, 894 aa, synthetic construct
MALPVTALLLPLALLLHAARPDIVMTQSPDSLAVSLGERATINCESSQSLLNSGNQKNYLTWYQQKPGQPPKPLIYWASTRESGVPDRFSGSGSGTDFTLTISSLQAEDVAVYYCQNDYSYPYLFGQGTKLEIKRLEGKPIPNPLLGLDSTGSGEDLKNVFPPEVAVFEPSEAEISHTQKATLVCLATGFYPDHVELSWWVNGKEVHSGVSTDPQPLKEQPALNDSRYCLSSRLRVSATFWQNPRNHFRCQVQFYGLSENDEWTQDRAKPVTQIVSAEAWGRADCGSQSFGLLDPKLCYLLDGILFIYGVILTALFLRVKFSRSADAPAYQQGQNQLYNELNLGRREEYDVLDKRRGRDPEMGGKPQRRKNPQEGLYNELQKDKMAEAYSEIGMKGERRRGKGHDGLYQGLSTATKDTYDALHMQALPPRRAKRSGSGATNFSLLKQAGDVEENPGPTSMDWIWRILFLVGAATGAHSFEQVQLVQSGSELKKPGASVKISCKASGYTFTNYGMNWVKQAPGQGLKWMGWINTYTGEPTYAEEFKGRFAFSLETSASTAYLQITSLKNEDTATYFCARLGFGNAMDYWGQGTSVTVSSTREQKLISEEDLGSGIQNPDPAVYQLRDSKSSDKSVCLFTDFDSQTNVSQSKDSDVYITDKTVLDMRSMDFKSNSAVAWSNKSDFACANAFNNSIIPEDTFFPSPESSCGTQSFGLLDPKLCYLLDGILFIYGVILTALFLKRGRKKLLYIFKQPFMRPVQTTQEEDGCSCRFPEEEEGGCELRVKFSRSADAPAYQQGQNQLYNELNLGRREEYDVLDKRRGRDPEMGGKPQRRKNPQEGLYNELQKDKMAEAYSEIGMKGERRRGKGHDGLYQGLSTATKDTYDALHMQALPPR

SEQ ID NO: 12106 - protein, 936 aa, synthetic construct
MALPVTALLLPLALLLHAARPDIVMTQSPDSLAVSLGERATINCESSQSLLNSGNQKNYLTWYQQKPGQPPKPLIYWASTRESGVPDRFSGSGSGTDFTLTISSLQAEDVAVYYCQNDYSYPYLFGQGTKLEIKRLEGKPIPNPLLGLDSTGSGEDLKNVFPPEVAVFEPSEAEISHTQKATLVCLATGFYPDHVELSWWVNGKEVHSGVSTDPQPLKEQPALNDSRYCLSSRLRVSATFWQNPRNHFRCQVQFYGLSENDEWTQDRAKPVTQIVSAEAWGRADCGSQSFGLLDPKLCYLLDGILFIYGVILTALFLKRGRKKLLYIFKQPFMRPVQTTQEEDGCSCRFPEEEEGGCELRVKFSRSADAPAYQQGQNQLYNELNLGRREEYDVLDKRRGRDPEMGGKPQRRKNPQEGLYNELQKDKMAEAYSEIGMKGERRRGKGHDGLYQGLSTATKDTYDALHMQALPPRRAKRSGSGATNFSLLKQAGDVEENPGPTSMDWIWRILFLVGAATGAHSFEQVQLVQSGSELKKPGASVKISCKASGYTFTNYGMNWVKQAPGQGLKWMGWINTYTGEPTYAEEFKGRFAFSLETSASTAYLQITSLKNEDTATYFCARLGFGNAMDYWGQGTSVTVSSTREQKLISEEDLGSGIQNPDPAVYQLRDSKSSDKSVCLFTDFDSQTNVSQSKDSDVYITDKTVLDMRSMDFKSNSAVAWSNKSDFACANAFNNSIIPEDTFFPSPESSCGTQSFGLLDPKLCYLLDGILFIYGVILTALFLKRGRKKLLYIFKQPFMRPVQTTQEEDGCSCRFPEEEEGGCELRVKFSRSADAPAYQQGQNQLYNELNLGRREEYDVLDKRRGRDPEMGGKPQRRKNPQEGLYNELQKDKMAEAYSEIGMKGERRRGKGHDGLYQGLSTATKDTYDALHMQALPPR

SEQ ID NO: 12107 - protein, 826 aa, synthetic construct
MALPVTALLLPLALLLHAARPDIVMTQSPDSLAVSLGERATINCESSQSLLNSGNQKNYLTWYQQKPGQPPKPLIYWASTRESGVPDRFSGSGSGTDFTLTISSLQAEDVAVYYCQNDYSYPYLFGQGTKLEIKRLEQSFGLLDPKLCYLLDGILFIYGVILTALFLRVKFSRSADAPAYQQGQNQLYNELNLGRREEYDVLDKRRGRDPEMGGKPQRRKNPQEGLYNELQKDKMAEAYSEIGMKGERRRGKGHDGLYQGLSTATKDTYDALHMQALPPRRAKRSGSGATNFSLLKQAGDVEENPGPTSMDWIWRILFLVGAATGAHSFEQVQLVQSGSELKKPGASVKISCKASGYTFTNYGMNWVKQAPGQGLKWMGWINTYTGEPTYAEEFKGRFAFSLETSASTAYLQITSLKNEDTATYFCARLGFGNAMDYWGQGTSVTVSSTRQSFGLLDPKLCYLLDGILFIYGVILTALFLRVKFSRSADAPAYQQGQNQLYNELNLGRREEYDVLDKRRGRDPEMGGKPQRRKNPQEGLYNELQKDKMAEAYSEIGMKGERRRGKGHDGLYQGLSTATKDTYDALHMQALPPRRAKRSGSGVKQTLNFDLLKLAGDVESNPGPSRGHMTEYKPTVRLATRDDVPRAVRTLAAAFADYPATRHTVDPDRHIERVTELQELFLTRVGLDIGKVWVADDGAAVAVWTTPESVEAGAVFAEIGPRMAELSGSRLAAQQQMEGLLAPHRPKEPAWFLATVGVSPDHQGKGLGSAVVLPGVEAAERAGVPAFLETSAPRNLPFYERLGFTVTADVEVPEGPRTWCMTRKPGA

SEQ ID NO: 12108 - protein, 651 aa, synthetic construct
MALPVTALLLPLALLLHAARPDIVMTQSPDSLAVSLGERATINCESSQSLLNSGNQKNYLTWYQQKPGQPPKPLIYWASTRESGVPDRFSGSGSGTDFTLTISSLQAEDVAVYYCQNDYSYPYLFGQGTKLEIKRLEGQPKANPTVTLFPPSSEELQANKATLVCLISDFYPGAVTVAWKADGSPVKAGVETTKPSKQSNNKYAASSYLSLTPEQWKSHRSYSCQVTHEGSTVEKTVAPTECSPIKTDVITMDPKDNCSKDANDTLLLQLTNTSAYYMYLLLLLKSVVYFAIITCCLLRRTAFCCNGEKSRAKRSGSGATNFSLLKQAGDVEENPGPTSMDWIWRILFLVGAATGAHSFEQVQLVQSGSELKKPGASVKISCKASGYTFTNYGMNWVKQAPGQGLKWMGWINTYTGEPTYAEEFKGRFAFSLETSASTAYLQITSLKNEDTATYFCARLGFGNAMDYWGQGTSVTVSSTRASTKGPSVFPLAPSSKSTSGGTAALGCLVKDYFPEPVTVSWNSGALTSGVHTFPAVLQSSGLYSLSSVVTVPSSSLGTQTYICNVNHKPSNTKVDKRVEPKSCEVKTDSTDHVKPKETENTKQPSKSCHKPKAIVHTEKVNMMSLTVLGLRMLFAKTVAVNFLLTAKLFFL

SEQ ID NO: 12109 - protein, 629 aa, synthetic construct
MALPVTALLLPLALLLHAARPDIVMTQSPDSLAVSLGERATINCESSQSLLNSGNQKNYLTWYQQKPGQPPKPLIYWASTRESGVPDRFSGSGSGTDFTLTISSLQAEDVAVYYCQNDYSYPYLFGQGTKLEIKRLEGQPKANPTVTLFPPSSEELQANKATLVCLISDFYPGAVTVAWKADGSPVKAGVETTKPSKQSNNKYAASSYLSLTPEQWKSHRSYSCQVTHEGSTVEKTVAPTECSGRADCGITSASYHQGVLSATILYEILLGKATLYAVLVSALVLMAMVKRKDSRGRAKRSGSGATNFSLLKQAGDVEENPGPTSMDWIWRILFLVGAATGAHSFEQVQLVQSGSELKKPGASVKISCKASGYTFTNYGMNWVKQAPGQGLKWMGWINTYTGEPTYAEEFKGRFAFSLETSASTAYLQITSLKNEDTATYFCARLGFGNAMDYWGQGTSVTVSSTRASTKGPSVFPLAPSSKSTSGGTAALGCLVKDYFPEPVTVSWNSGALTSGVHTFPAVLQSSGLYSLSSVVTVPSSSLGTQTYICNVNHKPSNTKVDKRVEPKSCIPEDTFFPSSDVPCDVKLVEKSFETDTNLNFQNLSVIGFRILLLKVAGFNLLMTLRLWSS

SEQ ID NO: 12110 - protein, 629 aa, synthetic construct
MALPVTALLLPLALLLHAARPDIVMTQSPDSLAVSLGERATINCESSQSLLNSGNQKNYLTWYQQKPGQPPKPLIYWASTRESGVPDRFSGSGSGTDFTLTISSLQAEDVAVYYCQNDYSYPYLFGQGTKLEIKRLEGQPKANPTVTLFPPSSEELQANKATLVCLISDFYPGAVTVAWKADGSPVKAGVETTKPSKQSNNKYAASSYLSLTPEQWKSHRSYSCQVTHEGSTVEKTVAPTECSGRADCGFTSESYQQGVLSATILYEILLGKATLYAVLVSALVLMAMVKRKDSRGRAKRSGSGATNFSLLKQAGDVEENPGPTSMDWIWRILFLVGAATGAHSFEQVQLVQSGSELKKPGASVKISCKASGYTFTNYGMNWVKQAPGQGLKWMGWINTYTGEPTYAEEFKGRFAFSLETSASTAYLQITSLKNEDTATYFCARLGFGNAMDYWGQGTSVTVSSTRASTKGPSVFPLAPSSKSTSGGTAALGCLVKDYFPEPVTVSWNSGALTSGVHTFPAVLQSSGLYSLSSVVTVPSSSLGTQTYICNVNHKPSNTKVDKRVEPKSCIPEDTFFPSPESSCDVKLVEKSFETDTNLNFQNLSVIGFRILLLKVAGFNLLMTLRLWSS

SEQ ID NO: 12111 - protein, 455 aa, synthetic construct
MALPVTALLLPLALLLHAARPDIVMTQSPDSLAVSLGERATINCESSQSLLNSGNQKNYLTWYQQKPGQPPKPLIYWASTRESGVPDRFSGSGSGTDFTLTISSLQAEDVAVYYCQNDYSYPYLFGQGTKLEIKRGGGGSGGGGSGGGGSQVQLVQSGSELKKPGASVKISCKASGYTFTNYGMNWVKQAPGQGLKWMGWINTYTGEPTYAEEFKGRFAFSLETSASTAYLQITSLKNEDTATYFCARLGFGNAMDYWGQGTSVTVSSTRDGNEEMGGITQTPYKVSISGTTVILTCPQYPGSEILWQHNDKNIGGDEDDKNIGSDEDHLSLKEFSELEQSGYYVCYPRGSKPEDANFYLYLRARVCENCMEMDVMSVATIVIVDICITGGLLLLVYYWSKNRKAKAKPVTRGAGAGGRQRGQNKERPPPVPNPDYEPIRKGQRDLYSGLNQRRI

SEQ ID NO: 12112 - protein, 420 aa, synthetic construct
MALPVTALLLPLALLLHAARPDIVMTQSPDSLAVSLGERATINCESSQSLLNSGNQKNYLTWYQQKPGQPPKPLIYWASTRESGVPDRFSGSGSGTDFTLTISSLQAEDVAVYYCQNDYSYPYLFGQGTKLEIKRGGGGSGGGGSGGGGSQVQLVQSGSELKKPGASVKISCKASGYTFTNYGMNWVKQAPGQGLKWMGWINTYTGEPTYAEEFKGRFAFSLETSASTAYLQITSLKNEDTATYFCARLGFGNAMDYWGQGTSVTVSSTRFKIPIEELEDRVFVNCNTSITWVEGTVGTLLSDITRLDLGKRILDPRGIYRCNGTDIYKDKESTVQVHYRMCQSCVELDPATVAGIIVTDVIATLLLALGVFCFAGHETGRLSGAADTQALLRNDQVYQPLRDRDDAQYSHLGGNWARNK

SEQ ID NO: 12113 - protein, 430 aa, synthetic construct
MALPVTALLLPLALLLHAARPDIVMTQSPDSLAVSLGERATINCESSQSLLNSGNQKNYLTWYQQKPGQPPKPLIYWASTRESGVPDRFSGSGSGTDFTLTISSLQAEDVAVYYCQNDYSYPYLFGQGTKLEIKRGGGGSGGGGSGGGGSQVQLVQSGSELKKPGASVKISCKASGYTFTNYGMNWVKQAPGQGLKWMGWINTYTGEPTYAEEFKGRFAFSLETSASTAYLQITSLKNEDTATYFCARLGFGNAMDYWGQGTSVTVSSTRQSIKGNHLVKVYDYQEDGSVLLTCDAEAKNITWFKDGKMIGFLTEDKKKWNLGSNAKDPRGMYQCKGSQNKSKPLQVYYRMCQNCIELNAATISGFLFAEIVSIFVLAVGVYFIAGQDGVRQSRASDKQTLLPNDQLYQPLKDREDDQYSHLQGNQLRRN

SEQ ID NO: 12114 - protein, 413 aa, synthetic construct
MALPVTALLLPLALLLHAARPDIVMTQSPDSLAVSLGERATINCESSQSLLNSGNQKNYLTWYQQKPGQPPKPLIYWASTRESGVPDRFSGSGSGTDFTLTISSLQAEDVAVYYCQNDYSYPYLFGQGTKLEIKRGGGGSGGGGSGGGGSQVQLVQSGSELKKPGASVKISCKASGYTFTNYGMNWVKQAPGQGLKWMGWINTYTGEPTYAEEFKGRFAFSLETSASTAYLQITSLKNEDTATYFCARLGFGNAMDYWGQGTSVTVSSTRQSFGLLDPKLCYLLDGILFIYGVILTALFLRVKFSRSADAPAYQQGQNQLYNELNLGRREEYDVLDKRRGRDPEMGGKPQRRKNPQEGLYNELQKDKMAEAYSEIGMKGERRRGKGHDGLYQGLSTATKDTYDALHMQALPPR

SEQ ID NO: 12115 - protein, 455 aa, synthetic construct
MALPVTALLLPLALLLHAARPQVQLVQSGSELKKPGASVKISCKASGYTFTNYGMNWVKQAPGQGLKWMGWINTYTGEPTYAEEFKGRFAFSLETSASTAYLQITSLKNEDTATYFCARLGFGNAMDYWGQGTSVTVSSGGGGSGGGGSGGGGSDIVMTQSPDSLAVSLGERATINCESSQSLLNSGNQKNYLTWYQQKPGQPPKPLIYWASTRESGVPDRFSGSGSGTDFTLTISSLQAEDVAVYYCQNDYSYPYLFGQGTKLEIKRTRDGNEEMGGITQTPYKVSISGTTVILTCPQYPGSEILWQHNDKNIGGDEDDKNIGSDEDHLSLKEFSELEQSGYYVCYPRGSKPEDANFYLYLRARVCENCMEMDVMSVATIVIVDICITGGLLLLVYYWSKNRKAKAKPVTRGAGAGGRQRGQNKERPPPVPNPDYEPIRKGQRDLYSGLNQRRI

SEQ ID NO: 12116 - protein, 420 aa, synthetic construct
MALPVTALLLPLALLLHAARPQVQLVQSGSELKKPGASVKISCKASGYTFTNYGMNWVKQAPGQGLKWMGWINTYTGEPTYAEEFKGRFAFSLETSASTAYLQITSLKNEDTATYFCARLGFGNAMDYWGQGTSVTVSSGGGGSGGGGSGGGGSDIVMTQSPDSLAVSLGERATINCESSQSLLNSGNQKNYLTWYQQKPGQPPKPLIYWASTRESGVPDRFSGSGSGTDFTLTISSLQAEDVAVYYCQNDYSYPYLFGQGTKLEIKRTRFKIPIEELEDRVFVNCNTSITWVEGTVGTLLSDITRLDLGKRILDPRGIYRCNGTDIYKDKESTVQVHYRMCQSCVELDPATVAGIIVTDVIATLLLALGVFCFAGHETGRLSGAADTQALLRNDQVYQPLRDRDDAQYSHLGGNWARNK

SEQ ID NO: 12117 - protein, 430 aa, synthetic construct
MALPVTALLLPLALLLHAARPQVQLVQSGSELKKPGASVKISCKASGYTFTNYGMNWVKQAPGQGLKWMGWINTYTGEPTYAEEFKGRFAFSLETSASTAYLQITSLKNEDTATYFCARLGFGNAMDYWGQGTSVTVSSGGGGSGGGGSGGGGSDIVMTQSPDSLAVSLGERATINCESSQSLLNSGNQKNYLTWYQQKPGQPPKPLIYWASTRESGVPDRFSGSGSGTDFTLTISSLQAEDVAVYYCQNDYSYPYLFGQGTKLEIKRTRQSIKGNHLVKVYDYQEDGSVLLTCDAEAKNITWFKDGKMIGFLTEDKKKWNLGSNAKDPRGMYQCKGSQNKSKPLQVYYRMCQNCIELNAATISGFLFAEIVSIFVLAVGVYFIAGQDGVRQSRASDKQTLLPNDQLYQPLKDREDDQYSHLQGNQLRRN

SEQ ID NO: 12118 - protein, 413 aa, synthetic construct
MALPVTALLLPLALLLHAARPQVQLVQSGSELKKPGASVKISCKASGYTFTNYGMNWVKQAPGQGLKWMGWINTYTGEPTYAEEFKGRFAFSLETSASTAYLQITSLKNEDTATYFCARLGFGNAMDYWGQGTSVTVSSGGGGSGGGGSGGGGSDIVMTQSPDSLAVSLGERATINCESSQSLLNSGNQKNYLTWYQQKPGQPPKPLIYWASTRESGVPDRFSGSGSGTDFTLTISSLQAEDVAVYYCQNDYSYPYLFGQGTKLEIKRTRQSFGLLDPKLCYLLDGILFIYGVILTALFLRVKFSRSADAPAYQQGQNQLYNELNLGRREEYDVLDKRRGRDPEMGGKPQRRKNPQEGLYNELQKDKMAEAYSEIGMKGERRRGKGHDGLYQGLSTATKDTYDALHMQALPPR

SEQ ID NO: 12119 - protein, 508 aa, synthetic construct
MALPVTALLLPLALLLHAARPDIVMTQSPDSLAVSLGERATINCESSQSLLNSGNQKNYLTWYQQKPGQPPKPLIYWASTRESGVPDRFSGSGSGTDFTLTISSLQAEDVAVYYCQNDYSYPYLFGQGTKLEIKRGGGGSGGGGSGGGGSQVQLVQSGSELKKPGASVKISCKASGYTFTNYGMNWVKQAPGQGLKWMGWINTYTGEPTYAEEFKGRFAFSLETSASTAYLQITSLKNEDTATYFCARLGFGNAMDYWGQGTSVTVSSTRGMRTEDLPKAVVFLEPQWYRVLEKDSVTLKCQGAYSPEDNSTQWFHNESLISSQASSYFIDAATVDDSGEYRCQTNLSTLSDPVQLEVHIGWLLLQAPRWVFKEEDPIHLRCHSWKNTALHKVTYLQNGKGRKYFHHNSDFYIPKATLKDSGSYFCRGLVGSKNVSSETVNITITQGLAVPTISSFFPPGYQVSFCLVMVLLFAVDTGLYFSVKTNIRSSTRDWKDHKFKWRKDPQDK

SEQ ID NO: 12120 - protein, 790 aa, synthetic construct
MALPVTALLLPLALLLHAARPDIVMTQSPDSLAVSLGERATINCESSQSLLNSGNQKNYLTWYQQKPGQPPKPLIYWASTRESGVPDRFSGSGSGTDFTLTISSLQAEDVAVYYCQNDYSYPYLFGQGTKLEIKRGGGGSGGGGSGGGGSQVQLVQSGSELKKPGASVKISCKASGYTFTNYGMNWVKQAPGQGLKWMGWINTYTGEPTYAEEFKGRFAFSLETSASTAYLQITSLKNEDTATYFCARLGFGNAMDYWGQGTSVTVSSTRGGSGQQQTLPKPFIWAEPHFMVPKEKQVTICCQGNYGAVEYQLHFEGSLFAVDRPKPPERINKVQFYIPDMNSRMAGQYSCIYRVGELWSEPSNLLDLVVTEMYDTPTLSVHPGPEVISGEKVTFYCRLDTATSMFLLLKEGRSSHVQRGYGKVQAEFPLGPVTTAHRGTYRCFGSYNNHAWSFPSEPVKLLVTGDIENTSLAPEDPTFPADTWGTYLLTTETGLQKDHALWDHTAQNLLRMGLAFLVLVALVWFLVEDWLSRKRTRERASRASTWEGRRRLNTQTLRAKRSGSGVKQTLNFDLLKLAGDVESNPGPSRGHMTEYKPTVRLATRDDVPRAVRTLAAAFADYPATRHTVDPDRHIERVTELQELFLTRVGLDIGKVWVADDGAAVAVWTTPESVEAGAVFAEIGPRMAELSGSRLAAQQQMEGLLAPHRPKEPAWFLATVGVSPDHQGKGLGSAVVLPGVEAAERAGVPAFLETSAPRNLPFYERLGFTVTADVEVPEGPRTWCMTRKPGA

SEQ ID NO: 12121 - protein, 623 aa, synthetic construct
MALPVTALLLPLALLLHAARPDIVMTQSPDSLAVSLGERATINCESSQSLLNSGNQKNYLTWYQQKPGQPPKPLIYWASTRESGVPDRFSGSGSGTDFTLTISSLQAEDVAVYYCQNDYSYPYLFGQGTKLEIKRGGGGSGGGGSGGGGSQVQLVQSGSELKKPGASVKISCKASGYTFTNYGMNWVKQAPGQGLKWMGWINTYTGEPTYAEEFKGRFAFSLETSASTAYLQITSLKNEDTATYFCARLGFGNAMDYWGQGTSVTVSSTRKIEVMYPPPYLDNEKSNGTIIHVKGARGDIENTSLAPEDPTFPADTWGTYLLTTETGLQKDHALWDHTAQNLLRMGLAFLVLVALVWFLVEDWLSRKRTRERASRASTWEGRRRLNTQTLRAKRSGSGVKQTLNFDLLKLAGDVESNPGPSRGHMTEYKPTVRLATRDDVPRAVRTLAAAFADYPATRHTVDPDRHIERVTELQELFLTRVGLDIGKVWVADDGAAVAVWTTPESVEAGAVFAEIGPRMAELSGSRLAAQQQMEGLLAPHRPKEPAWFLATVGVSPDHQGKGLGSAVVLPGVEAAERAGVPAFLETSAPRNLPFYERLGFTVTADVEVPEGPRTWCMTRKPGA

SEQ ID NO: 12122 - protein, 710 aa, synthetic construct
MALPVTALLLPLALLLHAARPDIVMTQSPDSLAVSLGERATINCESSQSLLNSGNQKNYLTWYQQKPGQPPKPLIYWASTRESGVPDRFSGSGSGTDFTLTISSLQAEDVAVYYCQNDYSYPYLFGQGTKLEIKRGGGGSGGGGSGGGGSQVQLVQSGSELKKPGASVKISCKASGYTFTNYGMNWVKQAPGQGLKWMGWINTYTGEPTYAEEFKGRFAFSLETSASTAYLQITSLKNEDTATYFCARLGFGNAMDYWGQGTSVTVSSTRLWVSQPPEIRTLEGSSAFLPCSFNASQGRLAIGSVTWFRDEVVPGKEVRNGTPEFRGRLAPLASSRFLHDHQAELHIRDVRGHDASIYVCRVEVLGLGVGTGNGTRLVVEKEHPQLGAGTVLLLRAGFYAVSFLSVAVGSTVYYQGKCLTWKGPRRQLPAVVPAPLPPPCGSSAHLLPPVPGGRAKRSGSGVKQTLNFDLLKLAGDVESNPGPSRMYRMQLLSCIALSLALVTNSAPTSSSTKKTQLQLEHLLLDLQMILNGINNYKNPKLTEMLTAKFYMPKKATELKHLQCLEEELKPLEEVLNLAQSKNFHLRPRDLISNINVIVLELKGSETTFMCEYADETATIVEFLNRWITFCQSIISTLTKIEVMYPPPYLDNEKSNGTIIHVKGKHLCPSPLFPGPSKPFWVLVVVGGVLACYSLLVTVAFIIFWVRSKRS

SEQ ID NO: 12123 - protein, 686 aa, synthetic construct
MALPVTALLLPLALLLHAARPDIVMTQSPDSLAVSLGERATINCESSQSLLNSGNQKNYLTWYQQKPGQPPKPLIYWASTRESGVPDRFSGSGSGTDFTLTISSLQAEDVAVYYCQNDYSYPYLFGQGTKLEIKRGGGGSGGGGSGGGGSQVQLVQSGSELKKPGASVKISCKASGYTFTNYGMNWVKQAPGQGLKWMGWINTYTGEPTYAEEFKGRFAFSLETSASTAYLQITSLKNEDTATYFCARLGFGNAMDYWGQGTSVTVSSTRLWVSQPPEIRTLEGSSAFLPCSFNASQGRLAIGSVTWFRDEVVPGKEVRNGTPEFRGRLAPLASSRFLHDHQAELHIRDVRGHDASIYVCRVEVLGLGVGTGNGTRLVVEKEHPQLGAGTVLLLRAGFYAVSFLSVAVGSTVYYQGKCLTWKGPRRQLPAVVPAPLPPPCGSSAHLLPPVPGGRAKRSGSGVKQTLNFDLLKLAGDVESNPGPSRGHMTEYKPTVRLATRDDVPRAVRTLAAAFADYPATRHTVDPDRHIERVTELQELFLTRVGLDIGKVWVADDGAAVAVWTTPESVEAGAVFAEIGPRMAELSGSRLAAQQQMEGLLAPHRPKEPAWFLATVGVSPDHQGKGLGSAVVLPGVEAAERAGVPAFLETSAPRNLPFYERLGFTVTADVEVPEGPRTWCMTRKPGA

SEQ ID NO: 12124 - protein, 362 aa, synthetic construct
MALPVTALLLPLALLLHAARPDIVMTQSPDSLAVSLGERATINCESSQSLLNSGNQKNYLTWYQQKPGQPPKPLIYWASTRESGVPDRFSGSGSGTDFTLTISSLQAEDVAVYYCQNDYSYPYLFGQGTKLEIKRGGGGSGGGGSGGGGSQVQLVQSGSELKKPGASVKISCKASGYTFTNYGMNWVKQAPGQGLKWMGWINTYTGEPTYAEEFKGRFAFSLETSASTAYLQITSLKNEDTATYFCARLGFGNAMDYWGQGTSVTVSSTRKIEVMYPPPYLDNEKSNGTIIHVKGARITQGLAVSTISSFFPPGYQVSFCLVMVLLFAVDTGLYFSVKTNIRSSTRDWKDHKFKWRKDPQDK

SEQ ID NO: 12125 - protein, 362 aa, synthetic construct
MALPVTALLLPLALLLHAARPDIVMTQSPDSLAVSLGERATINCESSQSLLNSGNQKNYLTWYQQKPGQPPKPLIYWASTRESGVPDRFSGSGSGTDFTLTISSLQAEDVAVYYCQNDYSYPYLFGQGTKLEIKRGGGGSGGGGSGGGGSQVQLVQSGSELKKPGASVKISCKASGYTFTNYGMNWVKQAPGQGLKWMGWINTYTGEPTYAEEFKGRFAFSLETSASTAYLQITSLKNEDTATYFCARLGFGNAMDYWGQGTSVTVSSTRKIEVMYPPPYLDNEKSNGTIIHVKGARITQGLAVPTISSFFPPGYQVSFCLVMVLLFAVDTGLYFSVKTNIRSSTRDWKDHKFKWRKDPQDK

SEQ ID NO: 12126 - protein, 341 aa, synthetic construct
MALPVTALLLPLALLLHAARPDIVMTQSPDSLAVSLGERATINCESSQSLLNSGNQKNYLTWYQQKPGQPPKPLIYWASTRESGVPDRFSGSGSGTDFTLTISSLQAEDVAVYYCQNDYSYPYLFGQGTKLEIKRGGGGSGGGGSGGGGSQVQLVQSGSELKKPGASVKISCKASGYTFTNYGMNWVKQAPGQGLKWMGWINTYTGEPTYAEEFKGRFAFSLETSASTAYLQITSLKNEDTATYFCARLGFGNAMDYWGQGTSVTVSSTRKIEVMYPPPYLDNEKSNGTIIHVKGARITQGLAVSTISSFSPPGYQVSFCLVMVLLFAVDTGLYFSVKTNI

SEQ ID NO: 12127 - protein, 372 aa, synthetic construct
MALPVTALLLPLALLLHAARPDIVMTQSPDSLAVSLGERATINCESSQSLLNSGNQKNYLTWYQQKPGQPPKPLIYWASTRESGVPDRFSGSGSGTDFTLTISSLQAEDVAVYYCQNDYSYPYLFGQGTKLEIKRGGGGSGGGGSGGGGSQVQLVQSGSELKKPGASVKISCKASGYTFTNYGMNWVKQAPGQGLKWMGWINTYTGEPTYAEEFKGRFAFSLETSASTAYLQITSLKNEDTATYFCARLGFGNAMDYWGQGTSVTVSSTRKIEVMYPPPYLDNEKSNGTIIHVKGARVEKEHPQLGAGTVLLLRAGFYAVSFLSVAVGSTVYYQGKCLTWKGPRRQLPAVVPAPLPPPCGSSAHLLPPVPGG

SEQ ID NO: 12128 - protein, 453 aa, synthetic construct
MALPVTALLLPLALLLHAARPDIVMTQSPDSLAVSLGERATINCESSQSLLNSGNQKNYLTWYQQKPGQPPKPLIYWASTRESGVPDRFSGSGSGTDFTLTISSLQAEDVAVYYCQNDYSYPYLFGQGTKLEIKRGGGGSGGGGSGGGGSQVQLVQSGSELKKPGASVKISCKASGYTFTNYGMNWVKQAPGQGLKWMGWINTYTGEPTYAEEFKGRFAFSLETSASTAYLQITSLKNEDTATYFCARLGFGNAMDYWGQGTSVTVSSTRKIEVMYPPPYLDNEKSNGTIIHVKGARKSVRFYLVVSPASASTQTSWTPRDLVSSQTQTQSCVPPTAGARQAPESPSTIPVPSQPQNSTLRPGPAAPIALVPVFCGLLVAKSLVLSALLVWWGDIWWKTMMELRSLDTQKATCHLQQVTDLPWTSVSSPVEREILYHTVARTKISDDDDEHTL

SEQ ID NO: 12129 - protein, 390 aa, synthetic construct
MALPVTALLLPLALLLHAARPDIVMTQSPDSLAVSLGERATINCESSQSLLNSGNQKNYLTWYQQKPGQPPKPLIYWASTRESGVPDRFSGSGSGTDFTLTISSLQAEDVAVYYCQNDYSYPYLFGQGTKLEIKRGGGGSGGGGSGGGGSQVQLVQSGSELKKPGASVKISCKASGYTFTNYGMNWVKQAPGQGLKWMGWINTYTGEPTYAEEFKGRFAFSLETSASTAYLQITSLKNEDTATYFCARLGFGNAMDYWGQGTSVTVSSTRKIEVMYPPPYLDNEKSNGTIIHVKGARGDIENTSLAPEDPTFPADTWGTYLLTTETGLQKDHALWDHTAQNLLRMGLAFLVLVALVWFLVEDWLSRKRTRERASRASTWEGRRRLNTQTL

SEQ ID NO: 12130 - protein, 986 aa, synthetic construct
MALPVTALLLPLALLLHAARPDIVMTQSPDSLAVSLGERATINCESSQSLLNSGNQKNYLTWYQQKPGQPPKPLIYWASTRESGVPDRFSGSGSGTDFTLTISSLQAEDVAVYYCQNDYSYPYLFGQGTKLEIKRLEGQPKANPTVTLFPPSSEELQANKATLVCLISDFYPGAVTVAWKADGSPVKAGVETTKPSKQSNNKYAASSYLSLTPEQWKSHRSYSCQVTHEGSTVEKTVAPTECSGSQSFGLLDPKLCYLLDGILFIYGVILTALFLRVKFSRSADAPAYQQGQNQLYNELNLGRREEYDVLDKRRGRDPEMGGKPQRRKNPQEGLYNELQKDKMAEAYSEIGMKGERRRGKGHDGLYQGLSTATKDTYDALHMQALPPRRAKRSGSGATNFSLLKQAGDVEENPGPTSMDWIWRILFLVGAATGAHSFEQVQLVQSGSELKKPGASVKISCKASGYTFTNYGMNWVKQAPGQGLKWMGWINTYTGEPTYAEEFKGRFAFSLETSASTAYLQITSLKNEDTATYFCARLGFGNAMDYWGQGTSVTVSSTRASTKGPSVFPLAPSSKSTSGGTAALGCLVKDYFPEPVTVSWNSGALTSGVHTFPAVLQSSGLYSLSSVVTVPSSSLGTQTYICNVNHKPSNTKVDKRVEPKSCGTGDIENTSLAPEDPTFPADTWGTYLLTTETGLQKDHALWDHTAQNLLRMGLAFLVLVALVWFLVEDWLSRKRTRERASRASTWEGRRRLNTQTLRAKRSGSGATNFSLLKQAGDVEENPGPSRGHMTEYKPTVRLATRDDVPRAVRTLAAAFADYPATRHTVDPDRHIERVTELQELFLTRVGLDIGKVWVADDGAAVAVWTTPESVEAGAVFAEIGPRMAELSGSRLAAQQQMEGLLAPHRPKEPAWFLATVGVSPDHQGKGLGSAVVLPGVEAAERAGVPAFLETSAPRNLPFYERLGFTVTADVEVPEGPRTWCMTRKPGA

SEQ ID NO: 12131 - protein, 1052 aa, synthetic construct
MALPVTALLLPLALLLHAARPDIVMTQSPDSLAVSLGERATINCESSQSLLNSGNQKNYLTWYQQKPGQPPKPLIYWASTRESGVPDRFSGSGSGTDFTLTISSLQAEDVAVYYCQNDYSYPYLFGQGTKLEIKRLEGQPKANPTVTLFPPSSEELQANKATLVCLISDFYPGAVTVAWKADGSPVKAGVETTKPSKQSNNKYAASSYLSLTPEQWKSHRSYSCQVTHEGSTVEKTVAPTECSGSQSFGLLDPKLCYLLDGILFIYGVILTALFLRVKFSRSADAPAYQQGQNQLYNELNLGRREEYDVLDKRRGRDPEMGGKPQRRKNPQEGLYNELQKDKMAEAYSEIGMKGERRRGKGHDGLYQGLSTATKDTYDALHMQALPPRRAKRSGSGATNFSLLKQAGDVEENPGPTSMDWIWRILFLVGAATGAHSFEQVQLVQSGSELKKPGASVKISCKASGYTFTNYGMNWVKQAPGQGLKWMGWINTYTGEPTYAEEFKGRFAFSLETSASTAYLQITSLKNEDTATYFCARLGFGNAMDYWGQGTSVTVSSTRASTKGPSVFPLAPSSKSTSGGTAALGCLVKDYFPEPVTVSWNSGALTSGVHTFPAVLQSSGLYSLSSVVTVPSSSLGTQTYICNVNHKPSNTKVDKRVEPKSCGTKSVRFYLVVSPASASTQTSWTPRDLVSSQTQTQSCVPPTAGARQAPESPSTIPVPSQPQNSTLRPGPAAPIALVPVFCGLLVAKSLVLSALLVWWGDIWWKTMMELRSLDTQKATCHLQQVTDLPWTSVSSPVEREILYHTVARTKISDDDDEHTLRAKRSGSGVKQTLNFDLLKLAGDVESNPGPSRGHMTEYKPTVRLATRDDVPRAVRTLAAAFADYPATRHTVDPDRHIERVTELQELFLTRVGLDIGKVWVADDGAAVAVWTTPESVEAGAVFAEIGPRMAELSGSRLAAQQQMEGLLAPHRPKEPAWFLATVGVSPDHQGKGLGSAVVLPGVEAAERAGVPAFLETSAPRNLPFYERLGFTVTADVEVPEGPRTWCMTRKPGA

SEQ ID NO: 12132 - protein, 972 aa, synthetic construct
MALPVTALLLPLALLLHAARPDIVMTQSPDSLAVSLGERATINCESSQSLLNSGNQKNYLTWYQQKPGQPPKPLIYWASTRESGVPDRFSGSGSGTDFTLTISSLQAEDVAVYYCQNDYSYPYLFGQGTKLEIKRLEGQPKANPTVTLFPPSSEELQANKATLVCLISDFYPGAVTVAWKADGSPVKAGVETTKPSKQSNNKYAASSYLSLTPEQWKSHRSYSCQVTHEGSTVEKTVAPTECSGSQSFGLLDPKLCYLLDGILFIYGVILTALFLRVKFSRSADAPAYQQGQNQLYNELNLGRREEYDVLDKRRGRDPEMGGKPQRRKNPQEGLYNELQKDKMAEAYSEIGMKGERRRGKGHDGLYQGLSTATKDTYDALHMQALPPRRAKRSGSGATNFSLLKQAGDVEENPGPTSMDWIWRILFLVGAATGAHSFEQVQLVQSGSELKKPGASVKISCKASGYTFTNYGMNWVKQAPGQGLKWMGWINTYTGEPTYAEEFKGRFAFSLETSASTAYLQITSLKNEDTATYFCARLGFGNAMDYWGQGTSVTVSSTRASTKGPSVFPLAPSSKSTSGGTAALGCLVKDYFPEPVTVSWNSGALTSGVHTFPAVLQSSGLYSLSSVVTVPSSSLGTQTYICNVNHKPSNTKVDKRVEPKSCGTVVEKEHPQLGAGTVLLLRAGFYAVSFLSVAVGSTVYYQGKCLTWKGPRRQLPAVVPAPLPPPCGSSAHLLPPVPGGRAKRSGSGVKQTLNFDLLKLAGDVESNPGPSRGHMTEYKPTVRLATRDDVPRAVRTLAAAFADYPATRHTVDPDRHIERVTELQELFLTRVGLDIGKVWVADDGAAVAVWTTPESVEAGAVFAEIGPRMAELSGSRLAAQQQMEGLLAPHRPKEPAWFLATVGVSPDHQGKGLGSAVVLPGVEAAERAGVPAFLETSAPRNLPFYERLGFTVTADVEVPEGPRTWCMTRKPGA

SEQ ID NO: 12133 - protein, 1001 aa, synthetic construct
MALPVTALLLPLALLLHAARPDIVMTQSPDSLAVSLGERATINCESSQSLLNSGNQKNYLTWYQQKPGQPPKPLIYWASTRESGVPDRFSGSGSGTDFTLTISSLQAEDVAVYYCQNDYSYPYLFGQGTKLEIKRLEDLKNVFPPEVAVFEPSEAEISHTQKATLVCLATGFYPDHVELSWWVNGKEVHSGVSTDPQPLKEQPALNDSRYCLSSRLRVSATFWQNPRNHFRCQVQFYGLSENDEWTQDRAKPVTQIVSAEAWGRADCGSQSFGLLDPKLCYLLDGILFIYGVILTALFLRVKFSRSADAPAYQQGQNQLYNELNLGRREEYDVLDKRRGRDPEMGGKPQRRKNPQEGLYNELQKDKMAEAYSEIGMKGERRRGKGHDGLYQGLSTATKDTYDALHMQALPPRRAKRSGSGATNFSLLKQAGDVEENPGPTSMDWIWRILFLVGAATGAHSFEQVQLVQSGSELKKPGASVKISCKASGYTFTNYGMNWVKQAPGQGLKWMGWINTYTGEPTYAEEFKGRFAFSLETSASTAYLQITSLKNEDTATYFCARLGFGNAMDYWGQGTSVTVSSTRIQNPDPAVYQLRDSKSSDKSVCLFTDFDSQTNVSQSKDSDVYITDKTVLDMRSMDFKSNSAVAWSNKSDFACANAFNNSIIPEDTFFPSPESSCGTGDIENTSLAPEDPTFPADTWGTYLLTTETGLQKDHALWDHTAQNLLRMGLAFLVLVALVWFLVEDWLSRKRTRERASRASTWEGRRRLNTQTLRAKRSGSGATNFSLLKQAGDVEENPGPSRGHMTEYKPTVRLATRDDVPRAVRTLAAAFADYPATRHTVDPDRHIERVTELQELFLTRVGLDIGKVWVADDGAAVAVWTTPESVEAGAVFAEIGPRMAELSGSRLAAQQQMEGLLAPHRPKEPAWFLATVGVSPDHQGKGLGSAVVLPGVEAAERAGVPAFLETSAPRNLPFYERLGFTVTADVEVPEGPRTWCMTRKPGA

SEQ ID NO: 12134 - protein, 1067 aa, synthetic construct
MALPVTALLLPLALLLHAARPDIVMTQSPDSLAVSLGERATINCESSQSLLNSGNQKNYLTWYQQKPGQPPKPLIYWASTRESGVPDRFSGSGSGTDFTLTISSLQAEDVAVYYCQNDYSYPYLFGQGTKLEIKRLEDLKNVFPPEVAVFEPSEAEISHTQKATLVCLATGFYPDHVELSWWVNGKEVHSGVSTDPQPLKEQPALNDSRYCLSSRLRVSATFWQNPRNHFRCQVQFYGLSENDEWTQDRAKPVTQIVSAEAWGRADCGSQSFGLLDPKLCYLLDGILFIYGVILTALFLRVKFSRSADAPAYQQGQNQLYNELNLGRREEYDVLDKRRGRDPEMGGKPQRRKNPQEGLYNELQKDKMAEAYSEIGMKGERRRGKGHDGLYQGLSTATKDTYDALHMQALPPRRAKRSGSGATNFSLLKQAGDVEENPGPTSMDWIWRILFLVGAATGAHSFEQVQLVQSGSELKKPGASVKISCKASGYTFTNYGMNWVKQAPGQGLKWMGWINTYTGEPTYAEEFKGRFAFSLETSASTAYLQITSLKNEDTATYFCARLGFGNAMDYWGQGTSVTVSSTRIQNPDPAVYQLRDSKSSDKSVCLFTDFDSQTNVSQSKDSDVYITDKTVLDMRSMDFKSNSAVAWSNKSDFACANAFNNSIIPEDTFFPSPESSCGTKSVRFYLVVSPASASTQTSWTPRDLVSSQTQTQSCVPPTAGARQAPESPSTIPVPSQPQNSTLRPGPAAPIALVPVFCGLLVAKSLVLSALLVWWGDIWWKTMMELRSLDTQKATCHLQQVTDLPWTSVSSPVEREILYHTVARTKISDDDDEHTLRAKRSGSGVKQTLNFDLLKLAGDVESNPGPSRGHMTEYKPTVRLATRDDVPRAVRTLAAAFADYPATRHTVDPDRHIERVTELQELFLTRVGLDIGKVWVADDGAAVAVWTTPESVEAGAVFAEIGPRMAELSGSRLAAQQQMEGLLAPHRPKEPAWFLATVGVSPDHQGKGLGSAVVLPGVEAAERAGVPAFLETSAPRNLPFYERLGFTVTADVEVPEGPRTWCMTRKPGA

SEQ ID NO: 12135 - protein, 987 aa, synthetic construct
MALPVTALLLPLALLLHAARPDIVMTQSPDSLAVSLGERATINCESSQSLLNSGNQKNYLTWYQQKPGQPPKPLIYWASTRESGVPDRFSGSGSGTDFTLTISSLQAEDVAVYYCQNDYSYPYLFGQGTKLEIKRLEDLKNVFPPEVAVFEPSEAEISHTQKATLVCLATGFYPDHVELSWWVNGKEVHSGVSTDPQPLKEQPALNDSRYCLSSRLRVSATFWQNPRNHFRCQVQFYGLSENDEWTQDRAKPVTQIVSAEAWGRADCGSQSFGLLDPKLCYLLDGILFIYGVILTALFLRVKFSRSADAPAYQQGQNQLYNELNLGRREEYDVLDKRRGRDPEMGGKPQRRKNPQEGLYNELQKDKMAEAYSEIGMKGERRRGKGHDGLYQGLSTATKDTYDALHMQALPPRRAKRSGSGATNFSLLKQAGDVEENPGPTSMDWIWRILFLVGAATGAHSFEQVQLVQSGSELKKPGASVKISCKASGYTFTNYGMNWVKQAPGQGLKWMGWINTYTGEPTYAEEFKGRFAFSLETSASTAYLQITSLKNEDTATYFCARLGFGNAMDYWGQGTSVTVSSTRIQNPDPAVYQLRDSKSSDKSVCLFTDFDSQTNVSQSKDSDVYITDKTVLDMRSMDFKSNSAVAWSNKSDFACANAFNNSIIPEDTFFPSPESSCGTVVEKEHPQLGAGTVLLLRAGFYAVSFLSVAVGSTVYYQGKCLTWKGPRRQLPAVVPAPLPPPCGSSAHLLPPVPGGRAKRSGSGVKQTLNFDLLKLAGDVESNPGPSRGHMTEYKPTVRLATRDDVPRAVRTLAAAFADYPATRHTVDPDRHIERVTELQELFLTRVGLDIGKVWVADDGAAVAVWTTPESVEAGAVFAEIGPRMAELSGSRLAAQQQMEGLLAPHRPKEPAWFLATVGVSPDHQGKGLGSAVVLPGVEAAERAGVPAFLETSAPRNLPFYERLGFTVTADVEVPEGPRTWCMTRKPGA

SEQ ID NO: 12136 - protein, 958 aa, synthetic construct
MALPVTALLLPLALLLHAARPDIVMTQSPDSLAVSLGERATINCESSQSLLNSGNQKNYLTWYQQKPGQPPKPLIYWASTRESGVPDRFSGSGSGTDFTLTISSLQAEDVAVYYCQNDYSYPYLFGQGTKLEIKRLEGQPKANPTVTLFPPSSEELQANKATLVCLISDFYPGAVTVAWKADGSPVKAGVETTKPSKQSNNKYAASSYLSLTPEQWKSHRSYSCQVTHEGSTVEKTVAPTECSGSQSFGLLDPKLCYLLDGILFIYGVILTALFLRVKFSRSADAPAYQQGQNQLYNELNLGRREEYDVLDKRRGRDPEMGGKPQRRKNPQEGLYNELQKDKMAEAYSEIGMKGERRRGKGHDGLYQGLSTATKDTYDALHMQALPPRRAKRSGSGATNFSLLKQAGDVEENPGPTSMDWIWRILFLVGAATGAHSFEQVQLVQSGSELKKPGASVKISCKASGYTFTNYGMNWVKQAPGQGLKWMGWINTYTGEPTYAEEFKGRFAFSLETSASTAYLQITSLKNEDTATYFCARLGFGNAMDYWGQGTSVTVSSTRASTKGPSVFPLAPSSKSTSGGTAALGCLVKDYFPEPVTVSWNSGALTSGVHTFPAVLQSSGLYSLSSVVTVPSSSLGTQTYICNVNHKPSNTKVDKRVEPKSCGTITQGLAVSTISSFFPPGYQVSFCLVMVLLFAVDTGLYFSVKTNIRSSTRDWKDHKFKWRKDPQDKRAKRSGSGATNFSLLKQAGDVEENPGPSRGHMTEYKPTVRLATRDDVPRAVRTLAAAFADYPATRHTVDPDRHIERVTELQELFLTRVGLDIGKVWVADDGAAVAVWTTPESVEAGAVFAEIGPRMAELSGSRLAAQQQMEGLLAPHRPKEPAWFLATVGVSPDHQGKGLGSAVVLPGVEAAERAGVPAFLETSAPRNLPFYERLGFTVTADVEVPEGPRTWCMTRKPGA

SEQ ID NO: 12137 - protein, 973 aa, synthetic construct
MALPVTALLLPLALLLHAARPDIVMTQSPDSLAVSLGERATINCESSQSLLNSGNQKNYLTWYQQKPGQPPKPLIYWASTRESGVPDRFSGSGSGTDFTLTISSLQAEDVAVYYCQNDYSYPYLFGQGTKLEIKRLEDLKNVFPPEVAVFEPSEAEISHTQKATLVCLATGFYPDHVELSWWVNGKEVHSGVSTDPQPLKEQPALNDSRYCLSSRLRVSATFWQNPRNHFRCQVQFYGLSENDEWTQDRAKPVTQIVSAEAWGRADCGSQSFGLLDPKLCYLLDGILFIYGVILTALFLRVKFSRSADAPAYQQGQNQLYNELNLGRREEYDVLDKRRGRDPEMGGKPQRRKNPQEGLYNELQKDKMAEAYSEIGMKGERRRGKGHDGLYQGLSTATKDTYDALHMQALPPRRAKRSGSGATNFSLLKQAGDVEENPGPTSMDWIWRILFLVGAATGAHSFEQVQLVQSGSELKKPGASVKISCKASGYTFTNYGMNWVKQAPGQGLKWMGWINTYTGEPTYAEEFKGRFAFSLETSASTAYLQITSLKNEDTATYFCARLGFGNAMDYWGQGTSVTVSSTRIQNPDPAVYQLRDSKSSDKSVCLFTDFDSQTNVSQSKDSDVYITDKTVLDMRSMDFKSNSAVAWSNKSDFACANAFNNSIIPEDTFFPSPESSCGTITQGLAVSTISSFFPPGYQVSFCLVMVLLFAVDTGLYFSVKTNIRSSTRDWKDHKFKWRKDPQDKRAKRSGSGATNFSLLKQAGDVEENPGPSRGHMTEYKPTVRLATRDDVPRAVRTLAAAFADYPATRHTVDPDRHIERVTELQELFLTRVGLDIGKVWVADDGAAVAVWTTPESVEAGAVFAEIGPRMAELSGSRLAAQQQMEGLLAPHRPKEPAWFLATVGVSPDHQGKGLGSAVVLPGVEAAERAGVPAFLETSAPRNLPFYERLGFTVTADVEVPEGPRTWCMTRKPGA

SEQ ID NO: 12138 - protein, 656 aa, synthetic construct
MALPVTALLLPLALLLHAARPDIVMTQSPDSLAVSLGERATINCESSQSLLNSGNQKNYLTWYQQKPGQPPKPLIYWASTRESGVPDRFSGSGSGTDFTLTISSLQAEDVAVYYCQNDYSYPYLFGQGTKLEIKRLEGQPKANPTVTLFPPSSEELQANKATLVCLISDFYPGAVTVAWKADGSPVKAGVETTKPSKQSNNKYAASSYLSLTPEQWKSHRSYSCQVTHEGSTVEKTVAPTECSGSLGEPQLCYILDAILFLYGIVLTLLYCRLKIQVRKAAITSYEKSDGVYTGLSTRNQETYETLKHEKPPQRAKRSGSGATNFSLLKQAGDVEENPGPTSMDWIWRILFLVGAATGAHSFEQVQLVQSGSELKKPGASVKISCKASGYTFTNYGMNWVKQAPGQGLKWMGWINTYTGEPTYAEEFKGRFAFSLETSASTAYLQITSLKNEDTATYFCARLGFGNAMDYWGQGTSVTVSSTRASTKGPSVFPLAPSSKSTSGGTAALGCLVKDYFPEPVTVSWNSGALTSGVHTFPAVLQSSGLYSLSSVVTVPSSSLGTQTYICNVNHKPSNTKVDKRVEPKSCGTLGEPQLCYILDAILFLYGIVLTLLYCRLKIQVRKAAITSYEKSDGVYTGLSTRNQETYETLKHEKPPQ

SEQ ID NO: 12139 - protein, 494 aa, synthetic construct
MALPVTALLLPLALLLHAARPDIVMTQSPATLSVSPGERATLSCRASQSVSNDVVWYQQKPGQAPRLLIYYASNRYTGIPARFSGSGSGTEFTLTISSLQSEDFAVYYCQQDYTSPWTFGQGTKLEIKRGGGGSGGGGSGGGGSEVQLVQSGAEVKKPGASVRVSCKASGYTFTNYGMNWVRQAPGQGLEWMGWINTYTGEPTYADDFKGRVTMTTDTSTSTAYMELRSLRSDDTAVYYCARIGDSSPSDYWGQGTLVTVSSTREQKLISEEDLKIEVMYPPPYLDNEKSNGTIIHVKGKHLCPSPLFPGPSKPFWVLVVVGGVLACYSLLVTVAFIIFWVRSKRSRLLHSDYMNMTPRRPGPTRKHYQPYAPPRDFAAYRSRVKFSRSADAPAYQQGQNQLYNELNLGRREEYDVLDKRRGRDPEMGGKPRRKNPQEGLYNELQKDKMAEAYSEIGMKGERRRGKGHDGLYQGLSTATKDTYDALHMQALPPR

SEQ ID NO: 12140 - protein, 500 aa, synthetic construct
MALPVTALLLPLALLLHAARPDIVMTQSPATLSVSPGERATLSCRASQSVSNDVVWYQQKPGQAPRLLIYYASNRYTGIPARFSGSGSGTEFTLTISSLQSEDFAVYYCQQDYTSPWTFGQGTKLEIKRGGGGSGGGGSGGGGSEVQLVQSGAEVKKPGASVRVSCKASGYTFTNYGMNWVRQAPGQGLEWMGWINTYTGEPTYADDFKGRVTMTTDTSTSTAYMELRSLRSDDTAVYYCARIGDSSPSDYWGQGTLVTVSSTREQKLISEEDLAKPTTTPAPRPPTPAPTIASQPLSLRPEACRPAAGGAVHTRGLDFACDIYIWAPLAGTCGVLLLSLVITLYCKRGRKKLLYIFKQPFMRPVQTTQEEDGCSCRFPEEEEGGCELRVKFSRSADAPAYQQGQNQLYNELNLGRREEYDVLDKRRGRDPEMGGKPRRKNPQEGLYNELQKDKMAEAYSEIGMKGERRRGKGHDGLYQGLSTATKDTYDALHMQALPPR

SEQ ID NO: 12141 - protein, 500 aa, synthetic construct
MALPVTALLLPLALLLHAARPEVQLVQSGAEVKKPGASVRVSCKASGYTFTNYGMNWVRQAPGQGLEWMGWINTYTGEPTYADDFKGRVTMTTDTSTSTAYMELRSLRSDDTAVYYCARIGDSSPSDYWGQGTLVTVSSGGGGSGGGGSGGGGSDIVMTQSPATLSVSPGERATLSCRASQSVSNDVVWYQQKPGQAPRLLIYYASNRYTGIPARFSGSGSGTEFTLTISSLQSEDFAVYYCQQDYTSPWTFGQGTKLEIKRTREQKLISEEDLAKPTTTPAPRPPTPAPTIASQPLSLRPEACRPAAGGAVHTRGLDFACDIYIWAPLAGTCGVLLLSLVITLYCKRGRKKLLYIFKQPFMRPVQTTQEEDGCSCRFPEEEEGGCELRVKFSRSADAPAYQQGQNQLYNELNLGRREEYDVLDKRRGRDPEMGGKPRRKNPQEGLYNELQKDKMAEAYSEIGMKGERRRGKGHDGLYQGLSTATKDTYDALHMQALPPR

SEQ ID NO: 12142 - protein, 913 aa, synthetic construct
MALPVTALLLPLALLLHAARPDIVMTQSPATLSVSPGERATLSCRASQSVSNDVVWYQQKPGQAPRLLIYYASNRYTGIPARFSGSGSGTEFTLTISSLQSEDFAVYYCQQDYTSPWTFGQGTKLEIKRGGGGSGGGGSGGGGSEVQLVQSGAEVKKPGASVRVSCKASGYTFTNYGMNWVRQAPGQGLEWMGWINTYTGEPTYADDFKGRVTMTTDTSTSTAYMELRSLRSDDTAVYYCARIGDSSPSDYWGQGTLVTVSSTREQKLISEEDLAKPTTTPAPRPPTPAPTIASQPLSLRPEACRPAAGGAVHTRGLDFACDIYIWAPLAGTCGVLLLSLVITLYCGRARVKFSRSADAPAYQQGQNQLYNELNLGRREEYDVLDKRRGRDPEMGGKPRRKNPQEGLYNELQKDKMAEAYSEIGMKGERRRGKGHDGLYQGLSTATKDTYDALHMQALPPRSRGSGATNFSLLKQAGDVEENPGPGIHMATYEVLCEVARKLGTDDREVVLFLLNVFIPQPTLAQLIGALRALKEEGRLTFPLLAECLFRAGRRDLLRDLLHLDPRFLERHLAGTMSYFSPYQLTVLHVDGELCARDIRSLIFLSKDTIGSRSTPQTFLHWVYCMENLDLLGPTDVDALMSMLRSLSRVDLQRQVQTLMGLHLSGPSHSQHYRHTPLETDFYDYKDDDDKTSGSGEGRGSLLTCGDVEENPGPHMTEYKPTVRLATRDDVPRAVRTLAAAFADYPATRHTVDPDRHIERVTELQELFLTRVGLDIGKVWVADDGAAVAVWTTPESVEAGAVFAEIGPRMAELSGSRLAAQQQMEGLLAPHRPKEPAWFLATVGVSPDHQGKGLGSAVVLPGVEAAERAGVPAFLETSAPRNLPFYERLGFTVTADVEVPEGPRTWCMTRKPGA

SEQ ID NO: 12143 - protein, 853 aa, synthetic construct
MALPVTALLLPLALLLHAARPDIVMTQSPATLSVSPGERATLSCRASQSVSNDVVWYQQKPGQAPRLLIYYASNRYTGIPARFSGSGSGTEFTLTISSLQSEDFAVYYCQQDYTSPWTFGQGTKLEIKRLEIQNPDPAVYQLRDSKSSDKSVCLFTDFDSQTNVSQSKDSDVYITDKCVLDMRSMDFKSNSAVAWSNKSDFACANAFNNSIIPEDTFFPSSDVPCDVKLVEKSFETDTNLNFQNLSVIGFRILLLKVAGFNLLMTLRLWSSRAKRSGSGVKQTLNFDLLKLAGDVESNPGPTSMDWIWRILFLVGAATGAHSFEEVQLVQSGAEVKKPGASVRVSCKASGYTFTNYGMNWVRQAPGQGLEWMGWINTYTGEPTYADDFKGRVTMTTDTSTSTAYMELRSLRSDDTAVYYCARIGDSSPSDYWGQGTLVTVSSTREDLKNVFPPEVAVFEPSKAEIAHTQKATLVCLATGFYPDHVELSWWVNGKEVHSGVCTDPQPLKEQPALNDSRYCLSSRLRVSATFWQNPRNHFRCQVQFYGLSENDEWTQDRAKPVTQIVSAEAWGRADCGITSASYHQGVLSATILYEILLGKATLYAVLVSALVLMAMVKRKDSRGRAKRSGSGATNFSLLKQAGDVEENPGPSRGHMTEYKPTVRLATRDDVPRAVRTLAAAFADYPATRHTVDPDRHIERVTELQELFLTRVGLDIGKVWVADDGAAVAVWTTPESVEAGAVFAEIGPRMAELSGSRLAAQQQMEGLLAPHRPKEPAWFLATVGVSPDHQGKGLGSAVVLPGVEAAERAGVPAFLETSAPRNLPFYERLGFTVTADVEVPEGPRTWCMTRKPGA

SEQ ID NO: 12144 - protein, 852 aa, synthetic construct
MALPVTALLLPLALLLHAARPDIVMTQSPATLSVSPGERATLSCRASQSVSNDVVWYQQKPGQAPRLLIYYASNRYTGIPARFSGSGSGTEFTLTISSLQSEDFAVYYCQQDYTSPWTFGQGTKLEIKRLEDLKNVFPPEVAVFEPSKAEIAHTQKATLVCLATGFYPDHVELSWWVNGKEVHSGVCTDPQPLKEQPALNDSRYCLSSRLRVSATFWQNPRNHFRCQVQFYGLSENDEWTQDRAKPVTQIVSAEAWGRADCGITSASYHQGVLSATILYEILLGKATLYAVLVSALVLMAMVKRKDSRGRAKRSGSGATNFSLLKQAGDVEENPGPTSMDWIWRILFLVGAATGAHSFEEVQLVQSGAEVKKPGASVRVSCKASGYTFTNYGMNWVRQAPGQGLEWMGWINTYTGEPTYADDFKGRVTMTTDTSTSTAYMELRSLRSDDTAVYYCARIGDSSPSDYWGQGTLVTVSSTRIQNPDPAVYQLRDSKSSDKSVCLFTDFDSQTNVSQSKDSDVYITDKCVLDMRSMDFKSNSAVAWSNKSDFACANAFNNSIIPEDTFFPSSDVPCDVKLVEKSFETDTNLNFQNLSVIGFRILLLKVAGFNLLMTLRLWSSRAKRSGSGVKQTLNFDLLKLAGDVESNPGPSRGHMTEYKPTVRLATRDDVPRAVRTLAAAFADYPATRHTVDPDRHIERVTELQELFLTRVGLDIGKVWVADDGAAVAVWTTPESVEAGAVFAEIGPRMAELSGSRLAAQQQMEGLLAPHRPKEPAWFLATVGVSPDHQGKGLGSAVVLPGVEAAERAGVPAFLETSAPRNLPFYERLGFTVTADVEVPEGPRTWCMTRKPGA

SEQ ID NO: 12145 - protein, 619 aa, synthetic construct
MALPVTALLLPLALLLHAARPDIVMTQSPATLSVSPGERATLSCRASQSVSNDVVWYQQKPGQAPRLLIYYASNRYTGIPARFSGSGSGTEFTLTISSLQSEDFAVYYCQQDYTSPWTFGQGTKLEIKRLEDLKNVFPPEVAVFEPSEAEISHTQKATLVCLATGFYPDHVELSWWVNGKEVHSGVCTDPQPLKEQPALNDSRYCLSSRLRVSATFWQNPRNHFRCQVQFYGLSENDEWTQDRAKPVTQIVSAEAWGRADCGFTSESYQQGVLSATILYEILLGKATLYAVLVSALVLMAMVKRKDSRGRAKRSGSGATNFSLLKQAGDVEENPGPTSMDWIWRILFLVGAATGAHSFEEVQLVQSGAEVKKPGASVRVSCKASGYTFTNYGMNWVRQAPGQGLEWMGWINTYTGEPTYADDFKGRVTMTTDTSTSTAYMELRSLRSDDTAVYYCARIGDSSPSDYWGQGTLVTVSSTRIQNPDPAVYQLRDSKSSDKSVCLFTDFDSQTNVSQSKDSDVYITDKCVLDMRSMDFKSNSAVAWSNKSDFACANAFNNSIIPEDTFFPSPESSCDVKLVEKSFETDTNLNFQNLSVIGFRILLLKVAGFNLLMTLRLWSS

SEQ ID NO: 12146 - protein, 844 aa, synthetic construct
MALPVTALLLPLALLLHAARPDIVMTQSPATLSVSPGERATLSCRASQSVSNDVVWYQQKPGQAPRLLIYYASNRYTGIPARFSGSGSGTEFTLTISSLQSEDFAVYYCQQDYTSPWTFGQGTKLEIKRLEDLKNVFPPEVAVFEPSEAEISHTQKATLVCLATGFYPDHVELSWWVNGKEVHSGVCTDPQPLKEQPALNDSRYCLSSRLRVSATFWQNPRNHFRCQVQFYGLSENDEWTQDRAKPVTQIVSAEAWGRADCGFTSESYQQGVLSATILYEILLGKATLYAVLVSALVLMAMVKRKDSRGRAKRSGSGATNFSLLKQAGDVEENPGPTSMDWIWRILFLVGAATGAHSFEEVQLVQSGAEVKKPGASVRVSCKASGYTFTNYGMNWVRQAPGQGLEWMGWINTYTGEPTYADDFKGRVTMTTDTSTSTAYMELRSLRSDDTAVYYCARIGDSSPSDYWGQGTLVTVSSTRIQNPDPAVYQLRDSKSSDKSVCLFTDFDSQTNVSQSKDSDVYITDKCVLDMRSMDFKSNSAVAWSNKSDFACANAFNNSIIPEDTFFPSPESSCDVKLVEKSFETDTNLNFQNLSVIGFRILLLKVAGFNLLMTLRLWSSRAKRSGSGVKQTLNFDLLKLAGDVESNPGPSRGGIHTMATYEVLCEVARKLGTDDREVVLFLLNVFIPQPTLAQLIGALRALKEEGRLTFPLLAECLFRAGRRDLLRDLLHLDPRFLERHLAGTMSYFSPYQLTVLHVDGELCARDIRSLIFLSKDTIGSRSTPQTFLHWVYCMENLDLLGPTDVDALMSMLRSLSRVDLQRQVQTLMGLHLSGPSHSQHYRHTP

SEQ ID NO: 12147 - protein, 623 aa, synthetic construct
MALPVTALLLPLALLLHAARPDIVMTQSPATLSVSPGERATLSCRASQSVSNDVVWYQQKPGQAPRLLIYYASNRYTGIPARFSGSGSGTEFTLTISSLQSEDFAVYYCQQDYTSPWTFGQGTKLEIKRLEIQNPDPAVYQLRDSKSSDKSVCLFTDFDSQTNVSQSKDSDVYITDKCVLDMRSMDFKSNSAVAWSNKSDFACANAFNNSIIPEDTFFPSPESSCDVKLVEKSFETDTNLNFQNLSVIGFRILLLKVAGFNLLMTLRLWSSRAKRSGSGVKQTLNFDLLKLAGDVESNPGPTSMDWIWRILFLVGAATGAHSFEEVQLVQSGAEVKKPGASVRVSCKASGYTFTNYGMNWVRQAPGQGLEWMGWINTYTGEPTYADDFKGRVTMTTDTSTSTAYMELRSLRSDDTAVYYCARIGDSSPSDYWGQGTLVTVSSTREDLKNVFPPEVAVFEPSEAEISHTQKATLVCLATGFYPDHVELSWWVNGKEVHSGVCTDPQPLKEQPALNDSRYCLSSRLRVSATFWQNPRNHFRCQVQFYGLSENDEWTQDRAKPVTQIVSAEAWGRADCGFTSESYQQGVLSATILYEILLGKATLYAVLVSALVLMAMVKRKDSRG

SEQ ID NO: 12148 - protein, 845 aa, synthetic construct
MALPVTALLLPLALLLHAARPDIVMTQSPATLSVSPGERATLSCRASQSVSNDVVWYQQKPGQAPRLLIYYASNRYTGIPARFSGSGSGTEFTLTISSLQSEDFAVYYCQQDYTSPWTFGQGTKLEIKRLEIQNPDPAVYQLRDSKSSDKSVCLFTDFDSQTNVSQSKDSDVYITDKCVLDMRSMDFKSNSAVAWSNKSDFACANAFNNSIIPEDTFFPSPESSCDVKLVEKSFETDTNLNFQNLSVIGFRILLLKVAGFNLLMTLRLWSSRAKRSGSGVKQTLNFDLLKLAGDVESNPGPTSMDWIWRILFLVGAATGAHSFEEVQLVQSGAEVKKPGASVRVSCKASGYTFTNYGMNWVRQAPGQGLEWMGWINTYTGEPTYADDFKGRVTMTTDTSTSTAYMELRSLRSDDTAVYYCARIGDSSPSDYWGQGTLVTVSSTREDLKNVFPPEVAVFEPSEAEISHTQKATLVCLATGFYPDHVELSWWVNGKEVHSGVCTDPQPLKEQPALNDSRYCLSSRLRVSATFWQNPRNHFRCQVQFYGLSENDEWTQDRAKPVTQIVSAEAWGRADCGFTSESYQQGVLSATILYEILLGKATLYAVLVSALVLMAMVKRKDSRGRAKRSGSGATNFSLLKQAGDVEENPGPSRGGIHTMATYEVLCEVARKLGTDDREVVLFLLNVFIPQPTLAQLIGALRALKEEGRLTFPLLAECLFRAGRRDLLRDLLHLDPRFLERHLAGTMSYFSPYQLTVLHVDGELCARDIRSLIFLSKDTIGSRSTPQTFLHWVYCMENLDLLGPTDVDALMSMLRSLSRVDLQRQVQTLMGLHLSGPSHSQHYRHTP

SEQ ID NO: 12149 - protein, 897 aa, synthetic construct
MALPVTALLLPLALLLHAARPLEGKPIPNPLLGLDSTGSGEDLKNVFPPEVAVFEPSKAEIAHTQKATLVCLATGFYPDHVELSWWVNGKEVHSGVCTDPQPLKEQPALNDSRYCLSSRLRVSATFWQNPRNHFRCQVQFYGLSENDEWTQDRAKPVTQIVSAEAWGRADCGITSASYHQGVLSATILYEILLGKATLYAVLVSALVLMAMVKRKDSRGRAKRSGSGATNFSLLKQAGDVEENPGPTSMALPVTALLLPLALLLHAARPDIVMTQSPATLSVSPGERATLSCRASQSVSNDVVWYQQKPGQAPRLLIYYASNRYTGIPARFSGSGSGTEFTLTISSLQSEDFAVYYCQQDYTSPWTFGQGTKLEIKRGGGGSGGGGSGGGGSEVQLVQSGAEVKKPGASVRVSCKASGYTFTNYGMNWVRQAPGQGLEWMGWINTYTGEPTYADDFKGRVTMTTDTSTSTAYMELRSLRSDDTAVYYCARIGDSSPSDYWGQGTLVTVSSTREQKLISEEDGSGIQNPDPAVYQLRDSKSSDKSVCLFTDFDSQTNVSQSKDSDVYITDKCVLDMRSMDFKSNSAVAWSNKSDFACANAFNNSIIPEDTFFPSSDVPCDVKLVEKSFETDTNLNFQNLSVIGFRILLLKVAGFNLLMTLRLWSSRAKRSGSGVKQTLNFDLLKLAGDVESNPGPSRGHMTEYKPTVRLATRDDVPRAVRTLAAAFADYPATRHTVDPDRHIERVTELQELFLTRVGLDIGKVWVADDGAAVAVWTTPESVEAGAVFAEIGPRMAELSGSRLAAQQQMEGLLAPHRPKEPAWFLATVGVSPDHQGKGLGSAVVLPGVEAAERAGVPAFLETSAPRNLPFYERLGFTVTADVEVPEGPRTWCMTRKPGA

SEQ ID NO: 12150 - protein, 898 aa, synthetic construct
MALPVTALLLPLALLLHAARPLEQKLISEEDLGSGDRPDPAVYQLRDSKSSDKSVCLFTDFDSQTNVSQSKDSDVYITDKCVLDMRSMDFKSNSAVAWSNKSDFACANAFNNSIIPEDTFFPSPESSCDVKLVEKSFETDTNLNFQNLSVIGFRILLLKVAGFNLLMTLRLWSSSSRAKRSGSGVKQTLNFDLLKLAGDVESNPGPTSMALPVTALLLPLALLLHAARPDIVMTQSPATLSVSPGERATLSCRASQSVSNDVVWYQQKPGQAPRLLIYYASNRYTGIPARFSGSGSGTEFTLTISSLQSEDFAVYYCQQDYTSPWTFGQGTKLEIKRGGGGSGGGGSGGGGSEVQLVQSGAEVKKPGASVRVSCKASGYTFTNYGMNWVRQAPGQGLEWMGWINTYTGEPTYADDFKGRVTMTTDTSTSTAYMELRSLRSDDTAVYYCARIGDSSPSDYWGQGTLVTVSSTRGKPIPNPLLGLDSTGSGEDLKNVFPPEVAVFEPSEAEISHTQKATLVCLATGFYPDHVELSWWVNGKEVHSGVCTDPQPLKEQPALNDSRYCLSSRLRVSATFWQNPRNHFRCQVQFYGLSENDEWTQDRAKPVTQIVSAEAWGRADCGFTSESYQQGVLSATILYEILLGKATLYAVLVSALVLMAMVKRKDSRGRAKRSGSGATNFSLLKQAGDVEENPGPSRGHMTEYKPTVRLATRDDVPRAVRTLAAAFADYPATRHTVDPDRHIERVTELQELFLTRVGLDIGKVWVADDGAAVAVWTTPESVEAGAVFAEIGPRMAELSGSRLAAQQQMEGLLAPHRPKEPAWFLATVGVSPDHQGKGLGSAVVLPGVEAAERAGVPAFLETSAPRNLPFYERLGFTVTADVEVPEGPRTWCMTRKPGA

SEQ ID NO: 12151 - protein, 852 aa, synthetic construct
MALPVTALLLPLALLLHAARPDIVMTQSPATLSVSPGERATLSCRASQSVSNDVVWYQQKPGQAPRLLIYYASNRYTGIPARFSGSGSGTEFTLTISSLQSEDFAVYYCQQDYTSPWTFGQGTKLEIKRLEDLKNVFPPEVAVFEPSEAEISHTQKATLVCLATGFYPDHVELSWWVNGKEVHSGVSTDPQPLKEQPALNDSRYCLSSRLRVSATFWQNPRNHFRCQVQFYGLSENDEWTQDRAKPVTQIVSAEAWGRADCGFTSESYQQGVLSATILYEILLGKATLYAVLVSALVLMAMVKRKDSRGRAKRSGSGATNFSLLKQAGDVEENPGPTSMDWIWRILFLVGAATGAHSFEEVQLVQSGAEVKKPGASVRVSCKASGYTFTNYGMNWVRQAPGQGLEWMGWINTYTGEPTYADDFKGRVTMTTDTSTSTAYMELRSLRSDDTAVYYCARIGDSSPSDYWGQGTLVTVSSTRIQNPDPAVYQLRDSKSSDKSVCLFTDFDSQTNVSQSKDSDVYITDKTVLDMRSMDFKSNSAVAWSNKSDFACANAFNNSIIPEDTFFPSPESSCDVKLVEKSFETDTNLNFQNLSVIGFRILLLKVAGFNLLMTLRLWSSRAKRSGSGVKQTLNFDLLKLAGDVESNPGPSRGHMTEYKPTVRLATRDDVPRAVRTLAAAFADYPATRHTVDPDRHIERVTELQELFLTRVGLDIGKVWVADDGAAVAVWTTPESVEAGAVFAEIGPRMAELSGSRLAAQQQMEGLLAPHRPKEPAWFLATVGVSPDHQGKGLGSAVVLPGVEAAERAGVPAFLETSAPRNLPFYERLGFTVTADVEVPEGPRTWCMTRKPGA

SEQ ID NO: 12152 - protein, 934 aa, synthetic construct
MALPVTALLLPLALLLHAARPDIVMTQSPATLSVSPGERATLSCRASQSVSNDVVWYQQKPGQAPRLLIYYASNRYTGIPARFSGSGSGTEFTLTISSLQSEDFAVYYCQQDYTSPWTFGQGTKLEIKRLEDLKNVFPPEVAVFEPSEAEISHTQKATLVCLATGFYPDHVELSWWVNGKEVHSGVSTDPQPLKEQPALNDSRYCLSSRLRVSATFWQNPRNHFRCQVQFYGLSENDEWTQDRAKPVTQIVSAEAWGRADCGFTSESYQQGVLSATILYEILLGKATLYAVLVSALVLMAMVKRKDSRGRAKRSGSGATNFSLLKQAGDVEENPGPTSMDWIWRILFLVGAATGAHSFEEVQLVQSGAEVKKPGASVRVSCKASGYTFTNYGMNWVRQAPGQGLEWMGWINTYTGEPTYADDFKGRVTMTTDTSTSTAYMELRSLRSDDTAVYYCARIGDSSPSDYWGQGTLVTVSSTREQKLISEEDGSGTPFPSLAPPIMLLVDGKQQMVVVCLVLDVAPPGLDSPIWFSAGNGSALDAFTYGPSPATDGTWTNLAHLSLPSEELASWEPLVCHTGPGAEGHSRSTQPMHLSGEASTARTCPQEPLRGTPGGALWLGVLRLLLFKLLLFDLLLTCSCLCDPAGPLPSPATTTRLRALGSHRLHPATETGGREATSSPRPQPRDRRWGDTPPGRKPGSPVRAKRSGSGVKQTLNFDLLKLAGDVESNPGPSRGHMTEYKPTVRLATRDDVPRAVRTLAAAFADYPATRHTVDPDRHIERVTELQELFLTRVGLDIGKVWVADDGAAVAVWTTPESVEAGAVFAEIGPRMAELSGSRLAAQQQMEGLLAPHRPKEPAWFLATVGVSPDHQGKGLGSAVVLPGVEAAERAGVPAFLETSAPRNLPFYERLGFTVTADVEVPEGPRTWCMTRKPGA

SEQ ID NO: 12153 - protein, 952 aa, synthetic construct
MALPVTALLLPLALLLHAARPLEDLKNVFPPEVAVFEPSEAEISHTQKATLVCLATGFYPDHVELSWWVNGKEVHSGVSTDPQPLKEQPALNDSRYCLSSRLRVSATFWQNPRNHFRCQVQFYGLSENDEWTQDRAKPVTQIVSAEAWGRADCGFTSESYQQGVLSATILYEILLGKATLYAVLVSALVLMAMVKRKDSRGRAKRSGSGATNFSLLKQAGDVEENPGPTSMALPVTALLLPLALLLHAARPDIVMTQSPATLSVSPGERATLSCRASQSVSNDVVWYQQKPGQAPRLLIYYASNRYTGIPARFSGSGSGTEFTLTISSLQSEDFAVYYCQQDYTSPWTFGQGTKLEIKRGGGGSGGGGSGGGGSEVQLVQSGAEVKKPGASVRVSCKASGYTFTNYGMNWVRQAPGQGLEWMGWINTYTGEPTYADDFKGRVTMTTDTSTSTAYMELRSLRSDDTAVYYCARIGDSSPSDYWGQGTLVTVSSTREQKLISEEDLGSGTPFPSLAPPIMLLVDGKQQMVVVCLVLDVAPPGLDSPIWFSAGNGSALDAFTYGPSPATDGTWTNLAHLSLPSEELASWEPLVCHTGPGAEGHSRSTQPMHLSGEASTARTCPQEPLRGTPGGALWLGVLRLLLFKLLLFDLLLTCSCLCDPAGPLPSPATTTRLRALGSHRLHPATETGGREATSSPRPQPRDRRWGDTPPGRKPGSPVRAKRSGSGVKQTLNFDLLKLAGDVESNPGPSRSRGHMTEYKPTVRLATRDDVPRAVRTLAAAFADYPATRHTVDPDRHIERVTELQELFLTRVGLDIGKVWVADDGAAVAVWTTPESVEAGAVFAEIGPRMAELSGSRLAAQQQMEGLLAPHRPKEPAWFLATVGVSPDHQGKGLGSAVVLPGVEAAERAGVPAFLETSAPRNLPFYERLGFTVTADVEVPEGPRTWCMTRKPGA

SEQ ID NO: 12154 - protein, 889 aa, synthetic construct
MALPVTALLLPLALLLHAARPDIVMTQSPATLSVSPGERATLSCRASQSVSNDVVWYQQKPGQAPRLLIYYASNRYTGIPARFSGSGSGTEFTLTISSLQSEDFAVYYCQQDYTSPWTFGQGTKLEIKRLEGKPIPNPLLGLDSTGSGDKQLDADVSPKPTIFLPSIAETKLQKAGTYLCLLEKFFPDVIKIHWQEKKSNTILGSQEGNTMKTNDTYMKFSWLTVPEKSLDKEHRCIVRHENNKNGVDQEIIFPPIKTDVITMDPKDNCSKDANDTLLLQLTNTSAYYMYLLLLLKSVVYFAIITCCLLRRTAFCCNGEKSRAKRSGSGATNFSLLKQAGDVEENPGPTSMDWIWRILFLVGAATGAHSFEEVQLVQSGAEVKKPGASVRVSCKASGYTFTNYGMNWVRQAPGQGLEWMGWINTYTGEPTYADDFKGRVTMTTDTSTSTAYMELRSLRSDDTAVYYCARIGDSSPSDYWGQGTLVTVSSTREQKLISEEDGSGSQPHTKPSVFVMKNGTNVACLVKEFYPKDIRINLVSSKKITEFDPAIVISPSGKYNAVKLGKYEDSNSVTCSVQHDNKTVHSTDFEVKTDSTDHVKPKETENTKQPSKSCHKPKAIVHTEKVNMMSLTVLGLRMLFAKTVAVNFLLTAKLFFLRAKRSGSGVKQTLNFDLLKLAGDVESNPGPSRGHMTEYKPTVRLATRDDVPRAVRTLAAAFADYPATRHTVDPDRHIERVTELQELFLTRVGLDIGKVWVADDGAAVAVWTTPESVEAGAVFAEIGPRMAELSGSRLAAQQQMEGLLAPHRPKEPAWFLATVGVSPDHQGKGLGSAVVLPGVEAAERAGVPAFLETSAPRNLPFYERLGFTVTADVEVPEGPRTWCMTRKPGA

SEQ ID NO: 12155 - protein, 627 aa, synthetic construct
MALPVTALLLPLALLLHAARPDIVMTQSPATLSVSPGERATLSCRASQSVSNDVVWYQQKPGQAPRLLIYYASNRYTGIPARFSGSGSGTEFTLTISSLQSEDFAVYYCQQDYTSPWTFGQGTKLEIKRLESQPHTKPSVFVMKNGTNVACLVKEFYPKDIRINLVSSKKITEFDPAIVISPSGKYNAVKLGKYEDSNSVTCSVQHDNKTVHSTDFEVKTDSTDHVKPKETENTKQPSKSCHKPKAIVHTEKVNMMSLTVLGLRMLFAKTVAVNFLLTAKLFFLRAKRSGSGATNFSLLKQAGDVEENPGPTSMDWIWRILFLVGAATGAHSFEEVQLVQSGAEVKKPGASVRVSCKASGYTFTNYGMNWVRQAPGQGLEWMGWINTYTGEPTYADDFKGRVTMTTDTSTSTAYMELRSLRSDDTAVYYCARIGDSSPSDYWGQGTLVTVSSTRDKQLDADVSPKPTIFLPSIAETKLQKAGTYLCLLEKFFPDVIKIHWQEKKSNTILGSQEGNTMKTNDTYMKFSWLTVPEKSLDKEHRCIVRHENNKNGVDQEIIFPPIKTDVITMDPKDNCSKDANDTLLLQLTNTSAYYMYLLLLLKSVVYFAIITCCLLRRTAFCCNGEKS

SEQ ID NO: 12156 - protein, 904 aa, synthetic construct
MALPVTALLLPLALLLHAARPLEGKPIPNPLLGLDSTGSGDKQLDADVSPKPTIFLPSIAETKLQKAGTYLCLLEKFFPDVIKIHWQEKKSNTILGSQEGNTMKTNDTYMKFSWLTVPEKSLDKEHRCIVRHENNKNGVDQEIIFPPIKTDVITMDPKDNCSKDANDTLLLQLTNTSAYYMYLLLLLKSVVYFAIITCCLLRRTAFCCNGEKSRAKRSGSGATNFSLLKQAGDVEENPGPTSMALPVTALLLPLALLLHAARPDIVMTQSPATLSVSPGERATLSCRASQSVSNDVVWYQQKPGQAPRLLIYYASNRYTGIPARFSGSGSGTEFTLTISSLQSEDFAVYYCQQDYTSPWTFGQGTKLEIKRGGGGSGGGGSGGGGSEVQLVQSGAEVKKPGASVRVSCKASGYTFTNYGMNWVRQAPGQGLEWMGWINTYTGEPTYADDFKGRVTMTTDTSTSTAYMELRSLRSDDTAVYYCARIGDSSPSDYWGQGTLVTVSSTREQKLISEEDGSGSQPHTKPSVFVMKNGTNVACLVKEFYPKDIRINLVSSKKITEFDPAIVISPSGKYNAVKLGKYEDSNSVTCSVQHDNKTVHSTDFEVKTDSTDHVKPKETENTKQPSKSCHKPKAIVHTEKVNMMSLTVLGLRMLFAKTVAVNFLLTAKLFFLRAKRSGSGVKQTLNFDLLKLAGDVESNPGPSRGHMTEYKPTVRLATRDDVPRAVRTLAAAFADYPATRHTVDPDRHIERVTELQELFLTRVGLDIGKVWVADDGAAVAVWTTPESVEAGAVFAEIGPRMAELSGSRLAAQQQMEGLLAPHRPKEPAWFLATVGVSPDHQGKGLGSAVVLPGVEAAERAGVPAFLETSAPRNLPFYERLGFTVTADVEVPEGPRTWCMTRKPGA

SEQ ID NO: 12157 - protein, 1029 aa, synthetic construct
MALPVTALLLPLALLLHAARPDIVMTQSPATLSVSPGERATLSCRASQSVSNDVVWYQQKPGQAPRLLIYYASNRYTGIPARFSGSGSGTEFTLTISSLQSEDFAVYYCQQDYTSPWTFGQGTKLEIKRGQPKANPTVTLFPPSSEELQANKATLVCLISDFYPGAVTVAWKADGSPVKAGVETTKPSKQSNNKYAASSYLSLTPEQWKSHRSYSCQVTHEGSTVEKTVAPTECSGSQSFGLLDPKLCYLLDGILFIYGVILTALFLRVKFSRSADAPAYQQGQNQLYNELNLGRREEYDVLDKRRGRDPEMGGKPQRRKNPQEGLYNELQKDKMAEAYSEIGMKGERRRGKGHDGLYQGLSTATKDTYDALHMQALPPRRAKRSGSGATNFSLLKQAGDVEENPGPTSMDWIWRILFLVGAATGAHSFEEVQLVQSGAEVKKPGASVRVSCKASGYTFTNYGMNWVRQAPGQGLEWMGWINTYTGEPTYADDFKGRVTMTTDTSTSTAYMELRSLRSDDTAVYYCARIGDSSPSDYWGQGTLVTVSSASTKGPSVFPLAPSSKSTSGGTAALGCLVKDYFPEPVTVSWNSGALTSGVHTFPAVLQSSGLYSLSSVVTVPSSSLGTQTYICNVNHKPSNTKVDKRVEPKSCGTQSFGLLDPKLCYLLDGILFIYGVILTALFLRVKFSRSADAPAYQQGQNQLYNELNLGRREEYDVLDKRRGRDPEMGGKPQRRKNPQEGLYNELQKDKMAEAYSEIGMKGERRRGKGHDGLYQGLSTATKDTYDALHMQALPPRRAKRSGSGVKQTLNFDLLKLAGDVESNPGPSRGHMTEYKPTVRLATRDDVPRAVRTLAAAFADYPATRHTVDPDRHIERVTELQELFLTRVGLDIGKVWVADDGAAVAVWTTPESVEAGAVFAEIGPRMAELSGSRLAAQQQMEGLLAPHRPKEPAWFLATVGVSPDHQGKGLGSAVVLPGVEAAERAGVPAFLETSAPRNLPFYERLGFTVTADVEVPEGPRTWCMTRKPGA

SEQ ID NO: 12158 - protein, 815 aa, synthetic construct
MALPVTALLLPLALLLHAARPDIVMTQSPATLSVSPGERATLSCRASQSVSNDVVWYQQKPGQAPRLLIYYASNRYTGIPARFSGSGSGTEFTLTISSLQSEDFAVYYCQQDYTSPWTFGQGTKLEIKRLEDLKNVFPPEVAVFEPSEAEISHTQKATLVCLATGFYPDHVELSWWVNGKEVHSGVSTDPQPLKEQPALNDSRYCLSSRLRVSATFWQNPRNHFRCQVQFYGLSENDEWTQDRAKPVTQIVSAEAWGRADCGSQSFGLLDPKLCYLLDGILFIYGVILTALFLRVKFSRSADAPAYQQGQNQLYNELNLGRREEYDVLDKRRGRDPEMGGKPQRRKNPQEGLYNELQKDKMAEAYSEIGMKGERRRGKGHDGLYQGLSTATKDTYDALHMQALPPRRAKRSGSGATNFSLLKQAGDVEENPGPTSMDWIWRILFLVGAATGAHSFEEVQLVQSGAEVKKPGASVRVSCKASGYTFTNYGMNWVRQAPGQGLEWMGWINTYTGEPTYADDFKGRVTMTTDTSTSTAYMELRSLRSDDTAVYYCARIGDSSPSDYWGQGTLVTVSSTRIQNPDPAVYQLRDSKSSDKSVCLFTDFDSQTNVSQSKDSDVYITDKTVLDMRSMDFKSNSAVAWSNKSDFACANAFNNSIIPEDTFFPSPESSCGTQSFGLLDPKLCYLLDGILFIYGVILTALFLRVKFSRSADAPAYQQGQNQLYNELNLGRREEYDVLDKRRGRDPEMGGKPQRRKNPQEGLYNELQKDKMAEAYSEIGMKGERRRGKGHDGLYQGLSTATKDTYDALHMQALPPR

SEQ ID NO: 12159 - protein, 815 aa, synthetic construct
MALPVTALLLPLALLLHAARPDIVMTQSPATLSVSPGERATLSCRASQSVSNDVVWYQQKPGQAPRLLIYYASNRYTGIPARFSGSGSGTEFTLTISSLQSEDFAVYYCQQDYTSPWTFGQGTKLEIKRLEDLKNVFPPEVAVFEPSKAEIAHTQKATLVCLATGFYPDHVELSWWVNGKEVHSGVCTDPQPLKEQPALNDSRYCLSSRLRVSATFWQNPRNHFRCQVQFYGLSENDEWTQDRAKPVTQIVSAEAWGRADCGSQSFGLLDPKLCYLLDGILFIYGVILTALFLRVKFSRSADAPAYQQGQNQLYNELNLGRREEYDVLDKRRGRDPEMGGKPQRRKNPQEGLYNELQKDKMAEAYSEIGMKGERRRGKGHDGLYQGLSTATKDTYDALHMQALPPRRAKRSGSGATNFSLLKQAGDVEENPGPTSMDWIWRILFLVGAATGAHSFEEVQLVQSGAEVKKPGASVRVSCKASGYTFTNYGMNWVRQAPGQGLEWMGWINTYTGEPTYADDFKGRVTMTTDTSTSTAYMELRSLRSDDTAVYYCARIGDSSPSDYWGQGTLVTVSSTRIQNPDPAVYQLRDSKSSDKSVCLFTDFDSQTNVSQSKDSDVYITDKCVLDMRSMDFKSNSAVAWSNKSDFACANAFNNSIIPEDTFFPSSDVPCGTQSFGLLDPKLCYLLDGILFIYGVILTALFLRVKFSRSADAPAYQQGQNQLYNELNLGRREEYDVLDKRRGRDPEMGGKPQRRKNPQEGLYNELQKDKMAEAYSEIGMKGERRRGKGHDGLYQGLSTATKDTYDALHMQALPPR

SEQ ID NO: 12160 - protein, 886 aa, synthetic construct
MALPVTALLLPLALLLHAARPDIVMTQSPATLSVSPGERATLSCRASQSVSNDVVWYQQKPGQAPRLLIYYASNRYTGIPARFSGSGSGTEFTLTISSLQSEDFAVYYCQQDYTSPWTFGQGTKLEIKRLEGKPIPNPLLGLDSTGSGEDLKNVFPPEVAVFEPSEAEISHTQKATLVCLATGFYPDHVELSWWVNGKEVHSGVSTDPQPLKEQPALNDSRYCLSSRLRVSATFWQNPRNHFRCQVQFYGLSENDEWTQDRAKPVTQIVSAEAWGRADCGSQSFGLLDPKLCYLLDGILFIYGVILTALFLRVKFSRSADAPAYQQGQNQLYNELNLGRREEYDVLDKRRGRDPEMGGKPQRRKNPQEGLYNELQKDKMAEAYSEIGMKGERRRGKGHDGLYQGLSTATKDTYDALHMQALPPRRAKRSGSGATNFSLLKQAGDVEENPGPTSMDWIWRILFLVGAATGAHSFEEVQLVQSGAEVKKPGASVRVSCKASGYTFTNYGMNWVRQAPGQGLEWMGWINTYTGEPTYADDFKGRVTMTTDTSTSTAYMELRSLRSDDTAVYYCARIGDSSPSDYWGQGTLVTVSSTREQKLISEEDGSGIQNPDPAVYQLRDSKSSDKSVCLFTDFDSQTNVSQSKDSDVYITDKTVLDMRSMDFKSNSAVAWSNKSDFACANAFNNSIIPEDTFFPSPESSCGTQSFGLLDPKLCYLLDGILFIYGVILTALFLRSKRSRLLHSDYMNMTPRRPGPTRKHYQPYAPPRDFAAYRSRVKFSRSADAPAYQQGQNQLYNELNLGRREEYDVLDKRRGRDPEMGGKPQRRKNPQEGLYNELQKDKMAEAYSEIGMKGERRRGKGHDGLYQGLSTATKDTYDALHMQALPPR

SEQ ID NO: 12161 - protein, 927 aa, synthetic construct
MALPVTALLLPLALLLHAARPDIVMTQSPATLSVSPGERATLSCRASQSVSNDVVWYQQKPGQAPRLLIYYASNRYTGIPARFSGSGSGTEFTLTISSLQSEDFAVYYCQQDYTSPWTFGQGTKLEIKRLEGKPIPNPLLGLDSTGSGEDLKNVFPPEVAVFEPSEAEISHTQKATLVCLATGFYPDHVELSWWVNGKEVHSGVSTDPQPLKEQPALNDSRYCLSSRLRVSATFWQNPRNHFRCQVQFYGLSENDEWTQDRAKPVTQIVSAEAWGRADCGSQSFGLLDPKLCYLLDGILFIYGVILTALFLRSKRSRLLHSDYMNMTPRRPGPTRKHYQPYAPPRDFAAYRSRVKFSRSADAPAYQQGQNQLYNELNLGRREEYDVLDKRRGRDPEMGGKPQRRKNPQEGLYNELQKDKMAEAYSEIGMKGERRRGKGHDGLYQGLSTATKDTYDALHMQALPPRRAKRSGSGATNFSLLKQAGDVEENPGPTSMDWIWRILFLVGAATGAHSFEEVQLVQSGAEVKKPGASVRVSCKASGYTFTNYGMNWVRQAPGQGLEWMGWINTYTGEPTYADDFKGRVTMTTDTSTSTAYMELRSLRSDDTAVYYCARIGDSSPSDYWGQGTLVTVSSTREQKLISEEDGSGIQNPDPAVYQLRDSKSSDKSVCLFTDFDSQTNVSQSKDSDVYITDKTVLDMRSMDFKSNSAVAWSNKSDFACANAFNNSIIPEDTFFPSPESSCGTQSFGLLDPKLCYLLDGILFIYGVILTALFLRSKRSRLLHSDYMNMTPRRPGPTRKHYQPYAPPRDFAAYRSRVKFSRSADAPAYQQGQNQLYNELNLGRREEYDVLDKRRGRDPEMGGKPQRRKNPQEGLYNELQKDKMAEAYSEIGMKGERRRGKGHDGLYQGLSTATKDTYDALHMQALPPR

SEQ ID NO: 12162 - protein, 888 aa, synthetic construct
MALPVTALLLPLALLLHAARPDIVMTQSPATLSVSPGERATLSCRASQSVSNDVVWYQQKPGQAPRLLIYYASNRYTGIPARFSGSGSGTEFTLTISSLQSEDFAVYYCQQDYTSPWTFGQGTKLEIKRLEGKPIPNPLLGLDSTGSGEDLKNVFPPEVAVFEPSEAEISHTQKATLVCLATGFYPDHVELSWWVNGKEVHSGVSTDPQPLKEQPALNDSRYCLSSRLRVSATFWQNPRNHFRCQVQFYGLSENDEWTQDRAKPVTQIVSAEAWGRADCGSQSFGLLDPKLCYLLDGILFIYGVILTALFLRVKFSRSADAPAYQQGQNQLYNELNLGRREEYDVLDKRRGRDPEMGGKPQRRKNPQEGLYNELQKDKMAEAYSEIGMKGERRRGKGHDGLYQGLSTATKDTYDALHMQALPPRRAKRSGSGATNFSLLKQAGDVEENPGPTSMDWIWRILFLVGAATGAHSFEEVQLVQSGAEVKKPGASVRVSCKASGYTFTNYGMNWVRQAPGQGLEWMGWINTYTGEPTYADDFKGRVTMTTDTSTSTAYMELRSLRSDDTAVYYCARIGDSSPSDYWGQGTLVTVSSTREQKLISEEDLGSGIQNPDPAVYQLRDSKSSDKSVCLFTDFDSQTNVSQSKDSDVYITDKTVLDMRSMDFKSNSAVAWSNKSDFACANAFNNSIIPEDTFFPSPESSCGTQSFGLLDPKLCYLLDGILFIYGVILTALFLKRGRKKLLYIFKQPFMRPVQTTQEEDGCSCRFPEEEEGGCELRVKFSRSADAPAYQQGQNQLYNELNLGRREEYDVLDKRRGRDPEMGGKPQRRKNPQEGLYNELQKDKMAEAYSEIGMKGERRRGKGHDGLYQGLSTATKDTYDALHMQALPPR

SEQ ID NO: 12163 - protein, 930 aa, synthetic construct
MALPVTALLLPLALLLHAARPDIVMTQSPATLSVSPGERATLSCRASQSVSNDVVWYQQKPGQAPRLLIYYASNRYTGIPARFSGSGSGTEFTLTISSLQSEDFAVYYCQQDYTSPWTFGQGTKLEIKRLEGKPIPNPLLGLDSTGSGEDLKNVFPPEVAVFEPSEAEISHTQKATLVCLATGFYPDHVELSWWVNGKEVHSGVSTDPQPLKEQPALNDSRYCLSSRLRVSATFWQNPRNHFRCQVQFYGLSENDEWTQDRAKPVTQIVSAEAWGRADCGSQSFGLLDPKLCYLLDGILFIYGVILTALFLKRGRKKLLYIFKQPFMRPVQTTQEEDGCSCRFPEEEEGGCELRVKFSRSADAPAYQQGQNQLYNELNLGRREEYDVLDKRRGRDPEMGGKPQRRKNPQEGLYNELQKDKMAEAYSEIGMKGERRRGKGHDGLYQGLSTATKDTYDALHMQALPPRRAKRSGSGATNFSLLKQAGDVEENPGPTSMDWIWRILFLVGAATGAHSFEEVQLVQSGAEVKKPGASVRVSCKASGYTFTNYGMNWVRQAPGQGLEWMGWINTYTGEPTYADDFKGRVTMTTDTSTSTAYMELRSLRSDDTAVYYCARIGDSSPSDYWGQGTLVTVSSTREQKLISEEDLGSGIQNPDPAVYQLRDSKSSDKSVCLFTDFDSQTNVSQSKDSDVYITDKTVLDMRSMDFKSNSAVAWSNKSDFACANAFNNSIIPEDTFFPSPESSCGTQSFGLLDPKLCYLLDGILFIYGVILTALFLKRGRKKLLYIFKQPFMRPVQTTQEEDGCSCRFPEEEEGGCELRVKFSRSADAPAYQQGQNQLYNELNLGRREEYDVLDKRRGRDPEMGGKPQRRKNPQEGLYNELQKDKMAEAYSEIGMKGERRRGKGHDGLYQGLSTATKDTYDALHMQALPPR

SEQ ID NO: 12164 - protein, 820 aa, synthetic construct
MALPVTALLLPLALLLHAARPDIVMTQSPATLSVSPGERATLSCRASQSVSNDVVWYQQKPGQAPRLLIYYASNRYTGIPARFSGSGSGTEFTLTISSLQSEDFAVYYCQQDYTSPWTFGQGTKLEIKRLEQSFGLLDPKLCYLLDGILFIYGVILTALFLRVKFSRSADAPAYQQGQNQLYNELNLGRREEYDVLDKRRGRDPEMGGKPQRRKNPQEGLYNELQKDKMAEAYSEIGMKGERRRGKGHDGLYQGLSTATKDTYDALHMQALPPRRAKRSGSGATNFSLLKQAGDVEENPGPTSMDWIWRILFLVGAATGAHSFEEVQLVQSGAEVKKPGASVRVSCKASGYTFTNYGMNWVRQAPGQGLEWMGWINTYTGEPTYADDFKGRVTMTTDTSTSTAYMELRSLRSDDTAVYYCARIGDSSPSDYWGQGTLVTVSSTRQSFGLLDPKLCYLLDGILFIYGVILTALFLRVKFSRSADAPAYQQGQNQLYNELNLGRREEYDVLDKRRGRDPEMGGKPQRRKNPQEGLYNELQKDKMAEAYSEIGMKGERRRGKGHDGLYQGLSTATKDTYDALHMQALPPRRAKRSGSGVKQTLNFDLLKLAGDVESNPGPSRGHMTEYKPTVRLATRDDVPRAVRTLAAAFADYPATRHTVDPDRHIERVTELQELFLTRVGLDIGKVWVADDGAAVAVWTTPESVEAGAVFAEIGPRMAELSGSRLAAQQQMEGLLAPHRPKEPAWFLATVGVSPDHQGKGLGSAVVLPGVEAAERAGVPAFLETSAPRNLPFYERLGFTVTADVEVPEGPRTWCMTRKPGA

SEQ ID NO: 12165 - protein, 645 aa, synthetic construct
MALPVTALLLPLALLLHAARPDIVMTQSPATLSVSPGERATLSCRASQSVSNDVVWYQQKPGQAPRLLIYYASNRYTGIPARFSGSGSGTEFTLTISSLQSEDFAVYYCQQDYTSPWTFGQGTKLEIKRLEGQPKANPTVTLFPPSSEELQANKATLVCLISDFYPGAVTVAWKADGSPVKAGVETTKPSKQSNNKYAASSYLSLTPEQWKSHRSYSCQVTHEGSTVEKTVAPTECSPIKTDVITMDPKDNCSKDANDTLLLQLTNTSAYYMYLLLLLKSVVYFAIITCCLLRRTAFCCNGEKSRAKRSGSGATNFSLLKQAGDVEENPGPTSMDWIWRILFLVGAATGAHSFEEVQLVQSGAEVKKPGASVRVSCKASGYTFTNYGMNWVRQAPGQGLEWMGWINTYTGEPTYADDFKGRVTMTTDTSTSTAYMELRSLRSDDTAVYYCARIGDSSPSDYWGQGTLVTVSSTRASTKGPSVFPLAPSSKSTSGGTAALGCLVKDYFPEPVTVSWNSGALTSGVHTFPAVLQSSGLYSLSSVVTVPSSSLGTQTYICNVNHKPSNTKVDKRVEPKSCEVKTDSTDHVKPKETENTKQPSKSCHKPKAIVHTEKVNMMSLTVLGLRMLFAKTVAVNFLLTAKLFFL

SEQ ID NO: 12166 - protein, 623 aa, synthetic construct
MALPVTALLLPLALLLHAARPDIVMTQSPATLSVSPGERATLSCRASQSVSNDVVWYQQKPGQAPRLLIYYASNRYTGIPARFSGSGSGTEFTLTISSLQSEDFAVYYCQQDYTSPWTFGQGTKLEIKRLEGQPKANPTVTLFPPSSEELQANKATLVCLISDFYPGAVTVAWKADGSPVKAGVETTKPSKQSNNKYAASSYLSLTPEQWKSHRSYSCQVTHEGSTVEKTVAPTECSGRADCGITSASYHQGVLSATILYEILLGKATLYAVLVSALVLMAMVKRKDSRGRAKRSGSGATNFSLLKQAGDVEENPGPTSMDWIWRILFLVGAATGAHSFEEVQLVQSGAEVKKPGASVRVSCKASGYTFTNYGMNWVRQAPGQGLEWMGWINTYTGEPTYADDFKGRVTMTTDTSTSTAYMELRSLRSDDTAVYYCARIGDSSPSDYWGQGTLVTVSSTRASTKGPSVFPLAPSSKSTSGGTAALGCLVKDYFPEPVTVSWNSGALTSGVHTFPAVLQSSGLYSLSSVVTVPSSSLGTQTYICNVNHKPSNTKVDKRVEPKSCIPEDTFFPSSDVPCDVKLVEKSFETDTNLNFQNLSVIGFRILLLKVAGFNLLMTLRLWSS

SEQ ID NO: 12167 - protein, 623 aa, synthetic construct
MALPVTALLLPLALLLHAARPDIVMTQSPATLSVSPGERATLSCRASQSVSNDVVWYQQKPGQAPRLLIYYASNRYTGIPARFSGSGSGTEFTLTISSLQSEDFAVYYCQQDYTSPWTFGQGTKLEIKRLEGQPKANPTVTLFPPSSEELQANKATLVCLISDFYPGAVTVAWKADGSPVKAGVETTKPSKQSNNKYAASSYLSLTPEQWKSHRSYSCQVTHEGSTVEKTVAPTECSGRADCGFTSESYQQGVLSATILYEILLGKATLYAVLVSALVLMAMVKRKDSRGRAKRSGSGATNFSLLKQAGDVEENPGPTSMDWIWRILFLVGAATGAHSFEEVQLVQSGAEVKKPGASVRVSCKASGYTFTNYGMNWVRQAPGQGLEWMGWINTYTGEPTYADDFKGRVTMTTDTSTSTAYMELRSLRSDDTAVYYCARIGDSSPSDYWGQGTLVTVSSTRASTKGPSVFPLAPSSKSTSGGTAALGCLVKDYFPEPVTVSWNSGALTSGVHTFPAVLQSSGLYSLSSVVTVPSSSLGTQTYICNVNHKPSNTKVDKRVEPKSCIPEDTFFPSPESSCDVKLVEKSFETDTNLNFQNLSVIGFRILLLKVAGFNLLMTLRLWSS

SEQ ID NO: 12168 - protein, 449 aa, synthetic construct
MALPVTALLLPLALLLHAARPDIVMTQSPATLSVSPGERATLSCRASQSVSNDVVWYQQKPGQAPRLLIYYASNRYTGIPARFSGSGSGTEFTLTISSLQSEDFAVYYCQQDYTSPWTFGQGTKLEIKRGGGGSGGGGSGGGGSEVQLVQSGAEVKKPGASVRVSCKASGYTFTNYGMNWVRQAPGQGLEWMGWINTYTGEPTYADDFKGRVTMTTDTSTSTAYMELRSLRSDDTAVYYCARIGDSSPSDYWGQGTLVTVSSTRDGNEEMGGITQTPYKVSISGTTVILTCPQYPGSEILWQHNDKNIGGDEDDKNIGSDEDHLSLKEFSELEQSGYYVCYPRGSKPEDANFYLYLRARVCENCMEMDVMSVATIVIVDICITGGLLLLVYYWSKNRKAKAKPVTRGAGAGGRQRGQNKERPPPVPNPDYEPIRKGQRDLYSGLNQRRI

SEQ ID NO: 12169 - protein, 414 aa, synthetic construct
MALPVTALLLPLALLLHAARPDIVMTQSPATLSVSPGERATLSCRASQSVSNDVVWYQQKPGQAPRLLIYYASNRYTGIPARFSGSGSGTEFTLTISSLQSEDFAVYYCQQDYTSPWTFGQGTKLEIKRGGGGSGGGGSGGGGSEVQLVQSGAEVKKPGASVRVSCKASGYTFTNYGMNWVRQAPGQGLEWMGWINTYTGEPTYADDFKGRVTMTTDTSTSTAYMELRSLRSDDTAVYYCARIGDSSPSDYWGQGTLVTVSSTRFKIPIEELEDRVFVNCNTSITWVEGTVGTLLSDITRLDLGKRILDPRGIYRCNGTDIYKDKESTVQVHYRMCQSCVELDPATVAGIIVTDVIATLLLALGVFCFAGHETGRLSGAADTQALLRNDQVYQPLRDRDDAQYSHLGGNWARNK

SEQ ID NO: 12170 - protein, 424 aa, synthetic construct
MALPVTALLLPLALLLHAARPDIVMTQSPATLSVSPGERATLSCRASQSVSNDVVWYQQKPGQAPRLLIYYASNRYTGIPARFSGSGSGTEFTLTISSLQSEDFAVYYCQQDYTSPWTFGQGTKLEIKRGGGGSGGGGSGGGGSEVQLVQSGAEVKKPGASVRVSCKASGYTFTNYGMNWVRQAPGQGLEWMGWINTYTGEPTYADDFKGRVTMTTDTSTSTAYMELRSLRSDDTAVYYCARIGDSSPSDYWGQGTLVTVSSTRQSIKGNHLVKVYDYQEDGSVLLTCDAEAKNITWFKDGKMIGFLTEDKKKWNLGSNAKDPRGMYQCKGSQNKSKPLQVYYRMCQNCIELNAATISGFLFAEIVSIFVLAVGVYFIAGQDGVRQSRASDKQTLLPNDQLYQPLKDREDDQYSHLQGNQLRRN

SEQ ID NO: 12171 - protein, 407 aa, synthetic construct
MALPVTALLLPLALLLHAARPDIVMTQSPATLSVSPGERATLSCRASQSVSNDVVWYQQKPGQAPRLLIYYASNRYTGIPARFSGSGSGTEFTLTISSLQSEDFAVYYCQQDYTSPWTFGQGTKLEIKRGGGGSGGGGSGGGGSEVQLVQSGAEVKKPGASVRVSCKASGYTFTNYGMNWVRQAPGQGLEWMGWINTYTGEPTYADDFKGRVTMTTDTSTSTAYMELRSLRSDDTAVYYCARIGDSSPSDYWGQGTLVTVSSTRQSFGLLDPKLCYLLDGILFIYGVILTALFLRVKFSRSADAPAYQQGQNQLYNELNLGRREEYDVLDKRRGRDPEMGGKPQRRKNPQEGLYNELQKDKMAEAYSEIGMKGERRRGKGHDGLYQGLSTATKDTYDALHMQALPPR

SEQ ID NO: 12172 - protein, 449 aa, synthetic construct
MALPVTALLLPLALLLHAARPEVQLVQSGAEVKKPGASVRVSCKASGYTFTNYGMNWVRQAPGQGLEWMGWINTYTGEPTYADDFKGRVTMTTDTSTSTAYMELRSLRSDDTAVYYCARIGDSSPSDYWGQGTLVTVSSGGGGSGGGGSGGGGSDIVMTQSPATLSVSPGERATLSCRASQSVSNDVVWYQQKPGQAPRLLIYYASNRYTGIPARFSGSGSGTEFTLTISSLQSEDFAVYYCQQDYTSPWTFGQGTKLEIKRTRDGNEEMGGITQTPYKVSISGTTVILTCPQYPGSEILWQHNDKNIGGDEDDKNIGSDEDHLSLKEFSELEQSGYYVCYPRGSKPEDANFYLYLRARVCENCMEMDVMSVATIVIVDICITGGLLLLVYYWSKNRKAKAKPVTRGAGAGGRQRGQNKERPPPVPNPDYEPIRKGQRDLYSGLNQRRI

SEQ ID NO: 12173 - protein, 414 aa, synthetic construct
MALPVTALLLPLALLLHAARPEVQLVQSGAEVKKPGASVRVSCKASGYTFTNYGMNWVRQAPGQGLEWMGWINTYTGEPTYADDFKGRVTMTTDTSTSTAYMELRSLRSDDTAVYYCARIGDSSPSDYWGQGTLVTVSSGGGGSGGGGSGGGGSDIVMTQSPATLSVSPGERATLSCRASQSVSNDVVWYQQKPGQAPRLLIYYASNRYTGIPARFSGSGSGTEFTLTISSLQSEDFAVYYCQQDYTSPWTFGQGTKLEIKRTRFKIPIEELEDRVFVNCNTSITWVEGTVGTLLSDITRLDLGKRILDPRGIYRCNGTDIYKDKESTVQVHYRMCQSCVELDPATVAGIIVTDVIATLLLALGVFCFAGHETGRLSGAADTQALLRNDQVYQPLRDRDDAQYSHLGGNWARNK

SEQ ID NO: 12174 - protein, 424 aa, synthetic construct
MALPVTALLLPLALLLHAARPEVQLVQSGAEVKKPGASVRVSCKASGYTFTNYGMNWVRQAPGQGLEWMGWINTYTGEPTYADDFKGRVTMTTDTSTSTAYMELRSLRSDDTAVYYCARIGDSSPSDYWGQGTLVTVSSGGGGSGGGGSGGGGSDIVMTQSPATLSVSPGERATLSCRASQSVSNDVVWYQQKPGQAPRLLIYYASNRYTGIPARFSGSGSGTEFTLTISSLQSEDFAVYYCQQDYTSPWTFGQGTKLEIKRTRQSIKGNHLVKVYDYQEDGSVLLTCDAEAKNITWFKDGKMIGFLTEDKKKWNLGSNAKDPRGMYQCKGSQNKSKPLQVYYRMCQNCIELNAATISGFLFAEIVSIFVLAVGVYFIAGQDGVRQSRASDKQTLLPNDQLYQPLKDREDDQYSHLQGNQLRRN

SEQ ID NO: 12175 - protein, 407 aa, synthetic construct
MALPVTALLLPLALLLHAARPEVQLVQSGAEVKKPGASVRVSCKASGYTFTNYGMNWVRQAPGQGLEWMGWINTYTGEPTYADDFKGRVTMTTDTSTSTAYMELRSLRSDDTAVYYCARIGDSSPSDYWGQGTLVTVSSGGGGSGGGGSGGGGSDIVMTQSPATLSVSPGERATLSCRASQSVSNDVVWYQQKPGQAPRLLIYYASNRYTGIPARFSGSGSGTEFTLTISSLQSEDFAVYYCQQDYTSPWTFGQGTKLEIKRTRQSFGLLDPKLCYLLDGILFIYGVILTALFLRVKFSRSADAPAYQQGQNQLYNELNLGRREEYDVLDKRRGRDPEMGGKPQRRKNPQEGLYNELQKDKMAEAYSEIGMKGERRRGKGHDGLYQGLSTATKDTYDALHMQALPPR

SEQ ID NO: 12176 - protein, 502 aa, synthetic construct
MALPVTALLLPLALLLHAARPDIVMTQSPATLSVSPGERATLSCRASQSVSNDVVWYQQKPGQAPRLLIYYASNRYTGIPARFSGSGSGTEFTLTISSLQSEDFAVYYCQQDYTSPWTFGQGTKLEIKRGGGGSGGGGSGGGGSEVQLVQSGAEVKKPGASVRVSCKASGYTFTNYGMNWVRQAPGQGLEWMGWINTYTGEPTYADDFKGRVTMTTDTSTSTAYMELRSLRSDDTAVYYCARIGDSSPSDYWGQGTLVTVSSTRGMRTEDLPKAVVFLEPQWYRVLEKDSVTLKCQGAYSPEDNSTQWFHNESLISSQASSYFIDAATVDDSGEYRCQTNLSTLSDPVQLEVHIGWLLLQAPRWVFKEEDPIHLRCHSWKNTALHKVTYLQNGKGRKYFHHNSDFYIPKATLKDSGSYFCRGLVGSKNVSSETVNITITQGLAVPTISSFFPPGYQVSFCLVMVLLFAVDTGLYFSVKTNIRSSTRDWKDHKFKWRKDPQDK

SEQ ID NO: 12177 - protein, 784 aa, synthetic construct
MALPVTALLLPLALLLHAARPDIVMTQSPATLSVSPGERATLSCRASQSVSNDVVWYQQKPGQAPRLLIYYASNRYTGIPARFSGSGSGTEFTLTISSLQSEDFAVYYCQQDYTSPWTFGQGTKLEIKRGGGGSGGGGSGGGGSEVQLVQSGAEVKKPGASVRVSCKASGYTFTNYGMNWVRQAPGQGLEWMGWINTYTGEPTYADDFKGRVTMTTDTSTSTAYMELRSLRSDDTAVYYCARIGDSSPSDYWGQGTLVTVSSTRGGSGQQQTLPKPFIWAEPHFMVPKEKQVTICCQGNYGAVEYQLHFEGSLFAVDRPKPPERINKVQFYIPDMNSRMAGQYSCIYRVGELWSEPSNLLDLVVTEMYDTPTLSVHPGPEVISGEKVTFYCRLDTATSMFLLLKEGRSSHVQRGYGKVQAEFPLGPVTTAHRGTYRCFGSYNNHAWSFPSEPVKLLVTGDIENTSLAPEDPTFPADTWGTYLLTTETGLQKDHALWDHTAQNLLRMGLAFLVLVALVWFLVEDWLSRKRTRERASRASTWEGRRRLNTQTLRAKRSGSGVKQTLNFDLLKLAGDVESNPGPSRGHMTEYKPTVRLATRDDVPRAVRTLAAAFADYPATRHTVDPDRHIERVTELQELFLTRVGLDIGKVWVADDGAAVAVWTTPESVEAGAVFAEIGPRMAELSGSRLAAQQQMEGLLAPHRPKEPAWFLATVGVSPDHQGKGLGSAVVLPGVEAAERAGVPAFLETSAPRNLPFYERLGFTVTADVEVPEGPRTWCMTRKPGA

SEQ ID NO: 12178 - protein, 617 aa, synthetic construct
MALPVTALLLPLALLLHAARPDIVMTQSPATLSVSPGERATLSCRASQSVSNDVVWYQQKPGQAPRLLIYYASNRYTGIPARFSGSGSGTEFTLTISSLQSEDFAVYYCQQDYTSPWTFGQGTKLEIKRGGGGSGGGGSGGGGSEVQLVQSGAEVKKPGASVRVSCKASGYTFTNYGMNWVRQAPGQGLEWMGWINTYTGEPTYADDFKGRVTMTTDTSTSTAYMELRSLRSDDTAVYYCARIGDSSPSDYWGQGTLVTVSSTRKIEVMYPPPYLDNEKSNGTIIHVKGARGDIENTSLAPEDPTFPADTWGTYLLTTETGLQKDHALWDHTAQNLLRMGLAFLVLVALVWFLVEDWLSRKRTRERASRASTWEGRRRLNTQTLRAKRSGSGVKQTLNFDLLKLAGDVESNPGPSRGHMTEYKPTVRLATRDDVPRAVRTLAAAFADYPATRHTVDPDRHIERVTELQELFLTRVGLDIGKVWVADDGAAVAVWTTPESVEAGAVFAEIGPRMAELSGSRLAAQQQMEGLLAPHRPKEPAWFLATVGVSPDHQGKGLGSAVVLPGVEAAERAGVPAFLETSAPRNLPFYERLGFTVTADVEVPEGPRTWCMTRKPGA

SEQ ID NO: 12179 - protein, 704 aa, synthetic construct
MALPVTALLLPLALLLHAARPDIVMTQSPATLSVSPGERATLSCRASQSVSNDVVWYQQKPGQAPRLLIYYASNRYTGIPARFSGSGSGTEFTLTISSLQSEDFAVYYCQQDYTSPWTFGQGTKLEIKRGGGGSGGGGSGGGGSEVQLVQSGAEVKKPGASVRVSCKASGYTFTNYGMNWVRQAPGQGLEWMGWINTYTGEPTYADDFKGRVTMTTDTSTSTAYMELRSLRSDDTAVYYCARIGDSSPSDYWGQGTLVTVSSTRLWVSQPPEIRTLEGSSAFLPCSFNASQGRLAIGSVTWFRDEVVPGKEVRNGTPEFRGRLAPLASSRFLHDHQAELHIRDVRGHDASIYVCRVEVLGLGVGTGNGTRLVVEKEHPQLGAGTVLLLRAGFYAVSFLSVAVGSTVYYQGKCLTWKGPRRQLPAVVPAPLPPPCGSSAHLLPPVPGGRAKRSGSGVKQTLNFDLLKLAGDVESNPGPSRMYRMQLLSCIALSLALVTNSAPTSSSTKKTQLQLEHLLLDLQMILNGINNYKNPKLTEMLTAKFYMPKKATELKHLQCLEEELKPLEEVLNLAQSKNFHLRPRDLISNINVIVLELKGSETTFMCEYADETATIVEFLNRWITFCQSIISTLTKIEVMYPPPYLDNEKSNGTIIHVKGKHLCPSPLFPGPSKPFWVLVVVGGVLACYSLLVTVAFIIFWVRSKRS

SEQ ID NO: 12180 - protein, 680 aa, synthetic construct
MALPVTALLLPLALLLHAARPDIVMTQSPATLSVSPGERATLSCRASQSVSNDVVWYQQKPGQAPRLLIYYASNRYTGIPARFSGSGSGTEFTLTISSLQSEDFAVYYCQQDYTSPWTFGQGTKLEIKRGGGGSGGGGSGGGGSEVQLVQSGAEVKKPGASVRVSCKASGYTFTNYGMNWVRQAPGQGLEWMGWINTYTGEPTYADDFKGRVTMTTDTSTSTAYMELRSLRSDDTAVYYCARIGDSSPSDYWGQGTLVTVSSTRLWVSQPPEIRTLEGSSAFLPCSFNASQGRLAIGSVTWFRDEVVPGKEVRNGTPEFRGRLAPLASSRFLHDHQAELHIRDVRGHDASIYVCRVEVLGLGVGTGNGTRLVVEKEHPQLGAGTVLLLRAGFYAVSFLSVAVGSTVYYQGKCLTWKGPRRQLPAVVPAPLPPPCGSSAHLLPPVPGGRAKRSGSGVKQTLNFDLLKLAGDVESNPGPSRGHMTEYKPTVRLATRDDVPRAVRTLAAAFADYPATRHTVDPDRHIERVTELQELFLTRVGLDIGKVWVADDGAAVAVWTTPESVEAGAVFAEIGPRMAELSGSRLAAQQQMEGLLAPHRPKEPAWFLATVGVSPDHQGKGLGSAVVLPGVEAAERAGVPAFLETSAPRNLPFYERLGFTVTADVEVPEGPRTWCMTRKPGA

SEQ ID NO: 12181 - protein, 356 aa, synthetic construct
MALPVTALLLPLALLLHAARPDIVMTQSPATLSVSPGERATLSCRASQSVSNDVVWYQQKPGQAPRLLIYYASNRYTGIPARFSGSGSGTEFTLTISSLQSEDFAVYYCQQDYTSPWTFGQGTKLEIKRGGGGSGGGGSGGGGSEVQLVQSGAEVKKPGASVRVSCKASGYTFTNYGMNWVRQAPGQGLEWMGWINTYTGEPTYADDFKGRVTMTTDTSTSTAYMELRSLRSDDTAVYYCARIGDSSPSDYWGQGTLVTVSSTRKIEVMYPPPYLDNEKSNGTIIHVKGARITQGLAVSTISSFFPPGYQVSFCLVMVLLFAVDTGLYFSVKTNIRSSTRDWKDHKFKWRKDPQDK

SEQ ID NO: 12182 - protein, 356 aa, synthetic construct
MALPVTALLLPLALLLHAARPDIVMTQSPATLSVSPGERATLSCRASQSVSNDVVWYQQKPGQAPRLLIYYASNRYTGIPARFSGSGSGTEFTLTISSLQSEDFAVYYCQQDYTSPWTFGQGTKLEIKRGGGGSGGGGSGGGGSEVQLVQSGAEVKKPGASVRVSCKASGYTFTNYGMNWVRQAPGQGLEWMGWINTYTGEPTYADDFKGRVTMTTDTSTSTAYMELRSLRSDDTAVYYCARIGDSSPSDYWGQGTLVTVSSTRKIEVMYPPPYLDNEKSNGTIIHVKGARITQGLAVPTISSFFPPGYQVSFCLVMVLLFAVDTGLYFSVKTNIRSSTRDWKDHKFKWRKDPQDK

SEQ ID NO: 12183 - protein, 335 aa, synthetic construct
MALPVTALLLPLALLLHAARPDIVMTQSPATLSVSPGERATLSCRASQSVSNDVVWYQQKPGQAPRLLIYYASNRYTGIPARFSGSGSGTEFTLTISSLQSEDFAVYYCQQDYTSPWTFGQGTKLEIKRGGGGSGGGGSGGGGSEVQLVQSGAEVKKPGASVRVSCKASGYTFTNYGMNWVRQAPGQGLEWMGWINTYTGEPTYADDFKGRVTMTTDTSTSTAYMELRSLRSDDTAVYYCARIGDSSPSDYWGQGTLVTVSSTRKIEVMYPPPYLDNEKSNGTIIHVKGARITQGLAVSTISSFSPPGYQVSFCLVMVLLFAVDTGLYFSVKTNI

SEQ ID NO: 12184 - protein, 366 aa, synthetic construct
MALPVTALLLPLALLLHAARPDIVMTQSPATLSVSPGERATLSCRASQSVSNDVVWYQQKPGQAPRLLIYYASNRYTGIPARFSGSGSGTEFTLTISSLQSEDFAVYYCQQDYTSPWTFGQGTKLEIKRGGGGSGGGGSGGGGSEVQLVQSGAEVKKPGASVRVSCKASGYTFTNYGMNWVRQAPGQGLEWMGWINTYTGEPTYADDFKGRVTMTTDTSTSTAYMELRSLRSDDTAVYYCARIGDSSPSDYWGQGTLVTVSSTRKIEVMYPPPYLDNEKSNGTIIHVKGARVEKEHPQLGAGTVLLLRAGFYAVSFLSVAVGSTVYYQGKCLTWKGPRRQLPAVVPAPLPPPCGSSAHLLPPVPGG

SEQ ID NO: 12185 - protein, 447 aa, synthetic construct
MALPVTALLLPLALLLHAARPDIVMTQSPATLSVSPGERATLSCRASQSVSNDVVWYQQKPGQAPRLLIYYASNRYTGIPARFSGSGSGTEFTLTISSLQSEDFAVYYCQQDYTSPWTFGQGTKLEIKRGGGGSGGGGSGGGGSEVQLVQSGAEVKKPGASVRVSCKASGYTFTNYGMNWVRQAPGQGLEWMGWINTYTGEPTYADDFKGRVTMTTDTSTSTAYMELRSLRSDDTAVYYCARIGDSSPSDYWGQGTLVTVSSTRKIEVMYPPPYLDNEKSNGTIIHVKGARKSVRFYLVVSPASASTQTSWTPRDLVSSQTQTQSCVPPTAGARQAPESPSTIPVPSQPQNSTLRPGPAAPIALVPVFCGLLVAKSLVLSALLVWWGDIWWKTMMELRSLDTQKATCHLQQVTDLPWTSVSSPVEREILYHTVARTKISDDDDEHTL

SEQ ID NO: 12186 - protein, 384 aa, synthetic construct
MALPVTALLLPLALLLHAARPDIVMTQSPATLSVSPGERATLSCRASQSVSNDVVWYQQKPGQAPRLLIYYASNRYTGIPARFSGSGSGTEFTLTISSLQSEDFAVYYCQQDYTSPWTFGQGTKLEIKRGGGGSGGGGSGGGGSEVQLVQSGAEVKKPGASVRVSCKASGYTFTNYGMNWVRQAPGQGLEWMGWINTYTGEPTYADDFKGRVTMTTDTSTSTAYMELRSLRSDDTAVYYCARIGDSSPSDYWGQGTLVTVSSTRKIEVMYPPPYLDNEKSNGTIIHVKGARGDIENTSLAPEDPTFPADTWGTYLLTTETGLQKDHALWDHTAQNLLRMGLAFLVLVALVWFLVEDWLSRKRTRERASRASTWEGRRRLNTQTL

SEQ ID NO: 12187 - protein, 980 aa, synthetic construct
MALPVTALLLPLALLLHAARPDIVMTQSPATLSVSPGERATLSCRASQSVSNDVVWYQQKPGQAPRLLIYYASNRYTGIPARFSGSGSGTEFTLTISSLQSEDFAVYYCQQDYTSPWTFGQGTKLEIKRLEGQPKANPTVTLFPPSSEELQANKATLVCLISDFYPGAVTVAWKADGSPVKAGVETTKPSKQSNNKYAASSYLSLTPEQWKSHRSYSCQVTHEGSTVEKTVAPTECSGSQSFGLLDPKLCYLLDGILFIYGVILTALFLRVKFSRSADAPAYQQGQNQLYNELNLGRREEYDVLDKRRGRDPEMGGKPQRRKNPQEGLYNELQKDKMAEAYSEIGMKGERRRGKGHDGLYQGLSTATKDTYDALHMQALPPRRAKRSGSGATNFSLLKQAGDVEENPGPTSMDWIWRILFLVGAATGAHSFEEVQLVQSGAEVKKPGASVRVSCKASGYTFTNYGMNWVRQAPGQGLEWMGWINTYTGEPTYADDFKGRVTMTTDTSTSTAYMELRSLRSDDTAVYYCARIGDSSPSDYWGQGTLVTVSSTRASTKGPSVFPLAPSSKSTSGGTAALGCLVKDYFPEPVTVSWNSGALTSGVHTFPAVLQSSGLYSLSSVVTVPSSSLGTQTYICNVNHKPSNTKVDKRVEPKSCGTGDIENTSLAPEDPTFPADTWGTYLLTTETGLQKDHALWDHTAQNLLRMGLAFLVLVALVWFLVEDWLSRKRTRERASRASTWEGRRRLNTQTLRAKRSGSGATNFSLLKQAGDVEENPGPSRGHMTEYKPTVRLATRDDVPRAVRTLAAAFADYPATRHTVDPDRHIERVTELQELFLTRVGLDIGKVWVADDGAAVAVWTTPESVEAGAVFAEIGPRMAELSGSRLAAQQQMEGLLAPHRPKEPAWFLATVGVSPDHQGKGLGSAVVLPGVEAAERAGVPAFLETSAPRNLPFYERLGFTVTADVEVPEGPRTWCMTRKPGA

SEQ ID NO: 12188 - protein, 1046 aa, synthetic construct
MALPVTALLLPLALLLHAARPDIVMTQSPATLSVSPGERATLSCRASQSVSNDVVWYQQKPGQAPRLLIYYASNRYTGIPARFSGSGSGTEFTLTISSLQSEDFAVYYCQQDYTSPWTFGQGTKLEIKRLEGQPKANPTVTLFPPSSEELQANKATLVCLISDFYPGAVTVAWKADGSPVKAGVETTKPSKQSNNKYAASSYLSLTPEQWKSHRSYSCQVTHEGSTVEKTVAPTECSGSQSFGLLDPKLCYLLDGILFIYGVILTALFLRVKFSRSADAPAYQQGQNQLYNELNLGRREEYDVLDKRRGRDPEMGGKPQRRKNPQEGLYNELQKDKMAEAYSEIGMKGERRRGKGHDGLYQGLSTATKDTYDALHMQALPPRRAKRSGSGATNFSLLKQAGDVEENPGPTSMDWIWRILFLVGAATGAHSFEEVQLVQSGAEVKKPGASVRVSCKASGYTFTNYGMNWVRQAPGQGLEWMGWINTYTGEPTYADDFKGRVTMTTDTSTSTAYMELRSLRSDDTAVYYCARIGDSSPSDYWGQGTLVTVSSTRASTKGPSVFPLAPSSKSTSGGTAALGCLVKDYFPEPVTVSWNSGALTSGVHTFPAVLQSSGLYSLSSVVTVPSSSLGTQTYICNVNHKPSNTKVDKRVEPKSCGTKSVRFYLVVSPASASTQTSWTPRDLVSSQTQTQSCVPPTAGARQAPESPSTIPVPSQPQNSTLRPGPAAPIALVPVFCGLLVAKSLVLSALLVWWGDIWWKTMMELRSLDTQKATCHLQQVTDLPWTSVSSPVEREILYHTVARTKISDDDDEHTLRAKRSGSGVKQTLNFDLLKLAGDVESNPGPSRGHMTEYKPTVRLATRDDVPRAVRTLAAAFADYPATRHTVDPDRHIERVTELQELFLTRVGLDIGKVWVADDGAAVAVWTTPESVEAGAVFAEIGPRMAELSGSRLAAQQQMEGLLAPHRPKEPAWFLATVGVSPDHQGKGLGSAVVLPGVEAAERAGVPAFLETSAPRNLPFYERLGFTVTADVEVPEGPRTWCMTRKPGA

SEQ ID NO: 12189 - protein, 966 aa, synthetic construct
MALPVTALLLPLALLLHAARPDIVMTQSPATLSVSPGERATLSCRASQSVSNDVVWYQQKPGQAPRLLIYYASNRYTGIPARFSGSGSGTEFTLTISSLQSEDFAVYYCQQDYTSPWTFGQGTKLEIKRLEGQPKANPTVTLFPPSSEELQANKATLVCLISDFYPGAVTVAWKADGSPVKAGVETTKPSKQSNNKYAASSYLSLTPEQWKSHRSYSCQVTHEGSTVEKTVAPTECSGSQSFGLLDPKLCYLLDGILFIYGVILTALFLRVKFSRSADAPAYQQGQNQLYNELNLGRREEYDVLDKRRGRDPEMGGKPQRRKNPQEGLYNELQKDKMAEAYSEIGMKGERRRGKGHDGLYQGLSTATKDTYDALHMQALPPRRAKRSGSGATNFSLLKQAGDVEENPGPTSMDWIWRILFLVGAATGAHSFEEVQLVQSGAEVKKPGASVRVSCKASGYTFTNYGMNWVRQAPGQGLEWMGWINTYTGEPTYADDFKGRVTMTTDTSTSTAYMELRSLRSDDTAVYYCARIGDSSPSDYWGQGTLVTVSSTRASTKGPSVFPLAPSSKSTSGGTAALGCLVKDYFPEPVTVSWNSGALTSGVHTFPAVLQSSGLYSLSSVVTVPSSSLGTQTYICNVNHKPSNTKVDKRVEPKSCGTVVEKEHPQLGAGTVLLLRAGFYAVSFLSVAVGSTVYYQGKCLTWKGPRRQLPAVVPAPLPPPCGSSAHLLPPVPGGRAKRSGSGVKQTLNFDLLKLAGDVESNPGPSRGHMTEYKPTVRLATRDDVPRAVRTLAAAFADYPATRHTVDPDRHIERVTELQELFLTRVGLDIGKVWVADDGAAVAVWTTPESVEAGAVFAEIGPRMAELSGSRLAAQQQMEGLLAPHRPKEPAWFLATVGVSPDHQGKGLGSAVVLPGVEAAERAGVPAFLETSAPRNLPFYERLGFTVTADVEVPEGPRTWCMTRKPGA

SEQ ID NO: 12190 - protein, 995 aa, synthetic construct
MALPVTALLLPLALLLHAARPDIVMTQSPATLSVSPGERATLSCRASQSVSNDVVWYQQKPGQAPRLLIYYASNRYTGIPARFSGSGSGTEFTLTISSLQSEDFAVYYCQQDYTSPWTFGQGTKLEIKRLEDLKNVFPPEVAVFEPSEAEISHTQKATLVCLATGFYPDHVELSWWVNGKEVHSGVSTDPQPLKEQPALNDSRYCLSSRLRVSATFWQNPRNHFRCQVQFYGLSENDEWTQDRAKPVTQIVSAEAWGRADCGSQSFGLLDPKLCYLLDGILFIYGVILTALFLRVKFSRSADAPAYQQGQNQLYNELNLGRREEYDVLDKRRGRDPEMGGKPQRRKNPQEGLYNELQKDKMAEAYSEIGMKGERRRGKGHDGLYQGLSTATKDTYDALHMQALPPRRAKRSGSGATNFSLLKQAGDVEENPGPTSMDWIWRILFLVGAATGAHSFEEVQLVQSGAEVKKPGASVRVSCKASGYTFTNYGMNWVRQAPGQGLEWMGWINTYTGEPTYADDFKGRVTMTTDTSTSTAYMELRSLRSDDTAVYYCARIGDSSPSDYWGQGTLVTVSSTRIQNPDPAVYQLRDSKSSDKSVCLFTDFDSQTNVSQSKDSDVYITDKTVLDMRSMDFKSNSAVAWSNKSDFACANAFNNSIIPEDTFFPSPESSCGTGDIENTSLAPEDPTFPADTWGTYLLTTETGLQKDHALWDHTAQNLLRMGLAFLVLVALVWFLVEDWLSRKRTRERASRASTWEGRRRLNTQTLRAKRSGSGATNFSLLKQAGDVEENPGPSRGHMTEYKPTVRLATRDDVPRAVRTLAAAFADYPATRHTVDPDRHIERVTELQELFLTRVGLDIGKVWVADDGAAVAVWTTPESVEAGAVFAEIGPRMAELSGSRLAAQQQMEGLLAPHRPKEPAWFLATVGVSPDHQGKGLGSAVVLPGVEAAERAGVPAFLETSAPRNLPFYERLGFTVTADVEVPEGPRTWCMTRKPGA

SEQ ID NO: 12191 - protein, 1061 aa, synthetic construct
MALPVTALLLPLALLLHAARPDIVMTQSPATLSVSPGERATLSCRASQSVSNDVVWYQQKPGQAPRLLIYYASNRYTGIPARFSGSGSGTEFTLTISSLQSEDFAVYYCQQDYTSPWTFGQGTKLEIKRLEDLKNVFPPEVAVFEPSEAEISHTQKATLVCLATGFYPDHVELSWWVNGKEVHSGVSTDPQPLKEQPALNDSRYCLSSRLRVSATFWQNPRNHFRCQVQFYGLSENDEWTQDRAKPVTQIVSAEAWGRADCGSQSFGLLDPKLCYLLDGILFIYGVILTALFLRVKFSRSADAPAYQQGQNQLYNELNLGRREEYDVLDKRRGRDPEMGGKPQRRKNPQEGLYNELQKDKMAEAYSEIGMKGERRRGKGHDGLYQGLSTATKDTYDALHMQALPPRRAKRSGSGATNFSLLKQAGDVEENPGPTSMDWIWRILFLVGAATGAHSFEEVQLVQSGAEVKKPGASVRVSCKASGYTFTNYGMNWVRQAPGQGLEWMGWINTYTGEPTYADDFKGRVTMTTDTSTSTAYMELRSLRSDDTAVYYCARIGDSSPSDYWGQGTLVTVSSTRIQNPDPAVYQLRDSKSSDKSVCLFTDFDSQTNVSQSKDSDVYITDKTVLDMRSMDFKSNSAVAWSNKSDFACANAFNNSIIPEDTFFPSPESSCGTKSVRFYLVVSPASASTQTSWTPRDLVSSQTQTQSCVPPTAGARQAPESPSTIPVPSQPQNSTLRPGPAAPIALVPVFCGLLVAKSLVLSALLVWWGDIWWKTMMELRSLDTQKATCHLQQVTDLPWTSVSSPVEREILYHTVARTKISDDDDEHTLRAKRSGSGVKQTLNFDLLKLAGDVESNPGPSRGHMTEYKPTVRLATRDDVPRAVRTLAAAFADYPATRHTVDPDRHIERVTELQELFLTRVGLDIGKVWVADDGAAVAVWTTPESVEAGAVFAEIGPRMAELSGSRLAAQQQMEGLLAPHRPKEPAWFLATVGVSPDHQGKGLGSAVVLPGVEAAERAGVPAFLETSAPRNLPFYERLGFTVTADVEVPEGPRTWCMTRKPGA

SEQ ID NO: 12192 - protein, 981 aa, synthetic construct
MALPVTALLLPLALLLHAARPDIVMTQSPATLSVSPGERATLSCRASQSVSNDVVWYQQKPGQAPRLLIYYASNRYTGIPARFSGSGSGTEFTLTISSLQSEDFAVYYCQQDYTSPWTFGQGTKLEIKRLEDLKNVFPPEVAVFEPSEAEISHTQKATLVCLATGFYPDHVELSWWVNGKEVHSGVSTDPQPLKEQPALNDSRYCLSSRLRVSATFWQNPRNHFRCQVQFYGLSENDEWTQDRAKPVTQIVSAEAWGRADCGSQSFGLLDPKLCYLLDGILFIYGVILTALFLRVKFSRSADAPAYQQGQNQLYNELNLGRREEYDVLDKRRGRDPEMGGKPQRRKNPQEGLYNELQKDKMAEAYSEIGMKGERRRGKGHDGLYQGLSTATKDTYDALHMQALPPRRAKRSGSGATNFSLLKQAGDVEENPGPTSMDWIWRILFLVGAATGAHSFEEVQLVQSGAEVKKPGASVRVSCKASGYTFTNYGMNWVRQAPGQGLEWMGWINTYTGEPTYADDFKGRVTMTTDTSTSTAYMELRSLRSDDTAVYYCARIGDSSPSDYWGQGTLVTVSSTRIQNPDPAVYQLRDSKSSDKSVCLFTDFDSQTNVSQSKDSDVYITDKTVLDMRSMDFKSNSAVAWSNKSDFACANAFNNSIIPEDTFFPSPESSCGTVVEKEHPQLGAGTVLLLRAGFYAVSFLSVAVGSTVYYQGKCLTWKGPRRQLPAVVPAPLPPPCGSSAHLLPPVPGGRAKRSGSGVKQTLNFDLLKLAGDVESNPGPSRGHMTEYKPTVRLATRDDVPRAVRTLAAAFADYPATRHTVDPDRHIERVTELQELFLTRVGLDIGKVWVADDGAAVAVWTTPESVEAGAVFAEIGPRMAELSGSRLAAQQQMEGLLAPHRPKEPAWFLATVGVSPDHQGKGLGSAVVLPGVEAAERAGVPAFLETSAPRNLPFYERLGFTVTADVEVPEGPRTWCMTRKPGA

SEQ ID NO: 12193 - protein, 952 aa, synthetic construct
MALPVTALLLPLALLLHAARPDIVMTQSPATLSVSPGERATLSCRASQSVSNDVVWYQQKPGQAPRLLIYYASNRYTGIPARFSGSGSGTEFTLTISSLQSEDFAVYYCQQDYTSPWTFGQGTKLEIKRLEGQPKANPTVTLFPPSSEELQANKATLVCLISDFYPGAVTVAWKADGSPVKAGVETTKPSKQSNNKYAASSYLSLTPEQWKSHRSYSCQVTHEGSTVEKTVAPTECSGSQSFGLLDPKLCYLLDGILFIYGVILTALFLRVKFSRSADAPAYQQGQNQLYNELNLGRREEYDVLDKRRGRDPEMGGKPQRRKNPQEGLYNELQKDKMAEAYSEIGMKGERRRGKGHDGLYQGLSTATKDTYDALHMQALPPRRAKRSGSGATNFSLLKQAGDVEENPGPTSMDWIWRILFLVGAATGAHSFEEVQLVQSGAEVKKPGASVRVSCKASGYTFTNYGMNWVRQAPGQGLEWMGWINTYTGEPTYADDFKGRVTMTTDTSTSTAYMELRSLRSDDTAVYYCARIGDSSPSDYWGQGTLVTVSSTRASTKGPSVFPLAPSSKSTSGGTAALGCLVKDYFPEPVTVSWNSGALTSGVHTFPAVLQSSGLYSLSSVVTVPSSSLGTQTYICNVNHKPSNTKVDKRVEPKSCGTITQGLAVSTISSFFPPGYQVSFCLVMVLLFAVDTGLYFSVKTNIRSSTRDWKDHKFKWRKDPQDKRAKRSGSGATNFSLLKQAGDVEENPGPSRGHMTEYKPTVRLATRDDVPRAVRTLAAAFADYPATRHTVDPDRHIERVTELQELFLTRVGLDIGKVWVADDGAAVAVWTTPESVEAGAVFAEIGPRMAELSGSRLAAQQQMEGLLAPHRPKEPAWFLATVGVSPDHQGKGLGSAVVLPGVEAAERAGVPAFLETSAPRNLPFYERLGFTVTADVEVPEGPRTWCMTRKPGA

SEQ ID NO: 12194 - protein, 967 aa, synthetic construct
MALPVTALLLPLALLLHAARPDIVMTQSPATLSVSPGERATLSCRASQSVSNDVVWYQQKPGQAPRLLIYYASNRYTGIPARFSGSGSGTEFTLTISSLQSEDFAVYYCQQDYTSPWTFGQGTKLEIKRLEDLKNVFPPEVAVFEPSEAEISHTQKATLVCLATGFYPDHVELSWWVNGKEVHSGVSTDPQPLKEQPALNDSRYCLSSRLRVSATFWQNPRNHFRCQVQFYGLSENDEWTQDRAKPVTQIVSAEAWGRADCGSQSFGLLDPKLCYLLDGILFIYGVILTALFLRVKFSRSADAPAYQQGQNQLYNELNLGRREEYDVLDKRRGRDPEMGGKPQRRKNPQEGLYNELQKDKMAEAYSEIGMKGERRRGKGHDGLYQGLSTATKDTYDALHMQALPPRRAKRSGSGATNFSLLKQAGDVEENPGPTSMDWIWRILFLVGAATGAHSFEEVQLVQSGAEVKKPGASVRVSCKASGYTFTNYGMNWVRQAPGQGLEWMGWINTYTGEPTYADDFKGRVTMTTDTSTSTAYMELRSLRSDDTAVYYCARIGDSSPSDYWGQGTLVTVSSTRIQNPDPAVYQLRDSKSSDKSVCLFTDFDSQTNVSQSKDSDVYITDKTVLDMRSMDFKSNSAVAWSNKSDFACANAFNNSIIPEDTFFPSPESSCGTITQGLAVSTISSFFPPGYQVSFCLVMVLLFAVDTGLYFSVKTNIRSSTRDWKDHKFKWRKDPQDKRAKRSGSGATNFSLLKQAGDVEENPGPSRGHMTEYKPTVRLATRDDVPRAVRTLAAAFADYPATRHTVDPDRHIERVTELQELFLTRVGLDIGKVWVADDGAAVAVWTTPESVEAGAVFAEIGPRMAELSGSRLAAQQQMEGLLAPHRPKEPAWFLATVGVSPDHQGKGLGSAVVLPGVEAAERAGVPAFLETSAPRNLPFYERLGFTVTADVEVPEGPRTWCMTRKPGA

SEQ ID NO: 12195 - protein, 650 aa, synthetic construct
MALPVTALLLPLALLLHAARPDIVMTQSPATLSVSPGERATLSCRASQSVSNDVVWYQQKPGQAPRLLIYYASNRYTGIPARFSGSGSGTEFTLTISSLQSEDFAVYYCQQDYTSPWTFGQGTKLEIKRLEGQPKANPTVTLFPPSSEELQANKATLVCLISDFYPGAVTVAWKADGSPVKAGVETTKPSKQSNNKYAASSYLSLTPEQWKSHRSYSCQVTHEGSTVEKTVAPTECSGSLGEPQLCYILDAILFLYGIVLTLLYCRLKIQVRKAAITSYEKSDGVYTGLSTRNQETYETLKHEKPPQRAKRSGSGATNFSLLKQAGDVEENPGPTSMDWIWRILFLVGAATGAHSFEEVQLVQSGAEVKKPGASVRVSCKASGYTFTNYGMNWVRQAPGQGLEWMGWINTYTGEPTYADDFKGRVTMTTDTSTSTAYMELRSLRSDDTAVYYCARIGDSSPSDYWGQGTLVTVSSTRASTKGPSVFPLAPSSKSTSGGTAALGCLVKDYFPEPVTVSWNSGALTSGVHTFPAVLQSSGLYSLSSVVTVPSSSLGTQTYICNVNHKPSNTKVDKRVEPKSCGTLGEPQLCYILDAILFLYGIVLTLLYCRLKIQVRKAAITSYEKSDGVYTGLSTRNQETYETLKHEKPPQ

SEQ ID NO: 12196 - protein, 493 aa, synthetic construct
MALPVTALLLPLALLLHAARPDIQMTQSPSSLSASVGDRVTITCRASQDVSTAVAWYQQKPGKAPKLLIYSASFLYSGVPSRFSGSRSGTDFTLTISSLQPEDFATYYCQQYLYQPWTFGQGTKVEIKRGGGGSGGGGSGGGGSEVQLVESGGGLVQPGGSLRLSCAASGFNIDYYGMHWVRQAPGKGLEWVASLYGGSDSTDYADSVKGRFTISADTSKNTAYLQMNSLRAEDTAVYYCSRQYSAYFDYWGQGTLVTVSSTREQKLISEEDLKIEVMYPPPYLDNEKSNGTIIHVKGKHLCPSPLFPGPSKPFWVLVVVGGVLACYSLLVTVAFIIFWVRSKRSRLLHSDYMNMTPRRPGPTRKHYQPYAPPRDFAAYRSRVKFSRSADAPAYQQGQNQLYNELNLGRREEYDVLDKRRGRDPEMGGKPRRKNPQEGLYNELQKDKMAEAYSEIGMKGERRRGKGHDGLYQGLSTATKDTYDALHMQALPPR

SEQ ID NO: 12197 - protein, 499 aa, synthetic construct
MALPVTALLLPLALLLHAARPDIQMTQSPSSLSASVGDRVTITCRASQDVSTAVAWYQQKPGKAPKLLIYSASFLYSGVPSRFSGSRSGTDFTLTISSLQPEDFATYYCQQYLYQPWTFGQGTKVEIKRGGGGSGGGGSGGGGSEVQLVESGGGLVQPGGSLRLSCAASGFNIDYYGMHWVRQAPGKGLEWVASLYGGSDSTDYADSVKGRFTISADTSKNTAYLQMNSLRAEDTAVYYCSRQYSAYFDYWGQGTLVTVSSTREQKLISEEDLAKPTTTPAPRPPTPAPTIASQPLSLRPEACRPAAGGAVHTRGLDFACDIYIWAPLAGTCGVLLLSLVITLYCKRGRKKLLYIFKQPFMRPVQTTQEEDGCSCRFPEEEEGGCELRVKFSRSADAPAYQQGQNQLYNELNLGRREEYDVLDKRRGRDPEMGGKPRRKNPQEGLYNELQKDKMAEAYSEIGMKGERRRGKGHDGLYQGLSTATKDTYDALHMQALPPR

SEQ ID NO: 12198 - protein, 499 aa, synthetic construct
MALPVTALLLPLALLLHAARPEVQLVESGGGLVQPGGSLRLSCAASGFNIDYYGMHWVRQAPGKGLEWVASLYGGSDSTDYADSVKGRFTISADTSKNTAYLQMNSLRAEDTAVYYCSRQYSAYFDYWGQGTLVTVSSGGGGSGGGGSGGGGSDIQMTQSPSSLSASVGDRVTITCRASQDVSTAVAWYQQKPGKAPKLLIYSASFLYSGVPSRFSGSRSGTDFTLTISSLQPEDFATYYCQQYLYQPWTFGQGTKVEIKRTREQKLISEEDLAKPTTTPAPRPPTPAPTIASQPLSLRPEACRPAAGGAVHTRGLDFACDIYIWAPLAGTCGVLLLSLVITLYCKRGRKKLLYIFKQPFMRPVQTTQEEDGCSCRFPEEEEGGCELRVKFSRSADAPAYQQGQNQLYNELNLGRREEYDVLDKRRGRDPEMGGKPRRKNPQEGLYNELQKDKMAEAYSEIGMKGERRRGKGHDGLYQGLSTATKDTYDALHMQALPPR

SEQ ID NO: 12199 - protein, 912 aa, synthetic construct
MALPVTALLLPLALLLHAARPDIQMTQSPSSLSASVGDRVTITCRASQDVSTAVAWYQQKPGKAPKLLIYSASFLYSGVPSRFSGSRSGTDFTLTISSLQPEDFATYYCQQYLYQPWTFGQGTKVEIKRGGGGSGGGGSGGGGSEVQLVESGGGLVQPGGSLRLSCAASGFNIDYYGMHWVRQAPGKGLEWVASLYGGSDSTDYADSVKGRFTISADTSKNTAYLQMNSLRAEDTAVYYCSRQYSAYFDYWGQGTLVTVSSTREQKLISEEDLAKPTTTPAPRPPTPAPTIASQPLSLRPEACRPAAGGAVHTRGLDFACDIYIWAPLAGTCGVLLLSLVITLYCGRARVKFSRSADAPAYQQGQNQLYNELNLGRREEYDVLDKRRGRDPEMGGKPRRKNPQEGLYNELQKDKMAEAYSEIGMKGERRRGKGHDGLYQGLSTATKDTYDALHMQALPPRSRGSGATNFSLLKQAGDVEENPGPGIHMATYEVLCEVARKLGTDDREVVLFLLNVFIPQPTLAQLIGALRALKEEGRLTFPLLAECLFRAGRRDLLRDLLHLDPRFLERHLAGTMSYFSPYQLTVLHVDGELCARDIRSLIFLSKDTIGSRSTPQTFLHWVYCMENLDLLGPTDVDALMSMLRSLSRVDLQRQVQTLMGLHLSGPSHSQHYRHTPLETDFYDYKDDDDKTSGSGEGRGSLLTCGDVEENPGPHMTEYKPTVRLATRDDVPRAVRTLAAAFADYPATRHTVDPDRHIERVTELQELFLTRVGLDIGKVWVADDGAAVAVWTTPESVEAGAVFAEIGPRMAELSGSRLAAQQQMEGLLAPHRPKEPAWFLATVGVSPDHQGKGLGSAVVLPGVEAAERAGVPAFLETSAPRNLPFYERLGFTVTADVEVPEGPRTWCMTRKPGA

SEQ ID NO: 12200 - protein, 852 aa, synthetic construct
MALPVTALLLPLALLLHAARPDIQMTQSPSSLSASVGDRVTITCRASQDVSTAVAWYQQKPGKAPKLLIYSASFLYSGVPSRFSGSRSGTDFTLTISSLQPEDFATYYCQQYLYQPWTFGQGTKVEIKRLEIQNPDPAVYQLRDSKSSDKSVCLFTDFDSQTNVSQSKDSDVYITDKCVLDMRSMDFKSNSAVAWSNKSDFACANAFNNSIIPEDTFFPSSDVPCDVKLVEKSFETDTNLNFQNLSVIGFRILLLKVAGFNLLMTLRLWSSRAKRSGSGVKQTLNFDLLKLAGDVESNPGPTSMDWIWRILFLVGAATGAHSFEEVQLVESGGGLVQPGGSLRLSCAASGFNIDYYGMHWVRQAPGKGLEWVASLYGGSDSTDYADSVKGRFTISADTSKNTAYLQMNSLRAEDTAVYYCSRQYSAYFDYWGQGTLVTVSSTREDLKNVFPPEVAVFEPSKAEIAHTQKATLVCLATGFYPDHVELSWWVNGKEVHSGVCTDPQPLKEQPALNDSRYCLSSRLRVSATFWQNPRNHFRCQVQFYGLSENDEWTQDRAKPVTQIVSAEAWGRADCGITSASYHQGVLSATILYEILLGKATLYAVLVSALVLMAMVKRKDSRGRAKRSGSGATNFSLLKQAGDVEENPGPSRGHMTEYKPTVRLATRDDVPRAVRTLAAAFADYPATRHTVDPDRHIERVTELQELFLTRVGLDIGKVWVADDGAAVAVWTTPESVEAGAVFAEIGPRMAELSGSRLAAQQQMEGLLAPHRPKEPAWFLATVGVSPDHQGKGLGSAVVLPGVEAAERAGVPAFLETSAPRNLPFYERLGFTVTADVEVPEGPRTWCMTRKPGA

SEQ ID NO: 12201 - protein, 851 aa, synthetic construct
MALPVTALLLPLALLLHAARPDIQMTQSPSSLSASVGDRVTITCRASQDVSTAVAWYQQKPGKAPKLLIYSASFLYSGVPSRFSGSRSGTDFTLTISSLQPEDFATYYCQQYLYQPWTFGQGTKVEIKRLEDLKNVFPPEVAVFEPSKAEIAHTQKATLVCLATGFYPDHVELSWWVNGKEVHSGVCTDPQPLKEQPALNDSRYCLSSRLRVSATFWQNPRNHFRCQVQFYGLSENDEWTQDRAKPVTQIVSAEAWGRADCGITSASYHQGVLSATILYEILLGKATLYAVLVSALVLMAMVKRKDSRGRAKRSGSGATNFSLLKQAGDVEENPGPTSMDWIWRILFLVGAATGAHSFEEVQLVESGGGLVQPGGSLRLSCAASGFNIDYYGMHWVRQAPGKGLEWVASLYGGSDSTDYADSVKGRFTISADTSKNTAYLQMNSLRAEDTAVYYCSRQYSAYFDYWGQGTLVTVSSTRIQNPDPAVYQLRDSKSSDKSVCLFTDFDSQTNVSQSKDSDVYITDKCVLDMRSMDFKSNSAVAWSNKSDFACANAFNNSIIPEDTFFPSSDVPCDVKLVEKSFETDTNLNFQNLSVIGFRILLLKVAGFNLLMTLRLWSSRAKRSGSGVKQTLNFDLLKLAGDVESNPGPSRGHMTEYKPTVRLATRDDVPRAVRTLAAAFADYPATRHTVDPDRHIERVTELQELFLTRVGLDIGKVWVADDGAAVAVWTTPESVEAGAVFAEIGPRMAELSGSRLAAQQQMEGLLAPHRPKEPAWFLATVGVSPDHQGKGLGSAVVLPGVEAAERAGVPAFLETSAPRNLPFYERLGFTVTADVEVPEGPRTWCMTRKPGA

SEQ ID NO: 12202 - protein, 618 aa, synthetic construct
MALPVTALLLPLALLLHAARPDIQMTQSPSSLSASVGDRVTITCRASQDVSTAVAWYQQKPGKAPKLLIYSASFLYSGVPSRFSGSRSGTDFTLTISSLQPEDFATYYCQQYLYQPWTFGQGTKVEIKRLEDLKNVFPPEVAVFEPSEAEISHTQKATLVCLATGFYPDHVELSWWVNGKEVHSGVCTDPQPLKEQPALNDSRYCLSSRLRVSATFWQNPRNHFRCQVQFYGLSENDEWTQDRAKPVTQIVSAEAWGRADCGFTSESYQQGVLSATILYEILLGKATLYAVLVSALVLMAMVKRKDSRGRAKRSGSGATNFSLLKQAGDVEENPGPTSMDWIWRILFLVGAATGAHSFEEVQLVESGGGLVQPGGSLRLSCAASGFNIDYYGMHWVRQAPGKGLEWVASLYGGSDSTDYADSVKGRFTISADTSKNTAYLQMNSLRAEDTAVYYCSRQYSAYFDYWGQGTLVTVSSTRIQNPDPAVYQLRDSKSSDKSVCLFTDFDSQTNVSQSKDSDVYITDKCVLDMRSMDFKSNSAVAWSNKSDFACANAFNNSIIPEDTFFPSPESSCDVKLVEKSFETDTNLNFQNLSVIGFRILLLKVAGFNLLMTLRLWSS

SEQ ID NO: 12203 - protein, 843 aa, synthetic construct
MALPVTALLLPLALLLHAARPDIQMTQSPSSLSASVGDRVTITCRASQDVSTAVAWYQQKPGKAPKLLIYSASFLYSGVPSRFSGSRSGTDFTLTISSLQPEDFATYYCQQYLYQPWTFGQGTKVEIKRLEDLKNVFPPEVAVFEPSEAEISHTQKATLVCLATGFYPDHVELSWWVNGKEVHSGVCTDPQPLKEQPALNDSRYCLSSRLRVSATFWQNPRNHFRCQVQFYGLSENDEWTQDRAKPVTQIVSAEAWGRADCGFTSESYQQGVLSATILYEILLGKATLYAVLVSALVLMAMVKRKDSRGRAKRSGSGATNFSLLKQAGDVEENPGPTSMDWIWRILFLVGAATGAHSFEEVQLVESGGGLVQPGGSLRLSCAASGFNIDYYGMHWVRQAPGKGLEWVASLYGGSDSTDYADSVKGRFTISADTSKNTAYLQMNSLRAEDTAVYYCSRQYSAYFDYWGQGTLVTVSSTRIQNPDPAVYQLRDSKSSDKSVCLFTDFDSQTNVSQSKDSDVYITDKCVLDMRSMDFKSNSAVAWSNKSDFACANAFNNSIIPEDTFFPSPESSCDVKLVEKSFETDTNLNFQNLSVIGFRILLLKVAGFNLLMTLRLWSSRAKRSGSGVKQTLNFDLLKLAGDVESNPGPSRGGIHTMATYEVLCEVARKLGTDDREVVLFLLNVFIPQPTLAQLIGALRALKEEGRLTFPLLAECLFRAGRRDLLRDLLHLDPRFLERHLAGTMSYFSPYQLTVLHVDGELCARDIRSLIFLSKDTIGSRSTPQTFLHWVYCMENLDLLGPTDVDALMSMLRSLSRVDLQRQVQTLMGLHLSGPSHSQHYRHTP

SEQ ID NO: 12204 - protein, 622 aa, synthetic construct
MALPVTALLLPLALLLHAARPDIQMTQSPSSLSASVGDRVTITCRASQDVSTAVAWYQQKPGKAPKLLIYSASFLYSGVPSRFSGSRSGTDFTLTISSLQPEDFATYYCQQYLYQPWTFGQGTKVEIKRLEIQNPDPAVYQLRDSKSSDKSVCLFTDFDSQTNVSQSKDSDVYITDKCVLDMRSMDFKSNSAVAWSNKSDFACANAFNNSIIPEDTFFPSPESSCDVKLVEKSFETDTNLNFQNLSVIGFRILLLKVAGFNLLMTLRLWSSRAKRSGSGVKQTLNFDLLKLAGDVESNPGPTSMDWIWRILFLVGAATGAHSFEEVQLVESGGGLVQPGGSLRLSCAASGFNIDYYGMHWVRQAPGKGLEWVASLYGGSDSTDYADSVKGRFTISADTSKNTAYLQMNSLRAEDTAVYYCSRQYSAYFDYWGQGTLVTVSSTREDLKNVFPPEVAVFEPSEAEISHTQKATLVCLATGFYPDHVELSWWVNGKEVHSGVCTDPQPLKEQPALNDSRYCLSSRLRVSATFWQNPRNHFRCQVQFYGLSENDEWTQDRAKPVTQIVSAEAWGRADCGFTSESYQQGVLSATILYEILLGKATLYAVLVSALVLMAMVKRKDSRG

SEQ ID NO: 12205 - protein, 844 aa, synthetic construct
MALPVTALLLPLALLLHAARPDIQMTQSPSSLSASVGDRVTITCRASQDVSTAVAWYQQKPGKAPKLLIYSASFLYSGVPSRFSGSRSGTDFTLTISSLQPEDFATYYCQQYLYQPWTFGQGTKVEIKRLEIQNPDPAVYQLRDSKSSDKSVCLFTDFDSQTNVSQSKDSDVYITDKCVLDMRSMDFKSNSAVAWSNKSDFACANAFNNSIIPEDTFFPSPESSCDVKLVEKSFETDTNLNFQNLSVIGFRILLLKVAGFNLLMTLRLWSSRAKRSGSGVKQTLNFDLLKLAGDVESNPGPTSMDWIWRILFLVGAATGAHSFEEVQLVESGGGLVQPGGSLRLSCAASGFNIDYYGMHWVRQAPGKGLEWVASLYGGSDSTDYADSVKGRFTISADTSKNTAYLQMNSLRAEDTAVYYCSRQYSAYFDYWGQGTLVTVSSTREDLKNVFPPEVAVFEPSEAEISHTQKATLVCLATGFYPDHVELSWWVNGKEVHSGVCTDPQPLKEQPALNDSRYCLSSRLRVSATFWQNPRNHFRCQVQFYGLSENDEWTQDRAKPVTQIVSAEAWGRADCGFTSESYQQGVLSATILYEILLGKATLYAVLVSALVLMAMVKRKDSRGRAKRSGSGATNFSLLKQAGDVEENPGPSRGGIHTMATYEVLCEVARKLGTDDREVVLFLLNVFIPQPTLAQLIGALRALKEEGRLTFPLLAECLFRAGRRDLLRDLLHLDPRFLERHLAGTMSYFSPYQLTVLHVDGELCARDIRSLIFLSKDTIGSRSTPQTFLHWVYCMENLDLLGPTDVDALMSMLRSLSRVDLQRQVQTLMGLHLSGPSHSQHYRHTP

SEQ ID NO: 12206 - protein, 896 aa, synthetic construct
MALPVTALLLPLALLLHAARPLEGKPIPNPLLGLDSTGSGEDLKNVFPPEVAVFEPSKAEIAHTQKATLVCLATGFYPDHVELSWWVNGKEVHSGVCTDPQPLKEQPALNDSRYCLSSRLRVSATFWQNPRNHFRCQVQFYGLSENDEWTQDRAKPVTQIVSAEAWGRADCGITSASYHQGVLSATILYEILLGKATLYAVLVSALVLMAMVKRKDSRGRAKRSGSGATNFSLLKQAGDVEENPGPTSMALPVTALLLPLALLLHAARPDIQMTQSPSSLSASVGDRVTITCRASQDVSTAVAWYQQKPGKAPKLLIYSASFLYSGVPSRFSGSRSGTDFTLTISSLQPEDFATYYCQQYLYQPWTFGQGTKVEIKRGGGGSGGGGSGGGGSEVQLVESGGGLVQPGGSLRLSCAASGFNIDYYGMHWVRQAPGKGLEWVASLYGGSDSTDYADSVKGRFTISADTSKNTAYLQMNSLRAEDTAVYYCSRQYSAYFDYWGQGTLVTVSSTREQKLISEEDGSGIQNPDPAVYQLRDSKSSDKSVCLFTDFDSQTNVSQSKDSDVYITDKCVLDMRSMDFKSNSAVAWSNKSDFACANAFNNSIIPEDTFFPSSDVPCDVKLVEKSFETDTNLNFQNLSVIGFRILLLKVAGFNLLMTLRLWSSRAKRSGSGVKQTLNFDLLKLAGDVESNPGPSRGHMTEYKPTVRLATRDDVPRAVRTLAAAFADYPATRHTVDPDRHIERVTELQELFLTRVGLDIGKVWVADDGAAVAVWTTPESVEAGAVFAEIGPRMAELSGSRLAAQQQMEGLLAPHRPKEPAWFLATVGVSPDHQGKGLGSAVVLPGVEAAERAGVPAFLETSAPRNLPFYERLGFTVTADVEVPEGPRTWCMTRKPGA

SEQ ID NO: 12207 - protein, 897 aa, synthetic construct
MALPVTALLLPLALLLHAARPLEQKLISEEDLGSGDRPDPAVYQLRDSKSSDKSVCLFTDFDSQTNVSQSKDSDVYITDKCVLDMRSMDFKSNSAVAWSNKSDFACANAFNNSIIPEDTFFPSPESSCDVKLVEKSFETDTNLNFQNLSVIGFRILLLKVAGFNLLMTLRLWSSSSRAKRSGSGVKQTLNFDLLKLAGDVESNPGPTSMALPVTALLLPLALLLHAARPDIQMTQSPSSLSASVGDRVTITCRASQDVSTAVAWYQQKPGKAPKLLIYSASFLYSGVPSRFSGSRSGTDFTLTISSLQPEDFATYYCQQYLYQPWTFGQGTKVEIKRGGGGSGGGGSGGGGSEVQLVESGGGLVQPGGSLRLSCAASGFNIDYYGMHWVRQAPGKGLEWVASLYGGSDSTDYADSVKGRFTISADTSKNTAYLQMNSLRAEDTAVYYCSRQYSAYFDYWGQGTLVTVSSTRGKPIPNPLLGLDSTGSGEDLKNVFPPEVAVFEPSEAEISHTQKATLVCLATGFYPDHVELSWWVNGKEVHSGVCTDPQPLKEQPALNDSRYCLSSRLRVSATFWQNPRNHFRCQVQFYGLSENDEWTQDRAKPVTQIVSAEAWGRADCGFTSESYQQGVLSATILYEILLGKATLYAVLVSALVLMAMVKRKDSRGRAKRSGSGATNFSLLKQAGDVEENPGPSRGHMTEYKPTVRLATRDDVPRAVRTLAAAFADYPATRHTVDPDRHIERVTELQELFLTRVGLDIGKVWVADDGAAVAVWTTPESVEAGAVFAEIGPRMAELSGSRLAAQQQMEGLLAPHRPKEPAWFLATVGVSPDHQGKGLGSAVVLPGVEAAERAGVPAFLETSAPRNLPFYERLGFTVTADVEVPEGPRTWCMTRKPGA

SEQ ID NO: 12208 - protein, 851 aa, synthetic construct
MALPVTALLLPLALLLHAARPDIQMTQSPSSLSASVGDRVTITCRASQDVSTAVAWYQQKPGKAPKLLIYSASFLYSGVPSRFSGSRSGTDFTLTISSLQPEDFATYYCQQYLYQPWTFGQGTKVEIKRLEDLKNVFPPEVAVFEPSEAEISHTQKATLVCLATGFYPDHVELSWWVNGKEVHSGVSTDPQPLKEQPALNDSRYCLSSRLRVSATFWQNPRNHFRCQVQFYGLSENDEWTQDRAKPVTQIVSAEAWGRADCGFTSESYQQGVLSATILYEILLGKATLYAVLVSALVLMAMVKRKDSRGRAKRSGSGATNFSLLKQAGDVEENPGPTSMDWIWRILFLVGAATGAHSFEEVQLVESGGGLVQPGGSLRLSCAASGFNIDYYGMHWVRQAPGKGLEWVASLYGGSDSTDYADSVKGRFTISADTSKNTAYLQMNSLRAEDTAVYYCSRQYSAYFDYWGQGTLVTVSSTRIQNPDPAVYQLRDSKSSDKSVCLFTDFDSQTNVSQSKDSDVYITDKTVLDMRSMDFKSNSAVAWSNKSDFACANAFNNSIIPEDTFFPSPESSCDVKLVEKSFETDTNLNFQNLSVIGFRILLLKVAGFNLLMTLRLWSSRAKRSGSGVKQTLNFDLLKLAGDVESNPGPSRGHMTEYKPTVRLATRDDVPRAVRTLAAAFADYPATRHTVDPDRHIERVTELQELFLTRVGLDIGKVWVADDGAAVAVWTTPESVEAGAVFAEIGPRMAELSGSRLAAQQQMEGLLAPHRPKEPAWFLATVGVSPDHQGKGLGSAVVLPGVEAAERAGVPAFLETSAPRNLPFYERLGFTVTADVEVPEGPRTWCMTRKPGA

SEQ ID NO: 12209 - protein, 933 aa, synthetic construct
MALPVTALLLPLALLLHAARPDIQMTQSPSSLSASVGDRVTITCRASQDVSTAVAWYQQKPGKAPKLLIYSASFLYSGVPSRFSGSRSGTDFTLTISSLQPEDFATYYCQQYLYQPWTFGQGTKVEIKRLEDLKNVFPPEVAVFEPSEAEISHTQKATLVCLATGFYPDHVELSWWVNGKEVHSGVSTDPQPLKEQPALNDSRYCLSSRLRVSATFWQNPRNHFRCQVQFYGLSENDEWTQDRAKPVTQIVSAEAWGRADCGFTSESYQQGVLSATILYEILLGKATLYAVLVSALVLMAMVKRKDSRGRAKRSGSGATNFSLLKQAGDVEENPGPTSMDWIWRILFLVGAATGAHSFEEVQLVESGGGLVQPGGSLRLSCAASGFNIDYYGMHWVRQAPGKGLEWVASLYGGSDSTDYADSVKGRFTISADTSKNTAYLQMNSLRAEDTAVYYCSRQYSAYFDYWGQGTLVTVSSTREQKLISEEDGSGTPFPSLAPPIMLLVDGKQQMVVVCLVLDVAPPGLDSPIWFSAGNGSALDAFTYGPSPATDGTWTNLAHLSLPSEELASWEPLVCHTGPGAEGHSRSTQPMHLSGEASTARTCPQEPLRGTPGGALWLGVLRLLLFKLLLFDLLLTCSCLCDPAGPLPSPATTTRLRALGSHRLHPATETGGREATSSPRPQPRDRRWGDTPPGRKPGSPVRAKRSGSGVKQTLNFDLLKLAGDVESNPGPSRGHMTEYKPTVRLATRDDVPRAVRTLAAAFADYPATRHTVDPDRHIERVTELQELFLTRVGLDIGKVWVADDGAAVAVWTTPESVEAGAVFAEIGPRMAELSGSRLAAQQQMEGLLAPHRPKEPAWFLATVGVSPDHQGKGLGSAVVLPGVEAAERAGVPAFLETSAPRNLPFYERLGFTVTADVEVPEGPRTWCMTRKPGA

SEQ ID NO: 12210 - protein, 951 aa, synthetic construct
MALPVTALLLPLALLLHAARPLEDLKNVFPPEVAVFEPSEAEISHTQKATLVCLATGFYPDHVELSWWVNGKEVHSGVSTDPQPLKEQPALNDSRYCLSSRLRVSATFWQNPRNHFRCQVQFYGLSENDEWTQDRAKPVTQIVSAEAWGRADCGFTSESYQQGVLSATILYEILLGKATLYAVLVSALVLMAMVKRKDSRGRAKRSGSGATNFSLLKQAGDVEENPGPTSMALPVTALLLPLALLLHAARPDIQMTQSPSSLSASVGDRVTITCRASQDVSTAVAWYQQKPGKAPKLLIYSASFLYSGVPSRFSGSRSGTDFTLTISSLQPEDFATYYCQQYLYQPWTFGQGTKVEIKRGGGGSGGGGSGGGGSEVQLVESGGGLVQPGGSLRLSCAASGFNIDYYGMHWVRQAPGKGLEWVASLYGGSDSTDYADSVKGRFTISADTSKNTAYLQMNSLRAEDTAVYYCSRQYSAYFDYWGQGTLVTVSSTREQKLISEEDLGSGTPFPSLAPPIMLLVDGKQQMVVVCLVLDVAPPGLDSPIWFSAGNGSALDAFTYGPSPATDGTWTNLAHLSLPSEELASWEPLVCHTGPGAEGHSRSTQPMHLSGEASTARTCPQEPLRGTPGGALWLGVLRLLLFKLLLFDLLLTCSCLCDPAGPLPSPATTTRLRALGSHRLHPATETGGREATSSPRPQPRDRRWGDTPPGRKPGSPVRAKRSGSGVKQTLNFDLLKLAGDVESNPGPSRSRGHMTEYKPTVRLATRDDVPRAVRTLAAAFADYPATRHTVDPDRHIERVTELQELFLTRVGLDIGKVWVADDGAAVAVWTTPESVEAGAVFAEIGPRMAELSGSRLAAQQQMEGLLAPHRPKEPAWFLATVGVSPDHQGKGLGSAVVLPGVEAAERAGVPAFLETSAPRNLPFYERLGFTVTADVEVPEGPRTWCMTRKPGA

SEQ ID NO: 12211 - protein, 888 aa, synthetic construct
MALPVTALLLPLALLLHAARPDIQMTQSPSSLSASVGDRVTITCRASQDVSTAVAWYQQKPGKAPKLLIYSASFLYSGVPSRFSGSRSGTDFTLTISSLQPEDFATYYCQQYLYQPWTFGQGTKVEIKRLEGKPIPNPLLGLDSTGSGDKQLDADVSPKPTIFLPSIAETKLQKAGTYLCLLEKFFPDVIKIHWQEKKSNTILGSQEGNTMKTNDTYMKFSWLTVPEKSLDKEHRCIVRHENNKNGVDQEIIFPPIKTDVITMDPKDNCSKDANDTLLLQLTNTSAYYMYLLLLLKSVVYFAIITCCLLRRTAFCCNGEKSRAKRSGSGATNFSLLKQAGDVEENPGPTSMDWIWRILFLVGAATGAHSFEEVQLVESGGGLVQPGGSLRLSCAASGFNIDYYGMHWVRQAPGKGLEWVASLYGGSDSTDYADSVKGRFTISADTSKNTAYLQMNSLRAEDTAVYYCSRQYSAYFDYWGQGTLVTVSSTREQKLISEEDGSGSQPHTKPSVFVMKNGTNVACLVKEFYPKDIRINLVSSKKITEFDPAIVISPSGKYNAVKLGKYEDSNSVTCSVQHDNKTVHSTDFEVKTDSTDHVKPKETENTKQPSKSCHKPKAIVHTEKVNMMSLTVLGLRMLFAKTVAVNFLLTAKLFFLRAKRSGSGVKQTLNFDLLKLAGDVESNPGPSRGHMTEYKPTVRLATRDDVPRAVRTLAAAFADYPATRHTVDPDRHIERVTELQELFLTRVGLDIGKVWVADDGAAVAVWTTPESVEAGAVFAEIGPRMAELSGSRLAAQQQMEGLLAPHRPKEPAWFLATVGVSPDHQGKGLGSAVVLPGVEAAERAGVPAFLETSAPRNLPFYERLGFTVTADVEVPEGPRTWCMTRKPGA

SEQ ID NO: 12212 - protein, 626 aa, synthetic construct
MALPVTALLLPLALLLHAARPDIQMTQSPSSLSASVGDRVTITCRASQDVSTAVAWYQQKPGKAPKLLIYSASFLYSGVPSRFSGSRSGTDFTLTISSLQPEDFATYYCQQYLYQPWTFGQGTKVEIKRLESQPHTKPSVFVMKNGTNVACLVKEFYPKDIRINLVSSKKITEFDPAIVISPSGKYNAVKLGKYEDSNSVTCSVQHDNKTVHSTDFEVKTDSTDHVKPKETENTKQPSKSCHKPKAIVHTEKVNMMSLTVLGLRMLFAKTVAVNFLLTAKLFFLRAKRSGSGATNFSLLKQAGDVEENPGPTSMDWIWRILFLVGAATGAHSFEEVQLVESGGGLVQPGGSLRLSCAASGFNIDYYGMHWVRQAPGKGLEWVASLYGGSDSTDYADSVKGRFTISADTSKNTAYLQMNSLRAEDTAVYYCSRQYSAYFDYWGQGTLVTVSSTRDKQLDADVSPKPTIFLPSIAETKLQKAGTYLCLLEKFFPDVIKIHWQEKKSNTILGSQEGNTMKTNDTYMKFSWLTVPEKSLDKEHRCIVRHENNKNGVDQEIIFPPIKTDVITMDPKDNCSKDANDTLLLQLTNTSAYYMYLLLLLKSVVYFAIITCCLLRRTAFCCNGEKS

SEQ ID NO: 12213 - protein, 903 aa, synthetic construct
MALPVTALLLPLALLLHAARPLEGKPIPNPLLGLDSTGSGDKQLDADVSPKPTIFLPSIAETKLQKAGTYLCLLEKFFPDVIKIHWQEKKSNTILGSQEGNTMKTNDTYMKFSWLTVPEKSLDKEHRCIVRHENNKNGVDQEIIFPPIKTDVITMDPKDNCSKDANDTLLLQLTNTSAYYMYLLLLLKSVVYFAIITCCLLRRTAFCCNGEKSRAKRSGSGATNFSLLKQAGDVEENPGPTSMALPVTALLLPLALLLHAARPDIQMTQSPSSLSASVGDRVTITCRASQDVSTAVAWYQQKPGKAPKLLIYSASFLYSGVPSRFSGSRSGTDFTLTISSLQPEDFATYYCQQYLYQPWTFGQGTKVEIKRGGGGSGGGGSGGGGSEVQLVESGGGLVQPGGSLRLSCAASGFNIDYYGMHWVRQAPGKGLEWVASLYGGSDSTDYADSVKGRFTISADTSKNTAYLQMNSLRAEDTAVYYCSRQYSAYFDYWGQGTLVTVSSTREQKLISEEDGSGSQPHTKPSVFVMKNGTNVACLVKEFYPKDIRINLVSSKKITEFDPAIVISPSGKYNAVKLGKYEDSNSVTCSVQHDNKTVHSTDFEVKTDSTDHVKPKETENTKQPSKSCHKPKAIVHTEKVNMMSLTVLGLRMLFAKTVAVNFLLTAKLFFLRAKRSGSGVKQTLNFDLLKLAGDVESNPGPSRGHMTEYKPTVRLATRDDVPRAVRTLAAAFADYPATRHTVDPDRHIERVTELQELFLTRVGLDIGKVWVADDGAAVAVWTTPESVEAGAVFAEIGPRMAELSGSRLAAQQQMEGLLAPHRPKEPAWFLATVGVSPDHQGKGLGSAVVLPGVEAAERAGVPAFLETSAPRNLPFYERLGFTVTADVEVPEGPRTWCMTRKPGA

SEQ ID NO: 12214 - protein, 1028 aa, synthetic construct
MALPVTALLLPLALLLHAARPDIQMTQSPSSLSASVGDRVTITCRASQDVSTAVAWYQQKPGKAPKLLIYSASFLYSGVPSRFSGSRSGTDFTLTISSLQPEDFATYYCQQYLYQPWTFGQGTKVEIKRGQPKANPTVTLFPPSSEELQANKATLVCLISDFYPGAVTVAWKADGSPVKAGVETTKPSKQSNNKYAASSYLSLTPEQWKSHRSYSCQVTHEGSTVEKTVAPTECSGSQSFGLLDPKLCYLLDGILFIYGVILTALFLRVKFSRSADAPAYQQGQNQLYNELNLGRREEYDVLDKRRGRDPEMGGKPQRRKNPQEGLYNELQKDKMAEAYSEIGMKGERRRGKGHDGLYQGLSTATKDTYDALHMQALPPRRAKRSGSGATNFSLLKQAGDVEENPGPTSMDWIWRILFLVGAATGAHSFEEVQLVESGGGLVQPGGSLRLSCAASGFNIDYYGMHWVRQAPGKGLEWVASLYGGSDSTDYADSVKGRFTISADTSKNTAYLQMNSLRAEDTAVYYCSRQYSAYFDYWGQGTLVTVSSASTKGPSVFPLAPSSKSTSGGTAALGCLVKDYFPEPVTVSWNSGALTSGVHTFPAVLQSSGLYSLSSVVTVPSSSLGTQTYICNVNHKPSNTKVDKRVEPKSCGTQSFGLLDPKLCYLLDGILFIYGVILTALFLRVKFSRSADAPAYQQGQNQLYNELNLGRREEYDVLDKRRGRDPEMGGKPQRRKNPQEGLYNELQKDKMAEAYSEIGMKGERRRGKGHDGLYQGLSTATKDTYDALHMQALPPRRAKRSGSGVKQTLNFDLLKLAGDVESNPGPSRGHMTEYKPTVRLATRDDVPRAVRTLAAAFADYPATRHTVDPDRHIERVTELQELFLTRVGLDIGKVWVADDGAAVAVWTTPESVEAGAVFAEIGPRMAELSGSRLAAQQQMEGLLAPHRPKEPAWFLATVGVSPDHQGKGLGSAVVLPGVEAAERAGVPAFLETSAPRNLPFYERLGFTVTADVEVPEGPRTWCMTRKPGA

SEQ ID NO: 12215 - protein, 814 aa, synthetic construct
MALPVTALLLPLALLLHAARPDIQMTQSPSSLSASVGDRVTITCRASQDVSTAVAWYQQKPGKAPKLLIYSASFLYSGVPSRFSGSRSGTDFTLTISSLQPEDFATYYCQQYLYQPWTFGQGTKVEIKRLEDLKNVFPPEVAVFEPSEAEISHTQKATLVCLATGFYPDHVELSWWVNGKEVHSGVSTDPQPLKEQPALNDSRYCLSSRLRVSATFWQNPRNHFRCQVQFYGLSENDEWTQDRAKPVTQIVSAEAWGRADCGSQSFGLLDPKLCYLLDGILFIYGVILTALFLRVKFSRSADAPAYQQGQNQLYNELNLGRREEYDVLDKRRGRDPEMGGKPQRRKNPQEGLYNELQKDKMAEAYSEIGMKGERRRGKGHDGLYQGLSTATKDTYDALHMQALPPRRAKRSGSGATNFSLLKQAGDVEENPGPTSMDWIWRILFLVGAATGAHSFEEVQLVESGGGLVQPGGSLRLSCAASGFNIDYYGMHWVRQAPGKGLEWVASLYGGSDSTDYADSVKGRFTISADTSKNTAYLQMNSLRAEDTAVYYCSRQYSAYFDYWGQGTLVTVSSTRIQNPDPAVYQLRDSKSSDKSVCLFTDFDSQTNVSQSKDSDVYITDKTVLDMRSMDFKSNSAVAWSNKSDFACANAFNNSIIPEDTFFPSPESSCGTQSFGLLDPKLCYLLDGILFIYGVILTALFLRVKFSRSADAPAYQQGQNQLYNELNLGRREEYDVLDKRRGRDPEMGGKPQRRKNPQEGLYNELQKDKMAEAYSEIGMKGERRRGKGHDGLYQGLSTATKDTYDALHMQALPPR

SEQ ID NO: 12216 - protein, 814 aa, synthetic construct
MALPVTALLLPLALLLHAARPDIQMTQSPSSLSASVGDRVTITCRASQDVSTAVAWYQQKPGKAPKLLIYSASFLYSGVPSRFSGSRSGTDFTLTISSLQPEDFATYYCQQYLYQPWTFGQGTKVEIKRLEDLKNVFPPEVAVFEPSKAEIAHTQKATLVCLATGFYPDHVELSWWVNGKEVHSGVCTDPQPLKEQPALNDSRYCLSSRLRVSATFWQNPRNHFRCQVQFYGLSENDEWTQDRAKPVTQIVSAEAWGRADCGSQSFGLLDPKLCYLLDGILFIYGVILTALFLRVKFSRSADAPAYQQGQNQLYNELNLGRREEYDVLDKRRGRDPEMGGKPQRRKNPQEGLYNELQKDKMAEAYSEIGMKGERRRGKGHDGLYQGLSTATKDTYDALHMQALPPRRAKRSGSGATNFSLLKQAGDVEENPGPTSMDWIWRILFLVGAATGAHSFEEVQLVESGGGLVQPGGSLRLSCAASGFNIDYYGMHWVRQAPGKGLEWVASLYGGSDSTDYADSVKGRFTISADTSKNTAYLQMNSLRAEDTAVYYCSRQYSAYFDYWGQGTLVTVSSTRIQNPDPAVYQLRDSKSSDKSVCLFTDFDSQTNVSQSKDSDVYITDKCVLDMRSMDFKSNSAVAWSNKSDFACANAFNNSIIPEDTFFPSSDVPCGTQSFGLLDPKLCYLLDGILFIYGVILTALFLRVKFSRSADAPAYQQGQNQLYNELNLGRREEYDVLDKRRGRDPEMGGKPQRRKNPQEGLYNELQKDKMAEAYSEIGMKGERRRGKGHDGLYQGLSTATKDTYDALHMQALPPR

SEQ ID NO: 12217 - protein, 885 aa, synthetic construct
MALPVTALLLPLALLLHAARPDIQMTQSPSSLSASVGDRVTITCRASQDVSTAVAWYQQKPGKAPKLLIYSASFLYSGVPSRFSGSRSGTDFTLTISSLQPEDFATYYCQQYLYQPWTFGQGTKVEIKRLEGKPIPNPLLGLDSTGSGEDLKNVFPPEVAVFEPSEAEISHTQKATLVCLATGFYPDHVELSWWVNGKEVHSGVSTDPQPLKEQPALNDSRYCLSSRLRVSATFWQNPRNHFRCQVQFYGLSENDEWTQDRAKPVTQIVSAEAWGRADCGSQSFGLLDPKLCYLLDGILFIYGVILTALFLRVKFSRSADAPAYQQGQNQLYNELNLGRREEYDVLDKRRGRDPEMGGKPQRRKNPQEGLYNELQKDKMAEAYSEIGMKGERRRGKGHDGLYQGLSTATKDTYDALHMQALPPRRAKRSGSGATNFSLLKQAGDVEENPGPTSMDWIWRILFLVGAATGAHSFEEVQLVESGGGLVQPGGSLRLSCAASGFNIDYYGMHWVRQAPGKGLEWVASLYGGSDSTDYADSVKGRFTISADTSKNTAYLQMNSLRAEDTAVYYCSRQYSAYFDYWGQGTLVTVSSTREQKLISEEDGSGIQNPDPAVYQLRDSKSSDKSVCLFTDFDSQTNVSQSKDSDVYITDKTVLDMRSMDFKSNSAVAWSNKSDFACANAFNNSIIPEDTFFPSPESSCGTQSFGLLDPKLCYLLDGILFIYGVILTALFLRSKRSRLLHSDYMNMTPRRPGPTRKHYQPYAPPRDFAAYRSRVKFSRSADAPAYQQGQNQLYNELNLGRREEYDVLDKRRGRDPEMGGKPQRRKNPQEGLYNELQKDKMAEAYSEIGMKGERRRGKGHDGLYQGLSTATKDTYDALHMQALPPR

SEQ ID NO: 12218 - protein, 926 aa, synthetic construct
MALPVTALLLPLALLLHAARPDIQMTQSPSSLSASVGDRVTITCRASQDVSTAVAWYQQKPGKAPKLLIYSASFLYSGVPSRFSGSRSGTDFTLTISSLQPEDFATYYCQQYLYQPWTFGQGTKVEIKRLEGKPIPNPLLGLDSTGSGEDLKNVFPPEVAVFEPSEAEISHTQKATLVCLATGFYPDHVELSWWVNGKEVHSGVSTDPQPLKEQPALNDSRYCLSSRLRVSATFWQNPRNHFRCQVQFYGLSENDEWTQDRAKPVTQIVSAEAWGRADCGSQSFGLLDPKLCYLLDGILFIYGVILTALFLRSKRSRLLHSDYMNMTPRRPGPTRKHYQPYAPPRDFAAYRSRVKFSRSADAPAYQQGQNQLYNELNLGRREEYDVLDKRRGRDPEMGGKPQRRKNPQEGLYNELQKDKMAEAYSEIGMKGERRRGKGHDGLYQGLSTATKDTYDALHMQALPPRRAKRSGSGATNFSLLKQAGDVEENPGPTSMDWIWRILFLVGAATGAHSFEEVQLVESGGGLVQPGGSLRLSCAASGFNIDYYGMHWVRQAPGKGLEWVASLYGGSDSTDYADSVKGRFTISADTSKNTAYLQMNSLRAEDTAVYYCSRQYSAYFDYWGQGTLVTVSSTREQKLISEEDGSGIQNPDPAVYQLRDSKSSDKSVCLFTDFDSQTNVSQSKDSDVYITDKTVLDMRSMDFKSNSAVAWSNKSDFACANAFNNSIIPEDTFFPSPESSCGTQSFGLLDPKLCYLLDGILFIYGVILTALFLRSKRSRLLHSDYMNMTPRRPGPTRKHYQPYAPPRDFAAYRSRVKFSRSADAPAYQQGQNQLYNELNLGRREEYDVLDKRRGRDPEMGGKPQRRKNPQEGLYNELQKDKMAEAYSEIGMKGERRRGKGHDGLYQGLSTATKDTYDALHMQALPPR

SEQ ID NO: 12219 - protein, 887 aa, synthetic construct
MALPVTALLLPLALLLHAARPDIQMTQSPSSLSASVGDRVTITCRASQDVSTAVAWYQQKPGKAPKLLIYSASFLYSGVPSRFSGSRSGTDFTLTISSLQPEDFATYYCQQYLYQPWTFGQGTKVEIKRLEGKPIPNPLLGLDSTGSGEDLKNVFPPEVAVFEPSEAEISHTQKATLVCLATGFYPDHVELSWWVNGKEVHSGVSTDPQPLKEQPALNDSRYCLSSRLRVSATFWQNPRNHFRCQVQFYGLSENDEWTQDRAKPVTQIVSAEAWGRADCGSQSFGLLDPKLCYLLDGILFIYGVILTALFLRVKFSRSADAPAYQQGQNQLYNELNLGRREEYDVLDKRRGRDPEMGGKPQRRKNPQEGLYNELQKDKMAEAYSEIGMKGERRRGKGHDGLYQGLSTATKDTYDALHMQALPPRRAKRSGSGATNFSLLKQAGDVEENPGPTSMDWIWRILFLVGAATGAHSFEEVQLVESGGGLVQPGGSLRLSCAASGFNIDYYGMHWVRQAPGKGLEWVASLYGGSDSTDYADSVKGRFTISADTSKNTAYLQMNSLRAEDTAVYYCSRQYSAYFDYWGQGTLVTVSSTREQKLISEEDLGSGIQNPDPAVYQLRDSKSSDKSVCLFTDFDSQTNVSQSKDSDVYITDKTVLDMRSMDFKSNSAVAWSNKSDFACANAFNNSIIPEDTFFPSPESSCGTQSFGLLDPKLCYLLDGILFIYGVILTALFLKRGRKKLLYIFKQPFMRPVQTTQEEDGCSCRFPEEEEGGCELRVKFSRSADAPAYQQGQNQLYNELNLGRREEYDVLDKRRGRDPEMGGKPQRRKNPQEGLYNELQKDKMAEAYSEIGMKGERRRGKGHDGLYQGLSTATKDTYDALHMQALPPR

SEQ ID NO: 12220 - protein, 929 aa, synthetic construct
MALPVTALLLPLALLLHAARPDIQMTQSPSSLSASVGDRVTITCRASQDVSTAVAWYQQKPGKAPKLLIYSASFLYSGVPSRFSGSRSGTDFTLTISSLQPEDFATYYCQQYLYQPWTFGQGTKVEIKRLEGKPIPNPLLGLDSTGSGEDLKNVFPPEVAVFEPSEAEISHTQKATLVCLATGFYPDHVELSWWVNGKEVHSGVSTDPQPLKEQPALNDSRYCLSSRLRVSATFWQNPRNHFRCQVQFYGLSENDEWTQDRAKPVTQIVSAEAWGRADCGSQSFGLLDPKLCYLLDGILFIYGVILTALFLKRGRKKLLYIFKQPFMRPVQTTQEEDGCSCRFPEEEEGGCELRVKFSRSADAPAYQQGQNQLYNELNLGRREEYDVLDKRRGRDPEMGGKPQRRKNPQEGLYNELQKDKMAEAYSEIGMKGERRRGKGHDGLYQGLSTATKDTYDALHMQALPPRRAKRSGSGATNFSLLKQAGDVEENPGPTSMDWIWRILFLVGAATGAHSFEEVQLVESGGGLVQPGGSLRLSCAASGFNIDYYGMHWVRQAPGKGLEWVASLYGGSDSTDYADSVKGRFTISADTSKNTAYLQMNSLRAEDTAVYYCSRQYSAYFDYWGQGTLVTVSSTREQKLISEEDLGSGIQNPDPAVYQLRDSKSSDKSVCLFTDFDSQTNVSQSKDSDVYITDKTVLDMRSMDFKSNSAVAWSNKSDFACANAFNNSIIPEDTFFPSPESSCGTQSFGLLDPKLCYLLDGILFIYGVILTALFLKRGRKKLLYIFKQPFMRPVQTTQEEDGCSCRFPEEEEGGCELRVKFSRSADAPAYQQGQNQLYNELNLGRREEYDVLDKRRGRDPEMGGKPQRRKNPQEGLYNELQKDKMAEAYSEIGMKGERRRGKGHDGLYQGLSTATKDTYDALHMQALPPR

SEQ ID NO: 12221 - protein, 819 aa, synthetic construct
MALPVTALLLPLALLLHAARPDIQMTQSPSSLSASVGDRVTITCRASQDVSTAVAWYQQKPGKAPKLLIYSASFLYSGVPSRFSGSRSGTDFTLTISSLQPEDFATYYCQQYLYQPWTFGQGTKVEIKRLEQSFGLLDPKLCYLLDGILFIYGVILTALFLRVKFSRSADAPAYQQGQNQLYNELNLGRREEYDVLDKRRGRDPEMGGKPQRRKNPQEGLYNELQKDKMAEAYSEIGMKGERRRGKGHDGLYQGLSTATKDTYDALHMQALPPRRAKRSGSGATNFSLLKQAGDVEENPGPTSMDWIWRILFLVGAATGAHSFEEVQLVESGGGLVQPGGSLRLSCAASGFNIDYYGMHWVRQAPGKGLEWVASLYGGSDSTDYADSVKGRFTISADTSKNTAYLQMNSLRAEDTAVYYCSRQYSAYFDYWGQGTLVTVSSTRQSFGLLDPKLCYLLDGILFIYGVILTALFLRVKFSRSADAPAYQQGQNQLYNELNLGRREEYDVLDKRRGRDPEMGGKPQRRKNPQEGLYNELQKDKMAEAYSEIGMKGERRRGKGHDGLYQGLSTATKDTYDALHMQALPPRRAKRSGSGVKQTLNFDLLKLAGDVESNPGPSRGHMTEYKPTVRLATRDDVPRAVRTLAAAFADYPATRHTVDPDRHIERVTELQELFLTRVGLDIGKVWVADDGAAVAVWTTPESVEAGAVFAEIGPRMAELSGSRLAAQQQMEGLLAPHRPKEPAWFLATVGVSPDHQGKGLGSAVVLPGVEAAERAGVPAFLETSAPRNLPFYERLGFTVTADVEVPEGPRTWCMTRKPGA

SEQ ID NO: 12222 - protein, 644 aa, synthetic construct
MALPVTALLLPLALLLHAARPDIQMTQSPSSLSASVGDRVTITCRASQDVSTAVAWYQQKPGKAPKLLIYSASFLYSGVPSRFSGSRSGTDFTLTISSLQPEDFATYYCQQYLYQPWTFGQGTKVEIKRLEGQPKANPTVTLFPPSSEELQANKATLVCLISDFYPGAVTVAWKADGSPVKAGVETTKPSKQSNNKYAASSYLSLTPEQWKSHRSYSCQVTHEGSTVEKTVAPTECSPIKTDVITMDPKDNCSKDANDTLLLQLTNTSAYYMYLLLLLKSVVYFAIITCCLLRRTAFCCNGEKSRAKRSGSGATNFSLLKQAGDVEENPGPTSMDWIWRILFLVGAATGAHSFEEVQLVESGGGLVQPGGSLRLSCAASGFNIDYYGMHWVRQAPGKGLEWVASLYGGSDSTDYADSVKGRFTISADTSKNTAYLQMNSLRAEDTAVYYCSRQYSAYFDYWGQGTLVTVSSTRASTKGPSVFPLAPSSKSTSGGTAALGCLVKDYFPEPVTVSWNSGALTSGVHTFPAVLQSSGLYSLSSVVTVPSSSLGTQTYICNVNHKPSNTKVDKRVEPKSCEVKTDSTDHVKPKETENTKQPSKSCHKPKAIVHTEKVNMMSLTVLGLRMLFAKTVAVNFLLTAKLFFL

SEQ ID NO: 12223 - protein, 622 aa, synthetic construct
MALPVTALLLPLALLLHAARPDIQMTQSPSSLSASVGDRVTITCRASQDVSTAVAWYQQKPGKAPKLLIYSASFLYSGVPSRFSGSRSGTDFTLTISSLQPEDFATYYCQQYLYQPWTFGQGTKVEIKRLEGQPKANPTVTLFPPSSEELQANKATLVCLISDFYPGAVTVAWKADGSPVKAGVETTKPSKQSNNKYAASSYLSLTPEQWKSHRSYSCQVTHEGSTVEKTVAPTECSGRADCGITSASYHQGVLSATILYEILLGKATLYAVLVSALVLMAMVKRKDSRGRAKRSGSGATNFSLLKQAGDVEENPGPTSMDWIWRILFLVGAATGAHSFEEVQLVESGGGLVQPGGSLRLSCAASGFNIDYYGMHWVRQAPGKGLEWVASLYGGSDSTDYADSVKGRFTISADTSKNTAYLQMNSLRAEDTAVYYCSRQYSAYFDYWGQGTLVTVSSTRASTKGPSVFPLAPSSKSTSGGTAALGCLVKDYFPEPVTVSWNSGALTSGVHTFPAVLQSSGLYSLSSVVTVPSSSLGTQTYICNVNHKPSNTKVDKRVEPKSCIPEDTFFPSSDVPCDVKLVEKSFETDTNLNFQNLSVIGFRILLLKVAGFNLLMTLRLWSS

SEQ ID NO: 12224 - protein, 622 aa, synthetic construct
MALPVTALLLPLALLLHAARPDIQMTQSPSSLSASVGDRVTITCRASQDVSTAVAWYQQKPGKAPKLLIYSASFLYSGVPSRFSGSRSGTDFTLTISSLQPEDFATYYCQQYLYQPWTFGQGTKVEIKRLEGQPKANPTVTLFPPSSEELQANKATLVCLISDFYPGAVTVAWKADGSPVKAGVETTKPSKQSNNKYAASSYLSLTPEQWKSHRSYSCQVTHEGSTVEKTVAPTECSGRADCGFTSESYQQGVLSATILYEILLGKATLYAVLVSALVLMAMVKRKDSRGRAKRSGSGATNFSLLKQAGDVEENPGPTSMDWIWRILFLVGAATGAHSFEEVQLVESGGGLVQPGGSLRLSCAASGFNIDYYGMHWVRQAPGKGLEWVASLYGGSDSTDYADSVKGRFTISADTSKNTAYLQMNSLRAEDTAVYYCSRQYSAYFDYWGQGTLVTVSSTRASTKGPSVFPLAPSSKSTSGGTAALGCLVKDYFPEPVTVSWNSGALTSGVHTFPAVLQSSGLYSLSSVVTVPSSSLGTQTYICNVNHKPSNTKVDKRVEPKSCIPEDTFFPSPESSCDVKLVEKSFETDTNLNFQNLSVIGFRILLLKVAGFNLLMTLRLWSS

SEQ ID NO: 12225 - protein, 448 aa, synthetic construct
MALPVTALLLPLALLLHAARPDIQMTQSPSSLSASVGDRVTITCRASQDVSTAVAWYQQKPGKAPKLLIYSASFLYSGVPSRFSGSRSGTDFTLTISSLQPEDFATYYCQQYLYQPWTFGQGTKVEIKRGGGGSGGGGSGGGGSEVQLVESGGGLVQPGGSLRLSCAASGFNIDYYGMHWVRQAPGKGLEWVASLYGGSDSTDYADSVKGRFTISADTSKNTAYLQMNSLRAEDTAVYYCSRQYSAYFDYWGQGTLVTVSSTRDGNEEMGGITQTPYKVSISGTTVILTCPQYPGSEILWQHNDKNIGGDEDDKNIGSDEDHLSLKEFSELEQSGYYVCYPRGSKPEDANFYLYLRARVCENCMEMDVMSVATIVIVDICITGGLLLLVYYWSKNRKAKAKPVTRGAGAGGRQRGQNKERPPPVPNPDYEPIRKGQRDLYSGLNQRRI

SEQ ID NO: 12226 - protein, 413 aa, synthetic construct
MALPVTALLLPLALLLHAARPDIQMTQSPSSLSASVGDRVTITCRASQDVSTAVAWYQQKPGKAPKLLIYSASFLYSGVPSRFSGSRSGTDFTLTISSLQPEDFATYYCQQYLYQPWTFGQGTKVEIKRGGGGSGGGGSGGGGSEVQLVESGGGLVQPGGSLRLSCAASGFNIDYYGMHWVRQAPGKGLEWVASLYGGSDSTDYADSVKGRFTISADTSKNTAYLQMNSLRAEDTAVYYCSRQYSAYFDYWGQGTLVTVSSTRFKIPIEELEDRVFVNCNTSITWVEGTVGTLLSDITRLDLGKRILDPRGIYRCNGTDIYKDKESTVQVHYRMCQSCVELDPATVAGIIVTDVIATLLLALGVFCFAGHETGRLSGAADTQALLRNDQVYQPLRDRDDAQYSHLGGNWARNK

SEQ ID NO: 12227 - protein, 423 aa, synthetic construct
MALPVTALLLPLALLLHAARPDIQMTQSPSSLSASVGDRVTITCRASQDVSTAVAWYQQKPGKAPKLLIYSASFLYSGVPSRFSGSRSGTDFTLTISSLQPEDFATYYCQQYLYQPWTFGQGTKVEIKRGGGGSGGGGSGGGGSEVQLVESGGGLVQPGGSLRLSCAASGFNIDYYGMHWVRQAPGKGLEWVASLYGGSDSTDYADSVKGRFTISADTSKNTAYLQMNSLRAEDTAVYYCSRQYSAYFDYWGQGTLVTVSSTRQSIKGNHLVKVYDYQEDGSVLLTCDAEAKNITWFKDGKMIGFLTEDKKKWNLGSNAKDPRGMYQCKGSQNKSKPLQVYYRMCQNCIELNAATISGFLFAEIVSIFVLAVGVYFIAGQDGVRQSRASDKQTLLPNDQLYQPLKDREDDQYSHLQGNQLRRN

SEQ ID NO: 12228 - protein, 406 aa, synthetic construct
MALPVTALLLPLALLLHAARPDIQMTQSPSSLSASVGDRVTITCRASQDVSTAVAWYQQKPGKAPKLLIYSASFLYSGVPSRFSGSRSGTDFTLTISSLQPEDFATYYCQQYLYQPWTFGQGTKVEIKRGGGGSGGGGSGGGGSEVQLVESGGGLVQPGGSLRLSCAASGFNIDYYGMHWVRQAPGKGLEWVASLYGGSDSTDYADSVKGRFTISADTSKNTAYLQMNSLRAEDTAVYYCSRQYSAYFDYWGQGTLVTVSSTRQSFGLLDPKLCYLLDGILFIYGVILTALFLRVKFSRSADAPAYQQGQNQLYNELNLGRREEYDVLDKRRGRDPEMGGKPQRRKNPQEGLYNELQKDKMAEAYSEIGMKGERRRGKGHDGLYQGLSTATKDTYDALHMQALPPR

SEQ ID NO: 12229 - protein, 448 aa, synthetic construct
MALPVTALLLPLALLLHAARPEVQLVESGGGLVQPGGSLRLSCAASGFNIDYYGMHWVRQAPGKGLEWVASLYGGSDSTDYADSVKGRFTISADTSKNTAYLQMNSLRAEDTAVYYCSRQYSAYFDYWGQGTLVTVSSGGGGSGGGGSGGGGSDIQMTQSPSSLSASVGDRVTITCRASQDVSTAVAWYQQKPGKAPKLLIYSASFLYSGVPSRFSGSRSGTDFTLTISSLQPEDFATYYCQQYLYQPWTFGQGTKVEIKRTRDGNEEMGGITQTPYKVSISGTTVILTCPQYPGSEILWQHNDKNIGGDEDDKNIGSDEDHLSLKEFSELEQSGYYVCYPRGSKPEDANFYLYLRARVCENCMEMDVMSVATIVIVDICITGGLLLLVYYWSKNRKAKAKPVTRGAGAGGRQRGQNKERPPPVPNPDYEPIRKGQRDLYSGLNQRRI

SEQ ID NO: 12230 - protein, 413 aa, synthetic construct
MALPVTALLLPLALLLHAARPEVQLVESGGGLVQPGGSLRLSCAASGFNIDYYGMHWVRQAPGKGLEWVASLYGGSDSTDYADSVKGRFTISADTSKNTAYLQMNSLRAEDTAVYYCSRQYSAYFDYWGQGTLVTVSSGGGGSGGGGSGGGGSDIQMTQSPSSLSASVGDRVTITCRASQDVSTAVAWYQQKPGKAPKLLIYSASFLYSGVPSRFSGSRSGTDFTLTISSLQPEDFATYYCQQYLYQPWTFGQGTKVEIKRTRFKIPIEELEDRVFVNCNTSITWVEGTVGTLLSDITRLDLGKRILDPRGIYRCNGTDIYKDKESTVQVHYRMCQSCVELDPATVAGIIVTDVIATLLLALGVFCFAGHETGRLSGAADTQALLRNDQVYQPLRDRDDAQYSHLGGNWARNK

SEQ ID NO: 12231 - protein, 423 aa, synthetic construct
MALPVTALLLPLALLLHAARPEVQLVESGGGLVQPGGSLRLSCAASGFNIDYYGMHWVRQAPGKGLEWVASLYGGSDSTDYADSVKGRFTISADTSKNTAYLQMNSLRAEDTAVYYCSRQYSAYFDYWGQGTLVTVSSGGGGSGGGGSGGGGSDIQMTQSPSSLSASVGDRVTITCRASQDVSTAVAWYQQKPGKAPKLLIYSASFLYSGVPSRFSGSRSGTDFTLTISSLQPEDFATYYCQQYLYQPWTFGQGTKVEIKRTRQSIKGNHLVKVYDYQEDGSVLLTCDAEAKNITWFKDGKMIGFLTEDKKKWNLGSNAKDPRGMYQCKGSQNKSKPLQVYYRMCQNCIELNAATISGFLFAEIVSIFVLAVGVYFIAGQDGVRQSRASDKQTLLPNDQLYQPLKDREDDQYSHLQGNQLRRN

SEQ ID NO: 12232 - protein, 406 aa, synthetic construct
MALPVTALLLPLALLLHAARPEVQLVESGGGLVQPGGSLRLSCAASGFNIDYYGMHWVRQAPGKGLEWVASLYGGSDSTDYADSVKGRFTISADTSKNTAYLQMNSLRAEDTAVYYCSRQYSAYFDYWGQGTLVTVSSGGGGSGGGGSGGGGSDIQMTQSPSSLSASVGDRVTITCRASQDVSTAVAWYQQKPGKAPKLLIYSASFLYSGVPSRFSGSRSGTDFTLTISSLQPEDFATYYCQQYLYQPWTFGQGTKVEIKRTRQSFGLLDPKLCYLLDGILFIYGVILTALFLRVKFSRSADAPAYQQGQNQLYNELNLGRREEYDVLDKRRGRDPEMGGKPQRRKNPQEGLYNELQKDKMAEAYSEIGMKGERRRGKGHDGLYQGLSTATKDTYDALHMQALPPR

SEQ ID NO: 12233 - protein, 501 aa, synthetic construct
MALPVTALLLPLALLLHAARPDIQMTQSPSSLSASVGDRVTITCRASQDVSTAVAWYQQKPGKAPKLLIYSASFLYSGVPSRFSGSRSGTDFTLTISSLQPEDFATYYCQQYLYQPWTFGQGTKVEIKRGGGGSGGGGSGGGGSEVQLVESGGGLVQPGGSLRLSCAASGFNIDYYGMHWVRQAPGKGLEWVASLYGGSDSTDYADSVKGRFTISADTSKNTAYLQMNSLRAEDTAVYYCSRQYSAYFDYWGQGTLVTVSSTRGMRTEDLPKAVVFLEPQWYRVLEKDSVTLKCQGAYSPEDNSTQWFHNESLISSQASSYFIDAATVDDSGEYRCQTNLSTLSDPVQLEVHIGWLLLQAPRWVFKEEDPIHLRCHSWKNTALHKVTYLQNGKGRKYFHHNSDFYIPKATLKDSGSYFCRGLVGSKNVSSETVNITITQGLAVPTISSFFPPGYQVSFCLVMVLLFAVDTGLYFSVKTNIRSSTRDWKDHKFKWRKDPQDK

SEQ ID NO: 12234 - protein, 783 aa, synthetic construct
MALPVTALLLPLALLLHAARPDIQMTQSPSSLSASVGDRVTITCRASQDVSTAVAWYQQKPGKAPKLLIYSASFLYSGVPSRFSGSRSGTDFTLTISSLQPEDFATYYCQQYLYQPWTFGQGTKVEIKRGGGGSGGGGSGGGGSEVQLVESGGGLVQPGGSLRLSCAASGFNIDYYGMHWVRQAPGKGLEWVASLYGGSDSTDYADSVKGRFTISADTSKNTAYLQMNSLRAEDTAVYYCSRQYSAYFDYWGQGTLVTVSSTRGGSGQQQTLPKPFIWAEPHFMVPKEKQVTICCQGNYGAVEYQLHFEGSLFAVDRPKPPERINKVQFYIPDMNSRMAGQYSCIYRVGELWSEPSNLLDLVVTEMYDTPTLSVHPGPEVISGEKVTFYCRLDTATSMFLLLKEGRSSHVQRGYGKVQAEFPLGPVTTAHRGTYRCFGSYNNHAWSFPSEPVKLLVTGDIENTSLAPEDPTFPADTWGTYLLTTETGLQKDHALWDHTAQNLLRMGLAFLVLVALVWFLVEDWLSRKRTRERASRASTWEGRRRLNTQTLRAKRSGSGVKQTLNFDLLKLAGDVESNPGPSRGHMTEYKPTVRLATRDDVPRAVRTLAAAFADYPATRHTVDPDRHIERVTELQELFLTRVGLDIGKVWVADDGAAVAVWTTPESVEAGAVFAEIGPRMAELSGSRLAAQQQMEGLLAPHRPKEPAWFLATVGVSPDHQGKGLGSAVVLPGVEAAERAGVPAFLETSAPRNLPFYERLGFTVTADVEVPEGPRTWCMTRKPGA

SEQ ID NO: 12235 - protein, 616 aa, synthetic construct
MALPVTALLLPLALLLHAARPDIQMTQSPSSLSASVGDRVTITCRASQDVSTAVAWYQQKPGKAPKLLIYSASFLYSGVPSRFSGSRSGTDFTLTISSLQPEDFATYYCQQYLYQPWTFGQGTKVEIKRGGGGSGGGGSGGGGSEVQLVESGGGLVQPGGSLRLSCAASGFNIDYYGMHWVRQAPGKGLEWVASLYGGSDSTDYADSVKGRFTISADTSKNTAYLQMNSLRAEDTAVYYCSRQYSAYFDYWGQGTLVTVSSTRKIEVMYPPPYLDNEKSNGTIIHVKGARGDIENTSLAPEDPTFPADTWGTYLLTTETGLQKDHALWDHTAQNLLRMGLAFLVLVALVWFLVEDWLSRKRTRERASRASTWEGRRRLNTQTLRAKRSGSGVKQTLNFDLLKLAGDVESNPGPSRGHMTEYKPTVRLATRDDVPRAVRTLAAAFADYPATRHTVDPDRHIERVTELQELFLTRVGLDIGKVWVADDGAAVAVWTTPESVEAGAVFAEIGPRMAELSGSRLAAQQQMEGLLAPHRPKEPAWFLATVGVSPDHQGKGLGSAVVLPGVEAAERAGVPAFLETSAPRNLPFYERLGFTVTADVEVPEGPRTWCMTRKPGA

SEQ ID NO: 12236 - protein, 703 aa, synthetic construct
MALPVTALLLPLALLLHAARPDIQMTQSPSSLSASVGDRVTITCRASQDVSTAVAWYQQKPGKAPKLLIYSASFLYSGVPSRFSGSRSGTDFTLTISSLQPEDFATYYCQQYLYQPWTFGQGTKVEIKRGGGGSGGGGSGGGGSEVQLVESGGGLVQPGGSLRLSCAASGFNIDYYGMHWVRQAPGKGLEWVASLYGGSDSTDYADSVKGRFTISADTSKNTAYLQMNSLRAEDTAVYYCSRQYSAYFDYWGQGTLVTVSSTRLWVSQPPEIRTLEGSSAFLPCSFNASQGRLAIGSVTWFRDEVVPGKEVRNGTPEFRGRLAPLASSRFLHDHQAELHIRDVRGHDASIYVCRVEVLGLGVGTGNGTRLVVEKEHPQLGAGTVLLLRAGFYAVSFLSVAVGSTVYYQGKCLTWKGPRRQLPAVVPAPLPPPCGSSAHLLPPVPGGRAKRSGSGVKQTLNFDLLKLAGDVESNPGPSRMYRMQLLSCIALSLALVTNSAPTSSSTKKTQLQLEHLLLDLQMILNGINNYKNPKLTEMLTAKFYMPKKATELKHLQCLEEELKPLEEVLNLAQSKNFHLRPRDLISNINVIVLELKGSETTFMCEYADETATIVEFLNRWITFCQSIISTLTKIEVMYPPPYLDNEKSNGTIIHVKGKHLCPSPLFPGPSKPFWVLVVVGGVLACYSLLVTVAFIIFWVRSKRS

SEQ ID NO: 12237 - protein, 679 aa, synthetic construct
MALPVTALLLPLALLLHAARPDIQMTQSPSSLSASVGDRVTITCRASQDVSTAVAWYQQKPGKAPKLLIYSASFLYSGVPSRFSGSRSGTDFTLTISSLQPEDFATYYCQQYLYQPWTFGQGTKVEIKRGGGGSGGGGSGGGGSEVQLVESGGGLVQPGGSLRLSCAASGFNIDYYGMHWVRQAPGKGLEWVASLYGGSDSTDYADSVKGRFTISADTSKNTAYLQMNSLRAEDTAVYYCSRQYSAYFDYWGQGTLVTVSSTRLWVSQPPEIRTLEGSSAFLPCSFNASQGRLAIGSVTWFRDEVVPGKEVRNGTPEFRGRLAPLASSRFLHDHQAELHIRDVRGHDASIYVCRVEVLGLGVGTGNGTRLVVEKEHPQLGAGTVLLLRAGFYAVSFLSVAVGSTVYYQGKCLTWKGPRRQLPAVVPAPLPPPCGSSAHLLPPVPGGRAKRSGSGVKQTLNFDLLKLAGDVESNPGPSRGHMTEYKPTVRLATRDDVPRAVRTLAAAFADYPATRHTVDPDRHIERVTELQELFLTRVGLDIGKVWVADDGAAVAVWTTPESVEAGAVFAEIGPRMAELSGSRLAAQQQMEGLLAPHRPKEPAWFLATVGVSPDHQGKGLGSAVVLPGVEAAERAGVPAFLETSAPRNLPFYERLGFTVTADVEVPEGPRTWCMTRKPGA

SEQ ID NO: 12238 - protein, 355 aa, synthetic construct
MALPVTALLLPLALLLHAARPDIQMTQSPSSLSASVGDRVTITCRASQDVSTAVAWYQQKPGKAPKLLIYSASFLYSGVPSRFSGSRSGTDFTLTISSLQPEDFATYYCQQYLYQPWTFGQGTKVEIKRGGGGSGGGGSGGGGSEVQLVESGGGLVQPGGSLRLSCAASGFNIDYYGMHWVRQAPGKGLEWVASLYGGSDSTDYADSVKGRFTISADTSKNTAYLQMNSLRAEDTAVYYCSRQYSAYFDYWGQGTLVTVSSTRKIEVMYPPPYLDNEKSNGTIIHVKGARITQGLAVSTISSFFPPGYQVSFCLVMVLLFAVDTGLYFSVKTNIRSSTRDWKDHKFKWRKDPQDK

SEQ ID NO: 12239 - protein, 355 aa, synthetic construct
MALPVTALLLPLALLLHAARPDIQMTQSPSSLSASVGDRVTITCRASQDVSTAVAWYQQKPGKAPKLLIYSASFLYSGVPSRFSGSRSGTDFTLTISSLQPEDFATYYCQQYLYQPWTFGQGTKVEIKRGGGGSGGGGSGGGGSEVQLVESGGGLVQPGGSLRLSCAASGFNIDYYGMHWVRQAPGKGLEWVASLYGGSDSTDYADSVKGRFTISADTSKNTAYLQMNSLRAEDTAVYYCSRQYSAYFDYWGQGTLVTVSSTRKIEVMYPPPYLDNEKSNGTIIHVKGARITQGLAVPTISSFFPPGYQVSFCLVMVLLFAVDTGLYFSVKTNIRSSTRDWKDHKFKWRKDPQDK

SEQ ID NO: 12240 - protein, 334 aa, synthetic construct
MALPVTALLLPLALLLHAARPDIQMTQSPSSLSASVGDRVTITCRASQDVSTAVAWYQQKPGKAPKLLIYSASFLYSGVPSRFSGSRSGTDFTLTISSLQPEDFATYYCQQYLYQPWTFGQGTKVEIKRGGGGSGGGGSGGGGSEVQLVESGGGLVQPGGSLRLSCAASGFNIDYYGMHWVRQAPGKGLEWVASLYGGSDSTDYADSVKGRFTISADTSKNTAYLQMNSLRAEDTAVYYCSRQYSAYFDYWGQGTLVTVSSTRKIEVMYPPPYLDNEKSNGTIIHVKGARITQGLAVSTISSFSPPGYQVSFCLVMVLLFAVDTGLYFSVKTNI

SEQ ID NO: 12241 - protein, 365 aa, synthetic construct
MALPVTALLLPLALLLHAARPDIQMTQSPSSLSASVGDRVTITCRASQDVSTAVAWYQQKPGKAPKLLIYSASFLYSGVPSRFSGSRSGTDFTLTISSLQPEDFATYYCQQYLYQPWTFGQGTKVEIKRGGGGSGGGGSGGGGSEVQLVESGGGLVQPGGSLRLSCAASGFNIDYYGMHWVRQAPGKGLEWVASLYGGSDSTDYADSVKGRFTISADTSKNTAYLQMNSLRAEDTAVYYCSRQYSAYFDYWGQGTLVTVSSTRKIEVMYPPPYLDNEKSNGTIIHVKGARVEKEHPQLGAGTVLLLRAGFYAVSFLSVAVGSTVYYQGKCLTWKGPRRQLPAVVPAPLPPPCGSSAHLLPPVPGG

SEQ ID NO: 12242 - protein, 446 aa, synthetic construct
MALPVTALLLPLALLLHAARPDIQMTQSPSSLSASVGDRVTITCRASQDVSTAVAWYQQKPGKAPKLLIYSASFLYSGVPSRFSGSRSGTDFTLTISSLQPEDFATYYCQQYLYQPWTFGQGTKVEIKRGGGGSGGGGSGGGGSEVQLVESGGGLVQPGGSLRLSCAASGFNIDYYGMHWVRQAPGKGLEWVASLYGGSDSTDYADSVKGRFTISADTSKNTAYLQMNSLRAEDTAVYYCSRQYSAYFDYWGQGTLVTVSSTRKIEVMYPPPYLDNEKSNGTIIHVKGARKSVRFYLVVSPASASTQTSWTPRDLVSSQTQTQSCVPPTAGARQAPESPSTIPVPSQPQNSTLRPGPAAPIALVPVFCGLLVAKSLVLSALLVWWGDIWWKTMMELRSLDTQKATCHLQQVTDLPWTSVSSPVEREILYHTVARTKISDDDDEHTL

SEQ ID NO: 12243 - protein, 383 aa, synthetic construct
MALPVTALLLPLALLLHAARPDIQMTQSPSSLSASVGDRVTITCRASQDVSTAVAWYQQKPGKAPKLLIYSASFLYSGVPSRFSGSRSGTDFTLTISSLQPEDFATYYCQQYLYQPWTFGQGTKVEIKRGGGGSGGGGSGGGGSEVQLVESGGGLVQPGGSLRLSCAASGFNIDYYGMHWVRQAPGKGLEWVASLYGGSDSTDYADSVKGRFTISADTSKNTAYLQMNSLRAEDTAVYYCSRQYSAYFDYWGQGTLVTVSSTRKIEVMYPPPYLDNEKSNGTIIHVKGARGDIENTSLAPEDPTFPADTWGTYLLTTETGLQKDHALWDHTAQNLLRMGLAFLVLVALVWFLVEDWLSRKRTRERASRASTWEGRRRLNTQTL

SEQ ID NO: 12244 - protein, 979 aa, synthetic construct
MALPVTALLLPLALLLHAARPDIQMTQSPSSLSASVGDRVTITCRASQDVSTAVAWYQQKPGKAPKLLIYSASFLYSGVPSRFSGSRSGTDFTLTISSLQPEDFATYYCQQYLYQPWTFGQGTKVEIKRLEGQPKANPTVTLFPPSSEELQANKATLVCLISDFYPGAVTVAWKADGSPVKAGVETTKPSKQSNNKYAASSYLSLTPEQWKSHRSYSCQVTHEGSTVEKTVAPTECSGSQSFGLLDPKLCYLLDGILFIYGVILTALFLRVKFSRSADAPAYQQGQNQLYNELNLGRREEYDVLDKRRGRDPEMGGKPQRRKNPQEGLYNELQKDKMAEAYSEIGMKGERRRGKGHDGLYQGLSTATKDTYDALHMQALPPRRAKRSGSGATNFSLLKQAGDVEENPGPTSMDWIWRILFLVGAATGAHSFEEVQLVESGGGLVQPGGSLRLSCAASGFNIDYYGMHWVRQAPGKGLEWVASLYGGSDSTDYADSVKGRFTISADTSKNTAYLQMNSLRAEDTAVYYCSRQYSAYFDYWGQGTLVTVSSTRASTKGPSVFPLAPSSKSTSGGTAALGCLVKDYFPEPVTVSWNSGALTSGVHTFPAVLQSSGLYSLSSVVTVPSSSLGTQTYICNVNHKPSNTKVDKRVEPKSCGTGDIENTSLAPEDPTFPADTWGTYLLTTETGLQKDHALWDHTAQNLLRMGLAFLVLVALVWFLVEDWLSRKRTRERASRASTWEGRRRLNTQTLRAKRSGSGATNFSLLKQAGDVEENPGPSRGHMTEYKPTVRLATRDDVPRAVRTLAAAFADYPATRHTVDPDRHIERVTELQELFLTRVGLDIGKVWVADDGAAVAVWTTPESVEAGAVFAEIGPRMAELSGSRLAAQQQMEGLLAPHRPKEPAWFLATVGVSPDHQGKGLGSAVVLPGVEAAERAGVPAFLETSAPRNLPFYERLGFTVTADVEVPEGPRTWCMTRKPGA

SEQ ID NO: 12245 - protein, 1045 aa, synthetic construct
MALPVTALLLPLALLLHAARPDIQMTQSPSSLSASVGDRVTITCRASQDVSTAVAWYQQKPGKAPKLLIYSASFLYSGVPSRFSGSRSGTDFTLTISSLQPEDFATYYCQQYLYQPWTFGQGTKVEIKRLEGQPKANPTVTLFPPSSEELQANKATLVCLISDFYPGAVTVAWKADGSPVKAGVETTKPSKQSNNKYAASSYLSLTPEQWKSHRSYSCQVTHEGSTVEKTVAPTECSGSQSFGLLDPKLCYLLDGILFIYGVILTALFLRVKFSRSADAPAYQQGQNQLYNELNLGRREEYDVLDKRRGRDPEMGGKPQRRKNPQEGLYNELQKDKMAEAYSEIGMKGERRRGKGHDGLYQGLSTATKDTYDALHMQALPPRRAKRSGSGATNFSLLKQAGDVEENPGPTSMDWIWRILFLVGAATGAHSFEEVQLVESGGGLVQPGGSLRLSCAASGFNIDYYGMHWVRQAPGKGLEWVASLYGGSDSTDYADSVKGRFTISADTSKNTAYLQMNSLRAEDTAVYYCSRQYSAYFDYWGQGTLVTVSSTRASTKGPSVFPLAPSSKSTSGGTAALGCLVKDYFPEPVTVSWNSGALTSGVHTFPAVLQSSGLYSLSSVVTVPSSSLGTQTYICNVNHKPSNTKVDKRVEPKSCGTKSVRFYLVVSPASASTQTSWTPRDLVSSQTQTQSCVPPTAGARQAPESPSTIPVPSQPQNSTLRPGPAAPIALVPVFCGLLVAKSLVLSALLVWWGDIWWKTMMELRSLDTQKATCHLQQVTDLPWTSVSSPVEREILYHTVARTKISDDDDEHTLRAKRSGSGVKQTLNFDLLKLAGDVESNPGPSRGHMTEYKPTVRLATRDDVPRAVRTLAAAFADYPATRHTVDPDRHIERVTELQELFLTRVGLDIGKVWVADDGAAVAVWTTPESVEAGAVFAEIGPRMAELSGSRLAAQQQMEGLLAPHRPKEPAWFLATVGVSPDHQGKGLGSAVVLPGVEAAERAGVPAFLETSAPRNLPFYERLGFTVTADVEVPEGPRTWCMTRKPGA

SEQ ID NO: 12246 - protein, 965 aa, synthetic construct
MALPVTALLLPLALLLHAARPDIQMTQSPSSLSASVGDRVTITCRASQDVSTAVAWYQQKPGKAPKLLIYSASFLYSGVPSRFSGSRSGTDFTLTISSLQPEDFATYYCQQYLYQPWTFGQGTKVEIKRLEGQPKANPTVTLFPPSSEELQANKATLVCLISDFYPGAVTVAWKADGSPVKAGVETTKPSKQSNNKYAASSYLSLTPEQWKSHRSYSCQVTHEGSTVEKTVAPTECSGSQSFGLLDPKLCYLLDGILFIYGVILTALFLRVKFSRSADAPAYQQGQNQLYNELNLGRREEYDVLDKRRGRDPEMGGKPQRRKNPQEGLYNELQKDKMAEAYSEIGMKGERRRGKGHDGLYQGLSTATKDTYDALHMQALPPRRAKRSGSGATNFSLLKQAGDVEENPGPTSMDWIWRILFLVGAATGAHSFEEVQLVESGGGLVQPGGSLRLSCAASGFNIDYYGMHWVRQAPGKGLEWVASLYGGSDSTDYADSVKGRFTISADTSKNTAYLQMNSLRAEDTAVYYCSRQYSAYFDYWGQGTLVTVSSTRASTKGPSVFPLAPSSKSTSGGTAALGCLVKDYFPEPVTVSWNSGALTSGVHTFPAVLQSSGLYSLSSVVTVPSSSLGTQTYICNVNHKPSNTKVDKRVEPKSCGTVVEKEHPQLGAGTVLLLRAGFYAVSFLSVAVGSTVYYQGKCLTWKGPRRQLPAVVPAPLPPPCGSSAHLLPPVPGGRAKRSGSGVKQTLNFDLLKLAGDVESNPGPSRGHMTEYKPTVRLATRDDVPRAVRTLAAAFADYPATRHTVDPDRHIERVTELQELFLTRVGLDIGKVWVADDGAAVAVWTTPESVEAGAVFAEIGPRMAELSGSRLAAQQQMEGLLAPHRPKEPAWFLATVGVSPDHQGKGLGSAVVLPGVEAAERAGVPAFLETSAPRNLPFYERLGFTVTADVEVPEGPRTWCMTRKPGA

SEQ ID NO: 12247 - protein, 994 aa, synthetic construct
MALPVTALLLPLALLLHAARPDIQMTQSPSSLSASVGDRVTITCRASQDVSTAVAWYQQKPGKAPKLLIYSASFLYSGVPSRFSGSRSGTDFTLTISSLQPEDFATYYCQQYLYQPWTFGQGTKVEIKRLEDLKNVFPPEVAVFEPSEAEISHTQKATLVCLATGFYPDHVELSWWVNGKEVHSGVSTDPQPLKEQPALNDSRYCLSSRLRVSATFWQNPRNHFRCQVQFYGLSENDEWTQDRAKPVTQIVSAEAWGRADCGSQSFGLLDPKLCYLLDGILFIYGVILTALFLRVKFSRSADAPAYQQGQNQLYNELNLGRREEYDVLDKRRGRDPEMGGKPQRRKNPQEGLYNELQKDKMAEAYSEIGMKGERRRGKGHDGLYQGLSTATKDTYDALHMQALPPRRAKRSGSGATNFSLLKQAGDVEENPGPTSMDWIWRILFLVGAATGAHSFEEVQLVESGGGLVQPGGSLRLSCAASGFNIDYYGMHWVRQAPGKGLEWVASLYGGSDSTDYADSVKGRFTISADTSKNTAYLQMNSLRAEDTAVYYCSRQYSAYFDYWGQGTLVTVSSTRIQNPDPAVYQLRDSKSSDKSVCLFTDFDSQTNVSQSKDSDVYITDKTVLDMRSMDFKSNSAVAWSNKSDFACANAFNNSIIPEDTFFPSPESSCGTGDIENTSLAPEDPTFPADTWGTYLLTTETGLQKDHALWDHTAQNLLRMGLAFLVLVALVWFLVEDWLSRKRTRERASRASTWEGRRRLNTQTLRAKRSGSGATNFSLLKQAGDVEENPGPSRGHMTEYKPTVRLATRDDVPRAVRTLAAAFADYPATRHTVDPDRHIERVTELQELFLTRVGLDIGKVWVADDGAAVAVWTTPESVEAGAVFAEIGPRMAELSGSRLAAQQQMEGLLAPHRPKEPAWFLATVGVSPDHQGKGLGSAVVLPGVEAAERAGVPAFLETSAPRNLPFYERLGFTVTADVEVPEGPRTWCMTRKPGA

SEQ ID NO: 12248 - protein, 1060 aa, synthetic construct
MALPVTALLLPLALLLHAARPDIQMTQSPSSLSASVGDRVTITCRASQDVSTAVAWYQQKPGKAPKLLIYSASFLYSGVPSRFSGSRSGTDFTLTISSLQPEDFATYYCQQYLYQPWTFGQGTKVEIKRLEDLKNVFPPEVAVFEPSEAEISHTQKATLVCLATGFYPDHVELSWWVNGKEVHSGVSTDPQPLKEQPALNDSRYCLSSRLRVSATFWQNPRNHFRCQVQFYGLSENDEWTQDRAKPVTQIVSAEAWGRADCGSQSFGLLDPKLCYLLDGILFIYGVILTALFLRVKFSRSADAPAYQQGQNQLYNELNLGRREEYDVLDKRRGRDPEMGGKPQRRKNPQEGLYNELQKDKMAEAYSEIGMKGERRRGKGHDGLYQGLSTATKDTYDALHMQALPPRRAKRSGSGATNFSLLKQAGDVEENPGPTSMDWIWRILFLVGAATGAHSFEEVQLVESGGGLVQPGGSLRLSCAASGFNIDYYGMHWVRQAPGKGLEWVASLYGGSDSTDYADSVKGRFTISADTSKNTAYLQMNSLRAEDTAVYYCSRQYSAYFDYWGQGTLVTVSSTRIQNPDPAVYQLRDSKSSDKSVCLFTDFDSQTNVSQSKDSDVYITDKTVLDMRSMDFKSNSAVAWSNKSDFACANAFNNSIIPEDTFFPSPESSCGTKSVRFYLVVSPASASTQTSWTPRDLVSSQTQTQSCVPPTAGARQAPESPSTIPVPSQPQNSTLRPGPAAPIALVPVFCGLLVAKSLVLSALLVWWGDIWWKTMMELRSLDTQKATCHLQQVTDLPWTSVSSPVEREILYHTVARTKISDDDDEHTLRAKRSGSGVKQTLNFDLLKLAGDVESNPGPSRGHMTEYKPTVRLATRDDVPRAVRTLAAAFADYPATRHTVDPDRHIERVTELQELFLTRVGLDIGKVWVADDGAAVAVWTTPESVEAGAVFAEIGPRMAELSGSRLAAQQQMEGLLAPHRPKEPAWFLATVGVSPDHQGKGLGSAVVLPGVEAAERAGVPAFLETSAPRNLPFYERLGFTVTADVEVPEGPRTWCMTRKPGA

SEQ ID NO: 12249 - protein, 980 aa, synthetic construct
MALPVTALLLPLALLLHAARPDIQMTQSPSSLSASVGDRVTITCRASQDVSTAVAWYQQKPGKAPKLLIYSASFLYSGVPSRFSGSRSGTDFTLTISSLQPEDFATYYCQQYLYQPWTFGQGTKVEIKRLEDLKNVFPPEVAVFEPSEAEISHTQKATLVCLATGFYPDHVELSWWVNGKEVHSGVSTDPQPLKEQPALNDSRYCLSSRLRVSATFWQNPRNHFRCQVQFYGLSENDEWTQDRAKPVTQIVSAEAWGRADCGSQSFGLLDPKLCYLLDGILFIYGVILTALFLRVKFSRSADAPAYQQGQNQLYNELNLGRREEYDVLDKRRGRDPEMGGKPQRRKNPQEGLYNELQKDKMAEAYSEIGMKGERRRGKGHDGLYQGLSTATKDTYDALHMQALPPRRAKRSGSGATNFSLLKQAGDVEENPGPTSMDWIWRILFLVGAATGAHSFEEVQLVESGGGLVQPGGSLRLSCAASGFNIDYYGMHWVRQAPGKGLEWVASLYGGSDSTDYADSVKGRFTISADTSKNTAYLQMNSLRAEDTAVYYCSRQYSAYFDYWGQGTLVTVSSTRIQNPDPAVYQLRDSKSSDKSVCLFTDFDSQTNVSQSKDSDVYITDKTVLDMRSMDFKSNSAVAWSNKSDFACANAFNNSIIPEDTFFPSPESSCGTVVEKEHPQLGAGTVLLLRAGFYAVSFLSVAVGSTVYYQGKCLTWKGPRRQLPAVVPAPLPPPCGSSAHLLPPVPGGRAKRSGSGVKQTLNFDLLKLAGDVESNPGPSRGHMTEYKPTVRLATRDDVPRAVRTLAAAFADYPATRHTVDPDRHIERVTELQELFLTRVGLDIGKVWVADDGAAVAVWTTPESVEAGAVFAEIGPRMAELSGSRLAAQQQMEGLLAPHRPKEPAWFLATVGVSPDHQGKGLGSAVVLPGVEAAERAGVPAFLETSAPRNLPFYERLGFTVTADVEVPEGPRTWCMTRKPGA

SEQ ID NO: 12250 - protein, 951 aa, synthetic construct
MALPVTALLLPLALLLHAARPDIQMTQSPSSLSASVGDRVTITCRASQDVSTAVAWYQQKPGKAPKLLIYSASFLYSGVPSRFSGSRSGTDFTLTISSLQPEDFATYYCQQYLYQPWTFGQGTKVEIKRLEGQPKANPTVTLFPPSSEELQANKATLVCLISDFYPGAVTVAWKADGSPVKAGVETTKPSKQSNNKYAASSYLSLTPEQWKSHRSYSCQVTHEGSTVEKTVAPTECSGSQSFGLLDPKLCYLLDGILFIYGVILTALFLRVKFSRSADAPAYQQGQNQLYNELNLGRREEYDVLDKRRGRDPEMGGKPQRRKNPQEGLYNELQKDKMAEAYSEIGMKGERRRGKGHDGLYQGLSTATKDTYDALHMQALPPRRAKRSGSGATNFSLLKQAGDVEENPGPTSMDWIWRILFLVGAATGAHSFEEVQLVESGGGLVQPGGSLRLSCAASGFNIDYYGMHWVRQAPGKGLEWVASLYGGSDSTDYADSVKGRFTISADTSKNTAYLQMNSLRAEDTAVYYCSRQYSAYFDYWGQGTLVTVSSTRASTKGPSVFPLAPSSKSTSGGTAALGCLVKDYFPEPVTVSWNSGALTSGVHTFPAVLQSSGLYSLSSVVTVPSSSLGTQTYICNVNHKPSNTKVDKRVEPKSCGTITQGLAVSTISSFFPPGYQVSFCLVMVLLFAVDTGLYFSVKTNIRSSTRDWKDHKFKWRKDPQDKRAKRSGSGATNFSLLKQAGDVEENPGPSRGHMTEYKPTVRLATRDDVPRAVRTLAAAFADYPATRHTVDPDRHIERVTELQELFLTRVGLDIGKVWVADDGAAVAVWTTPESVEAGAVFAEIGPRMAELSGSRLAAQQQMEGLLAPHRPKEPAWFLATVGVSPDHQGKGLGSAVVLPGVEAAERAGVPAFLETSAPRNLPFYERLGFTVTADVEVPEGPRTWCMTRKPGA

SEQ ID NO: 12251 - protein, 966 aa, synthetic construct
MALPVTALLLPLALLLHAARPDIQMTQSPSSLSASVGDRVTITCRASQDVSTAVAWYQQKPGKAPKLLIYSASFLYSGVPSRFSGSRSGTDFTLTISSLQPEDFATYYCQQYLYQPWTFGQGTKVEIKRLEDLKNVFPPEVAVFEPSEAEISHTQKATLVCLATGFYPDHVELSWWVNGKEVHSGVSTDPQPLKEQPALNDSRYCLSSRLRVSATFWQNPRNHFRCQVQFYGLSENDEWTQDRAKPVTQIVSAEAWGRADCGSQSFGLLDPKLCYLLDGILFIYGVILTALFLRVKFSRSADAPAYQQGQNQLYNELNLGRREEYDVLDKRRGRDPEMGGKPQRRKNPQEGLYNELQKDKMAEAYSEIGMKGERRRGKGHDGLYQGLSTATKDTYDALHMQALPPRRAKRSGSGATNFSLLKQAGDVEENPGPTSMDWIWRILFLVGAATGAHSFEEVQLVESGGGLVQPGGSLRLSCAASGFNIDYYGMHWVRQAPGKGLEWVASLYGGSDSTDYADSVKGRFTISADTSKNTAYLQMNSLRAEDTAVYYCSRQYSAYFDYWGQGTLVTVSSTRIQNPDPAVYQLRDSKSSDKSVCLFTDFDSQTNVSQSKDSDVYITDKTVLDMRSMDFKSNSAVAWSNKSDFACANAFNNSIIPEDTFFPSPESSCGTITQGLAVSTISSFFPPGYQVSFCLVMVLLFAVDTGLYFSVKTNIRSSTRDWKDHKFKWRKDPQDKRAKRSGSGATNFSLLKQAGDVEENPGPSRGHMTEYKPTVRLATRDDVPRAVRTLAAAFADYPATRHTVDPDRHIERVTELQELFLTRVGLDIGKVWVADDGAAVAVWTTPESVEAGAVFAEIGPRMAELSGSRLAAQQQMEGLLAPHRPKEPAWFLATVGVSPDHQGKGLGSAVVLPGVEAAERAGVPAFLETSAPRNLPFYERLGFTVTADVEVPEGPRTWCMTRKPGA

SEQ ID NO: 12252 - protein, 649 aa, synthetic construct
MALPVTALLLPLALLLHAARPDIQMTQSPSSLSASVGDRVTITCRASQDVSTAVAWYQQKPGKAPKLLIYSASFLYSGVPSRFSGSRSGTDFTLTISSLQPEDFATYYCQQYLYQPWTFGQGTKVEIKRLEGQPKANPTVTLFPPSSEELQANKATLVCLISDFYPGAVTVAWKADGSPVKAGVETTKPSKQSNNKYAASSYLSLTPEQWKSHRSYSCQVTHEGSTVEKTVAPTECSGSLGEPQLCYILDAILFLYGIVLTLLYCRLKIQVRKAAITSYEKSDGVYTGLSTRNQETYETLKHEKPPQRAKRSGSGATNFSLLKQAGDVEENPGPTSMDWIWRILFLVGAATGAHSFEEVQLVESGGGLVQPGGSLRLSCAASGFNIDYYGMHWVRQAPGKGLEWVASLYGGSDSTDYADSVKGRFTISADTSKNTAYLQMNSLRAEDTAVYYCSRQYSAYFDYWGQGTLVTVSSTRASTKGPSVFPLAPSSKSTSGGTAALGCLVKDYFPEPVTVSWNSGALTSGVHTFPAVLQSSGLYSLSSVVTVPSSSLGTQTYICNVNHKPSNTKVDKRVEPKSCGTLGEPQLCYILDAILFLYGIVLTLLYCRLKIQVRKAAITSYEKSDGVYTGLSTRNQETYETLKHEKPPQ

SEQ ID NO: 12253 - protein, 500 aa, synthetic construct
MALPVTALLLPLALLLHAARPDIVMTQSPDSLAVSLGERATINCKSSQSLLYSSNSKNYLAWYQQKPGQPPKLLIYWASTRESGVPDRFSGSGSGTDFTLTISSLQAEDVAVYYCQQPYSYPLSFGAGTKLELKGGGGSGGGGSGGGGSQVQLVQSGAEVKKPGASVKVSCKASGYTFTDHAIHWVRQAPGQRLEWMGYFSPGNDDFKYSQKFQGRVTITADTSASTAYMELSSLRSEDTAVYFCTRSLNMAYWGQGTLVTVSSGSTSTREQKLISEEDLKIEVMYPPPYLDNEKSNGTIIHVKGKHLCPSPLFPGPSKPFWVLVVVGGVLACYSLLVTVAFIIFWVRSKRSRLLHSDYMNMTPRRPGPTRKHYQPYAPPRDFAAYRSRVKFSRSADAPAYQQGQNQLYNELNLGRREEYDVLDKRRGRDPEMGGKPRRKNPQEGLYNELQKDKMAEAYSEIGMKGERRRGKGHDGLYQGLSTATKDTYDALHMQALPPR

SEQ ID NO: 12254 - protein, 506 aa, synthetic construct
MALPVTALLLPLALLLHAARPDIVMTQSPDSLAVSLGERATINCKSSQSLLYSSNSKNYLAWYQQKPGQPPKLLIYWASTRESGVPDRFSGSGSGTDFTLTISSLQAEDVAVYYCQQPYSYPLSFGAGTKLELKGGGGSGGGGSGGGGSQVQLVQSGAEVKKPGASVKVSCKASGYTFTDHAIHWVRQAPGQRLEWMGYFSPGNDDFKYSQKFQGRVTITADTSASTAYMELSSLRSEDTAVYFCTRSLNMAYWGQGTLVTVSSGSTSTREQKLISEEDLAKPTTTPAPRPPTPAPTIASQPLSLRPEACRPAAGGAVHTRGLDFACDIYIWAPLAGTCGVLLLSLVITLYCKRGRKKLLYIFKQPFMRPVQTTQEEDGCSCRFPEEEEGGCELRVKFSRSADAPAYQQGQNQLYNELNLGRREEYDVLDKRRGRDPEMGGKPRRKNPQEGLYNELQKDKMAEAYSEIGMKGERRRGKGHDGLYQGLSTATKDTYDALHMQALPPR

SEQ ID NO: 12255 - protein, 506 aa, synthetic construct
MALPVTALLLPLALLLHAARPQVQLVQSGAEVKKPGASVKVSCKASGYTFTDHAIHWVRQAPGQRLEWMGYFSPGNDDFKYSQKFQGRVTITADTSASTAYMELSSLRSEDTAVYFCTRSLNMAYWGQGTLVTVSSGSTSGGGGSGGGGSGGGGSDIVMTQSPDSLAVSLGERATINCKSSQSLLYSSNSKNYLAWYQQKPGQPPKLLIYWASTRESGVPDRFSGSGSGTDFTLTISSLQAEDVAVYYCQQPYSYPLSFGAGTKLELKTREQKLISEEDLAKPTTTPAPRPPTPAPTIASQPLSLRPEACRPAAGGAVHTRGLDFACDIYIWAPLAGTCGVLLLSLVITLYCKRGRKKLLYIFKQPFMRPVQTTQEEDGCSCRFPEEEEGGCELRVKFSRSADAPAYQQGQNQLYNELNLGRREEYDVLDKRRGRDPEMGGKPRRKNPQEGLYNELQKDKMAEAYSEIGMKGERRRGKGHDGLYQGLSTATKDTYDALHMQALPPR

SEQ ID NO: 12256 - protein, 919 aa, synthetic construct
MALPVTALLLPLALLLHAARPDIVMTQSPDSLAVSLGERATINCKSSQSLLYSSNSKNYLAWYQQKPGQPPKLLIYWASTRESGVPDRFSGSGSGTDFTLTISSLQAEDVAVYYCQQPYSYPLSFGAGTKLELKGGGGSGGGGSGGGGSQVQLVQSGAEVKKPGASVKVSCKASGYTFTDHAIHWVRQAPGQRLEWMGYFSPGNDDFKYSQKFQGRVTITADTSASTAYMELSSLRSEDTAVYFCTRSLNMAYWGQGTLVTVSSGSTSTREQKLISEEDLAKPTTTPAPRPPTPAPTIASQPLSLRPEACRPAAGGAVHTRGLDFACDIYIWAPLAGTCGVLLLSLVITLYCGRARVKFSRSADAPAYQQGQNQLYNELNLGRREEYDVLDKRRGRDPEMGGKPRRKNPQEGLYNELQKDKMAEAYSEIGMKGERRRGKGHDGLYQGLSTATKDTYDALHMQALPPRSRGSGATNFSLLKQAGDVEENPGPGIHMATYEVLCEVARKLGTDDREVVLFLLNVFIPQPTLAQLIGALRALKEEGRLTFPLLAECLFRAGRRDLLRDLLHLDPRFLERHLAGTMSYFSPYQLTVLHVDGELCARDIRSLIFLSKDTIGSRSTPQTFLHWVYCMENLDLLGPTDVDALMSMLRSLSRVDLQRQVQTLMGLHLSGPSHSQHYRHTPLETDFYDYKDDDDKTSGSGEGRGSLLTCGDVEENPGPHMTEYKPTVRLATRDDVPRAVRTLAAAFADYPATRHTVDPDRHIERVTELQELFLTRVGLDIGKVWVADDGAAVAVWTTPESVEAGAVFAEIGPRMAELSGSRLAAQQQMEGLLAPHRPKEPAWFLATVGVSPDHQGKGLGSAVVLPGVEAAERAGVPAFLETSAPRNLPFYERLGFTVTADVEVPEGPRTWCMTRKPGA

SEQ ID NO: 12257 - protein, 859 aa, synthetic construct
MALPVTALLLPLALLLHAARPDIVMTQSPDSLAVSLGERATINCKSSQSLLYSSNSKNYLAWYQQKPGQPPKLLIYWASTRESGVPDRFSGSGSGTDFTLTISSLQAEDVAVYYCQQPYSYPLSFGAGTKLELKLEIQNPDPAVYQLRDSKSSDKSVCLFTDFDSQTNVSQSKDSDVYITDKCVLDMRSMDFKSNSAVAWSNKSDFACANAFNNSIIPEDTFFPSSDVPCDVKLVEKSFETDTNLNFQNLSVIGFRILLLKVAGFNLLMTLRLWSSRAKRSGSGVKQTLNFDLLKLAGDVESNPGPTSMDWIWRILFLVGAATGAHSFEQVQLVQSGAEVKKPGASVKVSCKASGYTFTDHAIHWVRQAPGQRLEWMGYFSPGNDDFKYSQKFQGRVTITADTSASTAYMELSSLRSEDTAVYFCTRSLNMAYWGQGTLVTVSSGSTSTREDLKNVFPPEVAVFEPSKAEIAHTQKATLVCLATGFYPDHVELSWWVNGKEVHSGVCTDPQPLKEQPALNDSRYCLSSRLRVSATFWQNPRNHFRCQVQFYGLSENDEWTQDRAKPVTQIVSAEAWGRADCGITSASYHQGVLSATILYEILLGKATLYAVLVSALVLMAMVKRKDSRGRAKRSGSGATNFSLLKQAGDVEENPGPSRGHMTEYKPTVRLATRDDVPRAVRTLAAAFADYPATRHTVDPDRHIERVTELQELFLTRVGLDIGKVWVADDGAAVAVWTTPESVEAGAVFAEIGPRMAELSGSRLAAQQQMEGLLAPHRPKEPAWFLATVGVSPDHQGKGLGSAVVLPGVEAAERAGVPAFLETSAPRNLPFYERLGFTVTADVEVPEGPRTWCMTRKPGA

SEQ ID NO: 12258 - protein, 858 aa, synthetic construct
MALPVTALLLPLALLLHAARPDIVMTQSPDSLAVSLGERATINCKSSQSLLYSSNSKNYLAWYQQKPGQPPKLLIYWASTRESGVPDRFSGSGSGTDFTLTISSLQAEDVAVYYCQQPYSYPLSFGAGTKLELKLEDLKNVFPPEVAVFEPSKAEIAHTQKATLVCLATGFYPDHVELSWWVNGKEVHSGVCTDPQPLKEQPALNDSRYCLSSRLRVSATFWQNPRNHFRCQVQFYGLSENDEWTQDRAKPVTQIVSAEAWGRADCGITSASYHQGVLSATILYEILLGKATLYAVLVSALVLMAMVKRKDSRGRAKRSGSGATNFSLLKQAGDVEENPGPTSMDWIWRILFLVGAATGAHSFEQVQLVQSGAEVKKPGASVKVSCKASGYTFTDHAIHWVRQAPGQRLEWMGYFSPGNDDFKYSQKFQGRVTITADTSASTAYMELSSLRSEDTAVYFCTRSLNMAYWGQGTLVTVSSGSTSTRIQNPDPAVYQLRDSKSSDKSVCLFTDFDSQTNVSQSKDSDVYITDKCVLDMRSMDFKSNSAVAWSNKSDFACANAFNNSIIPEDTFFPSSDVPCDVKLVEKSFETDTNLNFQNLSVIGFRILLLKVAGFNLLMTLRLWSSRAKRSGSGVKQTLNFDLLKLAGDVESNPGPSRGHMTEYKPTVRLATRDDVPRAVRTLAAAFADYPATRHTVDPDRHIERVTELQELFLTRVGLDIGKVWVADDGAAVAVWTTPESVEAGAVFAEIGPRMAELSGSRLAAQQQMEGLLAPHRPKEPAWFLATVGVSPDHQGKGLGSAVVLPGVEAAERAGVPAFLETSAPRNLPFYERLGFTVTADVEVPEGPRTWCMTRKPGA

SEQ ID NO: 12259 - protein, 625 aa, synthetic construct
MALPVTALLLPLALLLHAARPDIVMTQSPDSLAVSLGERATINCKSSQSLLYSSNSKNYLAWYQQKPGQPPKLLIYWASTRESGVPDRFSGSGSGTDFTLTISSLQAEDVAVYYCQQPYSYPLSFGAGTKLELKLEDLKNVFPPEVAVFEPSEAEISHTQKATLVCLATGFYPDHVELSWWVNGKEVHSGVCTDPQPLKEQPALNDSRYCLSSRLRVSATFWQNPRNHFRCQVQFYGLSENDEWTQDRAKPVTQIVSAEAWGRADCGFTSESYQQGVLSATILYEILLGKATLYAVLVSALVLMAMVKRKDSRGRAKRSGSGATNFSLLKQAGDVEENPGPTSMDWIWRILFLVGAATGAHSFEQVQLVQSGAEVKKPGASVKVSCKASGYTFTDHAIHWVRQAPGQRLEWMGYFSPGNDDFKYSQKFQGRVTITADTSASTAYMELSSLRSEDTAVYFCTRSLNMAYWGQGTLVTVSSGSTSTRIQNPDPAVYQLRDSKSSDKSVCLFTDFDSQTNVSQSKDSDVYITDKCVLDMRSMDFKSNSAVAWSNKSDFACANAFNNSIIPEDTFFPSPESSCDVKLVEKSFETDTNLNFQNLSVIGFRILLLKVAGFNLLMTLRLWSS

SEQ ID NO: 12260 - protein, 850 aa, synthetic construct
MALPVTALLLPLALLLHAARPDIVMTQSPDSLAVSLGERATINCKSSQSLLYSSNSKNYLAWYQQKPGQPPKLLIYWASTRESGVPDRFSGSGSGTDFTLTISSLQAEDVAVYYCQQPYSYPLSFGAGTKLELKLEDLKNVFPPEVAVFEPSEAEISHTQKATLVCLATGFYPDHVELSWWVNGKEVHSGVCTDPQPLKEQPALNDSRYCLSSRLRVSATFWQNPRNHFRCQVQFYGLSENDEWTQDRAKPVTQIVSAEAWGRADCGFTSESYQQGVLSATILYEILLGKATLYAVLVSALVLMAMVKRKDSRGRAKRSGSGATNFSLLKQAGDVEENPGPTSMDWIWRILFLVGAATGAHSFEQVQLVQSGAEVKKPGASVKVSCKASGYTFTDHAIHWVRQAPGQRLEWMGYFSPGNDDFKYSQKFQGRVTITADTSASTAYMELSSLRSEDTAVYFCTRSLNMAYWGQGTLVTVSSGSTSTRIQNPDPAVYQLRDSKSSDKSVCLFTDFDSQTNVSQSKDSDVYITDKCVLDMRSMDFKSNSAVAWSNKSDFACANAFNNSIIPEDTFFPSPESSCDVKLVEKSFETDTNLNFQNLSVIGFRILLLKVAGFNLLMTLRLWSSRAKRSGSGVKQTLNFDLLKLAGDVESNPGPSRGGIHTMATYEVLCEVARKLGTDDREVVLFLLNVFIPQPTLAQLIGALRALKEEGRLTFPLLAECLFRAGRRDLLRDLLHLDPRFLERHLAGTMSYFSPYQLTVLHVDGELCARDIRSLIFLSKDTIGSRSTPQTFLHWVYCMENLDLLGPTDVDALMSMLRSLSRVDLQRQVQTLMGLHLSGPSHSQHYRHTP

SEQ ID NO: 12261 - protein, 629 aa, synthetic construct
MALPVTALLLPLALLLHAARPDIVMTQSPDSLAVSLGERATINCKSSQSLLYSSNSKNYLAWYQQKPGQPPKLLIYWASTRESGVPDRFSGSGSGTDFTLTISSLQAEDVAVYYCQQPYSYPLSFGAGTKLELKLEIQNPDPAVYQLRDSKSSDKSVCLFTDFDSQTNVSQSKDSDVYITDKCVLDMRSMDFKSNSAVAWSNKSDFACANAFNNSIIPEDTFFPSPESSCDVKLVEKSFETDTNLNFQNLSVIGFRILLLKVAGFNLLMTLRLWSSRAKRSGSGVKQTLNFDLLKLAGDVESNPGPTSMDWIWRILFLVGAATGAHSFEQVQLVQSGAEVKKPGASVKVSCKASGYTFTDHAIHWVRQAPGQRLEWMGYFSPGNDDFKYSQKFQGRVTITADTSASTAYMELSSLRSEDTAVYFCTRSLNMAYWGQGTLVTVSSGSTSTREDLKNVFPPEVAVFEPSEAEISHTQKATLVCLATGFYPDHVELSWWVNGKEVHSGVCTDPQPLKEQPALNDSRYCLSSRLRVSATFWQNPRNHFRCQVQFYGLSENDEWTQDRAKPVTQIVSAEAWGRADCGFTSESYQQGVLSATILYEILLGKATLYAVLVSALVLMAMVKRKDSRG

SEQ ID NO: 12262 - protein, 851 aa, synthetic construct
MALPVTALLLPLALLLHAARPDIVMTQSPDSLAVSLGERATINCKSSQSLLYSSNSKNYLAWYQQKPGQPPKLLIYWASTRESGVPDRFSGSGSGTDFTLTISSLQAEDVAVYYCQQPYSYPLSFGAGTKLELKLEIQNPDPAVYQLRDSKSSDKSVCLFTDFDSQTNVSQSKDSDVYITDKCVLDMRSMDFKSNSAVAWSNKSDFACANAFNNSIIPEDTFFPSPESSCDVKLVEKSFETDTNLNFQNLSVIGFRILLLKVAGFNLLMTLRLWSSRAKRSGSGVKQTLNFDLLKLAGDVESNPGPTSMDWIWRILFLVGAATGAHSFEQVQLVQSGAEVKKPGASVKVSCKASGYTFTDHAIHWVRQAPGQRLEWMGYFSPGNDDFKYSQKFQGRVTITADTSASTAYMELSSLRSEDTAVYFCTRSLNMAYWGQGTLVTVSSGSTSTREDLKNVFPPEVAVFEPSEAEISHTQKATLVCLATGFYPDHVELSWWVNGKEVHSGVCTDPQPLKEQPALNDSRYCLSSRLRVSATFWQNPRNHFRCQVQFYGLSENDEWTQDRAKPVTQIVSAEAWGRADCGFTSESYQQGVLSATILYEILLGKATLYAVLVSALVLMAMVKRKDSRGRAKRSGSGATNFSLLKQAGDVEENPGPSRGGIHTMATYEVLCEVARKLGTDDREVVLFLLNVFIPQPTLAQLIGALRALKEEGRLTFPLLAECLFRAGRRDLLRDLLHLDPRFLERHLAGTMSYFSPYQLTVLHVDGELCARDIRSLIFLSKDTIGSRSTPQTFLHWVYCMENLDLLGPTDVDALMSMLRSLSRVDLQRQVQTLMGLHLSGPSHSQHYRHTP

SEQ ID NO: 12263 - protein, 903 aa, synthetic construct
MALPVTALLLPLALLLHAARPLEGKPIPNPLLGLDSTGSGEDLKNVFPPEVAVFEPSKAEIAHTQKATLVCLATGFYPDHVELSWWVNGKEVHSGVCTDPQPLKEQPALNDSRYCLSSRLRVSATFWQNPRNHFRCQVQFYGLSENDEWTQDRAKPVTQIVSAEAWGRADCGITSASYHQGVLSATILYEILLGKATLYAVLVSALVLMAMVKRKDSRGRAKRSGSGATNFSLLKQAGDVEENPGPTSMALPVTALLLPLALLLHAARPDIVMTQSPDSLAVSLGERATINCKSSQSLLYSSNSKNYLAWYQQKPGQPPKLLIYWASTRESGVPDRFSGSGSGTDFTLTISSLQAEDVAVYYCQQPYSYPLSFGAGTKLELKGGGGSGGGGSGGGGSQVQLVQSGAEVKKPGASVKVSCKASGYTFTDHAIHWVRQAPGQRLEWMGYFSPGNDDFKYSQKFQGRVTITADTSASTAYMELSSLRSEDTAVYFCTRSLNMAYWGQGTLVTVSSGSTSTREQKLISEEDGSGIQNPDPAVYQLRDSKSSDKSVCLFTDFDSQTNVSQSKDSDVYITDKCVLDMRSMDFKSNSAVAWSNKSDFACANAFNNSIIPEDTFFPSSDVPCDVKLVEKSFETDTNLNFQNLSVIGFRILLLKVAGFNLLMTLRLWSSRAKRSGSGVKQTLNFDLLKLAGDVESNPGPSRGHMTEYKPTVRLATRDDVPRAVRTLAAAFADYPATRHTVDPDRHIERVTELQELFLTRVGLDIGKVWVADDGAAVAVWTTPESVEAGAVFAEIGPRMAELSGSRLAAQQQMEGLLAPHRPKEPAWFLATVGVSPDHQGKGLGSAVVLPGVEAAERAGVPAFLETSAPRNLPFYERLGFTVTADVEVPEGPRTWCMTRKPGA

SEQ ID NO: 12264 - protein, 904 aa, synthetic construct
MALPVTALLLPLALLLHAARPLEQKLISEEDLGSGDRPDPAVYQLRDSKSSDKSVCLFTDFDSQTNVSQSKDSDVYITDKCVLDMRSMDFKSNSAVAWSNKSDFACANAFNNSIIPEDTFFPSPESSCDVKLVEKSFETDTNLNFQNLSVIGFRILLLKVAGFNLLMTLRLWSSSSRAKRSGSGVKQTLNFDLLKLAGDVESNPGPTSMALPVTALLLPLALLLHAARPDIVMTQSPDSLAVSLGERATINCKSSQSLLYSSNSKNYLAWYQQKPGQPPKLLIYWASTRESGVPDRFSGSGSGTDFTLTISSLQAEDVAVYYCQQPYSYPLSFGAGTKLELKGGGGSGGGGSGGGGSQVQLVQSGAEVKKPGASVKVSCKASGYTFTDHAIHWVRQAPGQRLEWMGYFSPGNDDFKYSQKFQGRVTITADTSASTAYMELSSLRSEDTAVYFCTRSLNMAYWGQGTLVTVSSGSTSTRGKPIPNPLLGLDSTGSGEDLKNVFPPEVAVFEPSEAEISHTQKATLVCLATGFYPDHVELSWWVNGKEVHSGVCTDPQPLKEQPALNDSRYCLSSRLRVSATFWQNPRNHFRCQVQFYGLSENDEWTQDRAKPVTQIVSAEAWGRADCGFTSESYQQGVLSATILYEILLGKATLYAVLVSALVLMAMVKRKDSRGRAKRSGSGATNFSLLKQAGDVEENPGPSRGHMTEYKPTVRLATRDDVPRAVRTLAAAFADYPATRHTVDPDRHIERVTELQELFLTRVGLDIGKVWVADDGAAVAVWTTPESVEAGAVFAEIGPRMAELSGSRLAAQQQMEGLLAPHRPKEPAWFLATVGVSPDHQGKGLGSAVVLPGVEAAERAGVPAFLETSAPRNLPFYERLGFTVTADVEVPEGPRTWCMTRKPGA

SEQ ID NO: 12265 - protein, 858 aa, synthetic construct
MALPVTALLLPLALLLHAARPDIVMTQSPDSLAVSLGERATINCKSSQSLLYSSNSKNYLAWYQQKPGQPPKLLIYWASTRESGVPDRFSGSGSGTDFTLTISSLQAEDVAVYYCQQPYSYPLSFGAGTKLELKLEDLKNVFPPEVAVFEPSEAEISHTQKATLVCLATGFYPDHVELSWWVNGKEVHSGVSTDPQPLKEQPALNDSRYCLSSRLRVSATFWQNPRNHFRCQVQFYGLSENDEWTQDRAKPVTQIVSAEAWGRADCGFTSESYQQGVLSATILYEILLGKATLYAVLVSALVLMAMVKRKDSRGRAKRSGSGATNFSLLKQAGDVEENPGPTSMDWIWRILFLVGAATGAHSFEQVQLVQSGAEVKKPGASVKVSCKASGYTFTDHAIHWVRQAPGQRLEWMGYFSPGNDDFKYSQKFQGRVTITADTSASTAYMELSSLRSEDTAVYFCTRSLNMAYWGQGTLVTVSSGSTSTRIQNPDPAVYQLRDSKSSDKSVCLFTDFDSQTNVSQSKDSDVYITDKTVLDMRSMDFKSNSAVAWSNKSDFACANAFNNSIIPEDTFFPSPESSCDVKLVEKSFETDTNLNFQNLSVIGFRILLLKVAGFNLLMTLRLWSSRAKRSGSGVKQTLNFDLLKLAGDVESNPGPSRGHMTEYKPTVRLATRDDVPRAVRTLAAAFADYPATRHTVDPDRHIERVTELQELFLTRVGLDIGKVWVADDGAAVAVWTTPESVEAGAVFAEIGPRMAELSGSRLAAQQQMEGLLAPHRPKEPAWFLATVGVSPDHQGKGLGSAVVLPGVEAAERAGVPAFLETSAPRNLPFYERLGFTVTADVEVPEGPRTWCMTRKPGA

SEQ ID NO: 12266 - protein, 940 aa, synthetic construct
MALPVTALLLPLALLLHAARPDIVMTQSPDSLAVSLGERATINCKSSQSLLYSSNSKNYLAWYQQKPGQPPKLLIYWASTRESGVPDRFSGSGSGTDFTLTISSLQAEDVAVYYCQQPYSYPLSFGAGTKLELKLEDLKNVFPPEVAVFEPSEAEISHTQKATLVCLATGFYPDHVELSWWVNGKEVHSGVSTDPQPLKEQPALNDSRYCLSSRLRVSATFWQNPRNHFRCQVQFYGLSENDEWTQDRAKPVTQIVSAEAWGRADCGFTSESYQQGVLSATILYEILLGKATLYAVLVSALVLMAMVKRKDSRGRAKRSGSGATNFSLLKQAGDVEENPGPTSMDWIWRILFLVGAATGAHSFEQVQLVQSGAEVKKPGASVKVSCKASGYTFTDHAIHWVRQAPGQRLEWMGYFSPGNDDFKYSQKFQGRVTITADTSASTAYMELSSLRSEDTAVYFCTRSLNMAYWGQGTLVTVSSGSTSTREQKLISEEDGSGTPFPSLAPPIMLLVDGKQQMVVVCLVLDVAPPGLDSPIWFSAGNGSALDAFTYGPSPATDGTWTNLAHLSLPSEELASWEPLVCHTGPGAEGHSRSTQPMHLSGEASTARTCPQEPLRGTPGGALWLGVLRLLLFKLLLFDLLLTCSCLCDPAGPLPSPATTTRLRALGSHRLHPATETGGREATSSPRPQPRDRRWGDTPPGRKPGSPVRAKRSGSGVKQTLNFDLLKLAGDVESNPGPSRGHMTEYKPTVRLATRDDVPRAVRTLAAAFADYPATRHTVDPDRHIERVTELQELFLTRVGLDIGKVWVADDGAAVAVWTTPESVEAGAVFAEIGPRMAELSGSRLAAQQQMEGLLAPHRPKEPAWFLATVGVSPDHQGKGLGSAVVLPGVEAAERAGVPAFLETSAPRNLPFYERLGFTVTADVEVPEGPRTWCMTRKPGA

SEQ ID NO: 12267 - protein, 958 aa, synthetic construct
MALPVTALLLPLALLLHAARPLEDLKNVFPPEVAVFEPSEAEISHTQKATLVCLATGFYPDHVELSWWVNGKEVHSGVSTDPQPLKEQPALNDSRYCLSSRLRVSATFWQNPRNHFRCQVQFYGLSENDEWTQDRAKPVTQIVSAEAWGRADCGFTSESYQQGVLSATILYEILLGKATLYAVLVSALVLMAMVKRKDSRGRAKRSGSGATNFSLLKQAGDVEENPGPTSMALPVTALLLPLALLLHAARPDIVMTQSPDSLAVSLGERATINCKSSQSLLYSSNSKNYLAWYQQKPGQPPKLLIYWASTRESGVPDRFSGSGSGTDFTLTISSLQAEDVAVYYCQQPYSYPLSFGAGTKLELKGGGGSGGGGSGGGGSQVQLVQSGAEVKKPGASVKVSCKASGYTFTDHAIHWVRQAPGQRLEWMGYFSPGNDDFKYSQKFQGRVTITADTSASTAYMELSSLRSEDTAVYFCTRSLNMAYWGQGTLVTVSSGSTSTREQKLISEEDLGSGTPFPSLAPPIMLLVDGKQQMVVVCLVLDVAPPGLDSPIWFSAGNGSALDAFTYGPSPATDGTWTNLAHLSLPSEELASWEPLVCHTGPGAEGHSRSTQPMHLSGEASTARTCPQEPLRGTPGGALWLGVLRLLLFKLLLFDLLLTCSCLCDPAGPLPSPATTTRLRALGSHRLHPATETGGREATSSPRPQPRDRRWGDTPPGRKPGSPVRAKRSGSGVKQTLNFDLLKLAGDVESNPGPSRSRGHMTEYKPTVRLATRDDVPRAVRTLAAAFADYPATRHTVDPDRHIERVTELQELFLTRVGLDIGKVWVADDGAAVAVWTTPESVEAGAVFAEIGPRMAELSGSRLAAQQQMEGLLAPHRPKEPAWFLATVGVSPDHQGKGLGSAVVLPGVEAAERAGVPAFLETSAPRNLPFYERLGFTVTADVEVPEGPRTWCMTRKPGA

SEQ ID NO: 12268 - protein, 895 aa, synthetic construct
MALPVTALLLPLALLLHAARPDIVMTQSPDSLAVSLGERATINCKSSQSLLYSSNSKNYLAWYQQKPGQPPKLLIYWASTRESGVPDRFSGSGSGTDFTLTISSLQAEDVAVYYCQQPYSYPLSFGAGTKLELKLEGKPIPNPLLGLDSTGSGDKQLDADVSPKPTIFLPSIAETKLQKAGTYLCLLEKFFPDVIKIHWQEKKSNTILGSQEGNTMKTNDTYMKFSWLTVPEKSLDKEHRCIVRHENNKNGVDQEIIFPPIKTDVITMDPKDNCSKDANDTLLLQLTNTSAYYMYLLLLLKSVVYFAIITCCLLRRTAFCCNGEKSRAKRSGSGATNFSLLKQAGDVEENPGPTSMDWIWRILFLVGAATGAHSFEQVQLVQSGAEVKKPGASVKVSCKASGYTFTDHAIHWVRQAPGQRLEWMGYFSPGNDDFKYSQKFQGRVTITADTSASTAYMELSSLRSEDTAVYFCTRSLNMAYWGQGTLVTVSSGSTSTREQKLISEEDGSGSQPHTKPSVFVMKNGTNVACLVKEFYPKDIRINLVSSKKITEFDPAIVISPSGKYNAVKLGKYEDSNSVTCSVQHDNKTVHSTDFEVKTDSTDHVKPKETENTKQPSKSCHKPKAIVHTEKVNMMSLTVLGLRMLFAKTVAVNFLLTAKLFFLRAKRSGSGVKQTLNFDLLKLAGDVESNPGPSRGHMTEYKPTVRLATRDDVPRAVRTLAAAFADYPATRHTVDPDRHIERVTELQELFLTRVGLDIGKVWVADDGAAVAVWTTPESVEAGAVFAEIGPRMAELSGSRLAAQQQMEGLLAPHRPKEPAWFLATVGVSPDHQGKGLGSAVVLPGVEAAERAGVPAFLETSAPRNLPFYERLGFTVTADVEVPEGPRTWCMTRKPGA

SEQ ID NO: 12269 - protein, 633 aa, synthetic construct
MALPVTALLLPLALLLHAARPDIVMTQSPDSLAVSLGERATINCKSSQSLLYSSNSKNYLAWYQQKPGQPPKLLIYWASTRESGVPDRFSGSGSGTDFTLTISSLQAEDVAVYYCQQPYSYPLSFGAGTKLELKLESQPHTKPSVFVMKNGTNVACLVKEFYPKDIRINLVSSKKITEFDPAIVISPSGKYNAVKLGKYEDSNSVTCSVQHDNKTVHSTDFEVKTDSTDHVKPKETENTKQPSKSCHKPKAIVHTEKVNMMSLTVLGLRMLFAKTVAVNFLLTAKLFFLRAKRSGSGATNFSLLKQAGDVEENPGPTSMDWIWRILFLVGAATGAHSFEQVQLVQSGAEVKKPGASVKVSCKASGYTFTDHAIHWVRQAPGQRLEWMGYFSPGNDDFKYSQKFQGRVTITADTSASTAYMELSSLRSEDTAVYFCTRSLNMAYWGQGTLVTVSSGSTSTRDKQLDADVSPKPTIFLPSIAETKLQKAGTYLCLLEKFFPDVIKIHWQEKKSNTILGSQEGNTMKTNDTYMKFSWLTVPEKSLDKEHRCIVRHENNKNGVDQEIIFPPIKTDVITMDPKDNCSKDANDTLLLQLTNTSAYYMYLLLLLKSVVYFAIITCCLLRRTAFCCNGEKS

SEQ ID NO: 12270 - protein, 910 aa, synthetic construct
MALPVTALLLPLALLLHAARPLEGKPIPNPLLGLDSTGSGDKQLDADVSPKPTIFLPSIAETKLQKAGTYLCLLEKFFPDVIKIHWQEKKSNTILGSQEGNTMKTNDTYMKFSWLTVPEKSLDKEHRCIVRHENNKNGVDQEIIFPPIKTDVITMDPKDNCSKDANDTLLLQLTNTSAYYMYLLLLLKSVVYFAIITCCLLRRTAFCCNGEKSRAKRSGSGATNFSLLKQAGDVEENPGPTSMALPVTALLLPLALLLHAARPDIVMTQSPDSLAVSLGERATINCKSSQSLLYSSNSKNYLAWYQQKPGQPPKLLIYWASTRESGVPDRFSGSGSGTDFTLTISSLQAEDVAVYYCQQPYSYPLSFGAGTKLELKGGGGSGGGGSGGGGSQVQLVQSGAEVKKPGASVKVSCKASGYTFTDHAIHWVRQAPGQRLEWMGYFSPGNDDFKYSQKFQGRVTITADTSASTAYMELSSLRSEDTAVYFCTRSLNMAYWGQGTLVTVSSGSTSTREQKLISEEDGSGSQPHTKPSVFVMKNGTNVACLVKEFYPKDIRINLVSSKKITEFDPAIVISPSGKYNAVKLGKYEDSNSVTCSVQHDNKTVHSTDFEVKTDSTDHVKPKETENTKQPSKSCHKPKAIVHTEKVNMMSLTVLGLRMLFAKTVAVNFLLTAKLFFLRAKRSGSGVKQTLNFDLLKLAGDVESNPGPSRGHMTEYKPTVRLATRDDVPRAVRTLAAAFADYPATRHTVDPDRHIERVTELQELFLTRVGLDIGKVWVADDGAAVAVWTTPESVEAGAVFAEIGPRMAELSGSRLAAQQQMEGLLAPHRPKEPAWFLATVGVSPDHQGKGLGSAVVLPGVEAAERAGVPAFLETSAPRNLPFYERLGFTVTADVEVPEGPRTWCMTRKPGA

SEQ ID NO: 12271 - protein, 1035 aa, synthetic construct
MALPVTALLLPLALLLHAARPDIVMTQSPDSLAVSLGERATINCKSSQSLLYSSNSKNYLAWYQQKPGQPPKLLIYWASTRESGVPDRFSGSGSGTDFTLTISSLQAEDVAVYYCQQPYSYPLSFGAGTKLELKGQPKANPTVTLFPPSSEELQANKATLVCLISDFYPGAVTVAWKADGSPVKAGVETTKPSKQSNNKYAASSYLSLTPEQWKSHRSYSCQVTHEGSTVEKTVAPTECSGSQSFGLLDPKLCYLLDGILFIYGVILTALFLRVKFSRSADAPAYQQGQNQLYNELNLGRREEYDVLDKRRGRDPEMGGKPQRRKNPQEGLYNELQKDKMAEAYSEIGMKGERRRGKGHDGLYQGLSTATKDTYDALHMQALPPRRAKRSGSGATNFSLLKQAGDVEENPGPTSMDWIWRILFLVGAATGAHSFEQVQLVQSGAEVKKPGASVKVSCKASGYTFTDHAIHWVRQAPGQRLEWMGYFSPGNDDFKYSQKFQGRVTITADTSASTAYMELSSLRSEDTAVYFCTRSLNMAYWGQGTLVTVSSGSTSASTKGPSVFPLAPSSKSTSGGTAALGCLVKDYFPEPVTVSWNSGALTSGVHTFPAVLQSSGLYSLSSVVTVPSSSLGTQTYICNVNHKPSNTKVDKRVEPKSCGTQSFGLLDPKLCYLLDGILFIYGVILTALFLRVKFSRSADAPAYQQGQNQLYNELNLGRREEYDVLDKRRGRDPEMGGKPQRRKNPQEGLYNELQKDKMAEAYSEIGMKGERRRGKGHDGLYQGLSTATKDTYDALHMQALPPRRAKRSGSGVKQTLNFDLLKLAGDVESNPGPSRGHMTEYKPTVRLATRDDVPRAVRTLAAAFADYPATRHTVDPDRHIERVTELQELFLTRVGLDIGKVWVADDGAAVAVWTTPESVEAGAVFAEIGPRMAELSGSRLAAQQQMEGLLAPHRPKEPAWFLATVGVSPDHQGKGLGSAVVLPGVEAAERAGVPAFLETSAPRNLPFYERLGFTVTADVEVPEGPRTWCMTRKPGA

SEQ ID NO: 12272 - protein, 821 aa, synthetic construct
MALPVTALLLPLALLLHAARPDIVMTQSPDSLAVSLGERATINCKSSQSLLYSSNSKNYLAWYQQKPGQPPKLLIYWASTRESGVPDRFSGSGSGTDFTLTISSLQAEDVAVYYCQQPYSYPLSFGAGTKLELKLEDLKNVFPPEVAVFEPSEAEISHTQKATLVCLATGFYPDHVELSWWVNGKEVHSGVSTDPQPLKEQPALNDSRYCLSSRLRVSATFWQNPRNHFRCQVQFYGLSENDEWTQDRAKPVTQIVSAEAWGRADCGSQSFGLLDPKLCYLLDGILFIYGVILTALFLRVKFSRSADAPAYQQGQNQLYNELNLGRREEYDVLDKRRGRDPEMGGKPQRRKNPQEGLYNELQKDKMAEAYSEIGMKGERRRGKGHDGLYQGLSTATKDTYDALHMQALPPRRAKRSGSGATNFSLLKQAGDVEENPGPTSMDWIWRILFLVGAATGAHSFEQVQLVQSGAEVKKPGASVKVSCKASGYTFTDHAIHWVRQAPGQRLEWMGYFSPGNDDFKYSQKFQGRVTITADTSASTAYMELSSLRSEDTAVYFCTRSLNMAYWGQGTLVTVSSGSTSTRIQNPDPAVYQLRDSKSSDKSVCLFTDFDSQTNVSQSKDSDVYITDKTVLDMRSMDFKSNSAVAWSNKSDFACANAFNNSIIPEDTFFPSPESSCGTQSFGLLDPKLCYLLDGILFIYGVILTALFLRVKFSRSADAPAYQQGQNQLYNELNLGRREEYDVLDKRRGRDPEMGGKPQRRKNPQEGLYNELQKDKMAEAYSEIGMKGERRRGKGHDGLYQGLSTATKDTYDALHMQALPPR

SEQ ID NO: 12273 - protein, 821 aa, synthetic construct
MALPVTALLLPLALLLHAARPDIVMTQSPDSLAVSLGERATINCKSSQSLLYSSNSKNYLAWYQQKPGQPPKLLIYWASTRESGVPDRFSGSGSGTDFTLTISSLQAEDVAVYYCQQPYSYPLSFGAGTKLELKLEDLKNVFPPEVAVFEPSKAEIAHTQKATLVCLATGFYPDHVELSWWVNGKEVHSGVCTDPQPLKEQPALNDSRYCLSSRLRVSATFWQNPRNHFRCQVQFYGLSENDEWTQDRAKPVTQIVSAEAWGRADCGSQSFGLLDPKLCYLLDGILFIYGVILTALFLRVKFSRSADAPAYQQGQNQLYNELNLGRREEYDVLDKRRGRDPEMGGKPQRRKNPQEGLYNELQKDKMAEAYSEIGMKGERRRGKGHDGLYQGLSTATKDTYDALHMQALPPRRAKRSGSGATNFSLLKQAGDVEENPGPTSMDWIWRILFLVGAATGAHSFEQVQLVQSGAEVKKPGASVKVSCKASGYTFTDHAIHWVRQAPGQRLEWMGYFSPGNDDFKYSQKFQGRVTITADTSASTAYMELSSLRSEDTAVYFCTRSLNMAYWGQGTLVTVSSGSTSTRIQNPDPAVYQLRDSKSSDKSVCLFTDFDSQTNVSQSKDSDVYITDKCVLDMRSMDFKSNSAVAWSNKSDFACANAFNNSIIPEDTFFPSSDVPCGTQSFGLLDPKLCYLLDGILFIYGVILTALFLRVKFSRSADAPAYQQGQNQLYNELNLGRREEYDVLDKRRGRDPEMGGKPQRRKNPQEGLYNELQKDKMAEAYSEIGMKGERRRGKGHDGLYQGLSTATKDTYDALHMQALPPR

SEQ ID NO: 12274 - protein, 892 aa, synthetic construct
MALPVTALLLPLALLLHAARPDIVMTQSPDSLAVSLGERATINCKSSQSLLYSSNSKNYLAWYQQKPGQPPKLLIYWASTRESGVPDRFSGSGSGTDFTLTISSLQAEDVAVYYCQQPYSYPLSFGAGTKLELKLEGKPIPNPLLGLDSTGSGEDLKNVFPPEVAVFEPSEAEISHTQKATLVCLATGFYPDHVELSWWVNGKEVHSGVSTDPQPLKEQPALNDSRYCLSSRLRVSATFWQNPRNHFRCQVQFYGLSENDEWTQDRAKPVTQIVSAEAWGRADCGSQSFGLLDPKLCYLLDGILFIYGVILTALFLRVKFSRSADAPAYQQGQNQLYNELNLGRREEYDVLDKRRGRDPEMGGKPQRRKNPQEGLYNELQKDKMAEAYSEIGMKGERRRGKGHDGLYQGLSTATKDTYDALHMQALPPRRAKRSGSGATNFSLLKQAGDVEENPGPTSMDWIWRILFLVGAATGAHSFEQVQLVQSGAEVKKPGASVKVSCKASGYTFTDHAIHWVRQAPGQRLEWMGYFSPGNDDFKYSQKFQGRVTITADTSASTAYMELSSLRSEDTAVYFCTRSLNMAYWGQGTLVTVSSGSTSTREQKLISEEDGSGIQNPDPAVYQLRDSKSSDKSVCLFTDFDSQTNVSQSKDSDVYITDKTVLDMRSMDFKSNSAVAWSNKSDFACANAFNNSIIPEDTFFPSPESSCGTQSFGLLDPKLCYLLDGILFIYGVILTALFLRSKRSRLLHSDYMNMTPRRPGPTRKHYQPYAPPRDFAAYRSRVKFSRSADAPAYQQGQNQLYNELNLGRREEYDVLDKRRGRDPEMGGKPQRRKNPQEGLYNELQKDKMAEAYSEIGMKGERRRGKGHDGLYQGLSTATKDTYDALHMQALPPR

SEQ ID NO: 12275 - protein, 933 aa, synthetic construct
MALPVTALLLPLALLLHAARPDIVMTQSPDSLAVSLGERATINCKSSQSLLYSSNSKNYLAWYQQKPGQPPKLLIYWASTRESGVPDRFSGSGSGTDFTLTISSLQAEDVAVYYCQQPYSYPLSFGAGTKLELKLEGKPIPNPLLGLDSTGSGEDLKNVFPPEVAVFEPSEAEISHTQKATLVCLATGFYPDHVELSWWVNGKEVHSGVSTDPQPLKEQPALNDSRYCLSSRLRVSATFWQNPRNHFRCQVQFYGLSENDEWTQDRAKPVTQIVSAEAWGRADCGSQSFGLLDPKLCYLLDGILFIYGVILTALFLRSKRSRLLHSDYMNMTPRRPGPTRKHYQPYAPPRDFAAYRSRVKFSRSADAPAYQQGQNQLYNELNLGRREEYDVLDKRRGRDPEMGGKPQRRKNPQEGLYNELQKDKMAEAYSEIGMKGERRRGKGHDGLYQGLSTATKDTYDALHMQALPPRRAKRSGSGATNFSLLKQAGDVEENPGPTSMDWIWRILFLVGAATGAHSFEQVQLVQSGAEVKKPGASVKVSCKASGYTFTDHAIHWVRQAPGQRLEWMGYFSPGNDDFKYSQKFQGRVTITADTSASTAYMELSSLRSEDTAVYFCTRSLNMAYWGQGTLVTVSSGSTSTREQKLISEEDGSGIQNPDPAVYQLRDSKSSDKSVCLFTDFDSQTNVSQSKDSDVYITDKTVLDMRSMDFKSNSAVAWSNKSDFACANAFNNSIIPEDTFFPSPESSCGTQSFGLLDPKLCYLLDGILFIYGVILTALFLRSKRSRLLHSDYMNMTPRRPGPTRKHYQPYAPPRDFAAYRSRVKFSRSADAPAYQQGQNQLYNELNLGRREEYDVLDKRRGRDPEMGGKPQRRKNPQEGLYNELQKDKMAEAYSEIGMKGERRRGKGHDGLYQGLSTATKDTYDALHMQALPPR

SEQ ID NO: 12276 - protein, 894 aa, synthetic construct
MALPVTALLLPLALLLHAARPDIVMTQSPDSLAVSLGERATINCKSSQSLLYSSNSKNYLAWYQQKPGQPPKLLIYWASTRESGVPDRFSGSGSGTDFTLTISSLQAEDVAVYYCQQPYSYPLSFGAGTKLELKLEGKPIPNPLLGLDSTGSGEDLKNVFPPEVAVFEPSEAEISHTQKATLVCLATGFYPDHVELSWWVNGKEVHSGVSTDPQPLKEQPALNDSRYCLSSRLRVSATFWQNPRNHFRCQVQFYGLSENDEWTQDRAKPVTQIVSAEAWGRADCGSQSFGLLDPKLCYLLDGILFIYGVILTALFLRVKFSRSADAPAYQQGQNQLYNELNLGRREEYDVLDKRRGRDPEMGGKPQRRKNPQEGLYNELQKDKMAEAYSEIGMKGERRRGKGHDGLYQGLSTATKDTYDALHMQALPPRRAKRSGSGATNFSLLKQAGDVEENPGPTSMDWIWRILFLVGAATGAHSFEQVQLVQSGAEVKKPGASVKVSCKASGYTFTDHAIHWVRQAPGQRLEWMGYFSPGNDDFKYSQKFQGRVTITADTSASTAYMELSSLRSEDTAVYFCTRSLNMAYWGQGTLVTVSSGSTSTREQKLISEEDLGSGIQNPDPAVYQLRDSKSSDKSVCLFTDFDSQTNVSQSKDSDVYITDKTVLDMRSMDFKSNSAVAWSNKSDFACANAFNNSIIPEDTFFPSPESSCGTQSFGLLDPKLCYLLDGILFIYGVILTALFLKRGRKKLLYIFKQPFMRPVQTTQEEDGCSCRFPEEEEGGCELRVKFSRSADAPAYQQGQNQLYNELNLGRREEYDVLDKRRGRDPEMGGKPQRRKNPQEGLYNELQKDKMAEAYSEIGMKGERRRGKGHDGLYQGLSTATKDTYDALHMQALPPR

SEQ ID NO: 12277 - protein, 936 aa, synthetic construct
MALPVTALLLPLALLLHAARPDIVMTQSPDSLAVSLGERATINCKSSQSLLYSSNSKNYLAWYQQKPGQPPKLLIYWASTRESGVPDRFSGSGSGTDFTLTISSLQAEDVAVYYCQQPYSYPLSFGAGTKLELKLEGKPIPNPLLGLDSTGSGEDLKNVFPPEVAVFEPSEAEISHTQKATLVCLATGFYPDHVELSWWVNGKEVHSGVSTDPQPLKEQPALNDSRYCLSSRLRVSATFWQNPRNHFRCQVQFYGLSENDEWTQDRAKPVTQIVSAEAWGRADCGSQSFGLLDPKLCYLLDGILFIYGVILTALFLKRGRKKLLYIFKQPFMRPVQTTQEEDGCSCRFPEEEEGGCELRVKFSRSADAPAYQQGQNQLYNELNLGRREEYDVLDKRRGRDPEMGGKPQRRKNPQEGLYNELQKDKMAEAYSEIGMKGERRRGKGHDGLYQGLSTATKDTYDALHMQALPPRRAKRSGSGATNFSLLKQAGDVEENPGPTSMDWIWRILFLVGAATGAHSFEQVQLVQSGAEVKKPGASVKVSCKASGYTFTDHAIHWVRQAPGQRLEWMGYFSPGNDDFKYSQKFQGRVTITADTSASTAYMELSSLRSEDTAVYFCTRSLNMAYWGQGTLVTVSSGSTSTREQKLISEEDLGSGIQNPDPAVYQLRDSKSSDKSVCLFTDFDSQTNVSQSKDSDVYITDKTVLDMRSMDFKSNSAVAWSNKSDFACANAFNNSIIPEDTFFPSPESSCGTQSFGLLDPKLCYLLDGILFIYGVILTALFLKRGRKKLLYIFKQPFMRPVQTTQEEDGCSCRFPEEEEGGCELRVKFSRSADAPAYQQGQNQLYNELNLGRREEYDVLDKRRGRDPEMGGKPQRRKNPQEGLYNELQKDKMAEAYSEIGMKGERRRGKGHDGLYQGLSTATKDTYDALHMQALPPR

SEQ ID NO: 12278 - protein, 826 aa, synthetic construct
MALPVTALLLPLALLLHAARPDIVMTQSPDSLAVSLGERATINCKSSQSLLYSSNSKNYLAWYQQKPGQPPKLLIYWASTRESGVPDRFSGSGSGTDFTLTISSLQAEDVAVYYCQQPYSYPLSFGAGTKLELKLEQSFGLLDPKLCYLLDGILFIYGVILTALFLRVKFSRSADAPAYQQGQNQLYNELNLGRREEYDVLDKRRGRDPEMGGKPQRRKNPQEGLYNELQKDKMAEAYSEIGMKGERRRGKGHDGLYQGLSTATKDTYDALHMQALPPRRAKRSGSGATNFSLLKQAGDVEENPGPTSMDWIWRILFLVGAATGAHSFEQVQLVQSGAEVKKPGASVKVSCKASGYTFTDHAIHWVRQAPGQRLEWMGYFSPGNDDFKYSQKFQGRVTITADTSASTAYMELSSLRSEDTAVYFCTRSLNMAYWGQGTLVTVSSGSTSTRQSFGLLDPKLCYLLDGILFIYGVILTALFLRVKFSRSADAPAYQQGQNQLYNELNLGRREEYDVLDKRRGRDPEMGGKPQRRKNPQEGLYNELQKDKMAEAYSEIGMKGERRRGKGHDGLYQGLSTATKDTYDALHMQALPPRRAKRSGSGVKQTLNFDLLKLAGDVESNPGPSRGHMTEYKPTVRLATRDDVPRAVRTLAAAFADYPATRHTVDPDRHIERVTELQELFLTRVGLDIGKVWVADDGAAVAVWTTPESVEAGAVFAEIGPRMAELSGSRLAAQQQMEGLLAPHRPKEPAWFLATVGVSPDHQGKGLGSAVVLPGVEAAERAGVPAFLETSAPRNLPFYERLGFTVTADVEVPEGPRTWCMTRKPGA

SEQ ID NO: 12279 - protein, 651 aa, synthetic construct
MALPVTALLLPLALLLHAARPDIVMTQSPDSLAVSLGERATINCKSSQSLLYSSNSKNYLAWYQQKPGQPPKLLIYWASTRESGVPDRFSGSGSGTDFTLTISSLQAEDVAVYYCQQPYSYPLSFGAGTKLELKLEGQPKANPTVTLFPPSSEELQANKATLVCLISDFYPGAVTVAWKADGSPVKAGVETTKPSKQSNNKYAASSYLSLTPEQWKSHRSYSCQVTHEGSTVEKTVAPTECSPIKTDVITMDPKDNCSKDANDTLLLQLTNTSAYYMYLLLLLKSVVYFAIITCCLLRRTAFCCNGEKSRAKRSGSGATNFSLLKQAGDVEENPGPTSMDWIWRILFLVGAATGAHSFEQVQLVQSGAEVKKPGASVKVSCKASGYTFTDHAIHWVRQAPGQRLEWMGYFSPGNDDFKYSQKFQGRVTITADTSASTAYMELSSLRSEDTAVYFCTRSLNMAYWGQGTLVTVSSGSTSTRASTKGPSVFPLAPSSKSTSGGTAALGCLVKDYFPEPVTVSWNSGALTSGVHTFPAVLQSSGLYSLSSVVTVPSSSLGTQTYICNVNHKPSNTKVDKRVEPKSCEVKTDSTDHVKPKETENTKQPSKSCHKPKAIVHTEKVNMMSLTVLGLRMLFAKTVAVNFLLTAKLFFL

SEQ ID NO: 12280 - protein, 629 aa, synthetic construct
MALPVTALLLPLALLLHAARPDIVMTQSPDSLAVSLGERATINCKSSQSLLYSSNSKNYLAWYQQKPGQPPKLLIYWASTRESGVPDRFSGSGSGTDFTLTISSLQAEDVAVYYCQQPYSYPLSFGAGTKLELKLEGQPKANPTVTLFPPSSEELQANKATLVCLISDFYPGAVTVAWKADGSPVKAGVETTKPSKQSNNKYAASSYLSLTPEQWKSHRSYSCQVTHEGSTVEKTVAPTECSGRADCGITSASYHQGVLSATILYEILLGKATLYAVLVSALVLMAMVKRKDSRGRAKRSGSGATNFSLLKQAGDVEENPGPTSMDWIWRILFLVGAATGAHSFEQVQLVQSGAEVKKPGASVKVSCKASGYTFTDHAIHWVRQAPGQRLEWMGYFSPGNDDFKYSQKFQGRVTITADTSASTAYMELSSLRSEDTAVYFCTRSLNMAYWGQGTLVTVSSGSTSTRASTKGPSVFPLAPSSKSTSGGTAALGCLVKDYFPEPVTVSWNSGALTSGVHTFPAVLQSSGLYSLSSVVTVPSSSLGTQTYICNVNHKPSNTKVDKRVEPKSCIPEDTFFPSSDVPCDVKLVEKSFETDTNLNFQNLSVIGFRILLLKVAGFNLLMTLRLWSS

SEQ ID NO: 12281 - protein, 629 aa, synthetic construct
MALPVTALLLPLALLLHAARPDIVMTQSPDSLAVSLGERATINCKSSQSLLYSSNSKNYLAWYQQKPGQPPKLLIYWASTRESGVPDRFSGSGSGTDFTLTISSLQAEDVAVYYCQQPYSYPLSFGAGTKLELKLEGQPKANPTVTLFPPSSEELQANKATLVCLISDFYPGAVTVAWKADGSPVKAGVETTKPSKQSNNKYAASSYLSLTPEQWKSHRSYSCQVTHEGSTVEKTVAPTECSGRADCGFTSESYQQGVLSATILYEILLGKATLYAVLVSALVLMAMVKRKDSRGRAKRSGSGATNFSLLKQAGDVEENPGPTSMDWIWRILFLVGAATGAHSFEQVQLVQSGAEVKKPGASVKVSCKASGYTFTDHAIHWVRQAPGQRLEWMGYFSPGNDDFKYSQKFQGRVTITADTSASTAYMELSSLRSEDTAVYFCTRSLNMAYWGQGTLVTVSSGSTSTRASTKGPSVFPLAPSSKSTSGGTAALGCLVKDYFPEPVTVSWNSGALTSGVHTFPAVLQSSGLYSLSSVVTVPSSSLGTQTYICNVNHKPSNTKVDKRVEPKSCIPEDTFFPSPESSCDVKLVEKSFETDTNLNFQNLSVIGFRILLLKVAGFNLLMTLRLWSS

SEQ ID NO: 12282 - protein, 455 aa, synthetic construct
MALPVTALLLPLALLLHAARPDIVMTQSPDSLAVSLGERATINCKSSQSLLYSSNSKNYLAWYQQKPGQPPKLLIYWASTRESGVPDRFSGSGSGTDFTLTISSLQAEDVAVYYCQQPYSYPLSFGAGTKLELKGGGGSGGGGSGGGGSQVQLVQSGAEVKKPGASVKVSCKASGYTFTDHAIHWVRQAPGQRLEWMGYFSPGNDDFKYSQKFQGRVTITADTSASTAYMELSSLRSEDTAVYFCTRSLNMAYWGQGTLVTVSSGSTSTRDGNEEMGGITQTPYKVSISGTTVILTCPQYPGSEILWQHNDKNIGGDEDDKNIGSDEDHLSLKEFSELEQSGYYVCYPRGSKPEDANFYLYLRARVCENCMEMDVMSVATIVIVDICITGGLLLLVYYWSKNRKAKAKPVTRGAGAGGRQRGQNKERPPPVPNPDYEPIRKGQRDLYSGLNQRRI

SEQ ID NO: 12283 - protein, 420 aa, synthetic construct
MALPVTALLLPLALLLHAARPDIVMTQSPDSLAVSLGERATINCKSSQSLLYSSNSKNYLAWYQQKPGQPPKLLIYWASTRESGVPDRFSGSGSGTDFTLTISSLQAEDVAVYYCQQPYSYPLSFGAGTKLELKGGGGSGGGGSGGGGSQVQLVQSGAEVKKPGASVKVSCKASGYTFTDHAIHWVRQAPGQRLEWMGYFSPGNDDFKYSQKFQGRVTITADTSASTAYMELSSLRSEDTAVYFCTRSLNMAYWGQGTLVTVSSGSTSTRFKIPIEELEDRVFVNCNTSITWVEGTVGTLLSDITRLDLGKRILDPRGIYRCNGTDIYKDKESTVQVHYRMCQSCVELDPATVAGIIVTDVIATLLLALGVFCFAGHETGRLSGAADTQALLRNDQVYQPLRDRDDAQYSHLGGNWARNK

SEQ ID NO: 12284 - protein, 430 aa, synthetic construct
MALPVTALLLPLALLLHAARPDIVMTQSPDSLAVSLGERATINCKSSQSLLYSSNSKNYLAWYQQKPGQPPKLLIYWASTRESGVPDRFSGSGSGTDFTLTISSLQAEDVAVYYCQQPYSYPLSFGAGTKLELKGGGGSGGGGSGGGGSQVQLVQSGAEVKKPGASVKVSCKASGYTFTDHAIHWVRQAPGQRLEWMGYFSPGNDDFKYSQKFQGRVTITADTSASTAYMELSSLRSEDTAVYFCTRSLNMAYWGQGTLVTVSSGSTSTRQSIKGNHLVKVYDYQEDGSVLLTCDAEAKNITWFKDGKMIGFLTEDKKKWNLGSNAKDPRGMYQCKGSQNKSKPLQVYYRMCQNCIELNAATISGFLFAEIVSIFVLAVGVYFIAGQDGVRQSRASDKQTLLPNDQLYQPLKDREDDQYSHLQGNQLRRN

SEQ ID NO: 12285 - protein, 413 aa, synthetic construct
MALPVTALLLPLALLLHAARPDIVMTQSPDSLAVSLGERATINCKSSQSLLYSSNSKNYLAWYQQKPGQPPKLLIYWASTRESGVPDRFSGSGSGTDFTLTISSLQAEDVAVYYCQQPYSYPLSFGAGTKLELKGGGGSGGGGSGGGGSQVQLVQSGAEVKKPGASVKVSCKASGYTFTDHAIHWVRQAPGQRLEWMGYFSPGNDDFKYSQKFQGRVTITADTSASTAYMELSSLRSEDTAVYFCTRSLNMAYWGQGTLVTVSSGSTSTRQSFGLLDPKLCYLLDGILFIYGVILTALFLRVKFSRSADAPAYQQGQNQLYNELNLGRREEYDVLDKRRGRDPEMGGKPQRRKNPQEGLYNELQKDKMAEAYSEIGMKGERRRGKGHDGLYQGLSTATKDTYDALHMQALPPR

SEQ ID NO: 12286 - protein, 455 aa, synthetic construct
MALPVTALLLPLALLLHAARPQVQLVQSGAEVKKPGASVKVSCKASGYTFTDHAIHWVRQAPGQRLEWMGYFSPGNDDFKYSQKFQGRVTITADTSASTAYMELSSLRSEDTAVYFCTRSLNMAYWGQGTLVTVSSGSTSGGGGSGGGGSGGGGSDIVMTQSPDSLAVSLGERATINCKSSQSLLYSSNSKNYLAWYQQKPGQPPKLLIYWASTRESGVPDRFSGSGSGTDFTLTISSLQAEDVAVYYCQQPYSYPLSFGAGTKLELKTRDGNEEMGGITQTPYKVSISGTTVILTCPQYPGSEILWQHNDKNIGGDEDDKNIGSDEDHLSLKEFSELEQSGYYVCYPRGSKPEDANFYLYLRARVCENCMEMDVMSVATIVIVDICITGGLLLLVYYWSKNRKAKAKPVTRGAGAGGRQRGQNKERPPPVPNPDYEPIRKGQRDLYSGLNQRRI

SEQ ID NO: 12287 - protein, 420 aa, synthetic construct
MALPVTALLLPLALLLHAARPQVQLVQSGAEVKKPGASVKVSCKASGYTFTDHAIHWVRQAPGQRLEWMGYFSPGNDDFKYSQKFQGRVTITADTSASTAYMELSSLRSEDTAVYFCTRSLNMAYWGQGTLVTVSSGSTSGGGGSGGGGSGGGGSDIVMTQSPDSLAVSLGERATINCKSSQSLLYSSNSKNYLAWYQQKPGQPPKLLIYWASTRESGVPDRFSGSGSGTDFTLTISSLQAEDVAVYYCQQPYSYPLSFGAGTKLELKTRFKIPIEELEDRVFVNCNTSITWVEGTVGTLLSDITRLDLGKRILDPRGIYRCNGTDIYKDKESTVQVHYRMCQSCVELDPATVAGIIVTDVIATLLLALGVFCFAGHETGRLSGAADTQALLRNDQVYQPLRDRDDAQYSHLGGNWARNK

SEQ ID NO: 12288 - protein, 430 aa, synthetic construct
MALPVTALLLPLALLLHAARPQVQLVQSGAEVKKPGASVKVSCKASGYTFTDHAIHWVRQAPGQRLEWMGYFSPGNDDFKYSQKFQGRVTITADTSASTAYMELSSLRSEDTAVYFCTRSLNMAYWGQGTLVTVSSGSTSGGGGSGGGGSGGGGSDIVMTQSPDSLAVSLGERATINCKSSQSLLYSSNSKNYLAWYQQKPGQPPKLLIYWASTRESGVPDRFSGSGSGTDFTLTISSLQAEDVAVYYCQQPYSYPLSFGAGTKLELKTRQSIKGNHLVKVYDYQEDGSVLLTCDAEAKNITWFKDGKMIGFLTEDKKKWNLGSNAKDPRGMYQCKGSQNKSKPLQVYYRMCQNCIELNAATISGFLFAEIVSIFVLAVGVYFIAGQDGVRQSRASDKQTLLPNDQLYQPLKDREDDQYSHLQGNQLRRN

SEQ ID NO: 12289 - protein, 413 aa, synthetic construct
MALPVTALLLPLALLLHAARPQVQLVQSGAEVKKPGASVKVSCKASGYTFTDHAIHWVRQAPGQRLEWMGYFSPGNDDFKYSQKFQGRVTITADTSASTAYMELSSLRSEDTAVYFCTRSLNMAYWGQGTLVTVSSGSTSGGGGSGGGGSGGGGSDIVMTQSPDSLAVSLGERATINCKSSQSLLYSSNSKNYLAWYQQKPGQPPKLLIYWASTRESGVPDRFSGSGSGTDFTLTISSLQAEDVAVYYCQQPYSYPLSFGAGTKLELKTRQSFGLLDPKLCYLLDGILFIYGVILTALFLRVKFSRSADAPAYQQGQNQLYNELNLGRREEYDVLDKRRGRDPEMGGKPQRRKNPQEGLYNELQKDKMAEAYSEIGMKGERRRGKGHDGLYQGLSTATKDTYDALHMQALPPR

SEQ ID NO: 12290 - protein, 508 aa, synthetic construct
MALPVTALLLPLALLLHAARPDIVMTQSPDSLAVSLGERATINCKSSQSLLYSSNSKNYLAWYQQKPGQPPKLLIYWASTRESGVPDRFSGSGSGTDFTLTISSLQAEDVAVYYCQQPYSYPLSFGAGTKLELKGGGGSGGGGSGGGGSQVQLVQSGAEVKKPGASVKVSCKASGYTFTDHAIHWVRQAPGQRLEWMGYFSPGNDDFKYSQKFQGRVTITADTSASTAYMELSSLRSEDTAVYFCTRSLNMAYWGQGTLVTVSSGSTSTRGMRTEDLPKAVVFLEPQWYRVLEKDSVTLKCQGAYSPEDNSTQWFHNESLISSQASSYFIDAATVDDSGEYRCQTNLSTLSDPVQLEVHIGWLLLQAPRWVFKEEDPIHLRCHSWKNTALHKVTYLQNGKGRKYFHHNSDFYIPKATLKDSGSYFCRGLVGSKNVSSETVNITITQGLAVPTISSFFPPGYQVSFCLVMVLLFAVDTGLYFSVKTNIRSSTRDWKDHKFKWRKDPQDK

SEQ ID NO: 12291 - protein, 790 aa, synthetic construct
MALPVTALLLPLALLLHAARPDIVMTQSPDSLAVSLGERATINCKSSQSLLYSSNSKNYLAWYQQKPGQPPKLLIYWASTRESGVPDRFSGSGSGTDFTLTISSLQAEDVAVYYCQQPYSYPLSFGAGTKLELKGGGGSGGGGSGGGGSQVQLVQSGAEVKKPGASVKVSCKASGYTFTDHAIHWVRQAPGQRLEWMGYFSPGNDDFKYSQKFQGRVTITADTSASTAYMELSSLRSEDTAVYFCTRSLNMAYWGQGTLVTVSSGSTSTRGGSGQQQTLPKPFIWAEPHFMVPKEKQVTICCQGNYGAVEYQLHFEGSLFAVDRPKPPERINKVQFYIPDMNSRMAGQYSCIYRVGELWSEPSNLLDLVVTEMYDTPTLSVHPGPEVISGEKVTFYCRLDTATSMFLLLKEGRSSHVQRGYGKVQAEFPLGPVTTAHRGTYRCFGSYNNHAWSFPSEPVKLLVTGDIENTSLAPEDPTFPADTWGTYLLTTETGLQKDHALWDHTAQNLLRMGLAFLVLVALVWFLVEDWLSRKRTRERASRASTWEGRRRLNTQTLRAKRSGSGVKQTLNFDLLKLAGDVESNPGPSRGHMTEYKPTVRLATRDDVPRAVRTLAAAFADYPATRHTVDPDRHIERVTELQELFLTRVGLDIGKVWVADDGAAVAVWTTPESVEAGAVFAEIGPRMAELSGSRLAAQQQMEGLLAPHRPKEPAWFLATVGVSPDHQGKGLGSAVVLPGVEAAERAGVPAFLETSAPRNLPFYERLGFTVTADVEVPEGPRTWCMTRKPGA

SEQ ID NO: 12292 - protein, 623 aa, synthetic construct
MALPVTALLLPLALLLHAARPDIVMTQSPDSLAVSLGERATINCKSSQSLLYSSNSKNYLAWYQQKPGQPPKLLIYWASTRESGVPDRFSGSGSGTDFTLTISSLQAEDVAVYYCQQPYSYPLSFGAGTKLELKGGGGSGGGGSGGGGSQVQLVQSGAEVKKPGASVKVSCKASGYTFTDHAIHWVRQAPGQRLEWMGYFSPGNDDFKYSQKFQGRVTITADTSASTAYMELSSLRSEDTAVYFCTRSLNMAYWGQGTLVTVSSGSTSTRKIEVMYPPPYLDNEKSNGTIIHVKGARGDIENTSLAPEDPTFPADTWGTYLLTTETGLQKDHALWDHTAQNLLRMGLAFLVLVALVWFLVEDWLSRKRTRERASRASTWEGRRRLNTQTLRAKRSGSGVKQTLNFDLLKLAGDVESNPGPSRGHMTEYKPTVRLATRDDVPRAVRTLAAAFADYPATRHTVDPDRHIERVTELQELFLTRVGLDIGKVWVADDGAAVAVWTTPESVEAGAVFAEIGPRMAELSGSRLAAQQQMEGLLAPHRPKEPAWFLATVGVSPDHQGKGLGSAVVLPGVEAAERAGVPAFLETSAPRNLPFYERLGFTVTADVEVPEGPRTWCMTRKPGA

SEQ ID NO: 12293 - protein, 710 aa, synthetic construct
MALPVTALLLPLALLLHAARPDIVMTQSPDSLAVSLGERATINCKSSQSLLYSSNSKNYLAWYQQKPGQPPKLLIYWASTRESGVPDRFSGSGSGTDFTLTISSLQAEDVAVYYCQQPYSYPLSFGAGTKLELKGGGGSGGGGSGGGGSQVQLVQSGAEVKKPGASVKVSCKASGYTFTDHAIHWVRQAPGQRLEWMGYFSPGNDDFKYSQKFQGRVTITADTSASTAYMELSSLRSEDTAVYFCTRSLNMAYWGQGTLVTVSSGSTSTRLWVSQPPEIRTLEGSSAFLPCSFNASQGRLAIGSVTWFRDEVVPGKEVRNGTPEFRGRLAPLASSRFLHDHQAELHIRDVRGHDASIYVCRVEVLGLGVGTGNGTRLVVEKEHPQLGAGTVLLLRAGFYAVSFLSVAVGSTVYYQGKCLTWKGPRRQLPAVVPAPLPPPCGSSAHLLPPVPGGRAKRSGSGVKQTLNFDLLKLAGDVESNPGPSRMYRMQLLSCIALSLALVTNSAPTSSSTKKTQLQLEHLLLDLQMILNGINNYKNPKLTEMLTAKFYMPKKATELKHLQCLEEELKPLEEVLNLAQSKNFHLRPRDLISNINVIVLELKGSETTFMCEYADETATIVEFLNRWITFCQSIISTLTKIEVMYPPPYLDNEKSNGTIIHVKGKHLCPSPLFPGPSKPFWVLVVVGGVLACYSLLVTVAFIIFWVRSKRS

SEQ ID NO: 12294 - protein, 686 aa, synthetic construct
MALPVTALLLPLALLLHAARPDIVMTQSPDSLAVSLGERATINCKSSQSLLYSSNSKNYLAWYQQKPGQPPKLLIYWASTRESGVPDRFSGSGSGTDFTLTISSLQAEDVAVYYCQQPYSYPLSFGAGTKLELKGGGGSGGGGSGGGGSQVQLVQSGAEVKKPGASVKVSCKASGYTFTDHAIHWVRQAPGQRLEWMGYFSPGNDDFKYSQKFQGRVTITADTSASTAYMELSSLRSEDTAVYFCTRSLNMAYWGQGTLVTVSSGSTSTRLWVSQPPEIRTLEGSSAFLPCSFNASQGRLAIGSVTWFRDEVVPGKEVRNGTPEFRGRLAPLASSRFLHDHQAELHIRDVRGHDASIYVCRVEVLGLGVGTGNGTRLVVEKEHPQLGAGTVLLLRAGFYAVSFLSVAVGSTVYYQGKCLTWKGPRRQLPAVVPAPLPPPCGSSAHLLPPVPGGRAKRSGSGVKQTLNFDLLKLAGDVESNPGPSRGHMTEYKPTVRLATRDDVPRAVRTLAAAFADYPATRHTVDPDRHIERVTELQELFLTRVGLDIGKVWVADDGAAVAVWTTPESVEAGAVFAEIGPRMAELSGSRLAAQQQMEGLLAPHRPKEPAWFLATVGVSPDHQGKGLGSAVVLPGVEAAERAGVPAFLETSAPRNLPFYERLGFTVTADVEVPEGPRTWCMTRKPGA

SEQ ID NO: 12295 - protein, 362 aa, synthetic construct
MALPVTALLLPLALLLHAARPDIVMTQSPDSLAVSLGERATINCKSSQSLLYSSNSKNYLAWYQQKPGQPPKLLIYWASTRESGVPDRFSGSGSGTDFTLTISSLQAEDVAVYYCQQPYSYPLSFGAGTKLELKGGGGSGGGGSGGGGSQVQLVQSGAEVKKPGASVKVSCKASGYTFTDHAIHWVRQAPGQRLEWMGYFSPGNDDFKYSQKFQGRVTITADTSASTAYMELSSLRSEDTAVYFCTRSLNMAYWGQGTLVTVSSGSTSTRKIEVMYPPPYLDNEKSNGTIIHVKGARITQGLAVSTISSFFPPGYQVSFCLVMVLLFAVDTGLYFSVKTNIRSSTRDWKDHKFKWRKDPQDK

SEQ ID NO: 12296 - protein, 362 aa, synthetic construct
MALPVTALLLPLALLLHAARPDIVMTQSPDSLAVSLGERATINCKSSQSLLYSSNSKNYLAWYQQKPGQPPKLLIYWASTRESGVPDRFSGSGSGTDFTLTISSLQAEDVAVYYCQQPYSYPLSFGAGTKLELKGGGGSGGGGSGGGGSQVQLVQSGAEVKKPGASVKVSCKASGYTFTDHAIHWVRQAPGQRLEWMGYFSPGNDDFKYSQKFQGRVTITADTSASTAYMELSSLRSEDTAVYFCTRSLNMAYWGQGTLVTVSSGSTSTRKIEVMYPPPYLDNEKSNGTIIHVKGARITQGLAVPTISSFFPPGYQVSFCLVMVLLFAVDTGLYFSVKTNIRSSTRDWKDHKFKWRKDPQDK

SEQ ID NO: 12297 - protein, 341 aa, synthetic construct
MALPVTALLLPLALLLHAARPDIVMTQSPDSLAVSLGERATINCKSSQSLLYSSNSKNYLAWYQQKPGQPPKLLIYWASTRESGVPDRFSGSGSGTDFTLTISSLQAEDVAVYYCQQPYSYPLSFGAGTKLELKGGGGSGGGGSGGGGSQVQLVQSGAEVKKPGASVKVSCKASGYTFTDHAIHWVRQAPGQRLEWMGYFSPGNDDFKYSQKFQGRVTITADTSASTAYMELSSLRSEDTAVYFCTRSLNMAYWGQGTLVTVSSGSTSTRKIEVMYPPPYLDNEKSNGTIIHVKGARITQGLAVSTISSFSPPGYQVSFCLVMVLLFAVDTGLYFSVKTNI

SEQ ID NO: 12298 - protein, 372 aa, synthetic construct
MALPVTALLLPLALLLHAARPDIVMTQSPDSLAVSLGERATINCKSSQSLLYSSNSKNYLAWYQQKPGQPPKLLIYWASTRESGVPDRFSGSGSGTDFTLTISSLQAEDVAVYYCQQPYSYPLSFGAGTKLELKGGGGSGGGGSGGGGSQVQLVQSGAEVKKPGASVKVSCKASGYTFTDHAIHWVRQAPGQRLEWMGYFSPGNDDFKYSQKFQGRVTITADTSASTAYMELSSLRSEDTAVYFCTRSLNMAYWGQGTLVTVSSGSTSTRKIEVMYPPPYLDNEKSNGTIIHVKGARVEKEHPQLGAGTVLLLRAGFYAVSFLSVAVGSTVYYQGKCLTWKGPRRQLPAVVPAPLPPPCGSSAHLLPPVPGG

SEQ ID NO: 12299 - protein, 453 aa, synthetic construct
MALPVTALLLPLALLLHAARPDIVMTQSPDSLAVSLGERATINCKSSQSLLYSSNSKNYLAWYQQKPGQPPKLLIYWASTRESGVPDRFSGSGSGTDFTLTISSLQAEDVAVYYCQQPYSYPLSFGAGTKLELKGGGGSGGGGSGGGGSQVQLVQSGAEVKKPGASVKVSCKASGYTFTDHAIHWVRQAPGQRLEWMGYFSPGNDDFKYSQKFQGRVTITADTSASTAYMELSSLRSEDTAVYFCTRSLNMAYWGQGTLVTVSSGSTSTRKIEVMYPPPYLDNEKSNGTIIHVKGARKSVRFYLVVSPASASTQTSWTPRDLVSSQTQTQSCVPPTAGARQAPESPSTIPVPSQPQNSTLRPGPAAPIALVPVFCGLLVAKSLVLSALLVWWGDIWWKTMMELRSLDTQKATCHLQQVTDLPWTSVSSPVEREILYHTVARTKISDDDDEHTL

SEQ ID NO: 12300 - protein, 390 aa, synthetic construct
MALPVTALLLPLALLLHAARPDIVMTQSPDSLAVSLGERATINCKSSQSLLYSSNSKNYLAWYQQKPGQPPKLLIYWASTRESGVPDRFSGSGSGTDFTLTISSLQAEDVAVYYCQQPYSYPLSFGAGTKLELKGGGGSGGGGSGGGGSQVQLVQSGAEVKKPGASVKVSCKASGYTFTDHAIHWVRQAPGQRLEWMGYFSPGNDDFKYSQKFQGRVTITADTSASTAYMELSSLRSEDTAVYFCTRSLNMAYWGQGTLVTVSSGSTSTRKIEVMYPPPYLDNEKSNGTIIHVKGARGDIENTSLAPEDPTFPADTWGTYLLTTETGLQKDHALWDHTAQNLLRMGLAFLVLVALVWFLVEDWLSRKRTRERASRASTWEGRRRLNTQTL

SEQ ID NO: 12301 - protein, 986 aa, synthetic construct
MALPVTALLLPLALLLHAARPDIVMTQSPDSLAVSLGERATINCKSSQSLLYSSNSKNYLAWYQQKPGQPPKLLIYWASTRESGVPDRFSGSGSGTDFTLTISSLQAEDVAVYYCQQPYSYPLSFGAGTKLELKLEGQPKANPTVTLFPPSSEELQANKATLVCLISDFYPGAVTVAWKADGSPVKAGVETTKPSKQSNNKYAASSYLSLTPEQWKSHRSYSCQVTHEGSTVEKTVAPTECSGSQSFGLLDPKLCYLLDGILFIYGVILTALFLRVKFSRSADAPAYQQGQNQLYNELNLGRREEYDVLDKRRGRDPEMGGKPQRRKNPQEGLYNELQKDKMAEAYSEIGMKGERRRGKGHDGLYQGLSTATKDTYDALHMQALPPRRAKRSGSGATNFSLLKQAGDVEENPGPTSMDWIWRILFLVGAATGAHSFEQVQLVQSGAEVKKPGASVKVSCKASGYTFTDHAIHWVRQAPGQRLEWMGYFSPGNDDFKYSQKFQGRVTITADTSASTAYMELSSLRSEDTAVYFCTRSLNMAYWGQGTLVTVSSGSTSTRASTKGPSVFPLAPSSKSTSGGTAALGCLVKDYFPEPVTVSWNSGALTSGVHTFPAVLQSSGLYSLSSVVTVPSSSLGTQTYICNVNHKPSNTKVDKRVEPKSCGTGDIENTSLAPEDPTFPADTWGTYLLTTETGLQKDHALWDHTAQNLLRMGLAFLVLVALVWFLVEDWLSRKRTRERASRASTWEGRRRLNTQTLRAKRSGSGATNFSLLKQAGDVEENPGPSRGHMTEYKPTVRLATRDDVPRAVRTLAAAFADYPATRHTVDPDRHIERVTELQELFLTRVGLDIGKVWVADDGAAVAVWTTPESVEAGAVFAEIGPRMAELSGSRLAAQQQMEGLLAPHRPKEPAWFLATVGVSPDHQGKGLGSAVVLPGVEAAERAGVPAFLETSAPRNLPFYERLGFTVTADVEVPEGPRTWCMTRKPGA

SEQ ID NO: 12302 - protein, 1052 aa, synthetic construct
MALPVTALLLPLALLLHAARPDIVMTQSPDSLAVSLGERATINCKSSQSLLYSSNSKNYLAWYQQKPGQPPKLLIYWASTRESGVPDRFSGSGSGTDFTLTISSLQAEDVAVYYCQQPYSYPLSFGAGTKLELKLEGQPKANPTVTLFPPSSEELQANKATLVCLISDFYPGAVTVAWKADGSPVKAGVETTKPSKQSNNKYAASSYLSLTPEQWKSHRSYSCQVTHEGSTVEKTVAPTECSGSQSFGLLDPKLCYLLDGILFIYGVILTALFLRVKFSRSADAPAYQQGQNQLYNELNLGRREEYDVLDKRRGRDPEMGGKPQRRKNPQEGLYNELQKDKMAEAYSEIGMKGERRRGKGHDGLYQGLSTATKDTYDALHMQALPPRRAKRSGSGATNFSLLKQAGDVEENPGPTSMDWIWRILFLVGAATGAHSFEQVQLVQSGAEVKKPGASVKVSCKASGYTFTDHAIHWVRQAPGQRLEWMGYFSPGNDDFKYSQKFQGRVTITADTSASTAYMELSSLRSEDTAVYFCTRSLNMAYWGQGTLVTVSSGSTSTRASTKGPSVFPLAPSSKSTSGGTAALGCLVKDYFPEPVTVSWNSGALTSGVHTFPAVLQSSGLYSLSSVVTVPSSSLGTQTYICNVNHKPSNTKVDKRVEPKSCGTKSVRFYLVVSPASASTQTSWTPRDLVSSQTQTQSCVPPTAGARQAPESPSTIPVPSQPQNSTLRPGPAAPIALVPVFCGLLVAKSLVLSALLVWWGDIWWKTMMELRSLDTQKATCHLQQVTDLPWTSVSSPVEREILYHTVARTKISDDDDEHTLRAKRSGSGVKQTLNFDLLKLAGDVESNPGPSRGHMTEYKPTVRLATRDDVPRAVRTLAAAFADYPATRHTVDPDRHIERVTELQELFLTRVGLDIGKVWVADDGAAVAVWTTPESVEAGAVFAEIGPRMAELSGSRLAAQQQMEGLLAPHRPKEPAWFLATVGVSPDHQGKGLGSAVVLPGVEAAERAGVPAFLETSAPRNLPFYERLGFTVTADVEVPEGPRTWCMTRKPGA

SEQ ID NO: 12303 - protein, 972 aa, synthetic construct
MALPVTALLLPLALLLHAARPDIVMTQSPDSLAVSLGERATINCKSSQSLLYSSNSKNYLAWYQQKPGQPPKLLIYWASTRESGVPDRFSGSGSGTDFTLTISSLQAEDVAVYYCQQPYSYPLSFGAGTKLELKLEGQPKANPTVTLFPPSSEELQANKATLVCLISDFYPGAVTVAWKADGSPVKAGVETTKPSKQSNNKYAASSYLSLTPEQWKSHRSYSCQVTHEGSTVEKTVAPTECSGSQSFGLLDPKLCYLLDGILFIYGVILTALFLRVKFSRSADAPAYQQGQNQLYNELNLGRREEYDVLDKRRGRDPEMGGKPQRRKNPQEGLYNELQKDKMAEAYSEIGMKGERRRGKGHDGLYQGLSTATKDTYDALHMQALPPRRAKRSGSGATNFSLLKQAGDVEENPGPTSMDWIWRILFLVGAATGAHSFEQVQLVQSGAEVKKPGASVKVSCKASGYTFTDHAIHWVRQAPGQRLEWMGYFSPGNDDFKYSQKFQGRVTITADTSASTAYMELSSLRSEDTAVYFCTRSLNMAYWGQGTLVTVSSGSTSTRASTKGPSVFPLAPSSKSTSGGTAALGCLVKDYFPEPVTVSWNSGALTSGVHTFPAVLQSSGLYSLSSVVTVPSSSLGTQTYICNVNHKPSNTKVDKRVEPKSCGTVVEKEHPQLGAGTVLLLRAGFYAVSFLSVAVGSTVYYQGKCLTWKGPRRQLPAVVPAPLPPPCGSSAHLLPPVPGGRAKRSGSGVKQTLNFDLLKLAGDVESNPGPSRGHMTEYKPTVRLATRDDVPRAVRTLAAAFADYPATRHTVDPDRHIERVTELQELFLTRVGLDIGKVWVADDGAAVAVWTTPESVEAGAVFAEIGPRMAELSGSRLAAQQQMEGLLAPHRPKEPAWFLATVGVSPDHQGKGLGSAVVLPGVEAAERAGVPAFLETSAPRNLPFYERLGFTVTADVEVPEGPRTWCMTRKPGA

SEQ ID NO: 12304 - protein, 1001 aa, synthetic construct
MALPVTALLLPLALLLHAARPDIVMTQSPDSLAVSLGERATINCKSSQSLLYSSNSKNYLAWYQQKPGQPPKLLIYWASTRESGVPDRFSGSGSGTDFTLTISSLQAEDVAVYYCQQPYSYPLSFGAGTKLELKLEDLKNVFPPEVAVFEPSEAEISHTQKATLVCLATGFYPDHVELSWWVNGKEVHSGVSTDPQPLKEQPALNDSRYCLSSRLRVSATFWQNPRNHFRCQVQFYGLSENDEWTQDRAKPVTQIVSAEAWGRADCGSQSFGLLDPKLCYLLDGILFIYGVILTALFLRVKFSRSADAPAYQQGQNQLYNELNLGRREEYDVLDKRRGRDPEMGGKPQRRKNPQEGLYNELQKDKMAEAYSEIGMKGERRRGKGHDGLYQGLSTATKDTYDALHMQALPPRRAKRSGSGATNFSLLKQAGDVEENPGPTSMDWIWRILFLVGAATGAHSFEQVQLVQSGAEVKKPGASVKVSCKASGYTFTDHAIHWVRQAPGQRLEWMGYFSPGNDDFKYSQKFQGRVTITADTSASTAYMELSSLRSEDTAVYFCTRSLNMAYWGQGTLVTVSSGSTSTRIQNPDPAVYQLRDSKSSDKSVCLFTDFDSQTNVSQSKDSDVYITDKTVLDMRSMDFKSNSAVAWSNKSDFACANAFNNSIIPEDTFFPSPESSCGTGDIENTSLAPEDPTFPADTWGTYLLTTETGLQKDHALWDHTAQNLLRMGLAFLVLVALVWFLVEDWLSRKRTRERASRASTWEGRRRLNTQTLRAKRSGSGATNFSLLKQAGDVEENPGPSRGHMTEYKPTVRLATRDDVPRAVRTLAAAFADYPATRHTVDPDRHIERVTELQELFLTRVGLDIGKVWVADDGAAVAVWTTPESVEAGAVFAEIGPRMAELSGSRLAAQQQMEGLLAPHRPKEPAWFLATVGVSPDHQGKGLGSAVVLPGVEAAERAGVPAFLETSAPRNLPFYERLGFTVTADVEVPEGPRTWCMTRKPGA

SEQ ID NO: 12305 - protein, 1067 aa, synthetic construct
MALPVTALLLPLALLLHAARPDIVMTQSPDSLAVSLGERATINCKSSQSLLYSSNSKNYLAWYQQKPGQPPKLLIYWASTRESGVPDRFSGSGSGTDFTLTISSLQAEDVAVYYCQQPYSYPLSFGAGTKLELKLEDLKNVFPPEVAVFEPSEAEISHTQKATLVCLATGFYPDHVELSWWVNGKEVHSGVSTDPQPLKEQPALNDSRYCLSSRLRVSATFWQNPRNHFRCQVQFYGLSENDEWTQDRAKPVTQIVSAEAWGRADCGSQSFGLLDPKLCYLLDGILFIYGVILTALFLRVKFSRSADAPAYQQGQNQLYNELNLGRREEYDVLDKRRGRDPEMGGKPQRRKNPQEGLYNELQKDKMAEAYSEIGMKGERRRGKGHDGLYQGLSTATKDTYDALHMQALPPRRAKRSGSGATNFSLLKQAGDVEENPGPTSMDWIWRILFLVGAATGAHSFEQVQLVQSGAEVKKPGASVKVSCKASGYTFTDHAIHWVRQAPGQRLEWMGYFSPGNDDFKYSQKFQGRVTITADTSASTAYMELSSLRSEDTAVYFCTRSLNMAYWGQGTLVTVSSGSTSTRIQNPDPAVYQLRDSKSSDKSVCLFTDFDSQTNVSQSKDSDVYITDKTVLDMRSMDFKSNSAVAWSNKSDFACANAFNNSIIPEDTFFPSPESSCGTKSVRFYLVVSPASASTQTSWTPRDLVSSQTQTQSCVPPTAGARQAPESPSTIPVPSQPQNSTLRPGPAAPIALVPVFCGLLVAKSLVLSALLVWWGDIWWKTMMELRSLDTQKATCHLQQVTDLPWTSVSSPVEREILYHTVARTKISDDDDEHTLRAKRSGSGVKQTLNFDLLKLAGDVESNPGPSRGHMTEYKPTVRLATRDDVPRAVRTLAAAFADYPATRHTVDPDRHIERVTELQELFLTRVGLDIGKVWVADDGAAVAVWTTPESVEAGAVFAEIGPRMAELSGSRLAAQQQMEGLLAPHRPKEPAWFLATVGVSPDHQGKGLGSAVVLPGVEAAERAGVPAFLETSAPRNLPFYERLGFTVTADVEVPEGPRTWCMTRKPGA

SEQ ID NO: 12306 - protein, 987 aa, synthetic construct
MALPVTALLLPLALLLHAARPDIVMTQSPDSLAVSLGERATINCKSSQSLLYSSNSKNYLAWYQQKPGQPPKLLIYWASTRESGVPDRFSGSGSGTDFTLTISSLQAEDVAVYYCQQPYSYPLSFGAGTKLELKLEDLKNVFPPEVAVFEPSEAEISHTQKATLVCLATGFYPDHVELSWWVNGKEVHSGVSTDPQPLKEQPALNDSRYCLSSRLRVSATFWQNPRNHFRCQVQFYGLSENDEWTQDRAKPVTQIVSAEAWGRADCGSQSFGLLDPKLCYLLDGILFIYGVILTALFLRVKFSRSADAPAYQQGQNQLYNELNLGRREEYDVLDKRRGRDPEMGGKPQRRKNPQEGLYNELQKDKMAEAYSEIGMKGERRRGKGHDGLYQGLSTATKDTYDALHMQALPPRRAKRSGSGATNFSLLKQAGDVEENPGPTSMDWIWRILFLVGAATGAHSFEQVQLVQSGAEVKKPGASVKVSCKASGYTFTDHAIHWVRQAPGQRLEWMGYFSPGNDDFKYSQKFQGRVTITADTSASTAYMELSSLRSEDTAVYFCTRSLNMAYWGQGTLVTVSSGSTSTRIQNPDPAVYQLRDSKSSDKSVCLFTDFDSQTNVSQSKDSDVYITDKTVLDMRSMDFKSNSAVAWSNKSDFACANAFNNSIIPEDTFFPSPESSCGTVVEKEHPQLGAGTVLLLRAGFYAVSFLSVAVGSTVYYQGKCLTWKGPRRQLPAVVPAPLPPPCGSSAHLLPPVPGGRAKRSGSGVKQTLNFDLLKLAGDVESNPGPSRGHMTEYKPTVRLATRDDVPRAVRTLAAAFADYPATRHTVDPDRHIERVTELQELFLTRVGLDIGKVWVADDGAAVAVWTTPESVEAGAVFAEIGPRMAELSGSRLAAQQQMEGLLAPHRPKEPAWFLATVGVSPDHQGKGLGSAVVLPGVEAAERAGVPAFLETSAPRNLPFYERLGFTVTADVEVPEGPRTWCMTRKPGA

SEQ ID NO: 12307 - protein, 958 aa, synthetic construct
MALPVTALLLPLALLLHAARPDIVMTQSPDSLAVSLGERATINCKSSQSLLYSSNSKNYLAWYQQKPGQPPKLLIYWASTRESGVPDRFSGSGSGTDFTLTISSLQAEDVAVYYCQQPYSYPLSFGAGTKLELKLEGQPKANPTVTLFPPSSEELQANKATLVCLISDFYPGAVTVAWKADGSPVKAGVETTKPSKQSNNKYAASSYLSLTPEQWKSHRSYSCQVTHEGSTVEKTVAPTECSGSQSFGLLDPKLCYLLDGILFIYGVILTALFLRVKFSRSADAPAYQQGQNQLYNELNLGRREEYDVLDKRRGRDPEMGGKPQRRKNPQEGLYNELQKDKMAEAYSEIGMKGERRRGKGHDGLYQGLSTATKDTYDALHMQALPPRRAKRSGSGATNFSLLKQAGDVEENPGPTSMDWIWRILFLVGAATGAHSFEQVQLVQSGAEVKKPGASVKVSCKASGYTFTDHAIHWVRQAPGQRLEWMGYFSPGNDDFKYSQKFQGRVTITADTSASTAYMELSSLRSEDTAVYFCTRSLNMAYWGQGTLVTVSSGSTSTRASTKGPSVFPLAPSSKSTSGGTAALGCLVKDYFPEPVTVSWNSGALTSGVHTFPAVLQSSGLYSLSSVVTVPSSSLGTQTYICNVNHKPSNTKVDKRVEPKSCGTITQGLAVSTISSFFPPGYQVSFCLVMVLLFAVDTGLYFSVKTNIRSSTRDWKDHKFKWRKDPQDKRAKRSGSGATNFSLLKQAGDVEENPGPSRGHMTEYKPTVRLATRDDVPRAVRTLAAAFADYPATRHTVDPDRHIERVTELQELFLTRVGLDIGKVWVADDGAAVAVWTTPESVEAGAVFAEIGPRMAELSGSRLAAQQQMEGLLAPHRPKEPAWFLATVGVSPDHQGKGLGSAVVLPGVEAAERAGVPAFLETSAPRNLPFYERLGFTVTADVEVPEGPRTWCMTRKPGA

SEQ ID NO: 12308 - protein, 973 aa, synthetic construct
MALPVTALLLPLALLLHAARPDIVMTQSPDSLAVSLGERATINCKSSQSLLYSSNSKNYLAWYQQKPGQPPKLLIYWASTRESGVPDRFSGSGSGTDFTLTISSLQAEDVAVYYCQQPYSYPLSFGAGTKLELKLEDLKNVFPPEVAVFEPSEAEISHTQKATLVCLATGFYPDHVELSWWVNGKEVHSGVSTDPQPLKEQPALNDSRYCLSSRLRVSATFWQNPRNHFRCQVQFYGLSENDEWTQDRAKPVTQIVSAEAWGRADCGSQSFGLLDPKLCYLLDGILFIYGVILTALFLRVKFSRSADAPAYQQGQNQLYNELNLGRREEYDVLDKRRGRDPEMGGKPQRRKNPQEGLYNELQKDKMAEAYSEIGMKGERRRGKGHDGLYQGLSTATKDTYDALHMQALPPRRAKRSGSGATNFSLLKQAGDVEENPGPTSMDWIWRILFLVGAATGAHSFEQVQLVQSGAEVKKPGASVKVSCKASGYTFTDHAIHWVRQAPGQRLEWMGYFSPGNDDFKYSQKFQGRVTITADTSASTAYMELSSLRSEDTAVYFCTRSLNMAYWGQGTLVTVSSGSTSTRIQNPDPAVYQLRDSKSSDKSVCLFTDFDSQTNVSQSKDSDVYITDKTVLDMRSMDFKSNSAVAWSNKSDFACANAFNNSIIPEDTFFPSPESSCGTITQGLAVSTISSFFPPGYQVSFCLVMVLLFAVDTGLYFSVKTNIRSSTRDWKDHKFKWRKDPQDKRAKRSGSGATNFSLLKQAGDVEENPGPSRGHMTEYKPTVRLATRDDVPRAVRTLAAAFADYPATRHTVDPDRHIERVTELQELFLTRVGLDIGKVWVADDGAAVAVWTTPESVEAGAVFAEIGPRMAELSGSRLAAQQQMEGLLAPHRPKEPAWFLATVGVSPDHQGKGLGSAVVLPGVEAAERAGVPAFLETSAPRNLPFYERLGFTVTADVEVPEGPRTWCMTRKPGA

SEQ ID NO: 12309 - protein, 656 aa, synthetic construct
MALPVTALLLPLALLLHAARPDIVMTQSPDSLAVSLGERATINCKSSQSLLYSSNSKNYLAWYQQKPGQPPKLLIYWASTRESGVPDRFSGSGSGTDFTLTISSLQAEDVAVYYCQQPYSYPLSFGAGTKLELKLEGQPKANPTVTLFPPSSEELQANKATLVCLISDFYPGAVTVAWKADGSPVKAGVETTKPSKQSNNKYAASSYLSLTPEQWKSHRSYSCQVTHEGSTVEKTVAPTECSGSLGEPQLCYILDAILFLYGIVLTLLYCRLKIQVRKAAITSYEKSDGVYTGLSTRNQETYETLKHEKPPQRAKRSGSGATNFSLLKQAGDVEENPGPTSMDWIWRILFLVGAATGAHSFEQVQLVQSGAEVKKPGASVKVSCKASGYTFTDHAIHWVRQAPGQRLEWMGYFSPGNDDFKYSQKFQGRVTITADTSASTAYMELSSLRSEDTAVYFCTRSLNMAYWGQGTLVTVSSGSTSTRASTKGPSVFPLAPSSKSTSGGTAALGCLVKDYFPEPVTVSWNSGALTSGVHTFPAVLQSSGLYSLSSVVTVPSSSLGTQTYICNVNHKPSNTKVDKRVEPKSCGTLGEPQLCYILDAILFLYGIVLTLLYCRLKIQVRKAAITSYEKSDGVYTGLSTRNQETYETLKHEKPPQ

SEQ ID NO: 12310 - protein, 11 aa, synthetic construct
GGGGGGGGGGG

SEQ ID NO: 12311 - protein, 619 aa, synthetic construct
MALPVTALLLPLALLLHAARPDIQMTQTTSSLSASLGDRVTISCRASQDISKYLNWYQQKPDGTVKLLIYHTSRLHSGVPSRFSGSGSGTDYSLTISNLEQEDIATYFCQQGNTLPYTFGGGTKLEITLEDLKNVFPPEVAVFEPSEAEISHTQKATLVCLATGFYPDHVELSWWVNGKEVHSGVCTDPQPLKEQPALNDSRYCLSSRLRVSATFWQNPRNHFRCQVQFYGLSENDEWTQDRAKPVTQIVSAEAWGRADCDVKLVEKSFETDTNLNFQNLSVIGFRILLLKVAGFNLLMTLRLWSSRAKRSGSGATNFSLLKQAGDVEENPGPTSMDWIWRILFLVGAATGAHSFEVKLQESGPGLVAPSQSLSVTCTVSGVSLPDYGVSWIRQPPRKGLEWLGVIWGSETTYYNSALKSRLTIIKDNSKSQVFLKMNSLQTDDTAIYYCAKHYYYGGSYAMDYWGQGTSVTVSSTRIQNPDPAVYQLRDSKSSDKSVCLFTDFDSQTNVSQSKDSDVYITDKCVLDMRSMDFKSNSAVAWSNKSDFACANAFNNSIIPEDTFFPSPESSCGFTSESYQQGVLSATILYEILLGKATLYAVLVSALVLMAMVKRKDSRG

SEQ ID NO: 12312 - protein, 620 aa, synthetic construct
MALPVTALLLPLALLLHAARPEIVMTQSPATLSLSPGERATLSCRASQDISKYLNWYQQKPGQAPRLLIYHTSRLHSGIPARFSGSGSGTDYTLTISSLQPEDFAVYFCQQGNTLPYTFGQGTKLEIKLEDLKNVFPPEVAVFEPSEAEISHTQKATLVCLATGFYPDHVELSWWVNGKEVHSGVCTDPQPLKEQPALNDSRYCLSSRLRVSATFWQNPRNHFRCQVQFYGLSENDEWTQDRAKPVTQIVSAEAWGRADCDVKLVEKSFETDTNLNFQNLSVIGFRILLLKVAGFNLLMTLRLWSSRAKRSGSGATNFSLLKQAGDVEENPGPTSMDWIWRILFLVGAATGAHSFEQVQLQESGPGLVKPSETLSLTCTVSGVSLPDYGVSWIRQPPGKGLEWIGVIWGSETTYYNSSLKSRVTISKDNSKNQVSLKLSSVTAADTAVYYCAKHYYYGGSYAMDYWGQGTLVTVSSTRIQNPDPAVYQLRDSKSSDKSVCLFTDFDSQTNVSQSKDSDVYITDKCVLDMRSMDFKSNSAVAWSNKSDFACANAFNNSIIPEDTFFPSPESSCGFTSESYQQGVLSATILYEILLGKATLYAVLVSALVLMAMVKRKDSRG

SEQ ID NO: 12313 - protein, 621 aa, synthetic construct
MALPVTALLLPLALLLHAARPDEIVLTQSPATLSLSPGERATLSCSASSSVSYMHWYQQKPGQAPRLLIYDTSKLASGIPARFSGSGSGTDFTLTISSLEPEDVAVYYCFQGSVYPFTFGQGTKLEIKRLEDLKNVFPPEVAVFEPSEAEISHTQKATLVCLATGFYPDHVELSWWVNGKEVHSGVCTDPQPLKEQPALNDSRYCLSSRLRVSATFWQNPRNHFRCQVQFYGLSENDEWTQDRAKPVTQIVSAEAWGRADCDVKLVEKSFETDTNLNFQNLSVIGFRILLLKVAGFNLLMTLRLWSSRAKRSGSGATNFSLLKQAGDVEENPGPTSMDWIWRILFLVGAATGAHSFEQVQLQESGPGLVKPSQTLSLTCTVSGGSISTSGMGVGWIRQHPGKGLEWIGHIWWDDDKRYNPALKSRVTISVDTSKNQFSLKLSSVTAADTAVYYCARMELWSYYFDYWGQGTLVTVSSTRIQNPDPAVYQLRDSKSSDKSVCLFTDFDSQTNVSQSKDSDVYITDKCVLDMRSMDFKSNSAVAWSNKSDFACANAFNNSIIPEDTFFPSPESSCGFTSESYQQGVLSATILYEILLGKATLYAVLVSALVLMAMVKRKDSRG

SEQ ID NO: 12314 - protein, 619 aa, synthetic construct
MALPVTALLLPLALLLHAARPDYIHVTQSPSSLSVSIGDRVTINCQTSQGVGSDLHWYQHKPGRAPKLLIHHASSVEDGVPSRFSGTGFHTSFNLTINDLQADDIGTYYCQVLQSFGRGSRLDTKLEDLKNVFPPEVAVFEPSEAEISHTQKATLVCLATGFYPDHVELSWWVNGKEVHSGVCTDPQPLKEQPALNDSRYCLSSRLRVSATFWQNPRNHFRCQVQFYGLSENDEWTQDRAKPVTQIVSAEAWGRADCDVKLVEKSFETDTNLNFQNLSVIGFRILLLKVAGFNLLMTLRLWSSRAKRSGSGATNFSLLKQAGDVEENPGPTSMDWIWRILFLVGAATGAHSFERAHLVQSGTAMKKPGASVRVSCQTSGYTFTAHILFWFRQAPGRGLEWVGWIKPQYGAVNFGGGFRDRVTLTRDVYREIAYMDIRGLKPDDTAVYYCARDRSYGDSSWALDAWGQGTTVVVSATRIQNPDPAVYQLRDSKSSDKSVCLFTDFDSQTNVSQSKDSDVYITDKCVLDMRSMDFKSNSAVAWSNKSDFACANAFNNSIIPEDTFFPSPESSCGFTSESYQQGVLSATILYEILLGKATLYAVLVSALVLMAMVKRKDSRG

SEQ ID NO: 12315 - protein, 629 aa, synthetic construct
MALPVTALLLPLALLLHAARPDVQMIQTPDSLAVSLGQRATISCRASESVDNYGISFMHWYQQKPGQSPKLLIYRASNLESGIPARFSGSGSRTDFTLTINPVETDDVATYYCQQNNKDPPTFGGGTKLEIKLEDLKNVFPPEVAVFEPSEAEISHTQKATLVCLATGFYPDHVELSWWVNGKEVHSGVCTDPQPLKEQPALNDSRYCLSSRLRVSATFWQNPRNHFRCQVQFYGLSENDEWTQDRAKPVTQIVSAEAWGRADCDVKLVEKSFETDTNLNFQNLSVIGFRILLLKVAGFNLLMTLRLWSSRAKRSGSGATNFSLLKQAGDVEENPGPTSMDWIWRILFLVGAATGAHSFEGGGGSQVQLQQSGAELVKPGASVKISCKASGYAFSSYWMNWVKQRPGKGLEWIGQIYPGDGDTTYNGKFKGKATLTADKSSSTVYMQLNSLTSEDSAVYFCVRYYYGSSGYFDYWGQGTTLTVSSTRIQNPDPAVYQLRDSKSSDKSVCLFTDFDSQTNVSQSKDSDVYITDKCVLDMRSMDFKSNSAVAWSNKSDFACANAFNNSIIPEDTFFPSPESSCGFTSESYQQGVLSATILYEILLGKATLYAVLVSALVLMAMVKRKDSRG

SEQ ID NO: 12316 - protein, 620 aa, synthetic construct
MALPVTALLLPLALLLHAARPDVQMIQTPSSLSASLGDRVTISCRASQDIGNYLNWYQQKPDGTVKLLIYYTSRLHSGVPSRFSGSGSGTEYSLTISNLEQEDIATYFCQQGSALPPTFGGGTKLEINLEDLKNVFPPEVAVFEPSEAEISHTQKATLVCLATGFYPDHVELSWWVNGKEVHSGVCTDPQPLKEQPALNDSRYCLSSRLRVSATFWQNPRNHFRCQVQFYGLSENDEWTQDRAKPVTQIVSAEAWGRADCDVKLVEKSFETDTNLNFQNLSVIGFRILLLKVAGFNLLMTLRLWSSRAKRSGSGATNFSLLKQAGDVEENPGPTSMDWIWRILFLVGAATGAHSFEALQLQQSGAELVRPGASVTLSCKASGYTFTDYEMHWVKQTPVHGLEWIGAIDPETGGTAYNQKFEGKAILTADKSSSTAYMELRSLTSEDSPVYYCARRRYYGSSSFDYWGQGTTLTVSSTRIQNPDPAVYQLRDSKSSDKSVCLFTDFDSQTNVSQSKDSDVYITDKCVLDMRSMDFKSNSAVAWSNKSDFACANAFNNSIIPEDTFFPSPESSCGFTSESYQQGVLSATILYEILLGKATLYAVLVSALVLMAMVKRKDSRG

SEQ ID NO: 12317 - protein, 624 aa, synthetic construct
MALPVTALLLPLALLLHAARPDIVLTQSPASLAVSLGQRATISCRASKSVSTSGYSYLHWYQQKPGQPPKLLIYLASNLESGVPARFSGSGSGTDFTLNIHPVEEEDAATYYCQHSRELPFTFGSGTKLEIKLEDLKNVFPPEVAVFEPSEAEISHTQKATLVCLATGFYPDHVELSWWVNGKEVHSGVCTDPQPLKEQPALNDSRYCLSSRLRVSATFWQNPRNHFRCQVQFYGLSENDEWTQDRAKPVTQIVSAEAWGRADCDVKLVEKSFETDTNLNFQNLSVIGFRILLLKVAGFNLLMTLRLWSSRAKRSGSGATNFSLLKQAGDVEENPGPTSMDWIWRILFLVGAATGAHSFEQVQLVESGGGLVQPGGSLKLSCAASGFDFSRYWMSWVRQAPGKGLEWIGEINPTSSTINFTPSLKDKVFISRDNAKNTLYLQMSKVRSEDTALYYCARGNYYRYGDAMDYWGQGTSVTVSTRIQNPDPAVYQLRDSKSSDKSVCLFTDFDSQTNVSQSKDSDVYITDKCVLDMRSMDFKSNSAVAWSNKSDFACANAFNNSIIPEDTFFPSPESSCGFTSESYQQGVLSATILYEILLGKATLYAVLVSALVLMAMVKRKDSRG

SEQ ID NO: 12318 - protein, 622 aa, synthetic construct
MALPVTALLLPLALLLHAARPDIQMTQSPSSLSASVGDRVTITCSASQDISNYLNWYQQKPGKAPKLLIYYTSNLHSGVPSRFSGSGSGTDFTLTISSLQPEDFATYYCQQYRKLPWTFGQGTKLEIKRLEDLKNVFPPEVAVFEPSEAEISHTQKATLVCLATGFYPDHVELSWWVNGKEVHSGVCTDPQPLKEQPALNDSRYCLSSRLRVSATFWQNPRNHFRCQVQFYGLSENDEWTQDRAKPVTQIVSAEAWGRADCDVKLVEKSFETDTNLNFQNLSVIGFRILLLKVAGFNLLMTLRLWSSRAKRSGSGATNFSLLKQAGDVEENPGPTSMDWIWRILFLVGAATGAHSFEQVQLVQSGAEVKKPGSSVKVSCKASGGTFSNYWMHWVRQAPGQGLEWMGATYRGHSDTYYNQKFKGRVTITADKSTSTAYMELSSLRSEDTAVYYCARGAIYDGYDVLDNWGQGTLVTVSSTRIQNPDPAVYQLRDSKSSDKSVCLFTDFDSQTNVSQSKDSDVYITDKCVLDMRSMDFKSNSAVAWSNKSDFACANAFNNSIIPEDTFFPSPESSCGFTSESYQQGVLSATILYEILLGKATLYAVLVSALVLMAMVKRKDSRG

SEQ ID NO: 12319 - protein, 622 aa, synthetic construct
MALPVTALLLPLALLLHAARPDIVLTQSPATLSLSPGDRATISCRASESVTILGSHLIYWYQQKPGQPPRLLIQLASNVQTGVPARFSGSGSRTDFTLTISSVEPEDFAVYYCLQSRTIPRTFGQGTKLEIKRLEDLKNVFPPEVAVFEPSEAEISHTQKATLVCLATGFYPDHVELSWWVNGKEVHSGVCTDPQPLKEQPALNDSRYCLSSRLRVSATFWQNPRNHFRCQVQFYGLSENDEWTQDRAKPVTQIVSAEAWGRADCDVKLVEKSFETDTNLNFQNLSVIGFRILLLKVAGFNLLMTLRLWSSRAKRSGSGATNFSLLKQAGDVEENPGPTSMDWIWRILFLVGAATGAHSFEQVQLVQSGPEVKKPGESVKISCKASGYTFRHYSMNWVKQAPGQGLKWMGRINTESGVPIYADDFKGRFSFTVDTSASTAYLEISSLTSEDTAVYFCSNDYLYSLDFWGQGTTLTVSSTRIQNPDPAVYQLRDSKSSDKSVCLFTDFDSQTNVSQSKDSDVYITDKCVLDMRSMDFKSNSAVAWSNKSDFACANAFNNSIIPEDTFFPSPESSCGFTSESYQQGVLSATILYEILLGKATLYAVLVSALVLMAMVKRKDSRG

SEQ ID NO: 12320 - protein, 623 aa, synthetic construct
MALPVTALLLPLALLLHAARPQSVLTQPPSVSGAPGQRVTISCTGSSSNIGAGFDVHWYQQLPGTAPKLLIYGNSNRPSGVPDRFSGSKSGTSASLAITGLQAEDEADYYCQSYDSSLSGYVFGTGTKVTVLGLEDLKNVFPPEVAVFEPSEAEISHTQKATLVCLATGFYPDHVELSWWVNGKEVHSGVCTDPQPLKEQPALNDSRYCLSSRLRVSATFWQNPRNHFRCQVQFYGLSENDEWTQDRAKPVTQIVSAEAWGRADCDVKLVEKSFETDTNLNFQNLSVIGFRILLLKVAGFNLLMTLRLWSSRAKRSGSGATNFSLLKQAGDVEENPGPTSMDWIWRILFLVGAATGAHSFEQVQLVQSGAEVKKPGASVKVSCKASGYTFTDYYMHWVRQAPGQRLEWMGWINPNSGGTNYAQKFQDRITVTRDTSSNTGYMELTRLRSDDTAVYYCARSPYSGVLDKWGQGTLVTVSSTRIQNPDPAVYQLRDSKSSDKSVCLFTDFDSQTNVSQSKDSDVYITDKCVLDMRSMDFKSNSAVAWSNKSDFACANAFNNSIIPEDTFFPSPESSCGFTSESYQQGVLSATILYEILLGKATLYAVLVSALVLMAMVKRKDSRG

SEQ ID NO: 12321 - protein, 620 aa, synthetic construct
MALPVTALLLPLALLLHAARPQAVLTQPPSASGTPGQRVTISCSGSSSNIGSYTVSWYQQLPGTAPKFLIYSNNQRPSGVPDRFSGSKSGTSASLAISGLQSEDEADYYCAAWDDSLNGYVFGTGTKVTVLGLEDLKNVFPPEVAVFEPSEAEISHTQKATLVCLATGFYPDHVELSWWVNGKEVHSGVCTDPQPLKEQPALNDSRYCLSSRLRVSATFWQNPRNHFRCQVQFYGLSENDEWTQDRAKPVTQIVSAEAWGRADCDVKLVEKSFETDTNLNFQNLSVIGFRILLLKVAGFNLLMTLRLWSSRAKRSGSGATNFSLLKQAGDVEENPGPTSMDWIWRILFLVGAATGAHSFEVQLVQSGAEVKKPGESLKISCKGSGYDFTTYWIGWVRQMPGKGLEWMGIIYPGDSDTRYSPSVRGRVTISADKSINTAYLQWSSLEASDTAMYYCARMWTFSQDGWGQGTLVTVSSTRIQNPDPAVYQLRDSKSSDKSVCLFTDFDSQTNVSQSKDSDVYITDKCVLDMRSMDFKSNSAVAWSNKSDFACANAFNNSIIPEDTFFPSPESSCGFTSESYQQGVLSATILYEILLGKATLYAVLVSALVLMAMVKRKDSRG

SEQ ID NO: 12322 - protein, 623 aa, synthetic construct
MALPVTALLLPLALLLHAARPDIVMTQSPDSLAVSLGERATINCKSSQSILYSSNQKNYLAWYQQKPGQSPKLLIYWASTRESGVPDRFSGSGSGTDFTLTISSLQAEDVAVYYCHQYISSYTFGQGTKLEIKLEDLKNVFPPEVAVFEPSEAEISHTQKATLVCLATGFYPDHVELSWWVNGKEVHSGVCTDPQPLKEQPALNDSRYCLSSRLRVSATFWQNPRNHFRCQVQFYGLSENDEWTQDRAKPVTQIVSAEAWGRADCDVKLVEKSFETDTNLNFQNLSVIGFRILLLKVAGFNLLMTLRLWSSRAKRSGSGATNFSLLKQAGDVEENPGPTSMDWIWRILFLVGAATGAHSFEQVQLVQSGAEVKKPGASVKVSCKASGYTFASQWMHWMRQAPGQGLEWIGWINPGNVNTKYNEKFKGRATLTVDTSTNTAYMELSSLRSEDTAVYYCARSTWYRPLDYWGQGTLVTVSSTRIQNPDPAVYQLRDSKSSDKSVCLFTDFDSQTNVSQSKDSDVYITDKCVLDMRSMDFKSNSAVAWSNKSDFACANAFNNSIIPEDTFFPSPESSCGFTSESYQQGVLSATILYEILLGKATLYAVLVSALVLMAMVKRKDSRG

SEQ ID NO: 12323 - protein, 623 aa, synthetic construct
MALPVTALLLPLALLLHAARPDHIVLTQSPSSLSASLGDRVTISCRASQDISTYLNWYQQKPDGTVKLLIFYTSRLHAGVPSRFSGSGSGTHHSLTISNLEQEDIATYFCQQGNSLPFTFGSGTKLEIKRLEDLKNVFPPEVAVFEPSEAEISHTQKATLVCLATGFYPDHVELSWWVNGKEVHSGVCTDPQPLKEQPALNDSRYCLSSRLRVSATFWQNPRNHFRCQVQFYGLSENDEWTQDRAKPVTQIVSAEAWGRADCDVKLVEKSFETDTNLNFQNLSVIGFRILLLKVAGFNLLMTLRLWSSRAKRSGSGATNFSLLKQAGDVEENPGPTSMDWIWRILFLVGAATGAHSFEQVQLKESGPELEKPGASVKISCKASGYSFTAYSMNWVKQNNGMSLEWIGSIDPYYGDTKYAQKFKGKATLTVDKASSTAYLQLKSLTSEDSAVYYCARRMITTGDWYFDVWGAGTTVTVSSTRIQNPDPAVYQLRDSKSSDKSVCLFTDFDSQTNVSQSKDSDVYITDKCVLDMRSMDFKSNSAVAWSNKSDFACANAFNNSIIPEDTFFPSPESSCGFTSESYQQGVLSATILYEILLGKATLYAVLVSALVLMAMVKRKDSRG

SEQ ID NO: 12324 - protein, 623 aa, synthetic construct; identical to SEQ ID NO: 12323

SEQ ID NO: 12325 - protein, 623 aa, synthetic construct
MALPVTALLLPLALLLHAARPDEIVLTQSPATLSLSPGERATLSCRASQSVSSYLAWYQQKPGQAPRLLIYDASNRATGIPARFSGSGSGTDFTLTISSLEPEDFAVYYCQQRSNWPITFGQGTRLEIKLEDLKNVFPPEVAVFEPSEAEISHTQKATLVCLATGFYPDHVELSWWVNGKEVHSGVCTDPQPLKEQPALNDSRYCLSSRLRVSATFWQNPRNHFRCQVQFYGLSENDEWTQDRAKPVTQIVSAEAWGRADCDVKLVEKSFETDTNLNFQNLSVIGFRILLLKVAGFNLLMTLRLWSSRAKRSGSGATNFSLLKQAGDVEENPGPTSMDWIWRILFLVGAATGAHSFEEVQLVESGGGLVQPGRSLRLSCAASGFTFNDYAMHWVRQAPGKGLEWVSTISWNSGSIGYADSVKGRFTISRDNAKKSLYLQMNSLRAEDTALYYCAKDIQYGNYYYGMDVWGQGTTVTVSSTRIQNPDPAVYQLRDSKSSDKSVCLFTDFDSQTNVSQSKDSDVYITDKCVLDMRSMDFKSNSAVAWSNKSDFACANAFNNSIIPEDTFFPSPESSCGFTSESYQQGVLSATILYEILLGKATLYAVLVSALVLMAMVKRKDSRG

SEQ ID NO: 12326 - protein, 625 aa, synthetic construct
MALPVTALLLPLALLLHAARPDIVMTQTPLSLPVTPGEPASISCRSSKSLLHSNGITYLYWYLQKPGQSPQLLIYQMSNLVSGVPDRFSGSGSGTDFTLKISRVEAEDVGVYYCAQNLELPYTFGGGTKVEIKRLEDLKNVFPPEVAVFEPSEAEISHTQKATLVCLATGFYPDHVELSWWVNGKEVHSGVCTDPQPLKEQPALNDSRYCLSSRLRVSATFWQNPRNHFRCQVQFYGLSENDEWTQDRAKPVTQIVSAEAWGRADCDVKLVEKSFETDTNLNFQNLSVIGFRILLLKVAGFNLLMTLRLWSSRAKRSGSGATNFSLLKQAGDVEENPGPTSMDWIWRILFLVGAATGAHSFEQVQLVQSGAEVKKPGSSVKVSCKASGYAFSYSWINWVRQAPGQGLEWMGRIFPGDGDTDYNGKFKGRVTITADKSTSTAYMELSSLRSEDTAVYYCARNVFDGYWLVYWGQGTLVTVSSTRIQNPDPAVYQLRDSKSSDKSVCLFTDFDSQTNVSQSKDSDVYITDKCVLDMRSMDFKSNSAVAWSNKSDFACANAFNNSIIPEDTFFPSPESSCGFTSESYQQGVLSATILYEILLGKATLYAVLVSALVLMAMVKRKDSRG

SEQ ID NO: 12327 - protein, 626 aa, synthetic construct
MALPVTALLLPLALLLHAARPDIQMTQSPSSLSASVGDRVTITCRSSQSIVHSVGNTFLEWYQQKPGKAPKLLIYKVSNRFSGVPSRFSGSGSGTDFTLTISSLQPEDFATYYCFQGSQFPYTFGQGTKVEIKRLEDLKNVFPPEVAVFEPSEAEISHTQKATLVCLATGFYPDHVELSWWVNGKEVHSGVCTDPQPLKEQPALNDSRYCLSSRLRVSATFWQNPRNHFRCQVQFYGLSENDEWTQDRAKPVTQIVSAEAWGRADCDVKLVEKSFETDTNLNFQNLSVIGFRILLLKVAGFNLLMTLRLWSSRAKRSGSGATNFSLLKQAGDVEENPGPTSMDWIWRILFLVGAATGAHSFEEVQLVESGGGLVQPGGSLRLSCAASGYEFSRSWMNWVRQAPGKGLEWVGRIYPGDGDTNYSGKFKGRFTISADTSKNTAYLQMNSLRAEDTAVYYCARDGSSWDWYFDVWGQGTLVTVSSTRIQNPDPAVYQLRDSKSSDKSVCLFTDFDSQTNVSQSKDSDVYITDKCVLDMRSMDFKSNSAVAWSNKSDFACANAFNNSIIPEDTFFPSPESSCGFTSESYQQGVLSATILYEILLGKATLYAVLVSALVLMAMVKRKDSRG

SEQ ID NO: 12328 - protein, 624 aa, synthetic construct
MALPVTALLLPLALLLHAARPDIQMTQSPSSLSASVGDRVTITCRASQTIWSYLNWYQQRPGKAPNLLIYAASSLQSGVPSRFSGRGSGTDFTLTISSLQAEDFATYYCQQSYSIPQIFGQGTKLEIKLEDLKNVFPPEVAVFEPSEAEISHTQKATLVCLATGFYPDHVELSWWVNGKEVHSGVCTDPQPLKEQPALNDSRYCLSSRLRVSATFWQNPRNHFRCQVQFYGLSENDEWTQDRAKPVTQIVSAEAWGRADCDVKLVEKSFETDTNLNFQNLSVIGFRILLLKVAGFNLLMTLRLWSSRAKRSGSGATNFSLLKQAGDVEENPGPTSMDWIWRILFLVGAATGAHSFEQVQLQQSGPGLVKPSQTLSLTCAISGDSVSSNSAAWNWIRQSPSRGLEWLGRTYYRSKWYNDYAVSVKSRITINPDTSKNQFSLQLNSVTPEDTAVYYCAREVTGDLEDAFDIWGQGTMVTVSSTRIQNPDPAVYQLRDSKSSDKSVCLFTDFDSQTNVSQSKDSDVYITDKCVLDMRSMDFKSNSAVAWSNKSDFACANAFNNSIIPEDTFFPSPESSCGFTSESYQQGVLSATILYEILLGKATLYAVLVSALVLMAMVKRKDSRG

SEQ ID NO: 12329 - protein, 617 aa, synthetic construct
MALPVTALLLPLALLLHAARPDIQMTQSPATIENTSLSASVGDRVTITCRASQGISSWLTWYQQKPEKAPKSLIYAASSLQSGVPSRFSGSGSGTDFTLTISSLQPEDFATYYCQQYDSYPITFGQGTRLEIKLEDLKNVFPPEVAVFEPSEAEISHTQKATLVCLATGFYPDHVELSWWVNGKEVHSGVCTDPQPLKEQPALNDSRYCLSSRLRVSATFWQNPRNHFRCQVQFYGLSENDEWTQDRAKPVTQIVSAEAWGRADCDVKLVEKSFETDTNLNFQNLSVIGFRILLLKVAGFNLLMTLRLWSSRAKRSGSGATNFSLLKQAGDVEENPGPTSMDWIWRILFLVGAATGAHSFEQVQLQQWGAGLLKPSETLSLTCAVYGGSFSAYYWSWIRQPPGKGLEWIGDINHGGGTNYNPSLKSRVTISVDTSKNQFSLKLNSVTAADTAVYYCASLTAYWGQGSLVTVSSTRIQNPDPAVYQLRDSKSSDKSVCLFTDFDSQTNVSQSKDSDVYITDKCVLDMRSMDFKSNSAVAWSNKSDFACANAFNNSIIPEDTFFPSPESSCGFTSESYQQGVLSATILYEILLGKATLYAVLVSALVLMAMVKRKDSRG

SEQ ID NO: 12330 - protein, 622 aa, synthetic construct
MALPVTALLLPLALLLHAARPDEIVLTQSPDSLAVSLGERATINCKASQSVDFDGDSYLNWYQQKPGQPPKVLIYAASTLQSGVPSRFSGSGSGTDFTLTINSLEAEDAATYYCQQSNEDPWTFGGGTKVEIKLEDLKNVFPPEVAVFEPSEAEISHTQKATLVCLATGFYPDHVELSWWVNGKEVHSGVCTDPQPLKEQPALNDSRYCLSSRLRVSATFWQNPRNHFRCQVQFYGLSENDEWTQDRAKPVTQIVSAEAWGRADCDVKLVEKSFETDTNLNFQNLSVIGFRILLLKVAGFNLLMTLRLWSSRAKRSGSGATNFSLLKQAGDVEENPGPTSMDWIWRILFLVGAATGAHSFEQVQLVQSGAEVKKPGASVKVSCKVSGYTFTDYYITWVRQAPGQALEWMGWIYPGSGNTKYSQKFQGRFVFSVDTSASTAYLQLSSLKAEDTAVYYCANYGNYWFAYWGQGTLVTVSSTRIQNPDPAVYQLRDSKSSDKSVCLFTDFDSQTNVSQSKDSDVYITDKCVLDMRSMDFKSNSAVAWSNKSDFACANAFNNSIIPEDTFFPSPESSCGFTSESYQQGVLSATILYEILLGKATLYAVLVSALVLMAMVKRKDSRG

SEQ ID NO: 12331 - protein, 619 aa, synthetic construct
MALPVTALLLPLALLLHAARPDIQMTQSPSSLSASVGDRVTITCRASQGISSWLAWYQQKPEKAPKSLIYAASSLQSGVPSRFSGSGSGTDFTLTISSLQPEDFATYYCQQYNSYPPTFGGGTKVEIKLEDLKNVFPPEVAVFEPSEAEISHTQKATLVCLATGFYPDHVELSWWVNGKEVHSGVCTDPQPLKEQPALNDSRYCLSSRLRVSATFWQNPRNHFRCQVQFYGLSENDEWTQDRAKPVTQIVSAEAWGRADCDVKLVEKSFETDTNLNFQNLSVIGFRILLLKVAGFNLLMTLRLWSSRAKRSGSGATNFSLLKQAGDVEENPGPTSMDWIWRILFLVGAATGAHSFEEVQLVQSGGGLVHPGGSLRLSCAGSGFAFSSSTMHWIRQAPGKGLEWISLIGSGGGIYYGDSVKGRFTISRDNAKNSLYLQMNSLRAEDMAVYYCVRGYFDWVDYFDYWGQGTLVTVSSTRIQNPDPAVYQLRDSKSSDKSVCLFTDFDSQTNVSQSKDSDVYITDKCVLDMRSMDFKSNSAVAWSNKSDFACANAFNNSIIPEDTFFPSPESSCGFTSESYQQGVLSATILYEILLGKATLYAVLVSALVLMAMVKRKDSRG

SEQ ID NO: 12332 - protein, 629 aa, synthetic construct
MALPVTALLLPLALLLHAARPDDIVMTQSPDSLTVSLGERTTINCKSSQSVLDSSKNKNSLAWYQQKPGQPPKLLLSWASTRESGIPDRFSGSGSGTDFTLTIDSLQPEDSATYYCQQSAHFPITFGQGTRLEIKLEDLKNVFPPEVAVFEPSEAEISHTQKATLVCLATGFYPDHVELSWWVNGKEVHSGVCTDPQPLKEQPALNDSRYCLSSRLRVSATFWQNPRNHFRCQVQFYGLSENDEWTQDRAKPVTQIVSAEAWGRADCDVKLVEKSFETDTNLNFQNLSVIGFRILLLKVAGFNLLMTLRLWSSRAKRSGSGATNFSLLKQAGDVEENPGPTSMDWIWRILFLVGAATGAHSFEQVQLVQSGAEVKKPGASVKVSCKASGYTFTNYGMNWVKQAPGQGLKWMGWINTYTGEPTYADDFKGRVTMTSDTSTSTAYLELHNLRSDDTAVYYCARWSWSDGYYVYFDYWGQGTTVTVSSTRIQNPDPAVYQLRDSKSSDKSVCLFTDFDSQTNVSQSKDSDVYITDKCVLDMRSMDFKSNSAVAWSNKSDFACANAFNNSIIPEDTFFPSPESSCGFTSESYQQGVLSATILYEILLGKATLYAVLVSALVLMAMVKRKDSRG

SEQ ID NO: 12333 - protein, 625 aa, synthetic construct
MALPVTALLLPLALLLHAARPDEIVLTQSPGSLAVSPGERVTMSCKSSQSVFFSSSQKNYLAWYQQIPGQSPRLLIYWASTRESGVPDRFTGSGSGTDFTLTISSVQPEDLAIYYCHQYLSSRTFGQGTKLEIKRLEDLKNVFPPEVAVFEPSEAEISHTQKATLVCLATGFYPDHVELSWWVNGKEVHSGVCTDPQPLKEQPALNDSRYCLSSRLRVSATFWQNPRNHFRCQVQFYGLSENDEWTQDRAKPVTQIVSAEAWGRADCDVKLVEKSFETDTNLNFQNLSVIGFRILLLKVAGFNLLMTLRLWSSRAKRSGSGATNFSLLKQAGDVEENPGPTSMDWIWRILFLVGAATGAHSFEQVQLQQPGAEVVKPGASVKMSCKASGYTFTSYYIHWIKQTPGQGLEWVGVIYPGNDDISYNQKFQGKATLTADKSSTTAYMQLSSLTSEDSAVYYCAREVRLRYFDVWGQGTTVTVSSTRIQNPDPAVYQLRDSKSSDKSVCLFTDFDSQTNVSQSKDSDVYITDKCVLDMRSMDFKSNSAVAWSNKSDFACANAFNNSIIPEDTFFPSPESSCGFTSESYQQGVLSATILYEILLGKATLYAVLVSALVLMAMVKRKDSRG

SEQ ID NO: 12334 - protein, 629 aa, synthetic construct
MALPVTALLLPLALLLHAARPDVLLTQSPLSLPVTLGQPASISCRSSQTIVHSNGNTYLEWFQQRPGQSPRLLIYQVSNRFSGVPDRFSGSGSGTDFTLKISRVEAEDVGVYYCFQGSHVPRTFGGGTKVEIKRALEDLKNVFPPEVAVFEPSEAEISHTQKATLVCLATGFYPDHVELSWWVNGKEVHSGVCTDPQPLKEQPALNDSRYCLSSRLRVSATFWQNPRNHFRCQVQFYGLSENDEWTQDRAKPVTQIVSAEAWGRADCDVKLVEKSFETDTNLNFQNLSVIGFRILLLKVAGFNLLMTLRLWSSRAKRSGSGATNFSLLKQAGDVEENPGPTSMDWIWRILFLVGAATGAHSFEQIQLVQSGSELKKPGASVKVSCKASGYTFTNYGMNWVRQAPGQGLKWMGWINTNTGEPKYAEEFKGRFALSLDTSVSTAYLQINSLKAEDTAVYFCARGYGNYARGAWLAYWGQGTLVTVSSTRIQNPDPAVYQLRDSKSSDKSVCLFTDFDSQTNVSQSKDSDVYITDKCVLDMRSMDFKSNSAVAWSNKSDFACANAFNNSIIPEDTFFPSPESSCGFTSESYQQGVLSATILYEILLGKATLYAVLVSALVLMAMVKRKDSRG

SEQ ID NO: 12335 - protein, 614 aa, synthetic construct
MALPVTALLLPLALLLHAARPDEIVLTQSPATLSLSPGERATLSCSASSSINYIYWLQQKPGQAPRILIYLTSNLASGVPARFSGSGSGTDFTLTISSLEPEDFAVYYCLQWSSNPLTFGGGTKVEIKLEDLKNVFPPEVAVFEPSEAEISHTQKATLVCLATGFYPDHVELSWWVNGKEVHSGVCTDPQPLKEQPALNDSRYCLSSRLRVSATFWQNPRNHFRCQVQFYGLSENDEWTQDRAKPVTQIVSAEAWGRADCDVKLVEKSFETDTNLNFQNLSVIGFRILLLKVAGFNLLMTLRLWSSRAKRSGSGATNFSLLKQAGDVEENPGPTSMDWIWRILFLVGAATGAHSFEEVQLVESGGGLVKPGGSLRLSCAASGFTFSSYDMSWVRQAPGKGLEWVSTISSGGSYTYYLDSIKGRFTISRDNAKNSLYLQMNSLRAEDTAVYYCARQGLDYWGRGTLVTVSSTRIQNPDPAVYQLRDSKSSDKSVCLFTDFDSQTNVSQSKDSDVYITDKCVLDMRSMDFKSNSAVAWSNKSDFACANAFNNSIIPEDTFFPSPESSCGFTSESYQQGVLSATILYEILLGKATLYAVLVSALVLMAMVKRKDSRG

SEQ ID NO: 12336 - protein, 623 aa, synthetic construct
MALPVTALLLPLALLLHAARPDIVMTQSPDSLAVSLGERATINCRASKSVSTSGYSFMHWYQQKPGQPPKLLIYLASNLESGVPDRFSGSGSGTDFTLTISSLQAEDVAVYYCQHSREVPWTFGQGTKVEIKRLEDLKNVFPPEVAVFEPSEAEISHTQKATLVCLATGFYPDHVELSWWVNGKEVHSGVCTDPQPLKEQPALNDSRYCLSSRLRVSATFWQNPRNHFRCQVQFYGLSENDEWTQDRAKPVTQIVSAEAWGRADCDVKLVEKSFETDTNLNFQNLSVIGFRILLLKVAGFNLLMTLRLWSSRAKRSGSGATNFSLLKQAGDVEENPGPTSMDWIWRILFLVGAATGAHSFEQVQLVQSGAEVKKPGASVKVSCKASGYTFTNYGMNWVRQAPGQGLEWMGWINTYTGEPTYADAFKGRFAFSLDTSTSTAYLQINSLRSDDTAVYYCARDYGDYGMDYWGQGTTVTVSSTRIQNPDPAVYQLRDSKSSDKSVCLFTDFDSQTNVSQSKDSDVYITDKCVLDMRSMDFKSNSAVAWSNKSDFACANAFNNSIIPEDTFFPSPESSCGFTSESYQQGVLSATILYEILLGKATLYAVLVSALVLMAMVKRKDSRG

SEQ ID NO: 12337 - protein, 619 aa, synthetic construct
MALPVTALLLPLALLLHAARPDIVMTQTPLTLSVTIGQPASISCKSSQSLLDSDGKTYLNWLLQRPGQSPERLIYLVSKLDSGVPDRFTGSGSGTDFTLKISRVEAEDLGVYCCWQGTHFPYTFGGGTKVEIKGLEDLKNVFPPEVAVFEPSEAEISHTQKATLVCLATGFYPDHVELSWWVNGKEVHSGVCTDPQPLKEQPALNDSRYCLSSRLRVSATFWQNPRNHFRCQVQFYGLSENDEWTQDRAKPVTQIVSAEAWGRADCDVKLVEKSFETDTNLNFQNLSVIGFRILLLKVAGFNLLMTLRLWSSRAKRSGSGATNFSLLKQAGDVEENPGPTSMDWIWRILFLVGAATGAHSFEQVQLQQPGAELVRPGASVKLSCKASGYTFTSYWMNWVKQRPGQGLEWIGMIDPSDSETHYNHIFKDKATLTVDKSSSTAYLQLSSLTSEDSAVYYCARNLYLWGQGTSVTVSSTRIQNPDPAVYQLRDSKSSDKSVCLFTDFDSQTNVSQSKDSDVYITDKCVLDMRSMDFKSNSAVAWSNKSDFACANAFNNSIIPEDTFFPSPESSCGFTSESYQQGVLSATILYEILLGKATLYAVLVSALVLMAMVKRKDSRG

SEQ ID NO: 12338 - protein, 627 aa, synthetic construct
MALPVTALLLPLALLLHAARPDIVMTQSPDSLAVSLGERATINCESSQSLLNSGNQKNYLTWYQQKPGQPPKPLIYWASTRESGVPDRFSGSGSGTDFTLTISSLQAEDVAVYYCQNDYSYPYTFGQGTKLEIKRLEDLKNVFPPEVAVFEPSEAEISHTQKATLVCLATGFYPDHVELSWWVNGKEVHSGVCTDPQPLKEQPALNDSRYCLSSRLRVSATFWQNPRNHFRCQVQFYGLSENDEWTQDRAKPVTQIVSAEAWGRADCDVKLVEKSFETDTNLNFQNLSVIGFRILLLKVAGFNLLMTLRLWSSRAKRSGSGATNFSLLKQAGDVEENPGPTSMDWIWRILFLVGAATGAHSFEEVQLVQSGAEVKKPGESLKISCKGSGYSFTDYYMKWARQMPGKGLEWMGDIIPSNGATFYNQKFKGQVTISADKSISTTYLQWSSLKASDTAMYYCARSHLLRASWFAYWGQGTMVTVSSTRIQNPDPAVYQLRDSKSSDKSVCLFTDFDSQTNVSQSKDSDVYITDKCVLDMRSMDFKSNSAVAWSNKSDFACANAFNNSIIPEDTFFPSPESSCGFTSESYQQGVLSATILYEILLGKATLYAVLVSALVLMAMVKRKDSRG

SEQ ID NO: 12339 - protein, 622 aa, synthetic construct
MALPVTALLLPLALLLHAARPDIQMTQSTSSLSASLGDRVTISCSASQGINNYLNWYQQKPDGTVELLIYYTSTLQSGVPSRFSGSGSGTDYSLTISNLEPEDIGTYYCQQYSKLPRTFGGGTKLEIKLEDLKNVFPPEVAVFEPSEAEISHTQKATLVCLATGFYPDHVELSWWVNGKEVHSGVCTDPQPLKEQPALNDSRYCLSSRLRVSATFWQNPRNHFRCQVQFYGLSENDEWTQDRAKPVTQIVSAEAWGRADCDVKLVEKSFETDTNLNFQNLSVIGFRILLLKVAGFNLLMTLRLWSSRAKRSGSGATNFSLLKQAGDVEENPGPTSMDWIWRILFLVGAATGAHSFEQVQLQQSGSELMMPGASVKISCKATGYTFSNYWIEWVKQRPGHGLEWIGEILPGTGRTIYNEKFKGKATFTADISSNTVQMQLSSLTSEDSAVYYCARRDYYGNFYYAMDYWGQGTSVTVSSTRIQNPDPAVYQLRDSKSSDKSVCLFTDFDSQTNVSQSKDSDVYITDKCVLDMRSMDFKSNSAVAWSNKSDFACANAFNNSIIPEDTFFPSPESSCGFTSESYQQGVLSATILYEILLGKATLYAVLVSALVLMAMVKRKDSRG

SEQ ID NO: 12340 - protein, 617 aa, synthetic construct
MALPVTALLLPLALLLHAARPDIQMTQSPASLSVSVGETVTITCRASENIYSNLAWYQQKQGKSPQLLVYAATNLADGVPSRFSGSGSGTQYSLKINSLQSEDFGSYYCQHFWGTWTFGGGTTLEIKLEDLKNVFPPEVAVFEPSEAEISHTQKATLVCLATGFYPDHVELSWWVNGKEVHSGVCTDPQPLKEQPALNDSRYCLSSRLRVSATFWQNPRNHFRCQVQFYGLSENDEWTQDRAKPVTQIVSAEAWGRADCDVKLVEKSFETDTNLNFQNLSVIGFRILLLKVAGFNLLMTLRLWSSRAKRSGSGATNFSLLKQAGDVEENPGPTSMDWIWRILFLVGAATGAHSFEEVQLQQSGPELVKPGASVKMSCKASGYTFTDYYMKWMKQSHGKSLEWIGDINPNNGGTTYNQKFKGKATLTVDKSSSTAYMQLNSLTSEDSAVYYCARDYGYGYFDYWGQGTTLTVSSTRIQNPDPAVYQLRDSKSSDKSVCLFTDFDSQTNVSQSKDSDVYITDKCVLDMRSMDFKSNSAVAWSNKSDFACANAFNNSIIPEDTFFPSPESSCGFTSESYQQGVLSATILYEILLGKATLYAVLVSALVLMAMVKRKDSRG

SEQ ID NO: 12341 - protein, 620 aa, synthetic construct
MALPVTALLLPLALLLHAARPEIVLTQSPGTLSLSPGERATLSCRASQSVGGYLAWYQQKPGQAPRLLIYDASNRATGIPARFSGSGSGTDFTLTISSLEPEDFAVYYCQQRNNWPPMYTFGQGTKLEIKRLEDLKNVFPPEVAVFEPSEAEISHTQKATLVCLATGFYPDHVELSWWVNGKEVHSGVCTDPQPLKEQPALNDSRYCLSSRLRVSATFWQNPRNHFRCQVQFYGLSENDEWTQDRAKPVTQIVSAEAWGRADCDVKLVEKSFETDTNLNFQNLSVIGFRILLLKVAGFNLLMTLRLWSSRAKRSGSGATNFSLLKQAGDVEENPGPTSMDWIWRILFLVGAATGAHSFEQVQLVQSGAEVKKPGSSVKVSCKASGGTFSSYAISWVRQAPGQGLEWMGGIIPILGTANYAQKFQGRVTITADESTSTAYMELSSLRSEDTAVYYCARWGGGAFDIWGQGTMVTVSSTRIQNPDPAVYQLRDSKSSDKSVCLFTDFDSQTNVSQSKDSDVYITDKCVLDMRSMDFKSNSAVAWSNKSDFACANAFNNSIIPEDTFFPSPESSCGFTSESYQQGVLSATILYEILLGKATLYAVLVSALVLMAMVKRKDSRG

SEQ ID NO: 12342 - protein, 615 aa, synthetic construct
MALPVTALLLPLALLLHAARPQIVLTQSPALMSASPGEKVTMTCSASSSVRYMYWYQQKPRSSPKPWIHLTSNLASGVPARFSGSGSGTSYSLTISSMEAEDAATYYCQQWSSHPFTFGSGTKLEIKLEDLKNVFPPEVAVFEPSEAEISHTQKATLVCLATGFYPDHVELSWWVNGKEVHSGVCTDPQPLKEQPALNDSRYCLSSRLRVSATFWQNPRNHFRCQVQFYGLSENDEWTQDRAKPVTQIVSAEAWGRADCDVKLVEKSFETDTNLNFQNLSVIGFRILLLKVAGFNLLMTLRLWSSRAKRSGSGATNFSLLKQAGDVEENPGPTSMDWIWRILFLVGAATGAHSFEDVQLQESGPGLVKPSQSLSLTCTVTGFSITSDYSWNWIRQFPGNKLEWMGYISYSGHTSYNPSLESRISITRDTSKNQFFLQLNSVTTEDTATYYCTRGNWDVVYWGQGTLVTVSATRIQNPDPAVYQLRDSKSSDKSVCLFTDFDSQTNVSQSKDSDVYITDKCVLDMRSMDFKSNSAVAWSNKSDFACANAFNNSIIPEDTFFPSPESSCGFTSESYQQGVLSATILYEILLGKATLYAVLVSALVLMAMVKRKDSRG

SEQ ID NO: 12343 - protein, 625 aa, synthetic construct
MALPVTALLLPLALLLHAARPDVVMTQSPLSLPVTLGQPASISCRSSQSIVHSDGNTYLEWYQQRPGQSPRRLIYKVSNRFSGVPDRFSGSGSGTDFTLKISRVEAEDVGVYYCFQGSHAPWTFGGGTKVEIKLEDLKNVFPPEVAVFEPSEAEISHTQKATLVCLATGFYPDHVELSWWVNGKEVHSGVCTDPQPLKEQPALNDSRYCLSSRLRVSATFWQNPRNHFRCQVQFYGLSENDEWTQDRAKPVTQIVSAEAWGRADCDVKLVEKSFETDTNLNFQNLSVIGFRILLLKVAGFNLLMTLRLWSSRAKRSGSGATNFSLLKQAGDVEENPGPTSMDWIWRILFLVGAATGAHSFEEVQLVESGGGLVQPGGSLRLSCAASGFTFSSYGMHWVRQAPGKGLEWVAYITTRSSTIYYADSVKGRFTISRDNAKNSLYLQMNSLRAEDTAVYYCTREPLTGYYAMDYWGQGTSVTVSSTRIQNPDPAVYQLRDSKSSDKSVCLFTDFDSQTNVSQSKDSDVYITDKCVLDMRSMDFKSNSAVAWSNKSDFACANAFNNSIIPEDTFFPSPESSCGFTSESYQQGVLSATILYEILLGKATLYAVLVSALVLMAMVKRKDSRG

SEQ ID NO: 12344 - protein, 617 aa, synthetic construct
MALPVTALLLPLALLLHAARPDIQMTQSPSSLSASVGDRVTITCRASQSISLWLNWYQQKPGKAPKLLIYAASTLQSGVPSRFSGSGSGTDFTLTISSLQPEDFATYYCQQYYTSPYTFGQGTKVEIKRLEDLKNVFPPEVAVFEPSEAEISHTQKATLVCLATGFYPDHVELSWWVNGKEVHSGVCTDPQPLKEQPALNDSRYCLSSRLRVSATFWQNPRNHFRCQVQFYGLSENDEWTQDRAKPVTQIVSAEAWGRADCDVKLVEKSFETDTNLNFQNLSVIGFRILLLKVAGFNLLMTLRLWSSRAKRSGSGATNFSLLKQAGDVEENPGPTSMDWIWRILFLVGAATGAHSFEQVQLLESGGGLVQPGGSLRLSCAASGFTFSSYAMSWVRQAPGKGLEWVSVIRSSGSSTYYADSVKGRFTISRDNSKNTLYLQMNSLRAEDTAVYYCARGGGYFDYWGQGTLVTVSSTRIQNPDPAVYQLRDSKSSDKSVCLFTDFDSQTNVSQSKDSDVYITDKCVLDMRSMDFKSNSAVAWSNKSDFACANAFNNSIIPEDTFFPSPESSCGFTSESYQQGVLSATILYEILLGKATLYAVLVSALVLMAMVKRKDSRG

SEQ ID NO: 12345 - protein, 620 aa, synthetic construct
MALPVTALLLPLALLLHAARPDIQMTQSPSSLSASVGDRVTITCRASQSISSYLNWYQQKPGKAPKLLIYAVSTLQSGVPSRFSGSGSGTDFTLTISSLQPEDFATYYCQQSGTFPPTTFGQGTKVEIKRLEDLKNVFPPEVAVFEPSEAEISHTQKATLVCLATGFYPDHVELSWWVNGKEVHSGVCTDPQPLKEQPALNDSRYCLSSRLRVSATFWQNPRNHFRCQVQFYGLSENDEWTQDRAKPVTQIVSAEAWGRADCDVKLVEKSFETDTNLNFQNLSVIGFRILLLKVAGFNLLMTLRLWSSRAKRSGSGATNFSLLKQAGDVEENPGPTSMDWIWRILFLVGAATGAHSFEQVQLLESGGGLVQPGGSLRLSCAASGFTFSSHGMHWVRQAPGKGLEWVSVISGSGSNTGYADSVKGRFTISRDNSKNTLYLQMNSLRAEDTAVYYCARQWGSYAFDSWGQGTLVTVSSTRIQNPDPAVYQLRDSKSSDKSVCLFTDFDSQTNVSQSKDSDVYITDKCVLDMRSMDFKSNSAVAWSNKSDFACANAFNNSIIPEDTFFPSPESSCGFTSESYQQGVLSATILYEILLGKATLYAVLVSALVLMAMVKRKDSRG

SEQ ID NO: 12346 - protein, 630 aa, synthetic construct
MALPVTALLLPLALLLHAARPDIVMSQSPSSLAVSVGEKVTMSCKSSQSLLHSSNQKNYLAWYQQKPGQSPKVLIYWASTRESGVPDRFTGSGSGTDFTLTITSVKSEDLAVYYCQQYYSYPWTFGGGTRLEIKRLEDLKNVFPPEVAVFEPSEAEISHTQKATLVCLATGFYPDHVELSWWVNGKEVHSGVCTDPQPLKEQPALNDSRYCLSSRLRVSATFWQNPRNHFRCQVQFYGLSENDEWTQDRAKPVTQIVSAEAWGRADCDVKLVEKSFETDTNLNFQNLSVIGFRILLLKVAGFNLLMTLRLWSSRAKRSGSGATNFSLLKQAGDVEENPGPTSMDWIWRILFLVGAATGAHSFEEVQLQQSVAELVKPGASVKMSCKVSGYTLTDHTIHWMKQRPEQGLEWIGYIYPRDGITGYNEKFKGKATLTADTSSSTAYMQLNSLTSEDSAVYFCARWGYSYRNYAYYYDYWGQGTTLTVSSTRIQNPDPAVYQLRDSKSSDKSVCLFTDFDSQTNVSQSKDSDVYITDKCVLDMRSMDFKSNSAVAWSNKSDFACANAFNNSIIPEDTFFPSPESSCGFTSESYQQGVLSATILYEILLGKATLYAVLVSALVLMAMVKRKDSRG

SEQ ID NO: 12347 - protein, 627 aa, synthetic construct
MALPVTALLLPLALLLHAARPEIVLTQSPGTLSLSPGERATLSCRASQSVSSSYLAWYQQKPGQAPRLLIYGTSSRATGIPDRFSGSGSGTDFTLTISRLEPEDFAVYYCQQYGSSPFTFGGGTKVEIKRLEDLKNVFPPEVAVFEPSEAEISHTQKATLVCLATGFYPDHVELSWWVNGKEVHSGVCTDPQPLKEQPALNDSRYCLSSRLRVSATFWQNPRNHFRCQVQFYGLSENDEWTQDRAKPVTQIVSAEAWGRADCDVKLVEKSFETDTNLNFQNLSVIGFRILLLKVAGFNLLMTLRLWSSRAKRSGSGATNFSLLKQAGDVEENPGPTSMDWIWRILFLVGAATGAHSFEQVQLQESGPGLAKPSETLSLTCTVSGDSITSYYWSWIRQPPGKGLEWIGYIYYSGSTNYNPSLKSRVTISVDTSKNQFSLKLSSVTAADTAVYYCARDQRRIAAAGTHFYGMDVWGQGTTVTVSSTRIQNPDPAVYQLRDSKSSDKSVCLFTDFDSQTNVSQSKDSDVYITDKCVLDMRSMDFKSNSAVAWSNKSDFACANAFNNSIIPEDTFFPSPESSCGFTSESYQQGVLSATILYEILLGKATLYAVLVSALVLMAMVKRKDSRG

SEQ ID NO: 12348 - protein, 619 aa, synthetic construct
MALPVTALLLPLALLLHAARPDILLTQSPVILSVSPGERVSFSCRASQSIGTNIHWYQQRTNGSPRLLIKYASESISGIPSRFSGSGSGTDFTLSINSVESEDIADYYCQQNNNWPTTFGAGTKLELKLEDLKNVFPPEVAVFEPSEAEISHTQKATLVCLATGFYPDHVELSWWVNGKEVHSGVCTDPQPLKEQPALNDSRYCLSSRLRVSATFWQNPRNHFRCQVQFYGLSENDEWTQDRAKPVTQIVSAEAWGRADCDVKLVEKSFETDTNLNFQNLSVIGFRILLLKVAGFNLLMTLRLWSSRAKRSGSGATNFSLLKQAGDVEENPGPTSMDWIWRILFLVGAATGAHSFEQVQLKQSGPGLVQPSQSLSITCTVSGFSLTNYGVHWVRQSPGKGLEWLGVIWSGGNTDYNTPFTSRLSINKDNSKSQVFFKMNSLQSNDTAIYYCARALTYYDYEFAYWGQGTLVTVSATRIQNPDPAVYQLRDSKSSDKSVCLFTDFDSQTNVSQSKDSDVYITDKCVLDMRSMDFKSNSAVAWSNKSDFACANAFNNSIIPEDTFFPSPESSCGFTSESYQQGVLSATILYEILLGKATLYAVLVSALVLMAMVKRKDSRG

SEQ ID NO: 12349 - protein, 612 aa, synthetic construct
MALPVTALLLPLALLLHAARPMTQSPKFLLVSAGDRVTLTCKASQSVNNDVYWYQQEPGQSPKLLIYWASTRESGVPDRFTGSGSGTDFTLTISSVQAEDLAVYYCKQSYNLYTFGGGTKLEIKRLEDLKNVFPPEVAVFEPSEAEISHTQKATLVCLATGFYPDHVELSWWVNGKEVHSGVCTDPQPLKEQPALNDSRYCLSSRLRVSATFWQNPRNHFRCQVQFYGLSENDEWTQDRAKPVTQIVSAEAWGRADCDVKLVEKSFETDTNLNFQNLSVIGFRILLLKVAGFNLLMTLRLWSSRAKRSGSGATNFSLLKQAGDVEENPGPTSMDWIWRILFLVGAATGAHSFEESGRGLVQPGGSRKLSCAASGFTFSTSGMHWVRQAPEKGLEWVAYISSGSTTIYHADTVKGRFTISRDNPKNTLFLQMTSLRSEDTAMYYCCARSGQFGNYFDYWGQGTTLTVSSTRIQNPDPAVYQLRDSKSSDKSVCLFTDFDSQTNVSQSKDSDVYITDKCVLDMRSMDFKSNSAVAWSNKSDFACANAFNNSIIPEDTFFPSPESSCGFTSESYQQGVLSATILYEILLGKATLYAVLVSALVLMAMVKRKDSRG

SEQ ID NO: 12350 - protein, 617 aa, synthetic construct
MALPVTALLLPLALLLHAARPQSPSSLAVSAGEKVTMSCKSSQSLLNSRTRKNYLAWYQQKPGQSPKLLIYWASTRESGVPDRFTGSGSGTDFTLTISSVQAEDLAVYYCKQSNLYTFGGGTKLEIKLEDLKNVFPPEVAVFEPSEAEISHTQKATLVCLATGFYPDHVELSWWVNGKEVHSGVCTDPQPLKEQPALNDSRYCLSSRLRVSATFWQNPRNHFRCQVQFYGLSENDEWTQDRAKPVTQIVSAEAWGRADCDVKLVEKSFETDTNLNFQNLSVIGFRILLLKVAGFNLLMTLRLWSSRAKRSGSGATNFSLLKQAGDVEENPGPTSMDWIWRILFLVGAATGAHSFEQVQLEESGPELVKPGASVKLSCKASGYTFTEYIIHWVKQRSGQGLEWIGWFYPGSGSIKYNEKFKDKATLTADKSSSTVYMELSGLTSEDSAVYFCARHDGYSYFDYWGQGTTLTVSSTRIQNPDPAVYQLRDSKSSDKSVCLFTDFDSQTNVSQSKDSDVYITDKCVLDMRSMDFKSNSAVAWSNKSDFACANAFNNSIIPEDTFFPSPESSCGFTSESYQQGVLSATILYEILLGKATLYAVLVSALVLMAMVKRKDSRG

SEQ ID NO: 12351 - protein, 620 aa, synthetic construct
MALPVTALLLPLALLLHAARPDIQMTQSPSSLSASLGERVSLTCRATQELSGYLSWLQQKPDGTIKRLIYAASTLDSGVPKRFSGNRSGSDYSLTISSLESEDFADYYCLQYAIYPYTFGGGTKLEIKLEDLKNVFPPEVAVFEPSEAEISHTQKATLVCLATGFYPDHVELSWWVNGKEVHSGVCTDPQPLKEQPALNDSRYCLSSRLRVSATFWQNPRNHFRCQVQFYGLSENDEWTQDRAKPVTQIVSAEAWGRADCDVKLVEKSFETDTNLNFQNLSVIGFRILLLKVAGFNLLMTLRLWSSRAKRSGSGATNFSLLKQAGDVEENPGPTSMDWIWRILFLVGAATGAHSFEEVQLQQSGPELVKPGASVKMSCKASGYTFTSYFIHWVKQKPGQGLEWIGFINPYNDGSKYNEKFKGKATLTSDKSSSTAYMELSSLTSEDSAVYYCTRDDGYYGYAMDYWGQGTSVTVSSTRIQNPDPAVYQLRDSKSSDKSVCLFTDFDSQTNVSQSKDSDVYITDKCVLDMRSMDFKSNSAVAWSNKSDFACANAFNNSIIPEDTFFPSPESSCGFTSESYQQGVLSATILYEILLGKATLYAVLVSALVLMAMVKRKDSRG

SEQ ID NO: 12352 - protein, 625 aa, synthetic construct
MALPVTALLLPLALLLHAARPDTIVLTQSPASLAVSLGQRATISCRASESVDSYGNSFMHWYQQKPGQPPKLLIYLASNLESGVPARFSGSGSRTDFTLTIDPVEADDAATYYCQQNNYDPWTFGGGTKLEIKLEDLKNVFPPEVAVFEPSEAEISHTQKATLVCLATGFYPDHVELSWWVNGKEVHSGVCTDPQPLKEQPALNDSRYCLSSRLRVSATFWQNPRNHFRCQVQFYGLSENDEWTQDRAKPVTQIVSAEAWGRADCDVKLVEKSFETDTNLNFQNLSVIGFRILLLKVAGFNLLMTLRLWSSRAKRSGSGATNFSLLKQAGDVEENPGPTSMDWIWRILFLVGAATGAHSFEEVQLQQSGPELVKPGASVKMSCKASGYTFTSYVMHWVKQKPGQGLEWIGYINPYNDGTKYNEKFKGKATLTSDTSSSTAYMELNSLTSEDSAVYFCARPIYFDNDYFDYWGQGTTLKVSSTRIQNPDPAVYQLRDSKSSDKSVCLFTDFDSQTNVSQSKDSDVYITDKCVLDMRSMDFKSNSAVAWSNKSDFACANAFNNSIIPEDTFFPSPESSCGFTSESYQQGVLSATILYEILLGKATLYAVLVSALVLMAMVKRKDSRG

SEQ ID NO: 12353 - protein, 620 aa, synthetic construct
MALPVTALLLPLALLLHAARPDIQMTQSPSSLSASVGDRVTITCKASQDVGIAVAWYQQKPGKVPKLLIYWASTRHTGVPDRFSGSGSGTDFTLTISSLQPEDVATYYCQQYSSYPYTFGQGTKVEIKRLEDLKNVFPPEVAVFEPSEAEISHTQKATLVCLATGFYPDHVELSWWVNGKEVHSGVCTDPQPLKEQPALNDSRYCLSSRLRVSATFWQNPRNHFRCQVQFYGLSENDEWTQDRAKPVTQIVSAEAWGRADCDVKLVEKSFETDTNLNFQNLSVIGFRILLLKVAGFNLLMTLRLWSSRAKRSGSGATNFSLLKQAGDVEENPGPTSMDWIWRILFLVGAATGAHSFEEVQLVESGGGLVQPGGSLRLSCAASGFDFSRYWMSWVRQAPGKGLEWIGEINPDSSTINYAPSLKDKFIISRDNAKNSLYLQMNSLRAEDTAVYYCARPDGNYWYFDVWGQGTLVTVSSTRIQNPDPAVYQLRDSKSSDKSVCLFTDFDSQTNVSQSKDSDVYITDKCVLDMRSMDFKSNSAVAWSNKSDFACANAFNNSIIPEDTFFPSPESSCGFTSESYQQGVLSATILYEILLGKATLYAVLVSALVLMAMVKRKDSRG

SEQ ID NO: 12354 - protein, 620 aa, synthetic construct
MALPVTALLLPLALLLHAARPDIVMTQSQKSMSTSVGDRVSITCKASQDVITGVAWYQQKPGQSPKLLIYSASYRYTGVPDRFTGSGSGTDFTFTISNVQAEDLAVYYCQQHYSTPLTFGAGTKLELKLEDLKNVFPPEVAVFEPSEAEISHTQKATLVCLATGFYPDHVELSWWVNGKEVHSGVCTDPQPLKEQPALNDSRYCLSSRLRVSATFWQNPRNHFRCQVQFYGLSENDEWTQDRAKPVTQIVSAEAWGRADCDVKLVEKSFETDTNLNFQNLSVIGFRILLLKVAGFNLLMTLRLWSSRAKRSGSGATNFSLLKQAGDVEENPGPTSMDWIWRILFLVGAATGAHSFEQVQLQQPGAELVRPGASVKLSCKASGYSFTTYWMNWVKQRPGQGLEWIGMIHPSDSETRLNQKFKDKATLTVDKSSSTAYMQLSSPTSEDSAVYYCARSTMIATRAMDYWGQGTSVTVSSTRIQNPDPAVYQLRDSKSSDKSVCLFTDFDSQTNVSQSKDSDVYITDKCVLDMRSMDFKSNSAVAWSNKSDFACANAFNNSIIPEDTFFPSPESSCGFTSESYQQGVLSATILYEILLGKATLYAVLVSALVLMAMVKRKDSRG

SEQ ID NO: 12355 - protein, 626 aa, synthetic construct
MALPVTALLLPLALLLHAARPQSVLTQPPSVSGAPGQRVTISCTGSGSNIGAPYDVSWYQQLPGTAPKLLIYHNNKRPSGVPDRFSGSKSGTSASLAITGLQAEDEADYYCATVEAGLSGSVFGGGTKLTVLGALEDLKNVFPPEVAVFEPSEAEISHTQKATLVCLATGFYPDHVELSWWVNGKEVHSGVCTDPQPLKEQPALNDSRYCLSSRLRVSATFWQNPRNHFRCQVQFYGLSENDEWTQDRAKPVTQIVSAEAWGRADCDVKLVEKSFETDTNLNFQNLSVIGFRILLLKVAGFNLLMTLRLWSSRAKRSGSGATNFSLLKQAGDVEENPGPTSMDWIWRILFLVGAATGAHSFEQVQLVQSGAEVKKPGASVKVSCKVSGYTLTELSIHWVRQAPGKGLEWMGGFDPEENEIVYAQRFQGRVTMTEDTSTDTAYMELSSLRSEDTAVYYCAIVGSFSPLTLGLWGQGTMVTVSSTRIQNPDPAVYQLRDSKSSDKSVCLFTDFDSQTNVSQSKDSDVYITDKCVLDMRSMDFKSNSAVAWSNKSDFACANAFNNSIIPEDTFFPSPESSCGFTSESYQQGVLSATILYEILLGKATLYAVLVSALVLMAMVKRKDSRG

SEQ ID NO: 12356 - protein, 626 aa, synthetic construct
MALPVTALLLPLALLLHAARPQSVLTQPPSVSGAPGQRVTISCTGSGSNIGAPYDVSWYQQLPGTAPKLLIYHNNKRPSGVPDRFSGSKSGTSASLAITGLQAEDEADYYCQSYDSSSISTIFGGGTKLTVLGALEDLKNVFPPEVAVFEPSEAEISHTQKATLVCLATGFYPDHVELSWWVNGKEVHSGVCTDPQPLKEQPALNDSRYCLSSRLRVSATFWQNPRNHFRCQVQFYGLSENDEWTQDRAKPVTQIVSAEAWGRADCDVKLVEKSFETDTNLNFQNLSVIGFRILLLKVAGFNLLMTLRLWSSRAKRSGSGATNFSLLKQAGDVEENPGPTSMDWIWRILFLVGAATGAHSFEQVQLVQSGAEVKKPGASVKVSCKVSGYTLTELSIHWVRQAPGKGLEWMGGFDPEENEIVYAQRFQGRVTMTEDTSTDTAYMELSSLRSEDTAVYYCAIVGSFSGIAYRPWGQGTMVTVSSTRIQNPDPAVYQLRDSKSSDKSVCLFTDFDSQTNVSQSKDSDVYITDKCVLDMRSMDFKSNSAVAWSNKSDFACANAFNNSIIPEDTFFPSPESSCGFTSESYQQGVLSATILYEILLGKATLYAVLVSALVLMAMVKRKDSRG

SEQ ID NO: 12357 - protein, 614 aa, synthetic construct
MALPVTALLLPLALLLHAARPDIQMTQSPSSLSASVGDRVTITCRASQGIRNNLAWYQQKPGKAPKRLIYAASNLQSGVPSRFTGSGSGTEFTLIVSSLQPEDFATYYCLQHHSYPLTSGGGTKVELEDLKNVFPPEVAVFEPSEAEISHTQKATLVCLATGFYPDHVELSWWVNGKEVHSGVCTDPQPLKEQPALNDSRYCLSSRLRVSATFWQNPRNHFRCQVQFYGLSENDEWTQDRAKPVTQIVSAEAWGRADCDVKLVEKSFETDTNLNFQNLSVIGFRILLLKVAGFNLLMTLRLWSSRAKRSGSGATNFSLLKQAGDVEENPGPTSMDWIWRILFLVGAATGAHSFEEVQVLESGGGLVQPGGSLRLSCAASGFTFSSYAMSWVRQAPGKGLEWVSAISGSGGSTNYADSVKGRFTISRDNSKNTLYLQMNSLRAEDTAVYYCAGSSGWSEYWGQGTLVTVSSTRIQNPDPAVYQLRDSKSSDKSVCLFTDFDSQTNVSQSKDSDVYITDKCVLDMRSMDFKSNSAVAWSNKSDFACANAFNNSIIPEDTFFPSPESSCGFTSESYQQGVLSATILYEILLGKATLYAVLVSALVLMAMVKRKDSRG

SEQ ID NO: 12358 - protein, 620 aa, synthetic construct
MALPVTALLLPLALLLHAARPDEIQLVQSGAEVKKPGESLRISCKGSGFNIEDYYIHWVRQMPGKGLEWMGRIDPENDETKYGPIFQGHVTISADTSINTVYLQWSSLKASDTAMYYCAFRGGVYWGQGTTVTVSSLEDLKNVFPPEVAVFEPSEAEISHTQKATLVCLATGFYPDHVELSWWVNGKEVHSGVCTDPQPLKEQPALNDSRYCLSSRLRVSATFWQNPRNHFRCQVQFYGLSENDEWTQDRAKPVTQIVSAEAWGRADCDVKLVEKSFETDTNLNFQNLSVIGFRILLLKVAGFNLLMTLRLWSSRAKRSGSGATNFSLLKQAGDVEENPGPTSMDWIWRILFLVGAATGAHSFEDVVMTQSPDSLAVSLGERATINCKSSQSLLDSDGKTYLNWLQQKPGQPPKRLISLVSKLDSGVPDRFSGSGSGTDFTLTISSLQAEDVAVYYCWQGTHFPGTFGGGTKVEIKTRIQNPDPAVYQLRDSKSSDKSVCLFTDFDSQTNVSQSKDSDVYITDKCVLDMRSMDFKSNSAVAWSNKSDFACANAFNNSIIPEDTFFPSPESSCGFTSESYQQGVLSATILYEILLGKATLYAVLVSALVLMAMVKRKDSRG

SEQ ID NO: 12359 - protein, 627 aa, synthetic construct
MALPVTALLLPLALLLHAARPDELVMTQSPSSLTVTAGEKVTMSCKSSQSLLNSGNQKNYLTWYQQKPGQPPKLLIYWASTRESGVPDRFTGSGSGTDFTLTISSVQAEDLAVYYCQNDYSYPLTFGAGTKLEIKLEDLKNVFPPEVAVFEPSEAEISHTQKATLVCLATGFYPDHVELSWWVNGKEVHSGVCTDPQPLKEQPALNDSRYCLSSRLRVSATFWQNPRNHFRCQVQFYGLSENDEWTQDRAKPVTQIVSAEAWGRADCDVKLVEKSFETDTNLNFQNLSVIGFRILLLKVAGFNLLMTLRLWSSRAKRSGSGATNFSLLKQAGDVEENPGPTSMDWIWRILFLVGAATGAHSFEEVQLLEQSGAELVRPGTSVKISCKASGYAFTNYWLGWVKQRPGHGLEWIGDIFPGSGNIHYNEKFKGKATLTADKSSSTAYMQLSSLTFEDSAVYFCARLRNWDEPMDYWGQGTTVTVSSTRIQNPDPAVYQLRDSKSSDKSVCLFTDFDSQTNVSQSKDSDVYITDKCVLDMRSMDFKSNSAVAWSNKSDFACANAFNNSIIPEDTFFPSPESSCGFTSESYQQGVLSATILYEILLGKATLYAVLVSALVLMAMVKRKDSRG

SEQ ID NO: 12360 - protein, 628 aa, synthetic construct
MALPVTALLLPLALLLHAARPDELQMTQSPSSLSASVGDRVTITCRASQSISSYLNWYQQKPGQPPKLLIYWASTRESGVPDRFSGSESGTNYTLTISSLQPEDFATYFCQQSDSLPITFGQGTRLDIQLEDLKNVFPPEVAVFEPSEAEISHTQKATLVCLATGFYPDHVELSWWVNGKEVHSGVCTDPQPLKEQPALNDSRYCLSSRLRVSATFWQNPRNHFRCQVQFYGLSENDEWTQDRAKPVTQIVSAEAWGRADCDVKLVEKSFETDTNLNFQNLSVIGFRILLLKVAGFNLLMTLRLWSSRAKRSGSGATNFSLLKQAGDVEENPGPTSMDWIWRILFLVGAATGAHSFEEVQLLESGGGVVQPGRSLRLSCAASGFTFSSYGMHWVRQAPGKGLEWVAVISYDGSNKYYADSVKGRFTISRDNSKNTLYLQMNSLRAEDTAVYYCAKDMGWGSGWRPYYYYGMDVWGQGTTVTVSSTRIQNPDPAVYQLRDSKSSDKSVCLFTDFDSQTNVSQSKDSDVYITDKCVLDMRSMDFKSNSAVAWSNKSDFACANAFNNSIIPEDTFFPSPESSCGFTSESYQQGVLSATILYEILLGKATLYAVLVSALVLMAMVKRKDSRG

SEQ ID NO: 12361 - protein, 625 aa, synthetic construct
MALPVTALLLPLALLLHAARPDDIQMTQSPSSLSASVGDRVTITCRASQSISSYLNWYQQKPGKAPKLLIYAASSLQSGVPSRFSGSGSGTDFTLTISSLQPEDLATYYCQQSYSTPFTFGPGTKVDIKLEDLKNVFPPEVAVFEPSEAEISHTQKATLVCLATGFYPDHVELSWWVNGKEVHSGVCTDPQPLKEQPALNDSRYCLSSRLRVSATFWQNPRNHFRCQVQFYGLSENDEWTQDRAKPVTQIVSAEAWGRADCDVKLVEKSFETDTNLNFQNLSVIGFRILLLKVAGFNLLMTLRLWSSRAKRSGSGATNFSLLKQAGDVEENPGPTSMDWIWRILFLVGAATGAHSFEVHEVQLVQSGAEVKKPGSSVKVSCKASGGTFSSYAISWVRQAPGQGLEWMGGIIPIFGTANYAQKFQGRVTITADKSTSTAYMELSSLRSEDTAVYYCATFALFGFREQAFDIWGQGTTVTVSSTRIQNPDPAVYQLRDSKSSDKSVCLFTDFDSQTNVSQSKDSDVYITDKCVLDMRSMDFKSNSAVAWSNKSDFACANAFNNSIIPEDTFFPSPESSCGFTSESYQQGVLSATILYEILLGKATLYAVLVSALVLMAMVKRKDSRG

SEQ ID NO: 12362 - protein, 623 aa, synthetic construct
MALPVTALLLPLALLLHAARPDIVLTQSPLSLAVSLGQPAIISCKASQSVSFAGTSLMHWYHQKPGQQPRLLIYRASNLEAGVPDRFSGSGSKTDFTLTISPVEAEDAATYYCQQSREYPYTFGGGTKLEIKRLEDLKNVFPPEVAVFEPSEAEISHTQKATLVCLATGFYPDHVELSWWVNGKEVHSGVCTDPQPLKEQPALNDSRYCLSSRLRVSATFWQNPRNHFRCQVQFYGLSENDEWTQDRAKPVTQIVSAEAWGRADCDVKLVEKSFETDTNLNFQNLSVIGFRILLLKVAGFNLLMTLRLWSSRAKRSGSGATNFSLLKQAGDVEENPGPTSMDWIWRILFLVGAATGAHSFEQVQLVQSGAEVVKPGASVKISCKASGYTFTGYFMNWVKQSPGQSLEWIGRIHPYDGDTFYNQKFQGKATLTVDKSSNTAHMELLSLTSEDFAVYYCTRYDGSRAMDYWGQGTTVTVSSTRIQNPDPAVYQLRDSKSSDKSVCLFTDFDSQTNVSQSKDSDVYITDKCVLDMRSMDFKSNSAVAWSNKSDFACANAFNNSIIPEDTFFPSPESSCGFTSESYQQGVLSATILYEILLGKATLYAVLVSALVLMAMVKRKDSRG

SEQ ID NO: 12363 - protein, 620 aa, synthetic construct
MALPVTALLLPLALLLHAARPDDVVMTQTPLSLPVTPGEPASISCRSSQSLVHRNGNTYLHWYLQKPGQSPKLLIHKVSNRFSGVPDRFSGSGSGTDFTLKISRVEAEDLGVYFCSQSTHVPPLTFGAGTKLELKLEDLKNVFPPEVAVFEPSEAEISHTQKATLVCLATGFYPDHVELSWWVNGKEVHSGVCTDPQPLKEQPALNDSRYCLSSRLRVSATFWQNPRNHFRCQVQFYGLSENDEWTQDRAKPVTQIVSAEAWGRADCDVKLVEKSFETDTNLNFQNLSVIGFRILLLKVAGFNLLMTLRLWSSRAKRSGSGATNFSLLKQAGDVEENPGPTSMDWIWRILFLVGAATGAHSFEEVQLVQSGAEVEKPGASVKISCKASGSSFTGYNMNWVRQNIGKSLEWIGAIDPYYGGTSYNQKFKGRATLTVDKSTSTAYMHLKSLRSEDTAVYYCVSGMEYWGQGTSVTVSSTRIQNPDPAVYQLRDSKSSDKSVCLFTDFDSQTNVSQSKDSDVYITDKCVLDMRSMDFKSNSAVAWSNKSDFACANAFNNSIIPEDTFFPSPESSCGFTSESYQQGVLSATILYEILLGKATLYAVLVSALVLMAMVKRKDSRG

SEQ ID NO: 12364 - protein, 618 aa, synthetic construct
MALPVTALLLPLALLLHAARPDEIVMTQTPATLSVSAGERVTITCKASQSVSNDVTWYQQKPGQAPRLLIYSASNRYSGVPARFSGSGYGTEFTFTISSVQSEDFAVYFCQQDYSSFGQGTKLEIKRLEDLKNVFPPEVAVFEPSEAEISHTQKATLVCLATGFYPDHVELSWWVNGKEVHSGVCTDPQPLKEQPALNDSRYCLSSRLRVSATFWQNPRNHFRCQVQFYGLSENDEWTQDRAKPVTQIVSAEAWGRADCDVKLVEKSFETDTNLNFQNLSVIGFRILLLKVAGFNLLMTLRLWSSRAKRSGSGATNFSLLKQAGDVEENPGPTSMDWIWRILFLVGAATGAHSFEQVQLVESGPGVVQPGRSLRISCAVSGFSVTNYGVHWVRQPPGKGLEWLGVIWAGGITNYNSAFMSRLTISKDNSKNTVYLQMNSLRAEDTAMYYCASRGGHYGYALDYWGQGTLVTVSSTRIQNPDPAVYQLRDSKSSDKSVCLFTDFDSQTNVSQSKDSDVYITDKCVLDMRSMDFKSNSAVAWSNKSDFACANAFNNSIIPEDTFFPSPESSCGFTSESYQQGVLSATILYEILLGKATLYAVLVSALVLMAMVKRKDSRG

SEQ ID NO: 12365 - protein, 620 aa, synthetic construct
MALPVTALLLPLALLLHAARPDIQMTQTASSLPASLGDRVTISCSASQDISNYLNWYQQKPDGTVKLLIFYSSNLHSGVPSRFSGGGSGTDYSLTISNLEPEDIATYFCHQYSKLPWTFGGGTKLEIKRLEDLKNVFPPEVAVFEPSEAEISHTQKATLVCLATGFYPDHVELSWWVNGKEVHSGVCTDPQPLKEQPALNDSRYCLSSRLRVSATFWQNPRNHFRCQVQFYGLSENDEWTQDRAKPVTQIVSAEAWGRADCDVKLVEKSFETDTNLNFQNLSVIGFRILLLKVAGFNLLMTLRLWSSRAKRSGSGATNFSLLKQAGDVEENPGPTSMDWIWRILFLVGAATGAHSFEEVTLVESGGDFVKPGGSLKVSCAASGFAFSHYAMSWVRQTPAKRLEWVAYISSGGSGTYYSDSVKGRFTISRDNAKNTLYLQMRSLRSEDSAMYFCTRVKLGTYYFDSWGQGTTLTVSSTRIQNPDPAVYQLRDSKSSDKSVCLFTDFDSQTNVSQSKDSDVYITDKCVLDMRSMDFKSNSAVAWSNKSDFACANAFNNSIIPEDTFFPSPESSCGFTSESYQQGVLSATILYEILLGKATLYAVLVSALVLMAMVKRKDSRG

SEQ ID NO: 12366 - protein, 622 aa, synthetic construct
MALPVTALLLPLALLLHAARPQFVLTQSPSASAALGASAKLTCTLSSAHKTYTIDWYQQQKGKAPRYLIQVKSDGTYTKATGVPDRFSGSSSGADRYLIIPSVQADDEADYYCGTDYTGGYVFGGGTQLTVTLEDLKNVFPPEVAVFEPSEAEISHTQKATLVCLATGFYPDHVELSWWVNGKEVHSGVCTDPQPLKEQPALNDSRYCLSSRLRVSATFWQNPRNHFRCQVQFYGLSENDEWTQDRAKPVTQIVSAEAWGRADCDVKLVEKSFETDTNLNFQNLSVIGFRILLLKVAGFNLLMTLRLWSSRAKRSGSGATNFSLLKQAGDVEENPGPTSMDWIWRILFLVGAATGAHSFEEQLKESGGGLFKPTDTLTLTCTVSGFSLSYYGVNWVRQAPGNGLEWIGTIGGSGDTYYASWAKSRSTIIRNTNENTVTLKMTSLTAADTATYFCVRYANIGYEYFNVWGPGTLVTVSSTRIQNPDPAVYQLRDSKSSDKSVCLFTDFDSQTNVSQSKDSDVYITDKCVLDMRSMDFKSNSAVAWSNKSDFACANAFNNSIIPEDTFFPSPESSCGFTSESYQQGVLSATILYEILLGKATLYAVLVSALVLMAMVKRKDSRG

SEQ ID NO: 12367 - protein, 627 aa, synthetic construct
MALPVTALLLPLALLLHAARPQFVLTQSPSVSAALGASAKLTCTLSSAHKTYTIDWYQQQQGEAPRYLMQVKSDGSYTKGTGVPDRFSGSSSGADRYLIIPSVQADDEAGYVCGADDNGGYVFGGGTQLTVTLEDLKNVFPPEVAVFEPSEAEISHTQKATLVCLATGFYPDHVELSWWVNGKEVHSGVCTDPQPLKEQPALNDSRYCLSSRLRVSATFWQNPRNHFRCQVQFYGLSENDEWTQDRAKPVTQIVSAEAWGRADCDVKLVEKSFETDTNLNFQNLSVIGFRILLLKVAGFNLLMTLRLWSSRAKRSGSGATNFSLLKQAGDVEENPGPTSMDWIWRILFLVGAATGAHSFEQSVKESEGGLFKPTDTLTLTCTVSGFSLSRHALTWVRQAPGNGLEWIGAIDNAGTTYYASWAKSRSTITRNTDLHTVTLKMTSLTASDTATYFCARVFYDINSGYYLDGMDLWGPGTLVTVSSTRIQNPDPAVYQLRDSKSSDKSVCLFTDFDSQTNVSQSKDSDVYITDKCVLDMRSMDFKSNSAVAWSNKSDFACANAFNNSIIPEDTFFPSPESSCGFTSESYQQGVLSATILYEILLGKATLYAVLVSALVLMAMVKRKDSRG

SEQ ID NO: 12368 - protein, 621 aa, synthetic construct
MALPVTALLLPLALLLHAARPDIQMTQSPSSLSASVGDRVTITCRASQGISSWLAWYQQKPEKAPKSLIYAASSLQSGVPSRFSGSGSGTDFTLTISSLQPEDFATYYCQQYNSYPPTFGGGTKVEIKLEDLKNVFPPEVAVFEPSEAEISHTQKATLVCLATGFYPDHVELSWWVNGKEVHSGVCTDPQPLKEQPALNDSRYCLSSRLRVSATFWQNPRNHFRCQVQFYGLSENDEWTQDRAKPVTQIVSAEAWGRADCDVKLVEKSFETDTNLNFQNLSVIGFRILLLKVAGFNLLMTLRLWSSRAKRSGSGATNFSLLKQAGDVEENPGPTSMDWIWRILFLVGAATGAHSFEEVQLVESGGGLVQPGESLRLSCVASGFTFSRYKMNWVRQAPGKGLEWVSYISRSGRDIYYADSVKGRFTISRDNAKNSLYLQMNSLRDEDTAVYYCAGTVTTYYYFGMDVWGHGTTVTVSSTRIQNPDPAVYQLRDSKSSDKSVCLFTDFDSQTNVSQSKDSDVYITDKCVLDMRSMDFKSNSAVAWSNKSDFACANAFNNSIIPEDTFFPSPESSCGFTSESYQQGVLSATILYEILLGKATLYAVLVSALVLMAMVKRKDSRG

SEQ ID NO: 12369 - protein, 622 aa, synthetic construct
MALPVTALLLPLALLLHAARPDIQMTQSPSSLSASVGDRVTITCRASQGISSWLAWYQQKPEKAPKSLIYAASSLQSGVPSRFSGSGSGTDFTLTISSLQPEDFATYYCQQYNSYPPTFGGGTKVEIKLEDLKNVFPPEVAVFEPSEAEISHTQKATLVCLATGFYPDHVELSWWVNGKEVHSGVCTDPQPLKEQPALNDSRYCLSSRLRVSATFWQNPRNHFRCQVQFYGLSENDEWTQDRAKPVTQIVSAEAWGRADCDVKLVEKSFETDTNLNFQNLSVIGFRILLLKVAGFNLLMTLRLWSSRAKRSGSGATNFSLLKQAGDVEENPGPTSMDWIWRILFLVGAATGAHSFEEVQLVESGGGSVQPGESLRLSCVASGFTFSRYKMNWVRQAPGKGLEWVSYISRSGRDIYYADSVKGRFTISRDNAKNSLYLQMNSLRDEDTAVYYCAGTVTTYYYDFGMDVWGQGTTVTVSSTRIQNPDPAVYQLRDSKSSDKSVCLFTDFDSQTNVSQSKDSDVYITDKCVLDMRSMDFKSNSAVAWSNKSDFACANAFNNSIIPEDTFFPSPESSCGFTSESYQQGVLSATILYEILLGKATLYAVLVSALVLMAMVKRKDSRG

SEQ ID NO: 12370 - protein, 620 aa, synthetic construct
MALPVTALLLPLALLLHAARPQSVLTQPPSASGTPGQRVTISCSGSRSNVGGNYVFWYQQVPGATPKLLIYRSNQRPSGVPDRFAGSKSGSSASLAISGLRSEDEADYYCATWDDSLSGFVFGTGTKVTVLGLEDLKNVFPPEVAVFEPSEAEISHTQKATLVCLATGFYPDHVELSWWVNGKEVHSGVCTDPQPLKEQPALNDSRYCLSSRLRVSATFWQNPRNHFRCQVQFYGLSENDEWTQDRAKPVTQIVSAEAWGRADCDVKLVEKSFETDTNLNFQNLSVIGFRILLLKVAGFNLLMTLRLWSSRAKRSGSGATNFSLLKQAGDVEENPGPTSMDWIWRILFLVGAATGAHSFEVQLVESGGGLVKPGGSLRLSCAASGFTFSDYYMSWIRQAPGKGLEWVSYISSSGSTIYYADSVKGRFTISRDNAKNSLYLQMNSLRAEDTAVYYCARGYGKAYDQWGQGTLVTVSSTRIQNPDPAVYQLRDSKSSDKSVCLFTDFDSQTNVSQSKDSDVYITDKCVLDMRSMDFKSNSAVAWSNKSDFACANAFNNSIIPEDTFFPSPESSCGFTSESYQQGVLSATILYEILLGKATLYAVLVSALVLMAMVKRKDSRG

SEQ ID NO: 12371 - protein, 619 aa, synthetic construct
MALPVTALLLPLALLLHAARPQSVVTQPPSMSAAPGQQVTISCSGGNSNIERNYVSWYLQLPGTAPKLVIFDNDRRPSGIPDRFSGSKSGTSATLGITGLQTGDEADYYCGTWDSSLRGWVFGGGTKLTVLGLEDLKNVFPPEVAVFEPSEAEISHTQKATLVCLATGFYPDHVELSWWVNGKEVHSGVCTDPQPLKEQPALNDSRYCLSSRLRVSATFWQNPRNHFRCQVQFYGLSENDEWTQDRAKPVTQIVSAEAWGRADCDVKLVEKSFETDTNLNFQNLSVIGFRILLLKVAGFNLLMTLRLWSSRAKRSGSGATNFSLLKQAGDVEENPGPTSMDWIWRILFLVGAATGAHSFEVQLVESGGGLIQPGGSLRLSCAASGFTFSNYAMNWVRQAPGKGLEWVSTINGRGSSTIYADSVKGRFTISRDNSKNTLYLQMNSLRAEDTATYYCARYISRGLGDSWGQGTLVTVTRIQNPDPAVYQLRDSKSSDKSVCLFTDFDSQTNVSQSKDSDVYITDKCVLDMRSMDFKSNSAVAWSNKSDFACANAFNNSIIPEDTFFPSPESSCGFTSESYQQGVLSATILYEILLGKATLYAVLVSALVLMAMVKRKDSRG

SEQ ID NO: 12372 - protein, 620 aa, synthetic construct
MALPVTALLLPLALLLHAARPDVVMTQTPLSLPVSLGDQASISCRSSQSLVHSNGNTYLHWYLQKPGQSPKLLIYKVSNRFSGVPDRFSGSGSGTDFTLKISRVEAEDLGVYFCSQNTPVPPKFGSGTKLEIKLEDLKNVFPPEVAVFEPSEAEISHTQKATLVCLATGFYPDHVELSWWVNGKEVHSGVCTDPQPLKEQPALNDSRYCLSSRLRVSATFWQNPRNHFRCQVQFYGLSENDEWTQDRAKPVTQIVSAEAWGRADCDVKLVEKSFETDTNLNFQNLSVIGFRILLLKVAGFNLLMTLRLWSSRAKRSGSGATNFSLLKQAGDVEENPGPTSMDWIWRILFLVGAATGAHSFEQVQLQQSGAELVRPGASVKLSCKASGYTFNDYEMHWVKQTPVHGLKWIGALEPKTGDTAYSQKFKGKATLTADKSSSTAYMELRSLTSEDSAVYYCTSCYYYTYSGQGTLVTVSATRIQNPDPAVYQLRDSKSSDKSVCLFTDFDSQTNVSQSKDSDVYITDKCVLDMRSMDFKSNSAVAWSNKSDFACANAFNNSIIPEDTFFPSPESSCGFTSESYQQGVLSATILYEILLGKATLYAVLVSALVLMAMVKRKDSRG

SEQ ID NO: 12373 - protein, 619 aa, synthetic construct
MALPVTALLLPLALLLHAARPDIQLTQSPSSLSASVGDRVTITCRASQGIRNDLGWYQQKPGKAPKRLIYAASSLQNGVPSRFSGSGSGTEFTLTISSLQPEDFATYYCLQHNTYPAFGQGTKVEIKRLEDLKNVFPPEVAVFEPSEAEISHTQKATLVCLATGFYPDHVELSWWVNGKEVHSGVCTDPQPLKEQPALNDSRYCLSSRLRVSATFWQNPRNHFRCQVQFYGLSENDEWTQDRAKPVTQIVSAEAWGRADCDVKLVEKSFETDTNLNFQNLSVIGFRILLLKVAGFNLLMTLRLWSSRAKRSGSGATNFSLLKQAGDVEENPGPTSMDWIWRILFLVGAATGAHSFEQVQLQESGPGLVKPSQTLSLTCTVSGGSISSFNYYWSWIRHHPGKGLEWIGYIYYSGSTYSNPSLKSRVTISVDTSKNQFSLTLSSVTAADTAVYYCARGYNWNYFDYWGQGTLVTVSSTRIQNPDPAVYQLRDSKSSDKSVCLFTDFDSQTNVSQSKDSDVYITDKCVLDMRSMDFKSNSAVAWSNKSDFACANAFNNSIIPEDTFFPSPESSCGFTSESYQQGVLSATILYEILLGKATLYAVLVSALVLMAMVKRKDSRG

SEQ ID NO: 12374 - protein, 621 aa, synthetic construct
MALPVTALLLPLALLLHAARPDDIVLTQSPASLAVSLGQSVTISCRASESVEYYGTSLMQWYQQKPGQPPKLLIYATSNVESGVPARFSGSGSGTDFSLNIHPVEEDDIAMYFCQQSRKLPSTFGGGTKLEIKLEDLKNVFPPEVAVFEPSEAEISHTQKATLVCLATGFYPDHVELSWWVNGKEVHSGVCTDPQPLKEQPALNDSRYCLSSRLRVSATFWQNPRNHFRCQVQFYGLSENDEWTQDRAKPVTQIVSAEAWGRADCDVKLVEKSFETDTNLNFQNLSVIGFRILLLKVAGFNLLMTLRLWSSRAKRSGSGATNFSLLKQAGDVEENPGPTSMDWIWRILFLVGAATGAHSFEDVRLQESGPGQVKPSQTVSLTCSVTGYSITNGNHWWNWIRQVSGSKLEWIGYISSSGSTDSNPSLKSRISITRDTSKNQLFLQLNSVTTEDIATYYCARGYYFDYWGQGTTLTVSSTRIQNPDPAVYQLRDSKSSDKSVCLFTDFDSQTNVSQSKDSDVYITDKCVLDMRSMDFKSNSAVAWSNKSDFACANAFNNSIIPEDTFFPSPESSCGFTSESYQQGVLSATILYEILLGKATLYAVLVSALVLMAMVKRKDSRG

SEQ ID NO: 12375 - protein, 620 aa, synthetic construct
MALPVTALLLPLALLLHAARPDIQMTQSPSSLSASVGDRVTITCRASQDVNTAVAWYQQKPGKAPKLLIYSASFLESGVPSRFSGSRSGTDFTLTISSLQPEDFATYYCQQHYTTPPTFGQTKVEIKRLEDLKNVFPPEVAVFEPSEAEISHTQKATLVCLATGFYPDHVELSWWVNGKEVHSGVCTDPQPLKEQPALNDSRYCLSSRLRVSATFWQNPRNHFRCQVQFYGLSENDEWTQDRAKPVTQIVSAEAWGRADCDVKLVEKSFETDTNLNFQNLSVIGFRILLLKVAGFNLLMTLRLWSSRAKRSGSGATNFSLLKQAGDVEENPGPTSMDWIWRILFLVGAATGAHSFEEVQLVESGGGLVQPGGSLRLSCAASGFNIKDTYIHWVRQAPGKGLEWVARIYPTNGYTRYADSVKGRFTISADTSKNTAYLQMNSLRAEDTAVYYCSRWGGDGFYAMDVWGQGTLVTVSSTRIQNPDPAVYQLRDSKSSDKSVCLFTDFDSQTNVSQSKDSDVYITDKCVLDMRSMDFKSNSAVAWSNKSDFACANAFNNSIIPEDTFFPSPESSCGFTSESYQQGVLSATILYEILLGKATLYAVLVSALVLMAMVKRKDSRG

SEQ ID NO: 12376 - protein, 619 aa, synthetic construct
MALPVTALLLPLALLLHAARPDQSVLTQPPSVSVAPGKTARIPCEGNYIGSSNVHWYQQKPGQAPVLVIHFDSDRPSGIPDRFSGSNSGNMATLTISRVEAGDEADYYCQVWENHGWVFGGGTKLTVLSLEDLKNVFPPEVAVFEPSEAEISHTQKATLVCLATGFYPDHVELSWWVNGKEVHSGVCTDPQPLKEQPALNDSRYCLSSRLRVSATFWQNPRNHFRCQVQFYGLSENDEWTQDRAKPVTQIVSAEAWGRADCDVKLVEKSFETDTNLNFQNLSVIGFRILLLKVAGFNLLMTLRLWSSRAKRSGSGATNFSLLKQAGDVEENPGPTSMDWIWRILFLVGAATGAHSFEEVQLVETGGGLVQPGESLRLSCAASGFTFSDYEMNWVRQAPGKGLEWVSYISSSGSTIYYADSVKGRFTIYRDNAKNSLYLQMNSLRAEDTALYYCARAWGVGPPDYWGQGTLVTVSSTRIQNPDPAVYQLRDSKSSDKSVCLFTDFDSQTNVSQSKDSDVYITDKCVLDMRSMDFKSNSAVAWSNKSDFACANAFNNSIIPEDTFFPSPESSCGFTSESYQQGVLSATILYEILLGKATLYAVLVSALVLMAMVKRKDSRG

SEQ ID NO: 12377 - protein, 627 aa, synthetic construct
MALPVTALLLPLALLLHAARPDIQMTQSPSSLSASVGDTVTITCQANGYLNWYQQRRGKAPKLLIYDGSKLERGVPSRFSGRRWGQEYNLTINNLQPEDIATYFCQVYEFVVPGTRLDLKRTVAAPLEDLKNVFPPEVAVFEPSEAEISHTQKATLVCLATGFYPDHVELSWWVNGKEVHSGVCTDPQPLKEQPALNDSRYCLSSRLRVSATFWQNPRNHFRCQVQFYGLSENDEWTQDRAKPVTQIVSAEAWGRADCDVKLVEKSFETDTNLNFQNLSVIGFRILLLKVAGFNLLMTLRLWSSRAKRSGSGATNFSLLKQAGDVEENPGPTSMDWIWRILFLVGAATGAHSFEQVQLLQSGAAVTKPGASVRVSCEASGYNIRDYFIHWWRQAPGQGLQWVGWINPKTGQPNNPRQFQGRVSLTRHASWDFDTFSFYMDLKALRSDDTAVYFCARQRSDYWDFDVWGSGTQVTVSSASTKGPTRIQNPDPAVYQLRDSKSSDKSVCLFTDFDSQTNVSQSKDSDVYITDKCVLDMRSMDFKSNSAVAWSNKSDFACANAFNNSIIPEDTFFPSPESSCGFTSESYQQGVLSATILYEILLGKATLYAVLVSALVLMAMVKRKDSRG

SEQ ID NO: 12378 - protein, 633 aa, synthetic construct
MALPVTALLLPLALLLHAARPQSALTQPPSASGSPGQSITISCTGTSNNFVSWYQQHAGKAPKLVIYDVNKRPSGVPDRFSGSKSGNTASLTVSGLQTDDEAVYYCGSLVGNWDVIFGGGTKLTVLLEDLKNVFPPEVAVFEPSEAEISHTQKATLVCLATGFYPDHVELSWWVNGKEVHSGVCTDPQPLKEQPALNDSRYCLSSRLRVSATFWQNPRNHFRCQVQFYGLSENDEWTQDRAKPVTQIVSAEAWGRADCDVKLVEKSFETDTNLNFQNLSVIGFRILLLKVAGFNLLMTLRLWSSRAKRSGSGATNFSLLKQAGDVEENPGPTSMDWIWRILFLVGAATGAHSFEQPQLQESGPTLVEASETLSLTCAVSGDSTAACNSFWGWVRQPPGKGLEWVGSLSHCASYWNRGWTYHNPSLKSRLTLALDTPKNLVFLKLNSVTAADTATYYCARFGGEVLRYTDWPKPAWVDLWGRGTLVTVSSTRIQNPDPAVYQLRDSKSSDKSVCLFTDFDSQTNVSQSKDSDVYITDKCVLDMRSMDFKSNSAVAWSNKSDFACANAFNNSIIPEDTFFPSPESSCGFTSESYQQGVLSATILYEILLGKATLYAVLVSALVLMAMVKRKDSRG

SEQ ID NO: 12379 - protein, 618 aa, synthetic construct
MALPVTALLLPLALLLHAARPEIVLTQSPGTLSLSPGETAIISCRTSQYGSLAWYQQRPGQAPRLVIYSGSTRAAGIPDRFSGSRWGPDYNLTISNLESGDFGVYYCQQYEFFGQGTKVQVDIKRLEDLKNVFPPEVAVFEPSEAEISHTQKATLVCLATGFYPDHVELSWWVNGKEVHSGVCTDPQPLKEQPALNDSRYCLSSRLRVSATFWQNPRNHFRCQVQFYGLSENDEWTQDRAKPVTQIVSAEAWGRADCDVKLVEKSFETDTNLNFQNLSVIGFRILLLKVAGFNLLMTLRLWSSRAKRSGSGATNFSLLKQAGDVEENPGPTSMDWIWRILFLVGAATGAHSFEQVQLVQSGGQMKKPGESMRISCRASGYEFIDCTLNWIRLAPGKRPEWMGWLKPRGGAVNYARPLQGRVTMTRDVYSDTAFLELRSLTVDDTAVYFCTRGKNCDYNWDFEHWGRGTPVIVSSTRIQNPDPAVYQLRDSKSSDKSVCLFTDFDSQTNVSQSKDSDVYITDKCVLDMRSMDFKSNSAVAWSNKSDFACANAFNNSIIPEDTFFPSPESSCGFTSESYQQGVLSATILYEILLGKATLYAVLVSALVLMAMVKRKDSRG

SEQ ID NO: 12380 - protein, 628 aa, synthetic construct
MALPVTALLLPLALLLHAARPELVLTQSPGTLSLSAGERATLSCRASQSVSSGSLAWYQQKPGQAPRLLIYGASTRATGIPDRFSGSGSGTDFTLTIGRLEPEDLAVYYCQQYGTSPYTFGQGTKLEILEDLKNVFPPEVAVFEPSEAEISHTQKATLVCLATGFYPDHVELSWWVNGKEVHSGVCTDPQPLKEQPALNDSRYCLSSRLRVSATFWQNPRNHFRCQVQFYGLSENDEWTQDRAKPVTQIVSAEAWGRADCDVKLVEKSFETDTNLNFQNLSVIGFRILLLKVAGFNLLMTLRLWSSRAKRSGSGATNFSLLKQAGDVEENPGPTSMDWIWRILFLVGAATGAHSFELEQSGAEVKKPGSSVQVSCKASGGTFSMYGFNWVRQAPGHGLEWMGGIIPIFGTSNYAQKFRGRVTFTADQATSTAYMELTNLRSDDTAVYYCARDFGPDWEDGDSYDGSGRGFFDFWGQGTLVTVSSTRIQNPDPAVYQLRDSKSSDKSVCLFTDFDSQTNVSQSKDSDVYITDKCVLDMRSMDFKSNSAVAWSNKSDFACANAFNNSIIPEDTFFPSPESSCGFTSESYQQGVLSATILYEILLGKATLYAVLVSALVLMAMVKRKDSRG

SEQ ID NO: 12381 - protein, 608 aa, synthetic construct
MALPVTALLLPLALLLHAARPDIQMTQSPSSLSASVGDRVTITCQASQDINNYLNWYQQKPGKAPKLLIYDASNLQTGVPSRFSGSGSGTDFTFTIEDIATYYCQQYTFGPGTKVDIKLEDLKNVFPPEVAVFEPSEAEISHTQKATLVCLATGFYPDHVELSWWVNGKEVHSGVCTDPQPLKEQPALNDSRYCLSSRLRVSATFWQNPRNHFRCQVQFYGLSENDEWTQDRAKPVTQIVSAEAWGRADCDVKLVEKSFETDTNLNFQNLSVIGFRILLLKVAGFNLLMTLRLWSSRAKRSGSGATNFSLLKQAGDVEENPGPTSMDWIWRILFLVGAATGAHSFEEVQLLESGGGLVQPGGSLRLSCAASGFTFSWYSMTWVRQAPGKGLEWVSSIVPWGDFTQYADSVKGRFTISRDNSKNTLYLQMNSLRAEDTAVYYCAKGPGWGSFDLWGRGTLVTVSSTRIQNPDPAVYQLRDSKSSDKSVCLFTDFDSQTNVSQSKDSDVYITDKCVLDMRSMDFKSNSAVAWSNKSDFACANAFNNSIIPEDTFFPSPESSCGFTSESYQQGVLSATILYEILLGKATLYAVLVSALVLMAMVKRKDSRG

SEQ ID NO: 12382 - protein, 618 aa, synthetic construct
MALPVTALLLPLALLLHAARPDIQMTQSPSSLSASVGDRVTITCTASLSVSSTYLHWYQQKPGSSPKLWIYSTSNLASGVPSRFSGSGSGTSYTLTISSLQPEDFATYYCHQYHRSPLTFGGGTKVEIKRLEDLKNVFPPEVAVFEPSEAEISHTQKATLVCLATGFYPDHVELSWWVNGKEVHSGVCTDPQPLKEQPALNDSRYCLSSRLRVSATFWQNPRNHFRCQVQFYGLSENDEWTQDRAKPVTQIVSAEAWGRADCDVKLVEKSFETDTNLNFQNLSVIGFRILLLKVAGFNLLMTLRLWSSRAKRSGSGATNFSLLKQAGDVEENPGPTSMDWIWRILFLVGAATGAHSFEEVQLVESGGGLVQPGGSLRLSCAASGFSLTKYGVHWVRQAPGKGLEWVGVKWAGGSTDYNSALMSRFTISKDNAKNSLYLQMNSLRAEDTAVYYCARDHRDAMDYWGQGTLVTVSSTRIQNPDPAVYQLRDSKSSDKSVCLFTDFDSQTNVSQSKDSDVYITDKCVLDMRSMDFKSNSAVAWSNKSDFACANAFNNSIIPEDTFFPSPESSCGFTSESYQQGVLSATILYEILLGKATLYAVLVSALVLMAMVKRKDSRG

SEQ ID NO: 12383 - protein, 622 aa, synthetic construct
MALPVTALLLPLALLLHAARPDIQMTQSPSSLSASVGDRVTITCKASQDVGTAVAWYQQKPGKAPKLLIYSASYRSTGVPSRFSGSGSGTDFTLTISSLQPEDFATYYCQHHYSAPWTFGGGTKVEIKLEDLKNVFPPEVAVFEPSEAEISHTQKATLVCLATGFYPDHVELSWWVNGKEVHSGVCTDPQPLKEQPALNDSRYCLSSRLRVSATFWQNPRNHFRCQVQFYGLSENDEWTQDRAKPVTQIVSAEAWGRADCDVKLVEKSFETDTNLNFQNLSVIGFRILLLKVAGFNLLMTLRLWSSRAKRSGSGATNFSLLKQAGDVEENPGPTSMDWIWRILFLVGAATGAHSFEEVQLVESGGGLVQPGGSLRLSCAASGFTFSRNGMSWVRQAPGKGLEWVATVSSGGSYIYYADSVKGRFTISRDNAKNSLYLQMNSLRAEDTAVYYCARQGTTALATRFFDVWGQGTLVTVSSTRIQNPDPAVYQLRDSKSSDKSVCLFTDFDSQTNVSQSKDSDVYITDKCVLDMRSMDFKSNSAVAWSNKSDFACANAFNNSIIPEDTFFPSPESSCGFTSESYQQGVLSATILYEILLGKATLYAVLVSALVLMAMVKRKDSRG

SEQ ID NO: 12384 - protein, 618 aa, synthetic construct
MALPVTALLLPLALLLHAARPDIQMTQSPPSLSASVGGKVTITCKASQDIDRYMAWYQDKPGKGPKLLIHDTSTLQPGIPSRFSGSGSGRDYSFSISNLEPEDIATYYCLQYDNLWTFGGGTKLEIKRLEDLKNVFPPEVAVFEPSEAEISHTQKATLVCLATGFYPDHVELSWWVNGKEVHSGVCTDPQPLKEQPALNDSRYCLSSRLRVSATFWQNPRNHFRCQVQFYGLSENDEWTQDRAKPVTQIVSAEAWGRADCDVKLVEKSFETDTNLNFQNLSVIGFRILLLKVAGFNLLMTLRLWSSRAKRSGSGATNFSLLKQAGDVEENPGPTSMDWIWRILFLVGAATGAHSFEQVQLVQSGAELVKPGASVKMSCKASGYIFTNYNIHWVKKSPGQGLEWIGAIYPGNGDAPYSQKFQDRATLTADTSSSTTYMELSSLTSEDSAVYYCVRANWDVAFAYWGQGTLVSVSSTRIQNPDPAVYQLRDSKSSDKSVCLFTDFDSQTNVSQSKDSDVYITDKCVLDMRSMDFKSNSAVAWSNKSDFACANAFNNSIIPEDTFFPSPESSCGFTSESYQQGVLSATILYEILLGKATLYAVLVSALVLMAMVKRKDSRG

SEQ ID NO: 12385 - protein, 619 aa, synthetic construct
MALPVTALLLPLALLLHAARPDIQMTQSPASLSASVGETVTITCRVSGNIHNYLAWYQQKQGKSPQLLVYNAKTLADGVPSRFSGSGSGTQYSLKINSLQPEDFGSYYCQHFWSNPYTFGGGTKLEIKLEDLKNVFPPEVAVFEPSEAEISHTQKATLVCLATGFYPDHVELSWWVNGKEVHSGVCTDPQPLKEQPALNDSRYCLSSRLRVSATFWQNPRNHFRCQVQFYGLSENDEWTQDRAKPVTQIVSAEAWGRADCDVKLVEKSFETDTNLNFQNLSVIGFRILLLKVAGFNLLMTLRLWSSRAKRSGSGATNFSLLKQAGDVEENPGPTSMDWIWRILFLVGAATGAHSFEQVQLQQSGASVKVSCKASELVRPGTGYAFTNYLIEWVKQRPGQGLEWIGVINPGSGGTNYNEKFKGKATLTADKSSSTAYMQLSSLTSDDSAVYFCARYRSYDWYFDVWGAGTTVTVSSTRIQNPDPAVYQLRDSKSSDKSVCLFTDFDSQTNVSQSKDSDVYITDKCVLDMRSMDFKSNSAVAWSNKSDFACANAFNNSIIPEDTFFPSPESSCGFTSESYQQGVLSATILYEILLGKATLYAVLVSALVLMAMVKRKDSRG

SEQ ID NO: 12386 - protein, 618 aa, synthetic construct
MALPVTALLLPLALLLHAARPDIQMTQSFSSLSASVGDRVTITCRASQDISNYLNWYQQKPGKAPKLLIYYTSRLHSGVPSRFSGSGSGTDYTLTISSLQPEDFATYFCQQGNTLPWTFGGGTKLEIKRLEDLKNVFPPEVAVFEPSEAEISHTQKATLVCLATGFYPDHVELSWWVNGKEVHSGVCTDPQPLKEQPALNDSRYCLSSRLRVSATFWQNPRNHFRCQVQFYGLSENDEWTQDRAKPVTQIVSAEAWGRADCDVKLVEKSFETDTNLNFQNLSVIGFRILLLKVAGFNLLMTLRLWSSRAKRSGSGATNFSLLKQAGDVEENPGPTSMDWIWRILFLVGAATGAHSFEEVQLVQSGGGLVQSGGSLRLSCRASGYTFTRYWMLWVRQRPGKGLEWVAEINPRNDRTNYNEKFKTRFTISVDRSKNTLYLQMDSLRAEDTAVYFCALGGGYAMDYWGQGTLVTVSSTRIQNPDPAVYQLRDSKSSDKSVCLFTDFDSQTNVSQSKDSDVYITDKCVLDMRSMDFKSNSAVAWSNKSDFACANAFNNSIIPEDTFFPSPESSCGFTSESYQQGVLSATILYEILLGKATLYAVLVSALVLMAMVKRKDSRG

SEQ ID NO: 12387 - protein, 619 aa, synthetic construct
MALPVTALLLPLALLLHAARPDIQMTQSPASLSASVGETVTIICRASVNIYSYLAWYQQKQGKSPQLLVYNAKILAEGVPSRFSGSGSGTQFSLKINSLQPEDFGSYYCQHHYGTFTFGSGTKLEIKRLEDLKNVFPPEVAVFEPSEAEISHTQKATLVCLATGFYPDHVELSWWVNGKEVHSGVCTDPQPLKEQPALNDSRYCLSSRLRVSATFWQNPRNHFRCQVQFYGLSENDEWTQDRAKPVTQIVSAEAWGRADCDVKLVEKSFETDTNLNFQNLSVIGFRILLLKVAGFNLLMTLRLWSSRAKRSGSGATNFSLLKQAGDVEENPGPTSMDWIWRILFLVGAATGAHSFEQVQLKESGPGLVAPSQSLSITCTISGFSLTSYGVHWVRQPPGKGLEWLVVIWSDGSTTYNSALKSRLSISKDNSKSQVFLKMNSLQTDDTAIYYCASHYGSTLAFASWGHGTLVTVSAATRIQNPDPAVYQLRDSKSSDKSVCLFTDFDSQTNVSQSKDSDVYITDKCVLDMRSMDFKSNSAVAWSNKSDFACANAFNNSIIPEDTFFPSPESSCGFTSESYQQGVLSATILYEILLGKATLYAVLVSALVLMAMVKRKDSRG

SEQ ID NO: 12388 - protein, 627 aa, synthetic construct
MALPVTALLLPLALLLHAARPDIVMTQSHKFMSTSVGDRVSVTCKASQNVGNNVAWYQQKPGQSPKVLIYSASYRYSGVPDRFTGSGSGTDFTLTISNVQSEDLAEYFCQQYNTYPFTFGSGTKLEIKLEDLKNVFPPEVAVFEPSEAEISHTQKATLVCLATGFYPDHVELSWWVNGKEVHSGVCTDPQPLKEQPALNDSRYCLSSRLRVSATFWQNPRNHFRCQVQFYGLSENDEWTQDRAKPVTQIVSAEAWGRADCDVKLVEKSFETDTNLNFQNLSVIGFRILLLKVAGFNLLMTLRLWSSRAKRSGSGATNFSLLKQAGDVEENPGPTSMDWIWRILFLVGAATGAHSFEEVQLEESGGGLVQPGGSMKLSCVASGFTFSNYWMNWVRQSPEKGLEWVAEIRFKSHNYATHFAESVKGRFTISRDDSKSSVYLQMNNLRAEDTGIYYCTRRIGNSDYDWWYFDVWGAGTSVTVSSASTRIQNPDPAVYQLRDSKSSDKSVCLFTDFDSQTNVSQSKDSDVYITDKCVLDMRSMDFKSNSAVAWSNKSDFACANAFNNSIIPEDTFFPSPESSCGFTSESYQQGVLSATILYEILLGKATLYAVLVSALVLMAMVKRKDSRG

SEQ ID NO: 12389 - protein, 620 aa, synthetic construct
MALPVTALLLPLALLLHAARPDQIVLTQSPAIMSASPGEKVTISCSASSSVSYMYWYQQKPGSSPKPWIYRTSNLASGVPARFSGSGSGTSYSLTISNMEAEDAAAYYCQQYHSYPTTFGGGTKLEVKLEDLKNVFPPEVAVFEPSEAEISHTQKATLVCLATGFYPDHVELSWWVNGKEVHSGVCTDPQPLKEQPALNDSRYCLSSRLRVSATFWQNPRNHFRCQVQFYGLSENDEWTQDRAKPVTQIVSAEAWGRADCDVKLVEKSFETDTNLNFQNLSVIGFRILLLKVAGFNLLMTLRLWSSRAKRSGSGATNFSLLKQAGDVEENPGPTSMDWIWRILFLVGAATGAHSFEEVQLVESGGGLVQPKGSLKLSCAASGFSFNTYAMNWVRQAPGKGLEWIAHIRSKSNNFATYYADSVKDRFSISRDASENILFLQMNNLKTEDTAMYYCVRQGGDFPMDYWGQGTSVTVSSTRIQNPDPAVYQLRDSKSSDKSVCLFTDFDSQTNVSQSKDSDVYITDKCVLDMRSMDFKSNSAVAWSNKSDFACANAFNNSIIPEDTFFPSPESSCGFTSESYQQGVLSATILYEILLGKATLYAVLVSALVLMAMVKRKDSRG

SEQ ID NO: 12390 - protein, 619 aa, synthetic construct
MALPVTALLLPLALLLHAARPDDIQMTQSSSSFSVSLGDRVTITCMASEDIYIRLAWYQQKPGNAPRLLISAATSLETGVPSRFSGSGSGKDYTLSITSLQTEDVGTYYCQQYWSSPWTFGGGTKLEINLEDLKNVFPPEVAVFEPSEAEISHTQKATLVCLATGFYPDHVELSWWVNGKEVHSGVCTDPQPLKEQPALNDSRYCLSSRLRVSATFWQNPRNHFRCQVQFYGLSENDEWTQDRAKPVTQIVSAEAWGRADCDVKLVEKSFETDTNLNFQNLSVIGFRILLLKVAGFNLLMTLRLWSSRAKRSGSGATNFSLLKQAGDVEENPGPTSMDWIWRILFLVGAATGAHSFEDVQLQESGPGLVKPSQSLSLTCTVTGYSITSDYTWNWIRQFPGNKLEWMGYITYSGSTSYNPSLKSRNSITRDTSKNQFFLQLNSVTTEDTATYYCARLGRRYTMDYWGQGTSVTVSSTRIQNPDPAVYQLRDSKSSDKSVCLFTDFDSQTNVSQSKDSDVYITDKCVLDMRSMDFKSNSAVAWSNKSDFACANAFNNSIIPEDTFFPSPESSCGFTSESYQQGVLSATILYEILLGKATLYAVLVSALVLMAMVKRKDSRG

SEQ ID NO: 12391 - protein, 622 aa, synthetic construct
MALPVTALLLPLALLLHAARPDDIQMTQSPSSLSASVGDRVTITCRASQSISSYLNWYQQKPGKAPKLLIYDASNLETGVPSRFSGSGSGTDFTFTISSLQPEDIATYYCQQYDNLPLTFGGGTKVDIKRLEDLKNVFPPEVAVFEPSEAEISHTQKATLVCLATGFYPDHVELSWWVNGKEVHSGVCTDPQPLKEQPALNDSRYCLSSRLRVSATFWQNPRNHFRCQVQFYGLSENDEWTQDRAKPVTQIVSAEAWGRADCDVKLVEKSFETDTNLNFQNLSVIGFRILLLKVAGFNLLMTLRLWSSRAKRSGSGATNFSLLKQAGDVEENPGPTSMDWIWRILFLVGAATGAHSFEQVQLVESGGGVVQPGRSLRLSCAASGFTFSSYAMHWVRQAPGKGLEWVAVISYDGSNKYYADSVKGRFTISRDNSKNTLYLQMNSLRAEDTAVYYCARAHNSSSWSFDYWGQGTLVTVSSTRIQNPDPAVYQLRDSKSSDKSVCLFTDFDSQTNVSQSKDSDVYITDKCVLDMRSMDFKSNSAVAWSNKSDFACANAFNNSIIPEDTFFPSPESSCGFTSESYQQGVLSATILYEILLGKATLYAVLVSALVLMAMVKRKDSRG

SEQ ID NO: 12392 - protein, 631 aa, synthetic construct
MALPVTALLLPLALLLHAARPDDVVMTQSPLSLPVSLGDQASISCRSSQRLVHSNGNTYLHWYLQKPGQSPKLLIYRVSNRFPGVPDRFSGSGSGTDFTLKISRVEAEDLGIYFCSQSTHVPYTFGGGTKLEIKRLEDLKNVFPPEVAVFEPSEAEISHTQKATLVCLATGFYPDHVELSWWVNGKEVHSGVCTDPQPLKEQPALNDSRYCLSSRLRVSATFWQNPRNHFRCQVQFYGLSENDEWTQDRAKPVTQIVSAEAWGRADCDVKLVEKSFETDTNLNFQNLSVIGFRILLLKVAGFNLLMTLRLWSSRAKRSGSGATNFSLLKQAGDVEENPGPTSMDWIWRILFLVGAATGAHSFEEVRLQQSGPDLIKPGASVKMSCKASGYTFTGYVMHWVKQRPGQGLEWIGFINPYNDDIQSNERFRGKATLTSDKSSTTAYMELSSLTSEDSAVYYCARGAGYNFDGAYRFFDFWGQGTTLTVSSTRIQNPDPAVYQLRDSKSSDKSVCLFTDFDSQTNVSQSKDSDVYITDKCVLDMRSMDFKSNSAVAWSNKSDFACANAFNNSIIPEDTFFPSPESSCGFTSESYQQGVLSATILYEILLGKATLYAVLVSALVLMAMVKRKDSRG

SEQ ID NO: 12393 - protein, 622 aa, synthetic construct
MALPVTALLLPLALLLHAARPDSYELTQPPSVSVSPGQTATISCSGDQLGGKYGHWYQKKPGQSPVLVLYQDRKRPAGIPERFSGSSSGNTITLTISGTQAVDEADYYCQAWDTNLGGVFGGGTKVTVLGQLEDLKNVFPPEVAVFEPSEAEISHTQKATLVCLATGFYPDHVELSWWVNGKEVHSGVCTDPQPLKEQPALNDSRYCLSSRLRVSATFWQNPRNHFRCQVQFYGLSENDEWTQDRAKPVTQIVSAEAWGRADCDVKLVEKSFETDTNLNFQNLSVIGFRILLLKVAGFNLLMTLRLWSSRAKRSGSGATNFSLLKQAGDVEENPGPTSMDWIWRILFLVGAATGAHSFEQVQLVESGAEVKKPGASVKVSCKASGYTFTGYYMHWVRQAPGQGLEWMGRINPNSGGTNYAQKFQGRVTMTRDTSISTAYMELSRLRSDDTAVYYCASPRGRGSAFDIWGQGTLVTVSSTRIQNPDPAVYQLRDSKSSDKSVCLFTDFDSQTNVSQSKDSDVYITDKCVLDMRSMDFKSNSAVAWSNKSDFACANAFNNSIIPEDTFFPSPESSCGFTSESYQQGVLSATILYEILLGKATLYAVLVSALVLMAMVKRKDSRG

SEQ ID NO: 12394 - protein, 625 aa, synthetic construct
MALPVTALLLPLALLLHAARPDNFMLTQPHSVSESPGKTVTISCTRSSGSIASKYVQWYQQRPGSSPTTVIYEDNQRPSGVPDRFSGSIDTSSNSASLTISGLRTEDEADYYCHSYDSNNHSVFGGGTKVTVLGQLEDLKNVFPPEVAVFEPSEAEISHTQKATLVCLATGFYPDHVELSWWVNGKEVHSGVCTDPQPLKEQPALNDSRYCLSSRLRVSATFWQNPRNHFRCQVQFYGLSENDEWTQDRAKPVTQIVSAEAWGRADCDVKLVEKSFETDTNLNFQNLSVIGFRILLLKVAGFNLLMTLRLWSSRAKRSGSGATNFSLLKQAGDVEENPGPTSMDWIWRILFLVGAATGAHSFEEVQLVESGGGVVQPGGSLRLSCAASGFTFSSYAMSWVRQAPGKGLEWVSAISGSGGSTYYADSVKGRFSISRDNSKNTLYLQMNSLRAEDTAVYYCARTRSSGAFDIWGQGTLVTVSSTRIQNPDPAVYQLRDSKSSDKSVCLFTDFDSQTNVSQSKDSDVYITDKCVLDMRSMDFKSNSAVAWSNKSDFACANAFNNSIIPEDTFFPSPESSCGFTSESYQQGVLSATILYEILLGKATLYAVLVSALVLMAMVKRKDSRG

SEQ ID NO: 12395 - protein, 620 aa, synthetic construct
MALPVTALLLPLALLLHAARPDIQMNQSPSSLSASLGDTITITCHASQNINVWLSWYQQKPGNIPKLLIYKASNLHTGVPSRFSGSGSGTGFTITISSLQPEDIATYYCQQGQSYPWTFGGGTKLEIKRLEDLKNVFPPEVAVFEPSEAEISHTQKATLVCLATGFYPDHVELSWWVNGKEVHSGVCTDPQPLKEQPALNDSRYCLSSRLRVSATFWQNPRNHFRCQVQFYGLSENDEWTQDRAKPVTQIVSAEAWGRADCDVKLVEKSFETDTNLNFQNLSVIGFRILLLKVAGFNLLMTLRLWSSRAKRSGSGATNFSLLKQAGDVEENPGPTSMDWIWRILFLVGAATGAHSFEEVQLQQSGPELVKPGASVKISCKASGYSFTGYFMNWVKQSHGKSLEYIGRFNPYNGETLYNQKFKGKATLTVDKSSSTVHMELLSVTSEDSAVYYCGRSGNDDAMDYWGQGTSVTVSSATRIQNPDPAVYQLRDSKSSDKSVCLFTDFDSQTNVSQSKDSDVYITDKCVLDMRSMDFKSNSAVAWSNKSDFACANAFNNSIIPEDTFFPSPESSCGFTSESYQQGVLSATILYEILLGKATLYAVLVSALVLMAMVKRKDSRG

SEQ ID NO: 12396 - protein, 621 aa, synthetic construct
MALPVTALLLPLALLLHAARPEIVLTQSPATLSLSPGERATLSCRASQSVRSYLAWYQQKPGQAPRLLIYDASNRATGIPARFSGSGSGTDFTLTISSLEPEDFAVYYCQQRSNWPPTFGQGTKVEIKLEDLKNVFPPEVAVFEPSEAEISHTQKATLVCLATGFYPDHVELSWWVNGKEVHSGVCTDPQPLKEQPALNDSRYCLSSRLRVSATFWQNPRNHFRCQVQFYGLSENDEWTQDRAKPVTQIVSAEAWGRADCDVKLVEKSFETDTNLNFQNLSVIGFRILLLKVAGFNLLMTLRLWSSRAKRSGSGATNFSLLKQAGDVEENPGPTSMDWIWRILFLVGAATGAHSFEQLQVQESGPGLVKPSETLSLTCTVSGGSISNSYFSWGWIRQPPGKGLEWIGSFYYGEKTYYNPSLKSRATISIDTSKSQFSLKLSSVTAADTAVYYCPRGPTMIRGVIDSWGQGTLVTVSSTRIQNPDPAVYQLRDSKSSDKSVCLFTDFDSQTNVSQSKDSDVYITDKCVLDMRSMDFKSNSAVAWSNKSDFACANAFNNSIIPEDTFFPSPESSCGFTSESYQQGVLSATILYEILLGKATLYAVLVSALVLMAMVKRKDSRG

SEQ ID NO: 12397 - protein, 630 aa, synthetic construct
MALPVTALLLPLALLLHAARPDIVMTQTPLSLPVTPGEPASISCRSSRSLLDSDDGNTYLDWYLQKPGQSPQLLIYTLSYRASGVPDRFSGSGSGTDFTLKISRVEAEDVGVYYCMQRVEFPITFGQGTRLEIKRLEDLKNVFPPEVAVFEPSEAEISHTQKATLVCLATGFYPDHVELSWWVNGKEVHSGVCTDPQPLKEQPALNDSRYCLSSRLRVSATFWQNPRNHFRCQVQFYGLSENDEWTQDRAKPVTQIVSAEAWGRADCDVKLVEKSFETDTNLNFQNLSVIGFRILLLKVAGFNLLMTLRLWSSRAKRSGSGATNFSLLKQAGDVEENPGPTSMDWIWRILFLVGAATGAHSFEQVQLVESGGGVVQPGRSLRLSCAASGFIFSRYGMHWVRQAPGKGLKWVAVIWYDGSNKLYADSVKGRFTISRDNSKNTLYLQMNSLRAEDTAVYYCARDYYDNSRHHWGFDYWGQGTLVTVSSTRIQNPDPAVYQLRDSKSSDKSVCLFTDFDSQTNVSQSKDSDVYITDKCVLDMRSMDFKSNSAVAWSNKSDFACANAFNNSIIPEDTFFPSPESSCGFTSESYQQGVLSATILYEILLGKATLYAVLVSALVLMAMVKRKDSRG

SEQ ID NO: 12398 - protein, 620 aa, synthetic construct
MALPVTALLLPLALLLHAARPEIQMTQSPSSMSASLGDTITITCQATQDIFKNLNWYQQKPGKPPSLLIYYATELAEGVPSRFSGSGSGSDYSLTISNLESEDFAAYYCLQFFEFPFTFGSGTKLEMKLEDLKNVFPPEVAVFEPSEAEISHTQKATLVCLATGFYPDHVELSWWVNGKEVHSGVCTDPQPLKEQPALNDSRYCLSSRLRVSATFWQNPRNHFRCQVQFYGLSENDEWTQDRAKPVTQIVSAEAWGRADCDVKLVEKSFETDTNLNFQNLSVIGFRILLLKVAGFNLLMTLRLWSSRAKRSGSGATNFSLLKQAGDVEENPGPTSMDWIWRILFLVGAATGAHSFEQVQLQQSGAELVRPGTSVKVSCKASGYVFTNYWIEWIKQRPGQGLEWIGVMNPGSGETTYNEKFKGKATLTADKSSSTAYMQLSSLTSVDSAVYFCARDHDRDYYAMDYWGQGTSVTVSSTRIQNPDPAVYQLRDSKSSDKSVCLFTDFDSQTNVSQSKDSDVYITDKCVLDMRSMDFKSNSAVAWSNKSDFACANAFNNSIIPEDTFFPSPESSCGFTSESYQQGVLSATILYEILLGKATLYAVLVSALVLMAMVKRKDSRG

SEQ ID NO: 12399 - protein, 617 aa, synthetic construct
MALPVTALLLPLALLLHAARPDILLTQSPAILSVSPGERVSFSCRASQNIGTSIHWYQQRTNGSPRLLIKYASESVSGIPSRFSGSGSGTDFTLSINSVESEDIADYYCQHTNSWPTTFGGGTKLEIKRLEDLKNVFPPEVAVFEPSEAEISHTQKATLVCLATGFYPDHVELSWWVNGKEVHSGVCTDPQPLKEQPALNDSRYCLSSRLRVSATFWQNPRNHFRCQVQFYGLSENDEWTQDRAKPVTQIVSAEAWGRADCDVKLVEKSFETDTNLNFQNLSVIGFRILLLKVAGFNLLMTLRLWSSRAKRSGSGATNFSLLKQAGDVEENPGPTSMDWIWRILFLVGAATGAHSFEQVQLQQSDAELVKPGASVKISCKASGYTFTDHAIHWVKQKPEQGLEWIGYFSPGNGDIKYNEKFKGKATLTADKSSSTAYMQLNSLTSEDSAVYFCKRSYGNYDYWGQGTTLTVSSTRIQNPDPAVYQLRDSKSSDKSVCLFTDFDSQTNVSQSKDSDVYITDKCVLDMRSMDFKSNSAVAWSNKSDFACANAFNNSIIPEDTFFPSPESSCGFTSESYQQGVLSATILYEILLGKATLYAVLVSALVLMAMVKRKDSRG

SEQ ID NO: 12400 - protein, 622 aa, synthetic construct
MALPVTALLLPLALLLHAARPDIVMTQSPDSLAVSLGERATINCKSSQSLLNSGDQKNYLTWYQQKPGQPPKLLIYWASTRESGVPDRFSGSGSGTDFTLTISSLQAEDVAVYYCQNDYSYPLTFGQGTKVEIKLEDLKNVFPPEVAVFEPSEAEISHTQKATLVCLATGFYPDHVELSWWVNGKEVHSGVCTDPQPLKEQPALNDSRYCLSSRLRVSATFWQNPRNHFRCQVQFYGLSENDEWTQDRAKPVTQIVSAEAWGRADCDVKLVEKSFETDTNLNFQNLSVIGFRILLLKVAGFNLLMTLRLWSSRAKRSGSGATNFSLLKQAGDVEENPGPTSMDWIWRILFLVGAATGAHSFEQVQLVQSGAEVKKTGSSVKVSCKASGYTFTDHAIHVWRQAPGQALEWMGHFSPGNTDIKYNDKFKGRVTLTVDRSMSTAYMELSSLRSEDTAMYYCKTSTFFFDYWGQGTMVTVSSTRIQNPDPAVYQLRDSKSSDKSVCLFTDFDSQTNVSQSKDSDVYITDKCVLDMRSMDFKSNSAVAWSNKSDFACANAFNNSIIPEDTFFPSPESSCGFTSESYQQGVLSATILYEILLGKATLYAVLVSALVLMAMVKRKDSRG

SEQ ID NO: 12401 - protein, 621 aa, synthetic construct
MALPVTALLLPLALLLHAARPDIQMTQSPSSLSASVGDRVTITCKASQDVSIAVAWYQQKPGKAPKVLIYSASYRYTGVPDRFSGSGSGTDFTFTISSLQPEDIAVYYCQQHYITPLTFGGGTKVEIKLEDLKNVFPPEVAVFEPSEAEISHTQKATLVCLATGFYPDHVELSWWVNGKEVHSGVCTDPQPLKEQPALNDSRYCLSSRLRVSATFWQNPRNHFRCQVQFYGLSENDEWTQDRAKPVTQIVSAEAWGRADCDVKLVEKSFETDTNLNFQNLSVIGFRILLLKVAGFNLLMTLRLWSSRAKRSGSGATNFSLLKQAGDVEENPGPTSMDWIWRILFLVGAATGAHSFEQIQLVQSGHEVKKPGASVKVSCKASGYTFTNYGMNWVRQAPGQGLEWMGWINTKTGEPTYAEEFKGRFVFSLETSASTAYLQISSLKAEDTAMYFCGRGGYGSSYWYFDVWGQGTTVTVSSTRIQNPDPAVYQLRDSKSSDKSVCLFTDFDSQTNVSQSKDSDVYITDKCVLDMRSMDFKSNSAVAWSNKSDFACANAFNNSIIPEDTFFPSPESSCGFTSESYQQGVLSATILYEILLGKATLYAVLVSALVLMAMVKRKDSRG

SEQ ID NO: 12402 - protein, 623 aa, synthetic construct
MALPVTALLLPLALLLHAARPDIVMTQSPDSLAVSLGERATINCRASKSVSTSGYSYMHWYQQKPGQPPKLLIYLASNLESGVPDRFSGSGSGTDFTLTISSLQAEDVAVYYCQHSRELPYTFGQGTKLEIKLEDLKNVFPPEVAVFEPSEAEISHTQKATLVCLATGFYPDHVELSWWVNGKEVHSGVCTDPQPLKEQPALNDSRYCLSSRLRVSATFWQNPRNHFRCQVQFYGLSENDEWTQDRAKPVTQIVSAEAWGRADCDVKLVEKSFETDTNLNFQNLSVIGFRILLLKVAGFNLLMTLRLWSSRAKRSGSGATNFSLLKQAGDVEENPGPTSMDWIWRILFLVGAATGAHSFEQVQLQESGPGLVKPSETLSLTCTVSGGSISSYGVHWIRQPPGKGLEWIGVIWTSGVTDYNSALMGRVTISVDTSKNQFSLKLSSVTAADTAVYYCARDGDYDRYTMDYWGQGTLVTVSSTRIQNPDPAVYQLRDSKSSDKSVCLFTDFDSQTNVSQSKDSDVYITDKCVLDMRSMDFKSNSAVAWSNKSDFACANAFNNSIIPEDTFFPSPESSCGFTSESYQQGVLSATILYEILLGKATLYAVLVSALVLMAMVKRKDSRG

SEQ ID NO: 12403 - protein, 623 aa, synthetic construct
MALPVTALLLPLALLLHAARPDIQMTQSPSSLSASVGDRVTITCRASQSIGTSLHWYQQKPGKAPKLLIKFASRLQSGVPSRFSGSGSGTDFTLTISSLQPEDFATYYCQQSPGFPPTFGQGTKLEIKRLEDLKNVFPPEVAVFEPSEAEISHTQKATLVCLATGFYPDHVELSWWVNGKEVHSGVCTDPQPLKEQPALNDSRYCLSSRLRVSATFWQNPRNHFRCQVQFYGLSENDEWTQDRAKPVTQIVSAEAWGRADCDVKLVEKSFETDTNLNFQNLSVIGFRILLLKVAGFNLLMTLRLWSSRAKRSGSGATNFSLLKQAGDVEENPGPTSMDWIWRILFLVGAATGAHSFEQVQLVESGGGLVKPGGSLRLSCAASGFSITTSGYYWTWIRQFPGKGLEWMGYIGYNSKTYYNPALKSRITISRDNAKNSLYLQMNSLRAEDTAVYYCARSLYGGYKDAFDSWGQGTLVTVSSTRIQNPDPAVYQLRDSKSSDKSVCLFTDFDSQTNVSQSKDSDVYITDKCVLDMRSMDFKSNSAVAWSNKSDFACANAFNNSIIPEDTFFPSPESSCGFTSESYQQGVLSATILYEILLGKATLYAVLVSALVLMAMVKRKDSRG

SEQ ID NO: 12404 - protein, 628 aa, synthetic construct
MALPVTALLLPLALLLHAARPDEIVLTQSPLSLPVTPGEPASISCRSSQSLLHSIGYNYLDWYLQKPGQSPQLLIYLGSNRASGVPDRFSGSGSGTDFTLKISRVEAEDVGVYYCMQALQTPLTFGGGTKVEIKRLEDLKNVFPPEVAVFEPSEAEISHTQKATLVCLATGFYPDHVELSWWVNGKEVHSGVCTDPQPLKEQPALNDSRYCLSSRLRVSATFWQNPRNHFRCQVQFYGLSENDEWTQDRAKPVTQIVSAEAWGRADCDVKLVEKSFETDTNLNFQNLSVIGFRILLLKVAGFNLLMTLRLWSSRAKRSGSGATNFSLLKQAGDVEENPGPTSMDWIWRILFLVGAATGAHSFEEVQLVESGGGVVQPGRSLRLSCAASGFTFRSYGMHWVRQAPGKGLEWVAVISYDGSNKYYTDSVNGRFTISRDNSKNTLYLQMNSLRAEDTAVYYCARGGGYYETSGPDYWGQGTLVTVSSTRIQNPDPAVYQLRDSKSSDKSVCLFTDFDSQTNVSQSKDSDVYITDKCVLDMRSMDFKSNSAVAWSNKSDFACANAFNNSIIPEDTFFPSPESSCGFTSESYQQGVLSATILYEILLGKATLYAVLVSALVLMAMVKRKDSRG

SEQ ID NO: 12405 - protein, 626 aa, synthetic construct
MALPVTALLLPLALLLHAARPDDVVMTQSPLSLPVTPGEPASISCRSSQSLLHSIGYNYLHWFLQKPGQSPQLLIYLGSNRASGVPDRFSGSGSGTDFTLKISRVEAEDVGVYYCMQALQTPPTFGQGTRLEIKRLEDLKNVFPPEVAVFEPSEAEISHTQKATLVCLATGFYPDHVELSWWVNGKEVHSGVCTDPQPLKEQPALNDSRYCLSSRLRVSATFWQNPRNHFRCQVQFYGLSENDEWTQDRAKPVTQIVSAEAWGRADCDVKLVEKSFETDTNLNFQNLSVIGFRILLLKVAGFNLLMTLRLWSSRAKRSGSGATNFSLLKQAGDVEENPGPTSMDWIWRILFLVGAATGAHSFEQLQLQESGPGLVKPSGTLSLTCAVSGGSISSSNWWSWVRQPPGKGLEWIGEIYHSGSTNYNPSLKSRVTISVDKSKNQFSLKLSSVTAADTAVYYCVGSPYGDYVLDYWGQGTLVTVSSTRIQNPDPAVYQLRDSKSSDKSVCLFTDFDSQTNVSQSKDSDVYITDKCVLDMRSMDFKSNSAVAWSNKSDFACANAFNNSIIPEDTFFPSPESSCGFTSESYQQGVLSATILYEILLGKATLYAVLVSALVLMAMVKRKDSRG

SEQ ID NO: 12406 - protein, 624 aa, synthetic construct
MALPVTALLLPLALLLHAARPDEIVLTQSPGTLSLSLGERATLSCRASQSISSSFLAWYQQKPGQAPKLLIYAASTRATGIPDRFSGSGSGTDFTLTISRLEPEDFAVYYCQQYGRSLSFGGGTKVEVKLEDLKNVFPPEVAVFEPSEAEISHTQKATLVCLATGFYPDHVELSWWVNGKEVHSGVCTDPQPLKEQPALNDSRYCLSSRLRVSATFWQNPRNHFRCQVQFYGLSENDEWTQDRAKPVTQIVSAEAWGRADCDVKLVEKSFETDTNLNFQNLSVIGFRILLLKVAGFNLLMTLRLWSSRAKRSGSGATNFSLLKQAGDVEENPGPTSMDWIWRILFLVGAATGAHSFEQVQLQQSGPGLVKPSQTLSLTCAISGDSVSGNSATWNWIRQSPSRGLEWLGRTYYRSKWNHDYAESVKSRITINPDTSKNQFSLQLNSVTPEDTAVYYCARGDSSSWYAFDYWGQGTLVTVSSTRIQNPDPAVYQLRDSKSSDKSVCLFTDFDSQTNVSQSKDSDVYITDKCVLDMRSMDFKSNSAVAWSNKSDFACANAFNNSIIPEDTFFPSPESSCGFTSESYQQGVLSATILYEILLGKATLYAVLVSALVLMAMVKRKDSRG

SEQ ID NO: 12407 - protein, 623 aa, synthetic construct
MALPVTALLLPLALLLHAARPDQSVVTQPPSVSVAPGKTARITCGRNNIGSKSVHWYQQKPGQAPVLVVYDDSDRPSGIPERFSGSNSGNTATLTISRVEAGDEADYYCQVWDSSSDHVVFGGGTKLTVLGLEDLKNVFPPEVAVFEPSEAEISHTQKATLVCLATGFYPDHVELSWWVNGKEVHSGVCTDPQPLKEQPALNDSRYCLSSRLRVSATFWQNPRNHFRCQVQFYGLSENDEWTQDRAKPVTQIVSAEAWGRADCDVKLVEKSFETDTNLNFQNLSVIGFRILLLKVAGFNLLMTLRLWSSRAKRSGSGATNFSLLKQAGDVEENPGPTSMDWIWRILFLVGAATGAHSFEVQLVQSGGGVMRPGGSLRLSCAASGFTFDDYGMSWVRQAPGKGLEWVSGINWNGGSTGYADSVRGRFTISRDNAKNSLYLQMNSLRAEDTALYYCARERGYGYHDPHDYWGQGTLVTVSSTRIQNPDPAVYQLRDSKSSDKSVCLFTDFDSQTNVSQSKDSDVYITDKCVLDMRSMDFKSNSAVAWSNKSDFACANAFNNSIIPEDTFFPSPESSCGFTSESYQQGVLSATILYEILLGKATLYAVLVSALVLMAMVKRKDSRG

SEQ ID NO: 12408 - protein, 636 aa, synthetic construct
MALPVTALLLPLALLLHAARPEQKLISEEDLEFQAVVTQPPSASGTPGQRVTISCSGSSSNIGSNTVNWYQQVPGTAPKLLIYSNNQRPSGVPDRFSGSKSGTSASLAISGLQSEDEADYYCAAWDDSLNGWVFGGGTKLTVLLEDLKNVFPPEVAVFEPSEAEISHTQKATLVCLATGFYPDHVELSWWVNGKEVHSGVCTDPQPLKEQPALNDSRYCLSSRLRVSATFWQNPRNHFRCQVQFYGLSENDEWTQDRAKPVTQIVSAEAWGRADCDVKLVEKSFETDTNLNFQNLSVIGFRILLLKVAGFNLLMTLRLWSSRAKRSGSGATNFSLLKQAGDVEENPGPTSMDWIWRILFLVGAATGAHSFEQMQLVQSGAEVKEPGESLRISCKGSGYSFTNFWISWVRQMPGKGLEWMGRVDPGYSYSTYSPSFQGHVTISADKSTSTAYLQWNSLKASDTAMYYCARVQYSGYYDWFDPWGQGTLVTVSSTRIQNPDPAVYQLRDSKSSDKSVCLFTDFDSQTNVSQSKDSDVYITDKCVLDMRSMDFKSNSAVAWSNKSDFACANAFNNSIIPEDTFFPSPESSCGFTSESYQQGVLSATILYEILLGKATLYAVLVSALVLMAMVKRKDSRG

SEQ ID NO: 12409 - protein, 630 aa, synthetic construct
MALPVTALLLPLALLLHAARPEQKLISEEDLEFDIQMTQSPSTLSASVGDRVTITCRASQNINKWLAWYQQRPGKAPQLLIYKASSLESGVPSRFSGSGSGTEYTLTISSLQPDDFATYYCQQYNSYATFGQGTKVEIKRLEDLKNVFPPEVAVFEPSEAEISHTQKATLVCLATGFYPDHVELSWWVNGKEVHSGVCTDPQPLKEQPALNDSRYCLSSRLRVSATFWQNPRNHFRCQVQFYGLSENDEWTQDRAKPVTQIVSAEAWGRADCDVKLVEKSFETDTNLNFQNLSVIGFRILLLKVAGFNLLMTLRLWSSRAKRSGSGATNFSLLKQAGDVEENPGPTSMDWIWRILFLVGAATGAHSFEQVQLVQSGAEVKKPGESLKISCKGSGYNFSNKWIGWVRQLPGRGLEWIAIIYPGYSDITYSPSFQGRVTISADTSINTAYLHWHSLKASDTAMYYCVRHTALAGFDYWGLGTLVTVSSTRIQNPDPAVYQLRDSKSSDKSVCLFTDFDSQTNVSQSKDSDVYITDKCVLDMRSMDFKSNSAVAWSNKSDFACANAFNNSIIPEDTFFPSPESSCGFTSESYQQGVLSATILYEILLGKATLYAVLVSALVLMAMVKRKDSRG

SEQ ID NO: 12410 - protein, 621 aa, synthetic construct
MALPVTALLLPLALLLHAARPIVLTQSPASLAVSLGQRATISCRASESVDNYGNTFMHWYQQKPGQPPKLLIYRASNLESGIPARFSGSGSRTDFTLTINPVEADDVATYYCQQSNEDPPTFGAGTKLELKLEDLKNVFPPEVAVFEPSEAEISHTQKATLVCLATGFYPDHVELSWWVNGKEVHSGVCTDPQPLKEQPALNDSRYCLSSRLRVSATFWQNPRNHFRCQVQFYGLSENDEWTQDRAKPVTQIVSAEAWGRADCDVKLVEKSFETDTNLNFQNLSVIGFRILLLKVAGFNLLMTLRLWSSRAKRSGSGATNFSLLKQAGDVEENPGPTSMDWIWRILFLVGAATGAHSFEQIQLVQSGPELKKPGETVKISCKASGYIFTNYGMNWVKQAPGKSFKWMGWINTYTGESTYSADFKGRFAFSLETSASTAYLHINDLKNEDTATYFCARSGGYDPMDYWGQGTSVTVSSTRIQNPDPAVYQLRDSKSSDKSVCLFTDFDSQTNVSQSKDSDVYITDKCVLDMRSMDFKSNSAVAWSNKSDFACANAFNNSIIPEDTFFPSPESSCGFTSESYQQGVLSATILYEILLGKATLYAVLVSALVLMAMVKRKDSRG

SEQ ID NO: 12411 - protein, 620 aa, synthetic construct
MALPVTALLLPLALLLHAARPEIVLTQSPGTLSLSPGERATLSCRASQSVSNTYLAWYHQRPGQAPRLLIYGASSRATGIPDRFSGSGSGTDFALTISSLEPEDFAVYYCQQYSNSWTFGQGTKVEIKRLEDLKNVFPPEVAVFEPSEAEISHTQKATLVCLATGFYPDHVELSWWVNGKEVHSGVCTDPQPLKEQPALNDSRYCLSSRLRVSATFWQNPRNHFRCQVQFYGLSENDEWTQDRAKPVTQIVSAEAWGRADCDVKLVEKSFETDTNLNFQNLSVIGFRILLLKVAGFNLLMTLRLWSSRAKRSGSGATNFSLLKQAGDVEENPGPTSMDWIWRILFLVGAATGAHSFEQVQLVESGGGVVQPGRSLRLSCAASGFTFSSYDMHWVRQAPGKGLEWVAVISYDGTNEYYADSVKGRFTISRDTSKNTLYLQMNSLRAEDTAVYYCARERYFDWSFDYWGQGTLVSVSSTRIQNPDPAVYQLRDSKSSDKSVCLFTDFDSQTNVSQSKDSDVYITDKCVLDMRSMDFKSNSAVAWSNKSDFACANAFNNSIIPEDTFFPSPESSCGFTSESYQQGVLSATILYEILLGKATLYAVLVSALVLMAMVKRKDSRG

SEQ ID NO: 12412 - protein, 619 aa, synthetic construct
MALPVTALLLPLALLLHAARPELTQDPAVSVALGQTVRITCQGDSLRSNYANWYQQKPGQAPVLVIYGQNNRPSGIPDRFSGSSSGNTASLTITGAQAADEADYYCDSRVSTGNHVVFGGGTKLTVLGQLEDLKNVFPPEVAVFEPSEAEISHTQKATLVCLATGFYPDHVELSWWVNGKEVHSGVCTDPQPLKEQPALNDSRYCLSSRLRVSATFWQNPRNHFRCQVQFYGLSENDEWTQDRAKPVTQIVSAEAWGRADCDVKLVEKSFETDTNLNFQNLSVIGFRILLLKVAGFNLLMTLRLWSSRAKRSGSGATNFSLLKQAGDVEENPGPTSMDWIWRILFLVGAATGAHSFEEVQLVQSGAEVKKPGASVKVSCKASGYTFTSYAMHWVRQAPGQRLEWMGWINAGNGNTKYSQKFQGRVTITRDTSASTAYMELSSLRSEDTAVYYCARDISYGSFDYWGQGTLVTVSSTRIQNPDPAVYQLRDSKSSDKSVCLFTDFDSQTNVSQSKDSDVYITDKCVLDMRSMDFKSNSAVAWSNKSDFACANAFNNSIIPEDTFFPSPESSCGFTSESYQQGVLSATILYEILLGKATLYAVLVSALVLMAMVKRKDSRG

SEQ ID NO: 12413 - protein, 621 aa, synthetic construct
MALPVTALLLPLALLLHAARPDIVLTQTPATLSVTPGDSVSLSCRASQSISNNLHWYQQKSHESPRLLIKNASQSISGIPSKFSGSGSGTDFTLRINSVETEDFGMYFCQQSNSWPYTFGSGTKLEIKLEDLKNVFPPEVAVFEPSEAEISHTQKATLVCLATGFYPDHVELSWWVNGKEVHSGVCTDPQPLKEQPALNDSRYCLSSRLRVSATFWQNPRNHFRCQVQFYGLSENDEWTQDRAKPVTQIVSAEAWGRADCDVKLVEKSFETDTNLNFQNLSVIGFRILLLKVAGFNLLMTLRLWSSRAKRSGSGATNFSLLKQAGDVEENPGPTSMDWIWRILFLVGAATGAHSFEQVKLQQSGPELVKPGASVKISCKASGYSFTGYYMHWVKQSHGNILDWIGYIYPYNGVSSYNQKFKGKATLTVDKSSSTAYMELRSLTSEDSAVYYCARERGLYQLRAMDYWGQGTSVTVSSTRIQNPDPAVYQLRDSKSSDKSVCLFTDFDSQTNVSQSKDSDVYITDKCVLDMRSMDFKSNSAVAWSNKSDFACANAFNNSIIPEDTFFPSPESSCGFTSESYQQGVLSATILYEILLGKATLYAVLVSALVLMAMVKRKDSRG

SEQ ID NO: 12414 - protein, 612 aa, synthetic construct
MALPVTALLLPLALLLHAARPDIVMTQTPAIMSASPGQKVTITCSASSSVNYMHWYQQKLGSSPKLWIYDTSKLAPGVPARFSGSGSGTSYSLTISSMEAEDAASYFCHQWSSYPYTFGSGTKLEIKLEDLKNVFPPEVAVFEPSEAEISHTQKATLVCLATGFYPDHVELSWWVNGKEVHSGVCTDPQPLKEQPALNDSRYCLSSRLRVSATFWQNPRNHFRCQVQFYGLSENDEWTQDRAKPVTQIVSAEAWGRADCDVKLVEKSFETDTNLNFQNLSVIGFRILLLKVAGFNLLMTLRLWSSRAKRSGSGATNFSLLKQAGDVEENPGPTSMDWIWRILFLVGAATGAHSFEEVQLQESGPDLVKPSQSLSLTCTVTGYSITSGYGWHWIRQFPGNKLEWMGYIHYSGSTTYNPSLKSRISISRDTSKNQFFLQLNSVTTEDTATYYCARSLRYWGQGTTLTVSSTRIQNPDPAVYQLRDSKSSDKSVCLFTDFDSQTNVSQSKDSDVYITDKCVLDMRSMDFKSNSAVAWSNKSDFACANAFNNSIIPEDTFFPSPESSCGFTSESYQQGVLSATILYEILLGKATLYAVLVSALVLMAMVKRKDSRG

SEQ ID NO: 12415 - protein, 615 aa, synthetic construct
MALPVTALLLPLALLLHAARPDIQMTQSPSSLSASVGDRVTITCSATSSISYMHWYQQKPGKAPKGWIYDTSKLAHGVPSRFSGSGSGTDFTLTISSLQPEDFATYYCHQRRSYPFTFGQGTKVEIKLEDLKNVFPPEVAVFEPSEAEISHTQKATLVCLATGFYPDHVELSWWVNGKEVHSGVCTDPQPLKEQPALNDSRYCLSSRLRVSATFWQNPRNHFRCQVQFYGLSENDEWTQDRAKPVTQIVSAEAWGRADCDVKLVEKSFETDTNLNFQNLSVIGFRILLLKVAGFNLLMTLRLWSSRAKRSGSGATNFSLLKQAGDVEENPGPTSMDWIWRILFLVGAATGAHSFEEVQLVQSGAEVKKPGASVKVSCKASGYTFTNFWIHWVRQAPGQGLEWIGEIDPSDSYTNYNQKFKGRVTITRDTSTSTAYLELSSLRSEDTAVYYCAREITTVDYWGQGTLVTVSSTRIQNPDPAVYQLRDSKSSDKSVCLFTDFDSQTNVSQSKDSDVYITDKCVLDMRSMDFKSNSAVAWSNKSDFACANAFNNSIIPEDTFFPSPESSCGFTSESYQQGVLSATILYEILLGKATLYAVLVSALVLMAMVKRKDSRG

SEQ ID NO: 12416 - protein, 622 aa, synthetic construct
MALPVTALLLPLALLLHAARPDIQMTQSPSSLSASVGDRVTITCKASQGFNKYVAWYQQKPGKAPKLLIYYTSTLQPGVPSRFSGSGSGRDYTLTISSLQPEDFATYYCLQYGNLLYAFGQGTKVEIKRLEDLKNVFPPEVAVFEPSEAEISHTQKATLVCLATGFYPDHVELSWWVNGKEVHSGVCTDPQPLKEQPALNDSRYCLSSRLRVSATFWQNPRNHFRCQVQFYGLSENDEWTQDRAKPVTQIVSAEAWGRADCDVKLVEKSFETDTNLNFQNLSVIGFRILLLKVAGFNLLMTLRLWSSRAKRSGSGATNFSLLKQAGDVEENPGPTSMDWIWRILFLVGAATGAHSFEEVQLVQSGAEVKKPGASVKVSCKASGYTFTSYWIGWVRQAPGQGLEWIGDIYPGGGYTNYNEKFKGRVTITRDTSTSTAYLELSSLRSEDTAVYYCARLDGSSYRGAMDSWGQGTLVTVSSTRIQNPDPAVYQLRDSKSSDKSVCLFTDFDSQTNVSQSKDSDVYITDKCVLDMRSMDFKSNSAVAWSNKSDFACANAFNNSIIPEDTFFPSPESSCGFTSESYQQGVLSATILYEILLGKATLYAVLVSALVLMAMVKRKDSRG

SEQ ID NO: 12417 - protein, 618 aa, synthetic construct
MALPVTALLLPLALLLHAARPDIQMTQSPSSLSASVGDRVTITCRASQDIRYYLNWYQQKPGKAPKLLIYVASSLQSGVPSRFSGSGSGTEFTLTVSSLQPEDFATYYCLQVYSTPRTFGQGTKVEIKLEDLKNVFPPEVAVFEPSEAEISHTQKATLVCLATGFYPDHVELSWWVNGKEVHSGVCTDPQPLKEQPALNDSRYCLSSRLRVSATFWQNPRNHFRCQVQFYGLSENDEWTQDRAKPVTQIVSAEAWGRADCDVKLVEKSFETDTNLNFQNLSVIGFRILLLKVAGFNLLMTLRLWSSRAKRSGSGATNFSLLKQAGDVEENPGPTSMDWIWRILFLVGAATGAHSFEEVQLVESGGGLAKPGGSLRLSCAASGFRFTFNNYYMDWVRQAPGQGLEWVSRISSSGDPTWYADSVKGRFTISRENAKNTLFLQMNSLRAEDTAVYYCASLTTGSDSWGQGVLVTVSSTRIQNPDPAVYQLRDSKSSDKSVCLFTDFDSQTNVSQSKDSDVYITDKCVLDMRSMDFKSNSAVAWSNKSDFACANAFNNSIIPEDTFFPSPESSCGFTSESYQQGVLSATILYEILLGKATLYAVLVSALVLMAMVKRKDSRG

SEQ ID NO: 12418 - protein, 619 aa, synthetic construct
MALPVTALLLPLALLLHAARPEIVMTQSPATLSVSPGERATLSCRASQSVSRNLAWYQQKPGQAPRLLIYGASTRATGIPARFSGSGSGTEFTLTIGSLQSEDFAVYYCQQYKTWPRTFGQGTNVEIKLEDLKNVFPPEVAVFEPSEAEISHTQKATLVCLATGFYPDHVELSWWVNGKEVHSGVCTDPQPLKEQPALNDSRYCLSSRLRVSATFWQNPRNHFRCQVQFYGLSENDEWTQDRAKPVTQIVSAEAWGRADCDVKLVEKSFETDTNLNFQNLSVIGFRILLLKVAGFNLLMTLRLWSSRAKRSGSGATNFSLLKQAGDVEENPGPTSMDWIWRILFLVGAATGAHSFEQVQLQQWGAGLLKPSETLSLTCAVFGGSFSGYYWSWIRQPPGKGLEWIGEINHRGNTNDNPSLKSRVTISVDTSKNQFALKLSSVTAADTAVYYCARERGYTYGNFDHWGQGTLVTVSSTRIQNPDPAVYQLRDSKSSDKSVCLFTDFDSQTNVSQSKDSDVYITDKCVLDMRSMDFKSNSAVAWSNKSDFACANAFNNSIIPEDTFFPSPESSCGFTSESYQQGVLSATILYEILLGKATLYAVLVSALVLMAMVKRKDSRG

SEQ ID NO: 12419 - protein, 620 aa, synthetic construct
MALPVTALLLPLALLLHAARPEIVMTPSSATLSVSPGERATLSCRASQSVSRNLAWYQQKPGQAPRLLIYGASTRATGIPARFSGSGSGTEFTLTISSLQSEDFAVYYCHQYSNWMCSFGQGTKLEIKLEDLKNVFPPEVAVFEPSEAEISHTQKATLVCLATGFYPDHVELSWWVNGKEVHSGVCTDPQPLKEQPALNDSRYCLSSRLRVSATFWQNPRNHFRCQVQFYGLSENDEWTQDRAKPVTQIVSAEAWGRADCDVKLVEKSFETDTNLNFQNLSVIGFRILLLKVAGFNLLMTLRLWSSRAKRSGSGATNFSLLKQAGDVEENPGPTSMDWIWRILFLVGAATGAHSFEEVQLLESGGGLVQPGGSLRLSCAASGFTFSRYAMNWVRQAPGKGLEWVSGISGSGGRTYYADSVKGRFTISRDNSKNTLYLQMNSLRAEDTAVYYCAKDRDFWSGPFDYWGQGTLVTVSSTRIQNPDPAVYQLRDSKSSDKSVCLFTDFDSQTNVSQSKDSDVYITDKCVLDMRSMDFKSNSAVAWSNKSDFACANAFNNSIIPEDTFFPSPESSCGFTSESYQQGVLSATILYEILLGKATLYAVLVSALVLMAMVKRKDSRG

SEQ ID NO: 12420 - protein, 625 aa, synthetic construct
MALPVTALLLPLALLLHAARPDIQMTQSPSSLSASVGDRVTITCKASKNIRSYLAWYQQKPGKAPKLLIYSGSTLHSGVPSRFSGSGSGTDFTLTISSLQPEDFATYYCQQHHEYPLTFGQGTKVEIKRLEDLKNVFPPEVAVFEPSEAEISHTQKATLVCLATGFYPDHVELSWWVNGKEVHSGVCTDPQPLKEQPALNDSRYCLSSRLRVSATFWQNPRNHFRCQVQFYGLSENDEWTQDRAKPVTQIVSAEAWGRADCDVKLVEKSFETDTNLNFQNLSVIGFRILLLKVAGFNLLMTLRLWSSRAKRSGSGATNFSLLKQAGDVEENPGPTSMDWIWRILFLVGAATGAHSFEQVQLQESGPGLVKPSETLSLTCTVSGYTITSGYDWSWIRQPPGKGLEWIGYINYGGSTNYKPSLGSRVTISVDTSKNQFSLKLSSVTAADTAVYYCARYNEYKSYIYDWYFDFWGQGTLVTVSSTRIQNPDPAVYQLRDSKSSDKSVCLFTDFDSQTNVSQSKDSDVYITDKCVLDMRSMDFKSNSAVAWSNKSDFACANAFNNSIIPEDTFFPSPESSCGFTSESYQQGVLSATILYEILLGKATLYAVLVSALVLMAMVKRKDSRG

SEQ ID NO: 12421 - protein, 627 aa, synthetic construct
MALPVTALLLPLALLLHAARPQSVVTQPPSVSAAPGQKVTISCSGSSSNIGNNYVSWYQQLPGTAPKLLIYDNNKRPSGIPDRFSGSKSGTSATLGITGLQTGDEADYYCGTWDGSLYTMLFGGGTKLTVLLEDLKNVFPPEVAVFEPSEAEISHTQKATLVCLATGFYPDHVELSWWVNGKEVHSGVCTDPQPLKEQPALNDSRYCLSSRLRVSATFWQNPRNHFRCQVQFYGLSENDEWTQDRAKPVTQIVSAEAWGRADCDVKLVEKSFETDTNLNFQNLSVIGFRILLLKVAGFNLLMTLRLWSSRAKRSGSGATNFSLLKQAGDVEENPGPTSMDWIWRILFLVGAATGAHSFEEVQLVESGGGLVKPGGSLRLSCAASGFTFSNAWMSWVRQAPGKGLEWVGFIRSKAYGGTTEYAASVKGRFTISRDDSKSIAYLQMNNLKTEDTAVYYCARDGLYSSSWYDSDYWGQGTLVTVSSTRIQNPDPAVYQLRDSKSSDKSVCLFTDFDSQTNVSQSKDSDVYITDKCVLDMRSMDFKSNSAVAWSNKSDFACANAFNNSIIPEDTFFPSPESSCGFTSESYQQGVLSATILYEILLGKATLYAVLVSALVLMAMVKRKDSRG

SEQ ID NO: 12422 - protein, 632 aa, synthetic construct
MALPVTALLLPLALLLHAARPQSVLTQPPSVSGAPGQRVTISCTGSSSNIGAGYDVHWYQQLPGTAPKLLIFGNSNRPSGVPDRFSGFKSGTSASLAITGLQAEDEADYFCQSYDSSLSGSGVFGTGTKVTVLGLEDLKNVFPPEVAVFEPSEAEISHTQKATLVCLATGFYPDHVELSWWVNGKEVHSGVCTDPQPLKEQPALNDSRYCLSSRLRVSATFWQNPRNHFRCQVQFYGLSENDEWTQDRAKPVTQIVSAEAWGRADCDVKLVEKSFETDTNLNFQNLSVIGFRILLLKVAGFNLLMTLRLWSSRAKRSGSGATNFSLLKQAGDVEENPGPTSMDWIWRILFLVGAATGAHSFEQMQLVQSGGGLVQPGRSLRLSCAASGFTFDDYAMHWVRQAPGKGLEWVSGISWNSGSIGYADSVKGRFTISRDNAKNSLYLQMNSLRAEDTALYYCAKDIHSGSYYGLLYYAMDVWGQGTTVTVSSTRIQNPDPAVYQLRDSKSSDKSVCLFTDFDSQTNVSQSKDSDVYITDKCVLDMRSMDFKSNSAVAWSNKSDFACANAFNNSIIPEDTFFPSPESSCGFTSESYQQGVLSATILYEILLGKATLYAVLVSALVLMAMVKRKDSRG

SEQ ID NO: 12423 - protein, 632 aa, synthetic construct
MALPVTALLLPLALLLHAARPLPVLTQPPSASGTPGQRVTISCSGRSSNIGSNSVNWYRQLPGAAPKLLIYSNNQRPPGVPVRFSGSKSGTSASLAISGLQSEDEATYYCATWDDNLNVHYVFGTGTKVTVLGSRLEDLKNVFPPEVAVFEPSEAEISHTQKATLVCLATGFYPDHVELSWWVNGKEVHSGVCTDPQPLKEQPALNDSRYCLSSRLRVSATFWQNPRNHFRCQVQFYGLSENDEWTQDRAKPVTQIVSAEAWGRADCDVKLVEKSFETDTNLNFQNLSVIGFRILLLKVAGFNLLMTLRLWSSRAKRSGSGATNFSLLKQAGDVEENPGPTSMDWIWRILFLVGAATGAHSFELEMAQVQLVQSGAEVKKPGSSVKVSCKASGGTFSSYAISWVRQAPGQGLEWMGRIIPILGIANYAQKFQGRVTITADKSTSTAYMELSSLRSEDTAVYYCARGGYYSHDMWSEDWGQGTLVTVSSTRIQNPDPAVYQLRDSKSSDKSVCLFTDFDSQTNVSQSKDSDVYITDKCVLDMRSMDFKSNSAVAWSNKSDFACANAFNNSIIPEDTFFPSPESSCGFTSESYQQGVLSATILYEILLGKATLYAVLVSALVLMAMVKRKDSRG

SEQ ID NO: 12424 - protein, 626 aa, synthetic construct
MALPVTALLLPLALLLHAARPDFVMTQSPDSLAVSLGERVTMSCKSSQSLLNSGNQKNYLTWYQQKPGQPPKLLIYWASTRESGVPDRFSGSGSGTDFTLTISSLQAEDVAVYYCQNDYSYPYTFGQGTKLEIKLEDLKNVFPPEVAVFEPSEAEISHTQKATLVCLATGFYPDHVELSWWVNGKEVHSGVCTDPQPLKEQPALNDSRYCLSSRLRVSATFWQNPRNHFRCQVQFYGLSENDEWTQDRAKPVTQIVSAEAWGRADCDVKLVEKSFETDTNLNFQNLSVIGFRILLLKVAGFNLLMTLRLWSSRAKRSGSGATNFSLLKQAGDVEENPGPTSMDWIWRILFLVGAATGAHSFEEVQLVQSGAELKKPGASVKVSCKASGYTFTDYYMKWVRQAPGQGLEWIGDIIPSNGATFYNQKFKGRVTITVDKSTSTAYMELSSLRSEDTAVYYCARSHLLRASWFAYWGQGTLVTVSSTRIQNPDPAVYQLRDSKSSDKSVCLFTDFDSQTNVSQSKDSDVYITDKCVLDMRSMDFKSNSAVAWSNKSDFACANAFNNSIIPEDTFFPSPESSCGFTSESYQQGVLSATILYEILLGKATLYAVLVSALVLMAMVKRKDSRG

SEQ ID NO: 12425 - protein, 626 aa, synthetic construct
MALPVTALLLPLALLLHAARPDFVMTQSPDSLAVSLGERVTMSCKSSQSLLNSGNQKNYLTWYQQKPGQPPKLLIYWASTRESGVPDRFSGSGSGTDFTLTISSLQAEDVAVYYCQNDYSYPYTFGQGTKLEIKLEDLKNVFPPEVAVFEPSEAEISHTQKATLVCLATGFYPDHVELSWWVNGKEVHSGVCTDPQPLKEQPALNDSRYCLSSRLRVSATFWQNPRNHFRCQVQFYGLSENDEWTQDRAKPVTQIVSAEAWGRADCDVKLVEKSFETDTNLNFQNLSVIGFRILLLKVAGFNLLMTLRLWSSRAKRSGSGATNFSLLKQAGDVEENPGPTSMDWIWRILFLVGAATGAHSFEQVQLVQSGAELKKPGASVKVSCKASGYTFTDYYMKWVRQAPGQGLEWIGDIIPSNGATFYNQKFKGRVTITVDKSTSTAYMELSSLRSEDTAVYYCARSHLLRASWFAYWGQGTLVTVSSTRIQNPDPAVYQLRDSKSSDKSVCLFTDFDSQTNVSQSKDSDVYITDKCVLDMRSMDFKSNSAVAWSNKSDFACANAFNNSIIPEDTFFPSPESSCGFTSESYQQGVLSATILYEILLGKATLYAVLVSALVLMAMVKRKDSRG

SEQ ID NO: 12426 - protein, 616 aa, synthetic construct
MALPVTALLLPLALLLHAARPDVQITQSPSYLAASPGETITINCRASKSISKDLAWYQEKPGKTNKLLIYSGSTLQSGIPSRFSGSGSGTDFTLTISSLEPEDFAMYYCQQHNKYPYTFGGGTKLEIKRLEDLKNVFPPEVAVFEPSEAEISHTQKATLVCLATGFYPDHVELSWWVNGKEVHSGVCTDPQPLKEQPALNDSRYCLSSRLRVSATFWQNPRNHFRCQVQFYGLSENDEWTQDRAKPVTQIVSAEAWGRADCDVKLVEKSFETDTNLNFQNLSVIGFRILLLKVAGFNLLMTLRLWSSRAKRSGSGATNFSLLKQAGDVEENPGPTSMDWIWRILFLVGAATGAHSFEQVQLQQPGAELVRPGASVKLSCKASGYTFTSYWMNWVKQRPDQGLEWIGRIDPYDSETHYNQKFKDKAILTVDKSSSTAYMQLSSLTSEDSAVYYCARGNWDDYWGQGTTLTVSSTRIQNPDPAVYQLRDSKSSDKSVCLFTDFDSQTNVSQSKDSDVYITDKCVLDMRSMDFKSNSAVAWSNKSDFACANAFNNSIIPEDTFFPSPESSCGFTSESYQQGVLSATILYEILLGKATLYAVLVSALVLMAMVKRKDSRG

SEQ ID NO: 12427 - protein, 618 aa, synthetic construct
MALPVTALLLPLALLLHAARPEIVLTQSPTSMTASPGEQVTITCRASSSINYMHWYQQKPGASPRPWIYETSKLASGVPDRFSGSASGTSYSLTINNMEAEDAATYYCQQWNYPSWTFGGGTKLELKLEDLKNVFPPEVAVFEPSEAEISHTQKATLVCLATGFYPDHVELSWWVNGKEVHSGVCTDPQPLKEQPALNDSRYCLSSRLRVSATFWQNPRNHFRCQVQFYGLSENDEWTQDRAKPVTQIVSAEAWGRADCDVKLVEKSFETDTNLNFQNLSVIGFRILLLKVAGFNLLMTLRLWSSRAKRSGSGATNFSLLKQAGDVEENPGPTSMDWIWRILFLVGAATGAHSFEEVQLVESGGGLVQPGRSLKLSCAASGFTFSDYNMAWVRQAPKKGLEWVATILYDGGRTYYRGSVKGRFTISRDNAKSTLYLRMDSLRSEDTATYYCATHSRGTDYFDYWGQGVMVTVSSTRIQNPDPAVYQLRDSKSSDKSVCLFTDFDSQTNVSQSKDSDVYITDKCVLDMRSMDFKSNSAVAWSNKSDFACANAFNNSIIPEDTFFPSPESSCGFTSESYQQGVLSATILYEILLGKATLYAVLVSALVLMAMVKRKDSRG

SEQ ID NO: 12428 - protein, 627 aa, synthetic construct
MALPVTALLLPLALLLHAARPDIVMTQSPSSLAVSEGETVTINCKSSQSFLSSGDGKNYVAWYQYKPGQSPKLLIYWASTRQSGVPDRFIGSGSGTDFTLTISTVQAEDLAIYYCQQYYDTPLTFGSGTKLEIKLEDLKNVFPPEVAVFEPSEAEISHTQKATLVCLATGFYPDHVELSWWVNGKEVHSGVCTDPQPLKEQPALNDSRYCLSSRLRVSATFWQNPRNHFRCQVQFYGLSENDEWTQDRAKPVTQIVSAEAWGRADCDVKLVEKSFETDTNLNFQNLSVIGFRILLLKVAGFNLLMTLRLWSSRAKRSGSGATNFSLLKQAGDVEENPGPTSMDWIWRILFLVGAATGAHSFEEVKLQESGPSLVQSSQTLSLTCTVSGFSLTSYHIHWVRQTPGKGLEWMGVMWSDGDTSYNSALKSRLSISRDTSQSQVFLKMNSLQTEDTATYYCARGYYSSYLYLWFAYWGQGTLVTVSSTRIQNPDPAVYQLRDSKSSDKSVCLFTDFDSQTNVSQSKDSDVYITDKCVLDMRSMDFKSNSAVAWSNKSDFACANAFNNSIIPEDTFFPSPESSCGFTSESYQQGVLSATILYEILLGKATLYAVLVSALVLMAMVKRKDSRG

SEQ ID NO: 12429 - protein, 631 aa, synthetic construct
MALPVTALLLPLALLLHAARPDVLMTQTPVSLPVSLGGQVSISCRSSQSLVHSDGDTYLHWYLQKPGQSPQLLIYRVSNRFSGVPDRFSGSGSGTDFTLKISRVEPEDLGLYYCLQTTHFPPWTFGGGTKLEMKLEDLKNVFPPEVAVFEPSEAEISHTQKATLVCLATGFYPDHVELSWWVNGKEVHSGVCTDPQPLKEQPALNDSRYCLSSRLRVSATFWQNPRNHFRCQVQFYGLSENDEWTQDRAKPVTQIVSAEAWGRADCDVKLVEKSFETDTNLNFQNLSVIGFRILLLKVAGFNLLMTLRLWSSRAKRSGSGATNFSLLKQAGDVEENPGPTSMDWIWRILFLVGAATGAHSFEQVQLQQSGPELRRPGSSVRLSCKASGYRIKDFLIHWIKNRPEHGLEWIGWIDPEDGETKYAQKFQTKATLTADTSSNTAYMQLSSLTSEDTATYFCARWGDVYYGLMRGHVMDAWGQGTSVTVSSTRIQNPDPAVYQLRDSKSSDKSVCLFTDFDSQTNVSQSKDSDVYITDKCVLDMRSMDFKSNSAVAWSNKSDFACANAFNNSIIPEDTFFPSPESSCGFTSESYQQGVLSATILYEILLGKATLYAVLVSALVLMAMVKRKDSRG

SEQ ID NO: 12430 - protein, 626 aa, synthetic construct
MALPVTALLLPLALLLHAARPDIVMTQSPATLSLSPGERATLSCRSSKSLQNVNGNTYLYWFQQKPGQSPQLLIYRMSNLNSGVPDRFSGSGSGTEFTLTISSLEPEDFAVYYCMQHLEYPITFGAGTKLEIKLEDLKNVFPPEVAVFEPSEAEISHTQKATLVCLATGFYPDHVELSWWVNGKEVHSGVCTDPQPLKEQPALNDSRYCLSSRLRVSATFWQNPRNHFRCQVQFYGLSENDEWTQDRAKPVTQIVSAEAWGRADCDVKLVEKSFETDTNLNFQNLSVIGFRILLLKVAGFNLLMTLRLWSSRAKRSGSGATNFSLLKQAGDVEENPGPTSMDWIWRILFLVGAATGAHSFEEVQLVESGGGLVKPGGSLKLSCAASGYTFTSYVMHWVRQAPGKGLEWIGYINPYNDGTKYNEKFQGRVTISSDKSISTAYMELSSLRSEDTAMYYCARGTYYYGTRVFDYWGQGTLVTVSSTRIQNPDPAVYQLRDSKSSDKSVCLFTDFDSQTNVSQSKDSDVYITDKCVLDMRSMDFKSNSAVAWSNKSDFACANAFNNSIIPEDTFFPSPESSCGFTSESYQQGVLSATILYEILLGKATLYAVLVSALVLMAMVKRKDSRG

SEQ ID NO: 12431 - protein, 622 aa, synthetic construct; identical to SEQ ID NO: 9442

SEQ ID NO: 12432 - protein, 624 aa, synthetic construct
MALPVTALLLPLALLLHAARPQIVLSQSPAILSASPGEKVTMTCRASSSVSYMHWYQQKPGSSPKPWIYATSNLASGVPARFSGSGSGTSYSFTISRVEAEDAATYYCQQWTFNPPTFGGGTRLEIKRTVAALEDLKNVFPPEVAVFEPSEAEISHTQKATLVCLATGFYPDHVELSWWVNGKEVHSGVCTDPQPLKEQPALNDSRYCLSSRLRVSATFWQNPRNHFRCQVQFYGLSENDEWTQDRAKPVTQIVSAEAWGRADCDVKLVEKSFETDTNLNFQNLSVIGFRILLLKVAGFNLLMTLRLWSSRAKRSGSGATNFSLLKQAGDVEENPGPTSMDWIWRILFLVGAATGAHSFEQAYLQQSGAELVRPGASVKMSCKASGYTFTSYNMHWVKQTPRQGLEWIGGIYPGNGDTSYNQKFKGKATLTVGKSSSTAYMQLSSLTSEDSAVYFCARYDYNYAMDYWGQGTSVTVSSASTRIQNPDPAVYQLRDSKSSDKSVCLFTDFDSQTNVSQSKDSDVYITDKCVLDMRSMDFKSNSAVAWSNKSDFACANAFNNSIIPEDTFFPSPESSCGFTSESYQQGVLSATILYEILLGKATLYAVLVSALVLMAMVKRKDSRG

SEQ ID NO: 12433 - protein, 622 aa, synthetic construct
MALPVTALLLPLALLLHAARPEIVLTQSPATLSLSPGERATLSCRASQSVSSYLAWYQQKPGQAPRLLIYDASNRATGIPARFSGSGSGTDFTLTISSLEPEDFAVYYCQQRSNWPITFGQGTRLEIKLEDLKNVFPPEVAVFEPSEAEISHTQKATLVCLATGFYPDHVELSWWVNGKEVHSGVCTDPQPLKEQPALNDSRYCLSSRLRVSATFWQNPRNHFRCQVQFYGLSENDEWTQDRAKPVTQIVSAEAWGRADCDVKLVEKSFETDTNLNFQNLSVIGFRILLLKVAGFNLLMTLRLWSSRAKRSGSGATNFSLLKQAGDVEENPGPTSMDWIWRILFLVGAATGAHSFEEVQLVESGGGLVQPDRSLRLSCAASGFTFHDYAMHWVRQAPGKGLEWVSTISWNSGTIGYADSVKGRFTISRDNAKNSLYLQMNSLRAEDTALYYCAKDIQYGNYYYGMDVWGQGTTVTVSSTRIQNPDPAVYQLRDSKSSDKSVCLFTDFDSQTNVSQSKDSDVYITDKCVLDMRSMDFKSNSAVAWSNKSDFACANAFNNSIIPEDTFFPSPESSCGFTSESYQQGVLSATILYEILLGKATLYAVLVSALVLMAMVKRKDSRG

SEQ ID NO: 12434 - protein, 617 aa, synthetic construct
MALPVTALLLPLALLLHAARPDIQMTQSPSSLSASVGDRVTINCKASQDINSYLSWFQQKPGKAPKTLIYRANRLVDGVPSRFSGSGSGQDYTLTISSLQPEDFATYYCLQYDEFPLTFGGGTKVEIKLEDLKNVFPPEVAVFEPSEAEISHTQKATLVCLATGFYPDHVELSWWVNGKEVHSGVCTDPQPLKEQPALNDSRYCLSSRLRVSATFWQNPRNHFRCQVQFYGLSENDEWTQDRAKPVTQIVSAEAWGRADCDVKLVEKSFETDTNLNFQNLSVIGFRILLLKVAGFNLLMTLRLWSSRAKRSGSGATNFSLLKQAGDVEENPGPTSMDWIWRILFLVGAATGAHSFEQVQLVQSGAEVKKPGASVKVSCKASGYTFTNYDINWVRQAPGQGLEWIGWIYPGDGSTKYNEKFKAKATLTADTSTSTAYMELRSLRSDDTAVYYCASGYEDAMDYWGQGTTVTVSSTRIQNPDPAVYQLRDSKSSDKSVCLFTDFDSQTNVSQSKDSDVYITDKCVLDMRSMDFKSNSAVAWSNKSDFACANAFNNSIIPEDTFFPSPESSCGFTSESYQQGVLSATILYEILLGKATLYAVLVSALVLMAMVKRKDSRG

SEQ ID NO: 12435 - protein, 619 aa, synthetic construct
MALPVTALLLPLALLLHAARPDIVMTQTPLSLSVTPGQPASISCKSSQSLLDGDGKTYLNWLLQKPGQSPQRLIYLVSKLDSGVPDRFSGSGSGTDFTLKISRVEAEDVGVYYCWQGTHFPRTFGQGTKLEIKLEDLKNVFPPEVAVFEPSEAEISHTQKATLVCLATGFYPDHVELSWWVNGKEVHSGVCTDPQPLKEQPALNDSRYCLSSRLRVSATFWQNPRNHFRCQVQFYGLSENDEWTQDRAKPVTQIVSAEAWGRADCDVKLVEKSFETDTNLNFQNLSVIGFRILLLKVAGFNLLMTLRLWSSRAKRSGSGATNFSLLKQAGDVEENPGPTSMDWIWRILFLVGAATGAHSFEQVQLVQSGAEVKKPGASVKVSCKASGYTFKDTYIHWVRQAPGQGLEWMGRIDPANGNTKYDPKFQGRVTMTRDTSISTAYMELSRLRSDDTAVYYCARRGGVDWGQGTLVTVSSTRIQNPDPAVYQLRDSKSSDKSVCLFTDFDSQTNVSQSKDSDVYITDKCVLDMRSMDFKSNSAVAWSNKSDFACANAFNNSIIPEDTFFPSPESSCGFTSESYQQGVLSATILYEILLGKATLYAVLVSALVLMAMVKRKDSRG

SEQ ID NO: 12436 - protein, 620 aa, synthetic construct
MALPVTALLLPLALLLHAARPDIQMTQSPSSLSASVGDRVTITCKASQDVSTAVAWFQQKPGKAPKLLIYSPSYRYTGVPSRFSGSGSGTDFTLTISSLQPEDFTYYCQQLYSTPYTFGQGTKVEIKLEDLKNVFPPEVAVFEPSEAEISHTQKATLVCLATGFYPDHVELSWWVNGKEVHSGVCTDPQPLKEQPALNDSRYCLSSRLRVSATFWQNPRNHFRCQVQFYGLSENDEWTQDRAKPVTQIVSAEAWGRADCDVKLVEKSFETDTNLNFQNLSVIGFRILLLKVAGFNLLMTLRLWSSRAKRSGSGATNFSLLKQAGDVEENPGPTSMDWIWRILFLVGAATGAHSFEEVQLVQSGAEVKKPGASVKVSCKASGYTFTDYYLDVVVRQAPGQGLEWIGRVNPYNGGTIYNQKFKGRVTLTRDTSTSTAYLELSSLRSEDTAVYYCARDHYRYDPLLDYWGQGTLVTVSSTRIQNPDPAVYQLRDSKSSDKSVCLFTDFDSQTNVSQSKDSDVYITDKCVLDMRSMDFKSNSAVAWSNKSDFACANAFNNSIIPEDTFFPSPESSCGFTSESYQQGVLSATILYEILLGKATLYAVLVSALVLMAMVKRKDSRG

SEQ ID NO: 12437 - protein, 626 aa, synthetic construct
MALPVTALLLPLALLLHAARPDIQMTQSPSSLSASVGDRVTITCRASQSVSTSSYNYMHWYQQKPGKPPKLLIKYASNLESGVPSRFSGSGSGTDFTLTISSLQPEDFATYYCQHSWEIPLTFGQGTKVEIKLEDLKNVFPPEVAVFEPSEAEISHTQKATLVCLATGFYPDHVELSWWVNGKEVHSGVCTDPQPLKEQPALNDSRYCLSSRLRVSATFWQNPRNHFRCQVQFYGLSENDEWTQDRAKPVTQIVSAEAWGRADCDVKLVEKSFETDTNLNFQNLSVIGFRILLLKVAGFNLLMTLRLWSSRAKRSGSGATNFSLLKQAGDVEENPGPTSMDWIWRILFLVGAATGAHSFEEVQLVQSGAEVKKPGASVKVSCKASGYSFTDYYMHWVRQAPGQGLEWIGRINPYNGAAFYSQNFKDRVTLTVDTSTSTAYLELSSLRSEDTAVYYCAIERGADLEGYAMDYWGQGTLVTVSSTRIQNPDPAVYQLRDSKSSDKSVCLFTDFDSQTNVSQSKDSDVYITDKCVLDMRSMDFKSNSAVAWSNKSDFACANAFNNSIIPEDTFFPSPESSCGFTSESYQQGVLSATILYEILLGKATLYAVLVSALVLMAMVKRKDSRG

SEQ ID NO: 12438 - protein, 624 aa, synthetic construct
MALPVTALLLPLALLLHAARPEIVLTQSPATLSASPGERVTLTCRASSNVISSYVHWYQQKPGSSPRLFLYSTSNLASGVPSRFSGSGSGTDFTFTISSLEAEDAATYYCQQYSGYPLTFGQGTRLEIKLEDLKNVFPPEVAVFEPSEAEISHTQKATLVCLATGFYPDHVELSWWVNGKEVHSGVCTDPQPLKEQPALNDSRYCLSSRLRVSATFWQNPRNHFRCQVQFYGLSENDEWTQDRAKPVTQIVSAEAWGRADCDVKLVEKSFETDTNLNFQNLSVIGFRILLLKVAGFNLLMTLRLWSSRAKRSGSGATNFSLLKQAGDVEENPGPTSMDWIWRILFLVGAATGAHSFEQVQLQESGPGLVKPSETLSLTCAVSGYSITSAYYWNWIRQPPGKGLEWIGYISYDGRNNYNPSLKNRITINPDTSKNQFSLQLNSVTPEDTAVYYCAREGDYDVGNYYAMDYWGQGTLVTVSSTRIQNPDPAVYQLRDSKSSDKSVCLFTDFDSQTNVSQSKDSDVYITDKCVLDMRSMDFKSNSAVAWSNKSDFACANAFNNSIIPEDTFFPSPESSCGFTSESYQQGVLSATILYEILLGKATLYAVLVSALVLMAMVKRKDSRG

SEQ ID NO: 12439 - protein, 624 aa, synthetic construct
MALPVTALLLPLALLLHAARPEIVLTQSPATLSLSPGERATLSCRASSNVISSYVHWYQQKPGQAPRLLIYSTSNLASGIPARFSGSGSGTDFTLTISSLEPEDFAVYYCQQYSGYPLTFGQGTRLEIKLEDLKNVFPPEVAVFEPSEAEISHTQKATLVCLATGFYPDHVELSWWVNGKEVHSGVCTDPQPLKEQPALNDSRYCLSSRLRVSATFWQNPRNHFRCQVQFYGLSENDEWTQDRAKPVTQIVSAEAWGRADCDVKLVEKSFETDTNLNFQNLSVIGFRILLLKVAGFNLLMTLRLWSSRAKRSGSGATNFSLLKQAGDVEENPGPTSMDWIWRILFLVGAATGAHSFEEVQLVESGGGLVQPGRSLRLSCAASGYSITSAYYWNWVRQAPGKGLEWVSYISYDGRNNYNPSLKNRFTISRDNAKKSLYLQMNSLRAEDTALYYCAKEGDYDVGNYYAMDYWGQGTTVTVSSTRIQNPDPAVYQLRDSKSSDKSVCLFTDFDSQTNVSQSKDSDVYITDKCVLDMRSMDFKSNSAVAWSNKSDFACANAFNNSIIPEDTFFPSPESSCGFTSESYQQGVLSATILYEILLGKATLYAVLVSALVLMAMVKRKDSRG

SEQ ID NO: 12440 - protein, 623 aa, synthetic construct
MALPVTALLLPLALLLHAARPDVVMTQTPLSLPVSLGDQASISCRSSQSLVHSNGNTYLRWYLQKPGQSPKVLIYKVSNRVSGVPDRFSGSGSGTDFTLKINRVEAEDLGVYFCSQSTHVPWTFGGGTKLEIKLEDLKNVFPPEVAVFEPSEAEISHTQKATLVCLATGFYPDHVELSWWVNGKEVHSGVCTDPQPLKEQPALNDSRYCLSSRLRVSATFWQNPRNHFRCQVQFYGLSENDEWTQDRAKPVTQIVSAEAWGRADCDVKLVEKSFETDTNLNFQNLSVIGFRILLLKVAGFNLLMTLRLWSSRAKRSGSGATNFSLLKQAGDVEENPGPTSMDWIWRILFLVGAATGAHSFEGVKLDETGGGLVQPGGAMKLSCVTSGFTFGHYWMNWVRQSPEKGLEWVAQFRNKPYNYETYYSDSVKGRFTISRDDSKSSVYLQMNNLRVEDTGIYYCTGASYGMEYLGQGTSVTVSTTRIQNPDPAVYQLRDSKSSDKSVCLFTDFDSQTNVSQSKDSDVYITDKCVLDMRSMDFKSNSAVAWSNKSDFACANAFNNSIIPEDTFFPSPESSCGFTSESYQQGVLSATILYEILLGKATLYAVLVSALVLMAMVKRKDSRG

SEQ ID NO: 12441 - protein, 629 aa, synthetic construct
MALPVTALLLPLALLLHAARPQVQLVESGGNLVQPGGSLRLSCAASGFTFGSFSMSWVRQAPGGGLEWVAGLSARSSLTHYADSVKGRFTISRDNAKNSVYLQMNSLRVEDTAVYYCARRSYDSSGYWGHFYSYMDVWGQGTLVTVSLEDLKNVFPPEVAVFEPSEAEISHTQKATLVCLATGFYPDHVELSWWVNGKEVHSGVCTDPQPLKEQPALNDSRYCLSSRLRVSATFWQNPRNHFRCQVQFYGLSENDEWTQDRAKPVTQIVSAEAWGRADCDVKLVEKSFETDTNLNFQNLSVIGFRILLLKVAGFNLLMTLRLWSSRAKRSGSGATNFSLLKQAGDVEENPGPTSMDWIWRILFLVGAATGAHSFESVLTQPSSVSAAPGQKVTISCSGSTSNIGNNYVSWYQQHPGKAPKLMIYDVSKRPSGVPDRFSGSKSGNSASLDISGLQSEDEADYYCAAWDDSLSEFLFGTGTKLTVLGTRIQNPDPAVYQLRDSKSSDKSVCLFTDFDSQTNVSQSKDSDVYITDKCVLDMRSMDFKSNSAVAWSNKSDFACANAFNNSIIPEDTFFPSPESSCGFTSESYQQGVLSATILYEILLGKATLYAVLVSALVLMAMVKRKDSRG

SEQ ID NO: 12442 - protein, 624 aa, synthetic construct
MALPVTALLLPLALLLHAARPDVVMTQSPSSLSASVGDRVTITCQSSLDISHYLNWYQQKPGKAPKLLIYDASNLETGVPSRFSGSGSGTHFTFTISSLQPEDFATYYCQQYDNLPLTFGGGTKLEIKRLEDLKNVFPPEVAVFEPSEAEISHTQKATLVCLATGFYPDHVELSWWVNGKEVHSGVCTDPQPLKEQPALNDSRYCLSSRLRVSATFWQNPRNHFRCQVQFYGLSENDEWTQDRAKPVTQIVSAEAWGRADCDVKLVEKSFETDTNLNFQNLSVIGFRILLLKVAGFNLLMTLRLWSSRAKRSGSGATNFSLLKQAGDVEENPGPTSMDWIWRILFLVGAATGAHSFEQVQLVQSGGGVVQPGGSLRVSCAASGVTLSDYGMHWVRQAPGKGLEWVAFIRNDGSDKYYADSVKGRFTISRDNSEKTVSLQMSSLRAEDTAVYYCAKNGESGPLDYWYLDLWGRGTLVTVSSTRIQNPDPAVYQLRDSKSSDKSVCLFTDFDSQTNVSQSKDSDVYITDKCVLDMRSMDFKSNSAVAWSNKSDFACANAFNNSIIPEDTFFPSPESSCGFTSESYQQGVLSATILYEILLGKATLYAVLVSALVLMAMVKRKDSRG

SEQ ID NO: 12443 - protein, 628 aa, synthetic construct
MALPVTALLLPLALLLHAARPSYELTQPPSVSGTPGQRVAISCSGSSSNIGTRMVTWYQHVPGTAPKLLIFNNNQRPSGVPDRFSASKSGTSASLAIIGLQSDDEADYYCATWDDNVKSYVFGTGTKVTVLGSRLEDLKNVFPPEVAVFEPSEAEISHTQKATLVCLATGFYPDHVELSWWVNGKEVHSGVCTDPQPLKEQPALNDSRYCLSSRLRVSATFWQNPRNHFRCQVQFYGLSENDEWTQDRAKPVTQIVSAEAWGRADCDVKLVEKSFETDTNLNFQNLSVIGFRILLLKVAGFNLLMTLRLWSSRAKRSGSGATNFSLLKQAGDVEENPGPTSMDWIWRILFLVGAATGAHSFELEMAQVQLQQWGAGLLKPSETLSLTCAVYGGSFSGYYWSWIRQPPGKGLEWIGEINHSGSTNYNPSLKSRVTISVDTSKNQFSLKLSSVTAADTAVYYCARAPQSWYVGDVWGQGTLVTVSSTRIQNPDPAVYQLRDSKSSDKSVCLFTDFDSQTNVSQSKDSDVYITDKCVLDMRSMDFKSNSAVAWSNKSDFACANAFNNSIIPEDTFFPSPESSCGFTSESYQQGVLSATILYEILLGKATLYAVLVSALVLMAMVKRKDSRG

SEQ ID NO: 12444 - protein, 625 aa, synthetic construct
MALPVTALLLPLALLLHAARPQSVLTQPPSLSVAPGKTASITCGGNNIGMKSVHWYQQRPGQAPVLVIYYDSDRPSGIPGRFSGSNSGNTATLTISRVEAGDEADYYCQVWDTTGDHPGYVFGTGTKVTVLLEDLKNVFPPEVAVFEPSEAEISHTQKATLVCLATGFYPDHVELSWWVNGKEVHSGVCTDPQPLKEQPALNDSRYCLSSRLRVSATFWQNPRNHFRCQVQFYGLSENDEWTQDRAKPVTQIVSAEAWGRADCDVKLVEKSFETDTNLNFQNLSVIGFRILLLKVAGFNLLMTLRLWSSRAKRSGSGATNFSLLKQAGDVEENPGPTSMDWIWRILFLVGAATGAHSFEQVQLVQSGAEVKKPGSSVKVSCKASGGTFSSYAISWVRQAPGQGLEWMGGIIPIFGTANYAQKFQGRVTITADESTSTAYMELSSLRSEDTAVYYCARGVYGYSGSAPYDEWGQGTLVTVSSTRIQNPDPAVYQLRDSKSSDKSVCLFTDFDSQTNVSQSKDSDVYITDKCVLDMRSMDFKSNSAVAWSNKSDFACANAFNNSIIPEDTFFPSPESSCGFTSESYQQGVLSATILYEILLGKATLYAVLVSALVLMAMVKRKDSRG

SEQ ID NO: 12445 - protein, 623 aa, synthetic construct
MALPVTALLLPLALLLHAARPEVQLVESGGGLVQPGRSLRLSCAASGFTFDDYAMHWVRQAPGKGLEWVSGISWNSGSIGYADSVKGRFTISRDNAKNSLYLQMNSLRAEDTALYYCAKDKGGGYYDFWSGSDYWGQGTLVTVSSLEDLKNVFPPEVAVFEPSEAEISHTQKATLVCLATGFYPDHVELSWWVNGKEVHSGVCTDPQPLKEQPALNDSRYCLSSRLRVSATFWQNPRNHFRCQVQFYGLSENDEWTQDRAKPVTQIVSAEAWGRADCDVKLVEKSFETDTNLNFQNLSVIGFRILLLKVAGFNLLMTLRLWSSRAKRSGSGATNFSLLKQAGDVEENPGPTSMDWIWRILFLVGAATGAHSFESSELTQDPAVSVALGQTVRITCQGDSLRSYYASWYQQKPGQAPVLVIYGKNNRPSGIPDRFSGSSSGNTASLTITGAQAEDEADYYCNSRDSSGWVFGGGTKLTVLTRIQNPDPAVYQLRDSKSSDKSVCLFTDFDSQTNVSQSKDSDVYITDKCVLDMRSMDFKSNSAVAWSNKSDFACANAFNNSIIPEDTFFPSPESSCGFTSESYQQGVLSATILYEILLGKATLYAVLVSALVLMAMVKRKDSRG

SEQ ID NO: 12446 - protein, 632 aa, synthetic construct
MALPVTALLLPLALLLHAARPEVQLQQSGPGLVKPSQTLSLTCAISGDSVLSNSDTWNWIRQSPSRGLEWLGRTYHRSTWYDDYASSVRGRVSINVDTSKNQYSLQLNAVTPEDTGVYYCARDRLQDGNSWSDAFDVWGQGTMVTVSSLEDLKNVFPPEVAVFEPSEAEISHTQKATLVCLATGFYPDHVELSWWVNGKEVHSGVCTDPQPLKEQPALNDSRYCLSSRLRVSATFWQNPRNHFRCQVQFYGLSENDEWTQDRAKPVTQIVSAEAWGRADCDVKLVEKSFETDTNLNFQNLSVIGFRILLLKVAGFNLLMTLRLWSSRAKRSGSGATNFSLLKQAGDVEENPGPTSMDWIWRILFLVGAATGAHSFEQSALTQPASVSGSPGQSITISCTGTSSDVGGYNYVSWYQQHPGKAPKLMIYDVSNRPSGVSNRFSGSKSGNTASLTISGLQAEDEADYYCSSYTSSSTLVYVFGTGTKVTVLTRIQNPDPAVYQLRDSKSSDKSVCLFTDFDSQTNVSQSKDSDVYITDKCVLDMRSMDFKSNSAVAWSNKSDFACANAFNNSIIPEDTFFPSPESSCGFTSESYQQGVLSATILYEILLGKATLYAVLVSALVLMAMVKRKDSRG

SEQ ID NO: 12447 - protein, 610 aa, synthetic construct
MALPVTALLLPLALLLHAARPQVQLVQSGAEVKKPGASVKVSCKASGYTFTSYDINWVRQATGQGLEWMGWMNPNSGNTGYAQKFQGRVTMTRNTSISTAYMELSSLRSEDTAVYYCARGDSTKVEIKLEDLKNVFPPEVAVFEPSEAEISHTQKATLVCLATGFYPDHVELSWWVNGKEVHSGVCTDPQPLKEQPALNDSRYCLSSRLRVSATFWQNPRNHFRCQVQFYGLSENDEWTQDRAKPVTQIVSAEAWGRADCDVKLVEKSFETDTNLNFQNLSVIGFRILLLKVAGFNLLMTLRLWSSRAKRSGSGATNFSLLKQAGDVEENPGPTSMDWIWRILFLVGAATGAHSFEQSVLTQPRSVSGSPGQSVTISCTGTSSDVGGYNYVSWYQQHPGEAPKLIIYDADKRPSGISNRFSSGKSGNTASLTISGLQVEDEADYYCCSYAGGSTWVFGGGTKVTVLTRIQNPDPAVYQLRDSKSSDKSVCLFTDFDSQTNVSQSKDSDVYITDKCVLDMRSMDFKSNSAVAWSNKSDFACANAFNNSIIPEDTFFPSPESSCGFTSESYQQGVLSATILYEILLGKATLYAVLVSALVLMAMVKRKDSRG

SEQ ID NO: 12448 - protein, 632 aa, synthetic construct
MALPVTALLLPLALLLHAARPEVQLQQSGPGLVKPSQTLSLTCAISGDSVSSNSAAWNWIRQSPSRGLEWLGRTYYRSKWYSDYAVSVKSRITINPDTSKNQFSLQLNSVTPEDTAVYYCARDPYDFWSGYPDAFDIWGQGTMVTVSSLEDLKNVFPPEVAVFEPSEAEISHTQKATLVCLATGFYPDHVELSWWVNGKEVHSGVCTDPQPLKEQPALNDSRYCLSSRLRVSATFWQNPRNHFRCQVQFYGLSENDEWTQDRAKPVTQIVSAEAWGRADCDVKLVEKSFETDTNLNFQNLSVIGFRILLLKVAGFNLLMTLRLWSSRAKRSGSGATNFSLLKQAGDVEENPGPTSMDWIWRILFLVGAATGAHSFEQSALTQPASVSGSPGQSITISCTGTSSDVGGYNYVSWYQQHPGKAPKVIISEVNNRPSGVSHRFSGSKSGNTASLTISGLQAEDEADYFCSSYTSGRTLYVFGTGSKVTVLGTRIQNPDPAVYQLRDSKSSDKSVCLFTDFDSQTNVSQSKDSDVYITDKCVLDMRSMDFKSNSAVAWSNKSDFACANAFNNSIIPEDTFFPSPESSCGFTSESYQQGVLSATILYEILLGKATLYAVLVSALVLMAMVKRKDSRG

SEQ ID NO: 12449 - protein, 631 aa, synthetic construct
MALPVTALLLPLALLLHAARPQSALTQPASASGSPGQSVTISCTGTSSDVGGYNYVSWYQQHPGKAPKLMIYDVSNRPSGVSNRFSGSKSGNTASLTISGLQAEDEADYYCSSYTSSSTLYVFGTGTQLTVLLEDLKNVFPPEVAVFEPSEAEISHTQKATLVCLATGFYPDHVELSWWVNGKEVHSGVCTDPQPLKEQPALNDSRYCLSSRLRVSATFWQNPRNHFRCQVQFYGLSENDEWTQDRAKPVTQIVSAEAWGRADCDVKLVEKSFETDTNLNFQNLSVIGFRILLLKVAGFNLLMTLRLWSSRAKRSGSGATNFSLLKQAGDVEENPGPTSMDWIWRILFLVGAATGAHSFEEVQLQQSGPGLVKPSQTLSLTCAISGDSMLSNSDTWNWIRQSPSRGLEWLGRTYHRSTWYDDYASSVRGRVSINVDTSKNQYSLQLNAVTPEDTGVYYCARVRLQDGNSWSDAFDVWGQGTMVTVSSTRIQNPDPAVYQLRDSKSSDKSVCLFTDFDSQTNVSQSKDSDVYITDKCVLDMRSMDFKSNSAVAWSNKSDFACANAFNNSIIPEDTFFPSPESSCGFTSESYQQGVLSATILYEILLGKATLYAVLVSALVLMAMVKRKDSRG

SEQ ID NO: 12450 - protein, 631 aa, synthetic construct
MALPVTALLLPLALLLHAARPDVMLTQTPLSLPVSLGDQASISCRSSQSILHSTGDTYLEWYLQKPGQSPKLLINKVSNRLSGVPDRFSGSGSGTDFTLKISRVEAEDLGVYYCFQGSHVPWTFGGGTKLEIKRADAAPTVSIFPLEDLKNVFPPEVAVFEPSEAEISHTQKATLVCLATGFYPDHVELSWWVNGKEVHSGVCTDPQPLKEQPALNDSRYCLSSRLRVSATFWQNPRNHFRCQVQFYGLSENDEWTQDRAKPVTQIVSAEAWGRADCDVKLVEKSFETDTNLNFQNLSVIGFRILLLKVAGFNLLMTLRLWSSRAKRSGSGATNFSLLKQAGDVEENPGPTSMDWIWRILFLVGAATGAHSFEQVKLQQSGPSLVKPGASVKMSCKASGYTFTDFYMKWVKQSHGKSLEWIGDINPNIGDTFYNQKFKGKATLTVDKSSSTAYMQLNSLTSEDSAVYFCSVGYFDVWGAGTTVTVSSTRIQNPDPAVYQLRDSKSSDKSVCLFTDFDSQTNVSQSKDSDVYITDKCVLDMRSMDFKSNSAVAWSNKSDFACANAFNNSIIPEDTFFPSPESSCGFTSESYQQGVLSATILYEILLGKATLYAVLVSALVLMAMVKRKDSRG

SEQ ID NO: 12451 - protein, 627 aa, synthetic construct
MALPVTALLLPLALLLHAARPEIVLTQSPATLSLSPGERATLSCRASQSVSIYLAWYQQKPGQAPRLLIYDASNRATGIPARFSGSGSGTDFTLTISSLEPEDFAVYYCQQRSNWPPFTFGPGTKVDIKLEDLKNVFPPEVAVFEPSEAEISHTQKATLVCLATGFYPDHVELSWWVNGKEVHSGVCTDPQPLKEQPALNDSRYCLSSRLRVSATFWQNPRNHFRCQVQFYGLSENDEWTQDRAKPVTQIVSAEAWGRADCDVKLVEKSFETDTNLNFQNLSVIGFRILLLKVAGFNLLMTLRLWSSRAKRSGSGATNFSLLKQAGDVEENPGPTSMDWIWRILFLVGAATGAHSFEQVQLVESGGGVVQPGRSLRLSCAASGFTFSSYGMHWVRQAPGKGLEWVAVIWDDGSNKYYVDSVKGRFTISRDNSKNTLYLQMNSLRAEDTAVYYCARDDYYGSGSFNSYYGTDVWGQGTTVTVSSTRIQNPDPAVYQLRDSKSSDKSVCLFTDFDSQTNVSQSKDSDVYITDKCVLDMRSMDFKSNSAVAWSNKSDFACANAFNNSIIPEDTFFPSPESSCGFTSESYQQGVLSATILYEILLGKATLYAVLVSALVLMAMVKRKDSRG

SEQ ID NO: 12452 - protein, 612 aa, synthetic construct
MALPVTALLLPLALLLHAARPDIQMTQSPSSLSASVGDRVTITCRASQGISSWLAWYQQKPEKAPKSLIYAASSLQSGVPSRFSGSGSGTDFTLTISSLQPEDFATYYCQQYNSYPYTFGQGTKLEIKLEDLKNVFPPEVAVFEPSEAEISHTQKATLVCLATGFYPDHVELSWWVNGKEVHSGVCTDPQPLKEQPALNDSRYCLSSRLRVSATFWQNPRNHFRCQVQFYGLSENDEWTQDRAKPVTQIVSAEAWGRADCDVKLVEKSFETDTNLNFQNLSVIGFRILLLKVAGFNLLMTLRLWSSRAKRSGSGATNFSLLKQAGDVEENPGPTSMDWIWRILFLVGAATGAHSFEEVQLVQSGGGLVHPGGSLRLSCAGSGFTFSTYLMYWVRQAPGKTLEWVSAIGSGGDTYYADSVKGRFTISRDNAKNSLYLQMNSLRAEDMAVYYCARGLGYWGQGTLVTVSSTRIQNPDPAVYQLRDSKSSDKSVCLFTDFDSQTNVSQSKDSDVYITDKCVLDMRSMDFKSNSAVAWSNKSDFACANAFNNSIIPEDTFFPSPESSCGFTSESYQQGVLSATILYEILLGKATLYAVLVSALVLMAMVKRKDSRG

SEQ ID NO: 12453 - protein, 631 aa, synthetic construct
MALPVTALLLPLALLLHAARPLPVLTQPPSVSVAPGKTARITCGGNNIGSKSVHWYQQKPGQAPVLVVYDDSDRPSGIPERFSGSNSGNTATLTISRVEAGDEADYYCQVWDSSSDYVVFGGGTKLTVLLEDLKNVFPPEVAVFEPSEAEISHTQKATLVCLATGFYPDHVELSWWVNGKEVHSGVCTDPQPLKEQPALNDSRYCLSSRLRVSATFWQNPRNHFRCQVQFYGLSENDEWTQDRAKPVTQIVSAEAWGRADCDVKLVEKSFETDTNLNFQNLSVIGFRILLLKVAGFNLLMTLRLWSSRAKRSGSGATNFSLLKQAGDVEENPGPTSMDWIWRILFLVGAATGAHSFEEVQLVQSGAEVKKPGESLKISCKGSGYSFTSYWIGWVRQMPGKGLEWMGIIYPGDSDTRYSPSFQGQVTISADKSISTAYLQWSSLKASDTAMYYCARQVWGWQGGMYPRSNWWYNLDSWGQGTLVTVSSTRIQNPDPAVYQLRDSKSSDKSVCLFTDFDSQTNVSQSKDSDVYITDKCVLDMRSMDFKSNSAVAWSNKSDFACANAFNNSIIPEDTFFPSPESSCGFTSESYQQGVLSATILYEILLGKATLYAVLVSALVLMAMVKRKDSRG

SEQ ID NO: 12454 - protein, 624 aa, synthetic construct
MALPVTALLLPLALLLHAARPELVMTQSPASLAVSLGQRATISCRASESVDSYGKSFMHWYQLKPGQPPKLLIYRASNLESGVPARFSGSGSRTDFTLTIDPVEADDAATYYCQQNNEDPWTFGGGTKLEIKLEDLKNVFPPEVAVFEPSEAEISHTQKATLVCLATGFYPDHVELSWWVNGKEVHSGVCTDPQPLKEQPALNDSRYCLSSRLRVSATFWQNPRNHFRCQVQFYGLSENDEWTQDRAKPVTQIVSAEAWGRADCDVKLVEKSFETDTNLNFQNLSVIGFRILLLKVAGFNLLMTLRLWSSRAKRSGSGATNFSLLKQAGDVEENPGPTSMDWIWRILFLVGAATGAHSFEEVQLEQSGPELVKPGASVKMSCKASGYTFTNYYMKWVKQSHGKSLEWIGDLNPNNGDTFYNQKFKGKATLTVDKSSNTAYMQLNSLTSEDSAVYYCARTGRYEENAMDYWGQGTSVTVSSTRIQNPDPAVYQLRDSKSSDKSVCLFTDFDSQTNVSQSKDSDVYITDKCVLDMRSMDFKSNSAVAWSNKSDFACANAFNNSIIPEDTFFPSPESSCGFTSESYQQGVLSATILYEILLGKATLYAVLVSALVLMAMVKRKDSRG

SEQ ID NO: 12455 - protein, 618 aa, synthetic construct
MALPVTALLLPLALLLHAARPDVVMTQSPSSLSASVGDRVTITCMASEDIYIRLAWYQQKPGNAPKLLIYAATSLETGVPSRFSGSGSGTDFTLTISSLQPEDFATYYCQQYWSSPWTFGGGTKVEIKLEDLKNVFPPEVAVFEPSEAEISHTQKATLVCLATGFYPDHVELSWWVNGKEVHSGVCTDPQPLKEQPALNDSRYCLSSRLRVSATFWQNPRNHFRCQVQFYGLSENDEWTQDRAKPVTQIVSAEAWGRADCDVKLVEKSFETDTNLNFQNLSVIGFRILLLKVAGFNLLMTLRLWSSRAKRSGSGATNFSLLKQAGDVEENPGPTSMDWIWRILFLVGAATGAHSFEQVQLQESGPGLVKPSQTLSLTCTVSGYSITSDYTWNWIRQPPGNGLEWIGYITYSGSTSYNPSLKSRVLISVDTSKNQVSLKLSSVTAADTAVYYCARLGRRYTMDYWGQGTTVTVSSTRIQNPDPAVYQLRDSKSSDKSVCLFTDFDSQTNVSQSKDSDVYITDKCVLDMRSMDFKSNSAVAWSNKSDFACANAFNNSIIPEDTFFPSPESSCGFTSESYQQGVLSATILYEILLGKATLYAVLVSALVLMAMVKRKDSRG

SEQ ID NO: 12456 - protein, 622 aa, synthetic construct; identical to SEQ ID NO: 12319

SEQ ID NO: 12457 - protein, 622 aa, synthetic construct
MALPVTALLLPLALLLHAARPDIVLTQSPATLSLSPGDRATLSCRASESVTILGSHLIYWYQQKPGQAPRLLIQLASNVQTGIPARFSGSGSRTDFTLTISSLEPEDFAVYYCLQSRTIPRTFGQGTKLEIKRLEDLKNVFPPEVAVFEPSEAEISHTQKATLVCLATGFYPDHVELSWWVNGKEVHSGVCTDPQPLKEQPALNDSRYCLSSRLRVSATFWQNPRNHFRCQVQFYGLSENDEWTQDRAKPVTQIVSAEAWGRADCDVKLVEKSFETDTNLNFQNLSVIGFRILLLKVAGFNLLMTLRLWSSRAKRSGSGATNFSLLKQAGDVEENPGPTSMDWIWRILFLVGAATGAHSFEQVQLVQSGSELKKPGESVKISCKASGYTFTHYSMNWVRQAPGQGLEWMGRINTETGEPLYADDFKGRFVFSLDTSASTAYLQISSLKAEDTAVYYCSNDYLYSLDYWGQGTLVTVSSTRIQNPDPAVYQLRDSKSSDKSVCLFTDFDSQTNVSQSKDSDVYITDKCVLDMRSMDFKSNSAVAWSNKSDFACANAFNNSIIPEDTFFPSPESSCGFTSESYQQGVLSATILYEILLGKATLYAVLVSALVLMAMVKRKDSRG

SEQ ID NO: 12458 - protein, 623 aa, synthetic construct
MALPVTALLLPLALLLHAARPDIQLTQSPSFLSASVGDRVTITCRASQGISTDLNWYQQKPGKAPKLLIYAASNLESGVPSRFSGSGSGTEFTLTISSLQPEDFATYYCQQSYNWPYTFGGGTKVEIKRLEDLKNVFPPEVAVFEPSEAEISHTQKATLVCLATGFYPDHVELSWWVNGKEVHSGVCTDPQPLKEQPALNDSRYCLSSRLRVSATFWQNPRNHFRCQVQFYGLSENDEWTQDRAKPVTQIVSAEAWGRADCDVKLVEKSFETDTNLNFQNLSVIGFRILLLKVAGFNLLMTLRLWSSRAKRSGSGATNFSLLKQAGDVEENPGPTSMDWIWRILFLVGAATGAHSFEEVQLVESGGGLVKPGGSLRLSCAASGFTFSNFEMNWVRQAPGKGLEWVSGISSNGRYINYADSVKGRFTISRDNAKNSLYLQMNSLRAEDTAVYYCARVVDFDQDYNGFDYWGQGTLVTVSSTRIQNPDPAVYQLRDSKSSDKSVCLFTDFDSQTNVSQSKDSDVYITDKCVLDMRSMDFKSNSAVAWSNKSDFACANAFNNSIIPEDTFFPSPESSCGFTSESYQQGVLSATILYEILLGKATLYAVLVSALVLMAMVKRKDSRG

SEQ ID NO: 12459 - protein, 621 aa, synthetic construct
MALPVTALLLPLALLLHAARPDIQLTQSPSFLSASVGDRVTITCSLSLGISTWRDWFPPRLGRGLEPLTYAASTLQSGVPSRFSGSGSGTEFTLTISSLQPEDFATYYCQQLNSYPLTFGGGTKVEIKRLEDLKNVFPPEVAVFEPSEAEISHTQKATLVCLATGFYPDHVELSWWVNGKEVHSGVCTDPQPLKEQPALNDSRYCLSSRLRVSATFWQNPRNHFRCQVQFYGLSENDEWTQDRAKPVTQIVSAEAWGRADCDVKLVEKSFETDTNLNFQNLSVIGFRILLLKVAGFNLLMTLRLWSSRAKRSGSGATNFSLLKQAGDVEENPGPTSMDWIWRILFLVGAATGAHSFEEVQLVESGGGLVKPGGSLRLSCAASGFTFSTYGMSWVRQAPGKGLEWVAYINNGSGYIYYADSVKGRFTISRDNAKNSLYLQMNSLRAEDTAVYYCARGQWWSGGDFDYWGQGTLVTVSSTRIQNPDPAVYQLRDSKSSDKSVCLFTDFDSQTNVSQSKDSDVYITDKCVLDMRSMDFKSNSAVAWSNKSDFACANAFNNSIIPEDTFFPSPESSCGFTSESYQQGVLSATILYEILLGKATLYAVLVSALVLMAMVKRKDSRG

SEQ ID NO: 12460 - protein, 622 aa, synthetic construct
MALPVTALLLPLALLLHAARPEIVLTQSPATLSLSPGERATLSCSASSSVSYMYWYQQKPGQAPRLLIYRTSNLASGIPARFSGSGSGTDFTLTISSLEPEDFAVYYCQQYHSYPTTFGQGTKVEIKRTVLEDLKNVFPPEVAVFEPSEAEISHTQKATLVCLATGFYPDHVELSWWVNGKEVHSGVCTDPQPLKEQPALNDSRYCLSSRLRVSATFWQNPRNHFRCQVQFYGLSENDEWTQDRAKPVTQIVSAEAWGRADCDVKLVEKSFETDTNLNFQNLSVIGFRILLLKVAGFNLLMTLRLWSSRAKRSGSGATNFSLLKQAGDVEENPGPTSMDWIWRILFLVGAATGAHSFEEVQLVESGGGLVQPGGSLRLSCAASGFSFNTYAMNWVRQAPGKGLEWVSHIRSKSNNFATYYADSVKDRFTISRDNAKNSLYLQMNSLRAEDTAVYYCARQGGDFPMDYWGQGTLVTVSSTRIQNPDPAVYQLRDSKSSDKSVCLFTDFDSQTNVSQSKDSDVYITDKCVLDMRSMDFKSNSAVAWSNKSDFACANAFNNSIIPEDTFFPSPESSCGFTSESYQQGVLSATILYEILLGKATLYAVLVSALVLMAMVKRKDSRG

SEQ ID NO: 12461 - protein, 618 aa, synthetic construct
MALPVTALLLPLALLLHAARPDVVMTQSPSSLSASVGDRVTITCKASEDIYIRLAWYQQKPGKAPKLLIYAATSLETGVPSRFSGSGSGTDFTLTISSLQPEDFATYYCQQYWTTPWTFGGGTKVEIKLEDLKNVFPPEVAVFEPSEAEISHTQKATLVCLATGFYPDHVELSWWVNGKEVHSGVCTDPQPLKEQPALNDSRYCLSSRLRVSATFWQNPRNHFRCQVQFYGLSENDEWTQDRAKPVTQIVSAEAWGRADCDVKLVEKSFETDTNLNFQNLSVIGFRILLLKVAGFNLLMTLRLWSSRAKRSGSGATNFSLLKQAGDVEENPGPTSMDWIWRILFLVGAATGAHSFEQVQLQESGPGLVKPSQTLSLTCTVSGYSITIDYTWNWIRQPPGKGLEWIGYITYSGSTDYNPSLKSRVLISVDTSKNQVSLKLSSVTAADTAVYYCARLGRRYALDYWGQGTTVTVSSTRIQNPDPAVYQLRDSKSSDKSVCLFTDFDSQTNVSQSKDSDVYITDKCVLDMRSMDFKSNSAVAWSNKSDFACANAFNNSIIPEDTFFPSPESSCGFTSESYQQGVLSATILYEILLGKATLYAVLVSALVLMAMVKRKDSRG

SEQ ID NO: 12462 - protein, 623 aa, synthetic construct
MALPVTALLLPLALLLHAARPDIQMTQTTSSLSASLGDRVTISCRASQDISNYLNWYQQKPDGTVKLLIYYTSILHSGVPSRFSGSGSGTDYSLTISNLEQEDFATYFCQQGNTLPWTFGGGTKLEIKALEDLKNVFPPEVAVFEPSEAEISHTQKATLVCLATGFYPDHVELSWWVNGKEVHSGVCTDPQPLKEQPALNDSRYCLSSRLRVSATFWQNPRNHFRCQVQFYGLSENDEWTQDRAKPVTQIVSAEAWGRADCDVKLVEKSFETDTNLNFQNLSVIGFRILLLKVAGFNLLMTLRLWSSRAKRSGSGATNFSLLKQAGDVEENPGPTSMDWIWRILFLVGAATGAHSFEEVQLVESGGGLVKPGGSLKLSCAASGFAFSIYDMSWVRQTPEKRLEWVAYISSGGGTYYPDTVKGRFTISRDNAKNTLYLQMSSLKSEDTAMYYCARHSGYGTHWGVLFAYWGQGTLVTVSATRIQNPDPAVYQLRDSKSSDKSVCLFTDFDSQTNVSQSKDSDVYITDKCVLDMRSMDFKSNSAVAWSNKSDFACANAFNNSIIPEDTFFPSPESSCGFTSESYQQGVLSATILYEILLGKATLYAVLVSALVLMAMVKRKDSRG

SEQ ID NO: 12463 - protein, 633 aa, synthetic construct
MALPVTALLLPLALLLHAARPDIVMTQSPDSLAVSLGERATINCKSSQSLLYRSNQKNYLAWYQQKPGQPPKLLIYWASTRESGVPDRFSGSGSGTDFTLTISSLQAEDVAVYYCQQYYNYPRTFGQGTKVEIKRTVLEDLKNVFPPEVAVFEPSEAEISHTQKATLVCLATGFYPDHVELSWWVNGKEVHSGVCTDPQPLKEQPALNDSRYCLSSRLRVSATFWQNPRNHFRCQVQFYGLSENDEWTQDRAKPVTQIVSAEAWGRADCDVKLVEKSFETDTNLNFQNLSVIGFRILLLKVAGFNLLMTLRLWSSRAKRSGSGATNFSLLKQAGDVEENPGPTSMDWIWRILFLVGAATGAHSFEEVQLLESGGGLVQPGGSLRLSCAASGYSITSDYAWNWVRQAPGKGLEWVSYISNSGSTSYNPSLKSRFTISRDNSKNTLYLQMNSLRAEDTAVYYCAKERNYDYDDYYYAMDYWGQGTLVTVSSTRIQNPDPAVYQLRDSKSSDKSVCLFTDFDSQTNVSQSKDSDVYITDKCVLDMRSMDFKSNSAVAWSNKSDFACANAFNNSIIPEDTFFPSPESSCGFTSESYQQGVLSATILYEILLGKATLYAVLVSALVLMAMVKRKDSRG

SEQ ID NO: 12464 - protein, 626 aa, synthetic construct
MALPVTALLLPLALLLHAARPDVVMTQSPLSLPVTLGQPASISCRSSQSLLHSSGNTYLEWYQQRPGQSPRPLIYKISTRFSGVPDRFSGSGSGTDFTLKISRVEAEDVGVYYCFQGSHVPYTFGGGTKVEIKRLEDLKNVFPPEVAVFEPSEAEISHTQKATLVCLATGFYPDHVELSWWVNGKEVHSGVCTDPQPLKEQPALNDSRYCLSSRLRVSATFWQNPRNHFRCQVQFYGLSENDEWTQDRAKPVTQIVSAEAWGRADCDVKLVEKSFETDTNLNFQNLSVIGFRILLLKVAGFNLLMTLRLWSSRAKRSGSGATNFSLLKQAGDVEENPGPTSMDWIWRILFLVGAATGAHSFEQVQLVQSGAEVKKPGASVKVSCKASGLTIEDYYMHWVRQAPGQGLEWMGWIDPENGDTEYGPKFQGRVTMTRDTSINTAYMELSRLRSDDTAVYYCAVHNAHYGTWFAYWGQGTLVTVSSTRIQNPDPAVYQLRDSKSSDKSVCLFTDFDSQTNVSQSKDSDVYITDKCVLDMRSMDFKSNSAVAWSNKSDFACANAFNNSIIPEDTFFPSPESSCGFTSESYQQGVLSATILYEILLGKATLYAVLVSALVLMAMVKRKDSRG

SEQ ID NO: 12465 - protein, 618 aa, synthetic construct
MALPVTALLLPLALLLHAARPDIQMTQSPSSLSASVGDRVTITCRASENIYSNLAWYQQKPGKAPKLLIYAATNLADGVPSRFSGSGSGTDFTLTISSLQPEDFATYYCQHFWGTPTFGQGTKVEIKRTVLEDLKNVFPPEVAVFEPSEAEISHTQKATLVCLATGFYPDHVELSWWVNGKEVHSGVCTDPQPLKEQPALNDSRYCLSSRLRVSATFWQNPRNHFRCQVQFYGLSENDEWTQDRAKPVTQIVSAEAWGRADCDVKLVEKSFETDTNLNFQNLSVIGFRILLLKVAGFNLLMTLRLWSSRAKRSGSGATNFSLLKQAGDVEENPGPTSMDWIWRILFLVGAATGAHSFEEVQLVESGGGLVQPGGSLRLSCAASGFSLTNYGVHWVRQAPGKGLEWVSVIWSGGSTDYNAAFISRFTISADTSKNTAYLQMNSLRAEDTAVYYCARELIHAMDNWGQGTLVTVSSTRIQNPDPAVYQLRDSKSSDKSVCLFTDFDSQTNVSQSKDSDVYITDKCVLDMRSMDFKSNSAVAWSNKSDFACANAFNNSIIPEDTFFPSPESSCGFTSESYQQGVLSATILYEILLGKATLYAVLVSALVLMAMVKRKDSRG

SEQ ID NO: 12466 - protein, 625 aa, synthetic construct
MALPVTALLLPLALLLHAARPDFVMTQSPLSLPVTPGEPASISCRSSQSIVHSNGNTYLEWYLQKPGQSPQLLIYKVSNRFSGVPDRFSGSGSGTDFTLKISRVEAEDVGVYYCFQGSHVPLTFGQGTKLEIKRLEDLKNVFPPEVAVFEPSEAEISHTQKATLVCLATGFYPDHVELSWWVNGKEVHSGVCTDPQPLKEQPALNDSRYCLSSRLRVSATFWQNPRNHFRCQVQFYGLSENDEWTQDRAKPVTQIVSAEAWGRADCDVKLVEKSFETDTNLNFQNLSVIGFRILLLKVAGFNLLMTLRLWSSRAKRSGSGATNFSLLKQAGDVEENPGPTSMDWIWRILFLVGAATGAHSFEEVQLVESGAEVKKPGASVKVSCKASGYTFTSYWIHWVRQAPGQGLEWMGENDPSNGRTNYNEKFKNRVTLTVDTSISTAYMELSRLRSDDTAVYYCARGPNYFYSMDYWGQGTMVTVSSTRIQNPDPAVYQLRDSKSSDKSVCLFTDFDSQTNVSQSKDSDVYITDKCVLDMRSMDFKSNSAVAWSNKSDFACANAFNNSIIPEDTFFPSPESSCGFTSESYQQGVLSATILYEILLGKATLYAVLVSALVLMAMVKRKDSRG

SEQ ID NO: 12467 - protein, 618 aa, synthetic construct
MALPVTALLLPLALLLHAARPDIQLTQSPSFLSASVGDRVTITCSARSSISFMYWYQQKPGKAPKLLIYDTSNLASGVPSRFSGSGSGTEFTLTISSLEAEDAATYYCQQWSSYPLTFGQGTKLEIKLEDLKNVFPPEVAVFEPSEAEISHTQKATLVCLATGFYPDHVELSWWVNGKEVHSGVCTDPQPLKEQPALNDSRYCLSSRLRVSATFWQNPRNHFRCQVQFYGLSENDEWTQDRAKPVTQIVSAEAWGRADCDVKLVEKSFETDTNLNFQNLSVIGFRILLLKVAGFNLLMTLRLWSSRAKRSGSGATNFSLLKQAGDVEENPGPTSMDWIWRILFLVGAATGAHSFEQVQLVQSGAEVKKPGASVKVSCKASGYTFTGSWMNWVRQAPGQGLEWIGRIYPGDGETNYNGKFKDRVTITADKSTSTAYMELSSLRSEDTAVYYCARIYGNNVYFDVWGQGTTVTVSSTRIQNPDPAVYQLRDSKSSDKSVCLFTDFDSQTNVSQSKDSDVYITDKCVLDMRSMDFKSNSAVAWSNKSDFACANAFNNSIIPEDTFFPSPESSCGFTSESYQQGVLSATILYEILLGKATLYAVLVSALVLMAMVKRKDSRG

SEQ ID NO: 12468 - protein, 626 aa, synthetic construct
MALPVTALLLPLALLLHAARPQLVLTQSPSASASLGSSVKLTCTLSSGHKTDTIDWYQQQPGKAPRYLMKLEGSGSYNKGSGVPDRFSGSSSGADWYLTISSLQSEDEADYYCGTDYPGNYLFGGGTQLTVLGLEDLKNVFPPEVAVFEPSEAEISHTQKATLVCLATGFYPDHVELSWWVNGKEVHSGVCTDPQPLKEQPALNDSRYCLSSRLRVSATFWQNPRNHFRCQVQFYGLSENDEWTQDRAKPVTQIVSAEAWGRADCDVKLVEKSFETDTNLNFQNLSVIGFRILLLKVAGFNLLMTLRLWSSRAKRSGSGATNFSLLKQAGDVEENPGPTSMDWIWRILFLVGAATGAHSFEQEQLVESGGGLVQPGGSLRLSCAASGFTFSDYYMSWIRQAPGKGLEWVATIYPSSGKTYYADSAKGRLTISSDNAKDSLYLQMNSLRAEDTAVYYCTRDSYADDAALFDIWGQGTTVTVSSTRIQNPDPAVYQLRDSKSSDKSVCLFTDFDSQTNVSQSKDSDVYITDKCVLDMRSMDFKSNSAVAWSNKSDFACANAFNNSIIPEDTFFPSPESSCGFTSESYQQGVLSATILYEILLGKATLYAVLVSALVLMAMVKRKDSRG

SEQ ID NO: 12469 - protein, 618 aa, synthetic construct; identical to SEQ ID NO: 12465

SEQ ID NO: 12470 - protein, 625 aa, synthetic construct; identical to SEQ ID NO: 12466

SEQ ID NO: 12471 - protein, 618 aa, synthetic construct; identical to SEQ ID NO: 12467

SEQ ID NO: 12472 - protein, 626 aa, synthetic construct; identical to SEQ ID NO: 12468

SEQ ID NO: 12473 - protein, 625 aa, synthetic construct
MALPVTALLLPLALLLHAARPDIQLTQSPSSLSASVGDRVSFTCQASQDINNFLNWYQQKPGKAPKLLIYDASNLETGVPSRFSGSGSGTDFTFTISSLQPEDIATYYCQQYGNLPFTFGGGTKVEIKRLEDLKNVFPPEVAVFEPSEAEISHTQKATLVCLATGFYPDHVELSWWVNGKEVHSGVCTDPQPLKEQPALNDSRYCLSSRLRVSATFWQNPRNHFRCQVQFYGLSENDEWTQDRAKPVTQIVSAEAWGRADCDVKLVEKSFETDTNLNFQNLSVIGFRILLLKVAGFNLLMTLRLWSSRAKRSGSGATNFSLLKQAGDVEENPGPTSMDWIWRILFLVGAATGAHSFEQVQLQESGPGLVKPSQTLSLTCTVSGGSISSGGFYWSWIRQHPGKGLEWIGYIHHSGSTHYNPSLKSRVTISIDTSKNLFSLRLSSVTAADTAVYYCASLVYCGGDCYSGFDYWGQGTLVTVSSTRIQNPDPAVYQLRDSKSSDKSVCLFTDFDSQTNVSQSKDSDVYITDKCVLDMRSMDFKSNSAVAWSNKSDFACANAFNNSIIPEDTFFPSPESSCGFTSESYQQGVLSATILYEILLGKATLYAVLVSALVLMAMVKRKDSRG

SEQ ID NO: 12474 - protein, 621 aa, synthetic construct
MALPVTALLLPLALLLHAARPDIQMTQSPSSLSASVGDRVTITCKSSQSVLYSSNQKNYLAWFQQKPGKAPKLLIYWASTRESGVPSRFSGSGSGTDFTLTISSLQPEDFATYFCHQYLSSYTFGQGTKVEIKRLEDLKNVFPPEVAVFEPSEAEISHTQKATLVCLATGFYPDHVELSWWVNGKEVHSGVCTDPQPLKEQPALNDSRYCLSSRLRVSATFWQNPRNHFRCQVQFYGLSENDEWTQDRAKPVTQIVSAEAWGRADCDVKLVEKSFETDTNLNFQNLSVIGFRILLLKVAGFNLLMTLRLWSSRAKRSGSGATNFSLLKQAGDVEENPGPTSMDWIWRILFLVGAATGAHSFEEVQLVESGGGLVQPGGSLRLSCAASGYTFTTYWMHWVRQAPGKGLEWVGYIRPSTGYTEYNQKFKDRFTISADTSKNTAYLQMNSLRAEDTAVYYCARSRWLLDYWGQGTLVTVSTRIQNPDPAVYQLRDSKSSDKSVCLFTDFDSQTNVSQSKDSDVYITDKCVLDMRSMDFKSNSAVAWSNKSDFACANAFNNSIIPEDTFFPSPESSCGFTSESYQQGVLSATILYEILLGKATLYAVLVSALVLMAMVKRKDSRG

SEQ ID NO: 12475 - protein, 618 aa, synthetic construct
MALPVTALLLPLALLLHAARPDIQMTQSPSSLSASVGDRVTITCRASQDISNYLNWYQQKPGKAPKLLIYYTSRLHSGVPSRFSGSGSGTDFTLTISSLQPEDFATYYCQQGNTLPYTFGQGTKVEIKRLEDLKNVFPPEVAVFEPSEAEISHTQKATLVCLATGFYPDHVELSWWVNGKEVHSGVCTDPQPLKEQPALNDSRYCLSSRLRVSATFWQNPRNHFRCQVQFYGLSENDEWTQDRAKPVTQIVSAEAWGRADCDVKLVEKSFETDTNLNFQNLSVIGFRILLLKVAGFNLLMTLRLWSSRAKRSGSGATNFSLLKQAGDVEENPGPTSMDWIWRILFLVGAATGAHSFEEVQLVESGGGLVQPGGSLRLSCAASGFTFSDYFMSWVRQAPGKGLEWVATISNGGTYTYYPDSVKGRFTISRDNSKNTLYLQMNSLRAEDTAVYYCARFDGYIFDYWGQGTLVTVSSTRIQNPDPAVYQLRDSKSSDKSVCLFTDFDSQTNVSQSKDSDVYITDKCVLDMRSMDFKSNSAVAWSNKSDFACANAFNNSIIPEDTFFPSPESSCGFTSESYQQGVLSATILYEILLGKATLYAVLVSALVLMAMVKRKDSRG

SEQ ID NO: 12476 - protein, 623 aa, synthetic construct
MALPVTALLLPLALLLHAARPDIQMTQTTSSLSASLGDRVTISCRASQDISKYLNWYQQKPDGTVKLLIYHTSRLHSGVPSRFSGSGSGTDYSLTISNLEQEDIATYFCQQGNTLPYTFGGGTKLEITLEIQNPDPAVYQLRDSKSSDKSVCLFTDFDSQTNVSQSKDSDVYITDKCVLDMRSMDFKSNSAVAWSNKSDFACANAFNNSIIPEDTFFPSPESSCGFTSESYQQGVLSATILYEILLGKATLYAVLVSALVLMAMVKRKDSRGRAKRSGSGVKQTLNFDLLKLAGDVESNPGPTSMDWIWRILFLVGAATGAHSFEVKLQESGPGLVAPSQSLSVTCTVSGVSLPDYGVSWIRQPPRKGLEWLGVIWGSETTYYNSALKSRLTIIKDNSKSQVFLKMNSLQTDDTAIYYCAKHYYYGGSYAMDYWGQGTSVTVSSTREDLKNVFPPEVAVFEPSEAEISHTQKATLVCLATGFYPDHVELSWWVNGKEVHSGVCTDPQPLKEQPALNDSRYCLSSRLRVSATFWQNPRNHFRCQVQFYGLSENDEWTQDRAKPVTQIVSAEAWGRADCDVKLVEKSFETDTNLNFQNLSVIGFRILLLKVAGFNLLMTLRLWSS

SEQ ID NO: 12477 - protein, 624 aa, synthetic construct
MALPVTALLLPLALLLHAARPEIVMTQSPATLSLSPGERATLSCRASQDISKYLNWYQQKPGQAPRLLIYHTSRLHSGIPARFSGSGSGTDYTLTISSLQPEDFAVYFCQQGNTLPYTFGQGTKLEIKLEIQNPDPAVYQLRDSKSSDKSVCLFTDFDSQTNVSQSKDSDVYITDKCVLDMRSMDFKSNSAVAWSNKSDFACANAFNNSIIPEDTFFPSPESSCGFTSESYQQGVLSATILYEILLGKATLYAVLVSALVLMAMVKRKDSRGRAKRSGSGVKQTLNFDLLKLAGDVESNPGPTSMDWIWRILFLVGAATGAHSFEQVQLQESGPGLVKPSETLSLTCTVSGVSLPDYGVSWIRQPPGKGLEWIGVIWGSETTYYNSSLKSRVTISKDNSKNQVSLKLSSVTAADTAVYYCAKHYYYGGSYAMDYWGQGTLVTVSSTREDLKNVFPPEVAVFEPSEAEISHTQKATLVCLATGFYPDHVELSWWVNGKEVHSGVCTDPQPLKEQPALNDSRYCLSSRLRVSATFWQNPRNHFRCQVQFYGLSENDEWTQDRAKPVTQIVSAEAWGRADCDVKLVEKSFETDTNLNFQNLSVIGFRILLLKVAGFNLLMTLRLWSS

SEQ ID NO: 12478 - protein, 625 aa, synthetic construct
MALPVTALLLPLALLLHAARPDEIVLTQSPATLSLSPGERATLSCSASSSVSYMHWYQQKPGQAPRLLIYDTSKLASGIPARFSGSGSGTDFTLTISSLEPEDVAVYYCFQGSVYPFTFGQGTKLEIKRLEIQNPDPAVYQLRDSKSSDKSVCLFTDFDSQTNVSQSKDSDVYITDKCVLDMRSMDFKSNSAVAWSNKSDFACANAFNNSIIPEDTFFPSPESSCGFTSESYQQGVLSATILYEILLGKATLYAVLVSALVLMAMVKRKDSRGRAKRSGSGVKQTLNFDLLKLAGDVESNPGPTSMDWIWRILFLVGAATGAHSFEQVQLQESGPGLVKPSQTLSLTCTVSGGSISTSGMGVGWIRQHPGKGLEWIGHIWWDDDKRYNPALKSRVTISVDTSKNQFSLKLSSVTAADTAVYYCARMELWSYYFDYWGQGTLVTVSSTREDLKNVFPPEVAVFEPSEAEISHTQKATLVCLATGFYPDHVELSWWVNGKEVHSGVCTDPQPLKEQPALNDSRYCLSSRLRVSATFWQNPRNHFRCQVQFYGLSENDEWTQDRAKPVTQIVSAEAWGRADCDVKLVEKSFETDTNLNFQNLSVIGFRILLLKVAGFNLLMTLRLWSS

SEQ ID NO: 12479 - protein, 623 aa, synthetic construct
MALPVTALLLPLALLLHAARPDYIHVTQSPSSLSVSIGDRVTINCQTSQGVGSDLHWYQHKPGRAPKLLIHHASSVEDGVPSRFSGTGFHTSFNLTINDLQADDIGTYYCQVLQSFGRGSRLDTKLEIQNPDPAVYQLRDSKSSDKSVCLFTDFDSQTNVSQSKDSDVYITDKCVLDMRSMDFKSNSAVAWSNKSDFACANAFNNSIIPEDTFFPSPESSCGFTSESYQQGVLSATILYEILLGKATLYAVLVSALVLMAMVKRKDSRGRAKRSGSGVKQTLNFDLLKLAGDVESNPGPTSMDWIWRILFLVGAATGAHSFERAHLVQSGTAMKKPGASVRVSCQTSGYTFTAHILFWFRQAPGRGLEWVGWIKPQYGAVNFGGGFRDRVTLTRDVYREIAYMDIRGLKPDDTAVYYCARDRSYGDSSWALDAWGQGTTVVVSATREDLKNVFPPEVAVFEPSEAEISHTQKATLVCLATGFYPDHVELSWWVNGKEVHSGVCTDPQPLKEQPALNDSRYCLSSRLRVSATFWQNPRNHFRCQVQFYGLSENDEWTQDRAKPVTQIVSAEAWGRADCDVKLVEKSFETDTNLNFQNLSVIGFRILLLKVAGFNLLMTLRLWSS

SEQ ID NO: 12480 - protein, 633 aa, synthetic construct
MALPVTALLLPLALLLHAARPDVQMIQTPDSLAVSLGQRATISCRASESVDNYGISFMHWYQQKPGQSPKLLIYRASNLESGIPARFSGSGSRTDFTLTINPVETDDVATYYCQQNNKDPPTFGGGTKLEIKLEIQNPDPAVYQLRDSKSSDKSVCLFTDFDSQTNVSQSKDSDVYITDKCVLDMRSMDFKSNSAVAWSNKSDFACANAFNNSIIPEDTFFPSPESSCGFTSESYQQGVLSATILYEILLGKATLYAVLVSALVLMAMVKRKDSRGRAKRSGSGVKQTLNFDLLKLAGDVESNPGPTSMDWIWRILFLVGAATGAHSFEGGGGSQVQLQQSGAELVKPGASVKISCKASGYAFSSYWMNWVKQRPGKGLEWIGQIYPGDGDTTYNGKFKGKATLTADKSSSTVYMQLNSLTSEDSAVYFCVRYYYGSSGYFDYWGQGTTLTVSSTREDLKNVFPPEVAVFEPSEAEISHTQKATLVCLATGFYPDHVELSWWVNGKEVHSGVCTDPQPLKEQPALNDSRYCLSSRLRVSATFWQNPRNHFRCQVQFYGLSENDEWTQDRAKPVTQIVSAEAWGRADCDVKLVEKSFETDTNLNFQNLSVIGFRILLLKVAGFNLLMTLRLWSS

SEQ ID NO: 12481 - protein, 624 aa, synthetic construct
MALPVTALLLPLALLLHAARPDVQMIQTPSSLSASLGDRVTISCRASQDIGNYLNWYQQKPDGTVKLLIYYTSRLHSGVPSRFSGSGSGTEYSLTISNLEQEDIATYFCQQGSALPPTFGGGTKLEINLEIQNPDPAVYQLRDSKSSDKSVCLFTDFDSQTNVSQSKDSDVYITDKCVLDMRSMDFKSNSAVAWSNKSDFACANAFNNSIIPEDTFFPSPESSCGFTSESYQQGVLSATILYEILLGKATLYAVLVSALVLMAMVKRKDSRGRAKRSGSGVKQTLNFDLLKLAGDVESNPGPTSMDWIWRILFLVGAATGAHSFEALQLQQSGAELVRPGASVTLSCKASGYTFTDYEMHWVKQTPVHGLEWIGAIDPETGGTAYNQKFEGKAILTADKSSSTAYMELRSLTSEDSPVYYCARRRYYGSSSFDYWGQGTTLTVSSTREDLKNVFPPEVAVFEPSEAEISHTQKATLVCLATGFYPDHVELSWWVNGKEVHSGVCTDPQPLKEQPALNDSRYCLSSRLRVSATFWQNPRNHFRCQVQFYGLSENDEWTQDRAKPVTQIVSAEAWGRADCDVKLVEKSFETDTNLNFQNLSVIGFRILLLKVAGFNLLMTLRLWSS

SEQ ID NO: 12482 - protein, 628 aa, synthetic construct
MALPVTALLLPLALLLHAARPDIVLTQSPASLAVSLGQRATISCRASKSVSTSGYSYLHWYQQKPGQPPKLLIYLASNLESGVPARFSGSGSGTDFTLNIHPVEEEDAATYYCQHSRELPFTFGSGTKLEIKLEIQNPDPAVYQLRDSKSSDKSVCLFTDFDSQTNVSQSKDSDVYITDKCVLDMRSMDFKSNSAVAWSNKSDFACANAFNNSIIPEDTFFPSPESSCGFTSESYQQGVLSATILYEILLGKATLYAVLVSALVLMAMVKRKDSRGRAKRSGSGVKQTLNFDLLKLAGDVESNPGPTSMDWIWRILFLVGAATGAHSFEQVQLVESGGGLVQPGGSLKLSCAASGFDFSRYWMSWVRQAPGKGLEWIGEINPTSSTINFTPSLKDKVFISRDNAKNTLYLQMSKVRSEDTALYYCARGNYYRYGDAMDYWGQGTSVTVSTREDLKNVFPPEVAVFEPSEAEISHTQKATLVCLATGFYPDHVELSWWVNGKEVHSGVCTDPQPLKEQPALNDSRYCLSSRLRVSATFWQNPRNHFRCQVQFYGLSENDEWTQDRAKPVTQIVSAEAWGRADCDVKLVEKSFETDTNLNFQNLSVIGFRILLLKVAGFNLLMTLRLWSS

SEQ ID NO: 12483 - protein, 626 aa, synthetic construct
MALPVTALLLPLALLLHAARPDIQMTQSPSSLSASVGDRVTITCSASQDISNYLNWYQQKPGKAPKLLIYYTSNLHSGVPSRFSGSGSGTDFTLTISSLQPEDFATYYCQQYRKLPWTFGQGTKLEIKRLEIQNPDPAVYQLRDSKSSDKSVCLFTDFDSQTNVSQSKDSDVYITDKCVLDMRSMDFKSNSAVAWSNKSDFACANAFNNSIIPEDTFFPSPESSCGFTSESYQQGVLSATILYEILLGKATLYAVLVSALVLMAMVKRKDSRGRAKRSGSGVKQTLNFDLLKLAGDVESNPGPTSMDWIWRILFLVGAATGAHSFEQVQLVQSGAEVKKPGSSVKVSCKASGGTFSNYWMHWVRQAPGQGLEWMGATYRGHSDTYYNQKFKGRVTITADKSTSTAYMELSSLRSEDTAVYYCARGAIYDGYDVLDNWGQGTLVTVSSTREDLKNVFPPEVAVFEPSEAEISHTQKATLVCLATGFYPDHVELSWWVNGKEVHSGVCTDPQPLKEQPALNDSRYCLSSRLRVSATFWQNPRNHFRCQVQFYGLSENDEWTQDRAKPVTQIVSAEAWGRADCDVKLVEKSFETDTNLNFQNLSVIGFRILLLKVAGFNLLMTLRLWSS

SEQ ID NO: 12484 - protein, 626 aa, synthetic construct
MALPVTALLLPLALLLHAARPDIVLTQSPATLSLSPGDRATISCRASESVTILGSHLIYWYQQKPGQPPRLLIQLASNVQTGVPARFSGSGSRTDFTLTISSVEPEDFAVYYCLQSRTIPRTFGQGTKLEIKRLEIQNPDPAVYQLRDSKSSDKSVCLFTDFDSQTNVSQSKDSDVYITDKCVLDMRSMDFKSNSAVAWSNKSDFACANAFNNSIIPEDTFFPSPESSCGFTSESYQQGVLSATILYEILLGKATLYAVLVSALVLMAMVKRKDSRGRAKRSGSGVKQTLNFDLLKLAGDVESNPGPTSMDWIWRILFLVGAATGAHSFEQVQLVQSGPEVKKPGESVKISCKASGYTFRHYSMNWVKQAPGQGLKWMGRINTESGVPIYADDFKGRFSFTVDTSASTAYLEISSLTSEDTAVYFCSNDYLYSLDFWGQGTTLTVSSTREDLKNVFPPEVAVFEPSEAEISHTQKATLVCLATGFYPDHVELSWWVNGKEVHSGVCTDPQPLKEQPALNDSRYCLSSRLRVSATFWQNPRNHFRCQVQFYGLSENDEWTQDRAKPVTQIVSAEAWGRADCDVKLVEKSFETDTNLNFQNLSVIGFRILLLKVAGFNLLMTLRLWSS

SEQ ID NO: 12485 - protein, 627 aa, synthetic construct
MALPVTALLLPLALLLHAARPQSVLTQPPSVSGAPGQRVTISCTGSSSNIGAGFDVHWYQQLPGTAPKLLIYGNSNRPSGVPDRFSGSKSGTSASLAITGLQAEDEADYYCQSYDSSLSGYVFGTGTKVTVLGLEIQNPDPAVYQLRDSKSSDKSVCLFTDFDSQTNVSQSKDSDVYITDKCVLDMRSMDFKSNSAVAWSNKSDFACANAFNNSIIPEDTFFPSPESSCGFTSESYQQGVLSATILYEILLGKATLYAVLVSALVLMAMVKRKDSRGRAKRSGSGVKQTLNFDLLKLAGDVESNPGPTSMDWIWRILFLVGAATGAHSFEQVQLVQSGAEVKKPGASVKVSCKASGYTFTDYYMHWVRQAPGQRLEWMGWINPNSGGTNYAQKFQDRITVTRDTSSNTGYMELTRLRSDDTAVYYCARSPYSGVLDKWGQGTLVTVSSTREDLKNVFPPEVAVFEPSEAEISHTQKATLVCLATGFYPDHVELSWWVNGKEVHSGVCTDPQPLKEQPALNDSRYCLSSRLRVSATFWQNPRNHFRCQVQFYGLSENDEWTQDRAKPVTQIVSAEAWGRADCDVKLVEKSFETDTNLNFQNLSVIGFRILLLKVAGFNLLMTLRLWSS

SEQ ID NO: 12486 - protein, 624 aa, synthetic construct
MALPVTALLLPLALLLHAARPQAVLTQPPSASGTPGQRVTISCSGSSSNIGSYTVSWYQQLPGTAPKFLIYSNNQRPSGVPDRFSGSKSGTSASLAISGLQSEDEADYYCAAWDDSLNGYVFGTGTKVTVLGLEIQNPDPAVYQLRDSKSSDKSVCLFTDFDSQTNVSQSKDSDVYITDKCVLDMRSMDFKSNSAVAWSNKSDFACANAFNNSIIPEDTFFPSPESSCGFTSESYQQGVLSATILYEILLGKATLYAVLVSALVLMAMVKRKDSRGRAKRSGSGVKQTLNFDLLKLAGDVESNPGPTSMDWIWRILFLVGAATGAHSFEVQLVQSGAEVKKPGESLKISCKGSGYDFTTYWIGWVRQMPGKGLEWMGIIYPGDSDTRYSPSVRGRVTISADKSINTAYLQWSSLEASDTAMYYCARMWTFSQDGWGQGTLVTVSSTREDLKNVFPPEVAVFEPSEAEISHTQKATLVCLATGFYPDHVELSWWVNGKEVHSGVCTDPQPLKEQPALNDSRYCLSSRLRVSATFWQNPRNHFRCQVQFYGLSENDEWTQDRAKPVTQIVSAEAWGRADCDVKLVEKSFETDTNLNFQNLSVIGFRILLLKVAGFNLLMTLRLWSS

SEQ ID NO: 12487 - protein, 627 aa, synthetic construct
MALPVTALLLPLALLLHAARPDIVMTQSPDSLAVSLGERATINCKSSQSILYSSNQKNYLAWYQQKPGQSPKLLIYWASTRESGVPDRFSGSGSGTDFTLTISSLQAEDVAVYYCHQYISSYTFGQGTKLEIKLEIQNPDPAVYQLRDSKSSDKSVCLFTDFDSQTNVSQSKDSDVYITDKCVLDMRSMDFKSNSAVAWSNKSDFACANAFNNSIIPEDTFFPSPESSCGFTSESYQQGVLSATILYEILLGKATLYAVLVSALVLMAMVKRKDSRGRAKRSGSGVKQTLNFDLLKLAGDVESNPGPTSMDWIWRILFLVGAATGAHSFEQVQLVQSGAEVKKPGASVKVSCKASGYTFASQWMHWMRQAPGQGLEWIGWINPGNVNTKYNEKFKGRATLTVDTSTNTAYMELSSLRSEDTAVYYCARSTWYRPLDYWGQGTLVTVSSTREDLKNVFPPEVAVFEPSEAEISHTQKATLVCLATGFYPDHVELSWWVNGKEVHSGVCTDPQPLKEQPALNDSRYCLSSRLRVSATFWQNPRNHFRCQVQFYGLSENDEWTQDRAKPVTQIVSAEAWGRADCDVKLVEKSFETDTNLNFQNLSVIGFRILLLKVAGFNLLMTLRLWSS

SEQ ID NO: 12488 - protein, 627 aa, synthetic construct
MALPVTALLLPLALLLHAARPDHIVLTQSPSSLSASLGDRVTISCRASQDISTYLNWYQQKPDGTVKLLIFYTSRLHAGVPSRFSGSGSGTHHSLTISNLEQEDIATYFCQQGNSLPFTFGSGTKLEIKRLEIQNPDPAVYQLRDSKSSDKSVCLFTDFDSQTNVSQSKDSDVYITDKCVLDMRSMDFKSNSAVAWSNKSDFACANAFNNSIIPEDTFFPSPESSCGFTSESYQQGVLSATILYEILLGKATLYAVLVSALVLMAMVKRKDSRGRAKRSGSGVKQTLNFDLLKLAGDVESNPGPTSMDWIWRILFLVGAATGAHSFEQVQLKESGPELEKPGASVKISCKASGYSFTAYSMNWVKQNNGMSLEWIGSIDPYYGDTKYAQKFKGKATLTVDKASSTAYLQLKSLTSEDSAVYYCARRMITTGDWYFDVWGAGTTVTVSSTREDLKNVFPPEVAVFEPSEAEISHTQKATLVCLATGFYPDHVELSWWVNGKEVHSGVCTDPQPLKEQPALNDSRYCLSSRLRVSATFWQNPRNHFRCQVQFYGLSENDEWTQDRAKPVTQIVSAEAWGRADCDVKLVEKSFETDTNLNFQNLSVIGFRILLLKVAGFNLLMTLRLWSS

SEQ ID NO: 12489 - protein, 627 aa, synthetic construct; identical to SEQ ID NO: 12488

SEQ ID NO: 12490 - protein, 627 aa, synthetic construct
MALPVTALLLPLALLLHAARPDEIVLTQSPATLSLSPGERATLSCRASQSVSSYLAWYQQKPGQAPRLLIYDASNRATGIPARFSGSGSGTDFTLTISSLEPEDFAVYYCQQRSNWPITFGQGTRLEIKLEIQNPDPAVYQLRDSKSSDKSVCLFTDFDSQTNVSQSKDSDVYITDKCVLDMRSMDFKSNSAVAWSNKSDFACANAFNNSIIPEDTFFPSPESSCGFTSESYQQGVLSATILYEILLGKATLYAVLVSALVLMAMVKRKDSRGRAKRSGSGVKQTLNFDLLKLAGDVESNPGPTSMDWIWRILFLVGAATGAHSFEEVQLVESGGGLVQPGRSLRLSCAASGFTFNDYAMHWVRQAPGKGLEWVSTISWNSGSIGYADSVKGRFTISRDNAKKSLYLQMNSLRAEDTALYYCAKDIQYGNYYYGMDVWGQGTTVTVSSTREDLKNVFPPEVAVFEPSEAEISHTQKATLVCLATGFYPDHVELSWWVNGKEVHSGVCTDPQPLKEQPALNDSRYCLSSRLRVSATFWQNPRNHFRCQVQFYGLSENDEWTQDRAKPVTQIVSAEAWGRADCDVKLVEKSFETDTNLNFQNLSVIGFRILLLKVAGFNLLMTLRLWSS

SEQ ID NO: 12491 - protein, 629 aa, synthetic construct
MALPVTALLLPLALLLHAARPDIVMTQTPLSLPVTPGEPASISCRSSKSLLHSNGITYLYWYLQKPGQSPQLLIYQMSNLVSGVPDRFSGSGSGTDFTLKISRVEAEDVGVYYCAQNLELPYTFGGGTKVEIKRLEIQNPDPAVYQLRDSKSSDKSVCLFTDFDSQTNVSQSKDSDVYITDKCVLDMRSMDFKSNSAVAWSNKSDFACANAFNNSIIPEDTFFPSPESSCGFTSESYQQGVLSATILYEILLGKATLYAVLVSALVLMAMVKRKDSRGRAKRSGSGVKQTLNFDLLKLAGDVESNPGPTSMDWIWRILFLVGAATGAHSFEQVQLVQSGAEVKKPGSSVKVSCKASGYAFSYSWINWVRQAPGQGLEWMGRIFPGDGDTDYNGKFKGRVTITADKSTSTAYMELSSLRSEDTAVYYCARNVFDGYWLVYWGQGTLVTVSSTREDLKNVFPPEVAVFEPSEAEISHTQKATLVCLATGFYPDHVELSWWVNGKEVHSGVCTDPQPLKEQPALNDSRYCLSSRLRVSATFWQNPRNHFRCQVQFYGLSENDEWTQDRAKPVTQIVSAEAWGRADCDVKLVEKSFETDTNLNFQNLSVIGFRILLLKVAGFNLLMTLRLWSS

SEQ ID NO: 12492 - protein, 630 aa, synthetic construct
MALPVTALLLPLALLLHAARPDIQMTQSPSSLSASVGDRVTITCRSSQSIVHSVGNTFLEWYQQKPGKAPKLLIYKVSNRFSGVPSRFSGSGSGTDFTLTISSLQPEDFATYYCFQGSQFPYTFGQGTKVEIKRLEIQNPDPAVYQLRDSKSSDKSVCLFTDFDSQTNVSQSKDSDVYITDKCVLDMRSMDFKSNSAVAWSNKSDFACANAFNNSIIPEDTFFPSPESSCGFTSESYQQGVLSATILYEILLGKATLYAVLVSALVLMAMVKRKDSRGRAKRSGSGVKQTLNFDLLKLAGDVESNPGPTSMDWIWRILFLVGAATGAHSFEEVQLVESGGGLVQPGGSLRLSCAASGYEFSRSWMNWVRQAPGKGLEWVGRIYPGDGDTNYSGKFKGRFTISADTSKNTAYLQMNSLRAEDTAVYYCARDGSSWDWYFDVWGQGTLVTVSSTREDLKNVFPPEVAVFEPSEAEISHTQKATLVCLATGFYPDHVELSWWVNGKEVHSGVCTDPQPLKEQPALNDSRYCLSSRLRVSATFWQNPRNHFRCQVQFYGLSENDEWTQDRAKPVTQIVSAEAWGRADCDVKLVEKSFETDTNLNFQNLSVIGFRILLLKVAGFNLLMTLRLWSS

SEQ ID NO: 12493 - protein, 628 aa, synthetic construct
MALPVTALLLPLALLLHAARPDIQMTQSPSSLSASVGDRVTITCRASQTIWSYLNWYQQRPGKAPNLLIYAASSLQSGVPSRFSGRGSGTDFTLTISSLQAEDFATYYCQQSYSIPQIFGQGTKLEIKLEIQNPDPAVYQLRDSKSSDKSVCLFTDFDSQTNVSQSKDSDVYITDKCVLDMRSMDFKSNSAVAWSNKSDFACANAFNNSIIPEDTFFPSPESSCGFTSESYQQGVLSATILYEILLGKATLYAVLVSALVLMAMVKRKDSRGRAKRSGSGVKQTLNFDLLKLAGDVESNPGPTSMDWIWRILFLVGAATGAHSFEQVQLQQSGPGLVKPSQTLSLTCAISGDSVSSNSAAWNWIRQSPSRGLEWLGRTYYRSKWYNDYAVSVKSRITINPDTSKNQFSLQLNSVTPEDTAVYYCAREVTGDLEDAFDIWGQGTMVTVSSTREDLKNVFPPEVAVFEPSEAEISHTQKATLVCLATGFYPDHVELSWWVNGKEVHSGVCTDPQPLKEQPALNDSRYCLSSRLRVSATFWQNPRNHFRCQVQFYGLSENDEWTQDRAKPVTQIVSAEAWGRADCDVKLVEKSFETDTNLNFQNLSVIGFRILLLKVAGFNLLMTLRLWSS

SEQ ID NO: 12494 - protein, 621 aa, synthetic construct
MALPVTALLLPLALLLHAARPDIQMTQSPATIENTSLSASVGDRVTITCRASQGISSWLTWYQQKPEKAPKSLIYAASSLQSGVPSRFSGSGSGTDFTLTISSLQPEDFATYYCQQYDSYPITFGQGTRLEIKLEIQNPDPAVYQLRDSKSSDKSVCLFTDFDSQTNVSQSKDSDVYITDKCVLDMRSMDFKSNSAVAWSNKSDFACANAFNNSIIPEDTFFPSPESSCGFTSESYQQGVLSATILYEILLGKATLYAVLVSALVLMAMVKRKDSRGRAKRSGSGVKQTLNFDLLKLAGDVESNPGPTSMDWIWRILFLVGAATGAHSFEQVQLQQWGAGLLKPSETLSLTCAVYGGSFSAYYWSWIRQPPGKGLEWIGDINHGGGTNYNPSLKSRVTISVDTSKNQFSLKLNSVTAADTAVYYCASLTAYWGQGSLVTVSSTREDLKNVFPPEVAVFEPSEAEISHTQKATLVCLATGFYPDHVELSWWVNGKEVHSGVCTDPQPLKEQPALNDSRYCLSSRLRVSATFWQNPRNHFRCQVQFYGLSENDEWTQDRAKPVTQIVSAEAWGRADCDVKLVEKSFETDTNLNFQNLSVIGFRILLLKVAGFNLLMTLRLWSS

SEQ ID NO: 12495 - protein, 626 aa, synthetic construct
MALPVTALLLPLALLLHAARPDEIVLTQSPDSLAVSLGERATINCKASQSVDFDGDSYLNWYQQKPGQPPKVLIYAASTLQSGVPSRFSGSGSGTDFTLTINSLEAEDAATYYCQQSNEDPWTFGGGTKVEIKLEIQNPDPAVYQLRDSKSSDKSVCLFTDFDSQTNVSQSKDSDVYITDKCVLDMRSMDFKSNSAVAWSNKSDFACANAFNNSIIPEDTFFPSPESSCGFTSESYQQGVLSATILYEILLGKATLYAVLVSALVLMAMVKRKDSRGRAKRSGSGVKQTLNFDLLKLAGDVESNPGPTSMDWIWRILFLVGAATGAHSFEQVQLVQSGAEVKKPGASVKVSCKVSGYTFTDYYITWVRQAPGQALEWMGWIYPGSGNTKYSQKFQGRFVFSVDTSASTAYLQLSSLKAEDTAVYYCANYGNYWFAYWGQGTLVTVSSTREDLKNVFPPEVAVFEPSEAEISHTQKATLVCLATGFYPDHVELSWWVNGKEVHSGVCTDPQPLKEQPALNDSRYCLSSRLRVSATFWQNPRNHFRCQVQFYGLSENDEWTQDRAKPVTQIVSAEAWGRADCDVKLVEKSFETDTNLNFQNLSVIGFRILLLKVAGFNLLMTLRLWSS

SEQ ID NO: 12496 - protein, 623 aa, synthetic construct
MALPVTALLLPLALLLHAARPDIQMTQSPSSLSASVGDRVTITCRASQGISSWLAWYQQKPEKAPKSLIYAASSLQSGVPSRFSGSGSGTDFTLTISSLQPEDFATYYCQQYNSYPPTFGGGTKVEIKLEIQNPDPAVYQLRDSKSSDKSVCLFTDFDSQTNVSQSKDSDVYITDKCVLDMRSMDFKSNSAVAWSNKSDFACANAFNNSIIPEDTFFPSPESSCGFTSESYQQGVLSATILYEILLGKATLYAVLVSALVLMAMVKRKDSRGRAKRSGSGVKQTLNFDLLKLAGDVESNPGPTSMDWIWRILFLVGAATGAHSFEEVQLVQSGGGLVHPGGSLRLSCAGSGFAFSSSTMHWIRQAPGKGLEWISLIGSGGGIYYGDSVKGRFTISRDNAKNSLYLQMNSLRAEDMAVYYCVRGYFDWVDYFDYWGQGTLVTVSSTREDLKNVFPPEVAVFEPSEAEISHTQKATLVCLATGFYPDHVELSWWVNGKEVHSGVCTDPQPLKEQPALNDSRYCLSSRLRVSATFWQNPRNHFRCQVQFYGLSENDEWTQDRAKPVTQIVSAEAWGRADCDVKLVEKSFETDTNLNFQNLSVIGFRILLLKVAGFNLLMTLRLWSS

SEQ ID NO: 12497 - protein, 633 aa, synthetic construct
MALPVTALLLPLALLLHAARPDDIVMTQSPDSLTVSLGERTTINCKSSQSVLDSSKNKNSLAWYQQKPGQPPKLLLSWASTRESGIPDRFSGSGSGTDFTLTIDSLQPEDSATYYCQQSAHFPITFGQGTRLEIKLEIQNPDPAVYQLRDSKSSDKSVCLFTDFDSQTNVSQSKDSDVYITDKCVLDMRSMDFKSNSAVAWSNKSDFACANAFNNSIIPEDTFFPSPESSCGFTSESYQQGVLSATILYEILLGKATLYAVLVSALVLMAMVKRKDSRGRAKRSGSGVKQTLNFDLLKLAGDVESNPGPTSMDWIWRILFLVGAATGAHSFEQVQLVQSGAEVKKPGASVKVSCKASGYTFTNYGMNWVKQAPGQGLKWMGWINTYTGEPTYADDFKGRVTMTSDTSTSTAYLELHNLRSDDTAVYYCARWSWSDGYYVYFDYWGQGTTVTVSSTREDLKNVFPPEVAVFEPSEAEISHTQKATLVCLATGFYPDHVELSWWVNGKEVHSGVCTDPQPLKEQPALNDSRYCLSSRLRVSATFWQNPRNHFRCQVQFYGLSENDEWTQDRAKPVTQIVSAEAWGRADCDVKLVEKSFETDTNLNFQNLSVIGFRILLLKVAGFNLLMTLRLWSS

SEQ ID NO: 12498 - protein, 629 aa, synthetic construct
MALPVTALLLPLALLLHAARPDEIVLTQSPGSLAVSPGERVTMSCKSSQSVFFSSSQKNYLAWYQQIPGQSPRLLIYWASTRESGVPDRFTGSGSGTDFTLTISSVQPEDLAIYYCHQYLSSRTFGQGTKLEIKRLEIQNPDPAVYQLRDSKSSDKSVCLFTDFDSQTNVSQSKDSDVYITDKCVLDMRSMDFKSNSAVAWSNKSDFACANAFNNSIIPEDTFFPSPESSCGFTSESYQQGVLSATILYEILLGKATLYAVLVSALVLMAMVKRKDSRGRAKRSGSGVKQTLNFDLLKLAGDVESNPGPTSMDWIWRILFLVGAATGAHSFEQVQLQQPGAEVVKPGASVKMSCKASGYTFTSYYIHWIKQTPGQGLEWVGVIYPGNDDISYNQKFQGKATLTADKSSTTAYMQLSSLTSEDSAVYYCAREVRLRYFDVWGQGTTVTVSSTREDLKNVFPPEVAVFEPSEAEISHTQKATLVCLATGFYPDHVELSWWVNGKEVHSGVCTDPQPLKEQPALNDSRYCLSSRLRVSATFWQNPRNHFRCQVQFYGLSENDEWTQDRAKPVTQIVSAEAWGRADCDVKLVEKSFETDTNLNFQNLSVIGFRILLLKVAGFNLLMTLRLWSS

SEQ ID NO: 12499 - protein, 633 aa, synthetic construct
MALPVTALLLPLALLLHAARPDVLLTQSPLSLPVTLGQPASISCRSSQTIVHSNGNTYLEWFQQRPGQSPRLLIYQVSNRFSGVPDRFSGSGSGTDFTLKISRVEAEDVGVYYCFQGSHVPRTFGGGTKVEIKRALEIQNPDPAVYQLRDSKSSDKSVCLFTDFDSQTNVSQSKDSDVYITDKCVLDMRSMDFKSNSAVAWSNKSDFACANAFNNSIIPEDTFFPSPESSCGFTSESYQQGVLSATILYEILLGKATLYAVLVSALVLMAMVKRKDSRGRAKRSGSGVKQTLNFDLLKLAGDVESNPGPTSMDWIWRILFLVGAATGAHSFEQIQLVQSGSELKKPGASVKVSCKASGYTFTNYGMNWVRQAPGQGLKWMGWINTNTGEPKYAEEFKGRFALSLDTSVSTAYLQINSLKAEDTAVYFCARGYGNYARGAWLAYWGQGTLVTVSSTREDLKNVFPPEVAVFEPSEAEISHTQKATLVCLATGFYPDHVELSWWVNGKEVHSGVCTDPQPLKEQPALNDSRYCLSSRLRVSATFWQNPRNHFRCQVQFYGLSENDEWTQDRAKPVTQIVSAEAWGRADCDVKLVEKSFETDTNLNFQNLSVIGFRILLLKVAGFNLLMTLRLWSS

SEQ ID NO: 12500 - protein, 618 aa, synthetic construct
MALPVTALLLPLALLLHAARPDEIVLTQSPATLSLSPGERATLSCSASSSINYIYWLQQKPGQAPRILIYLTSNLASGVPARFSGSGSGTDFTLTISSLEPEDFAVYYCLQWSSNPLTFGGGTKVEIKLEIQNPDPAVYQLRDSKSSDKSVCLFTDFDSQTNVSQSKDSDVYITDKCVLDMRSMDFKSNSAVAWSNKSDFACANAFNNSIIPEDTFFPSPESSCGFTSESYQQGVLSATILYEILLGKATLYAVLVSALVLMAMVKRKDSRGRAKRSGSGVKQTLNFDLLKLAGDVESNPGPTSMDWIWRILFLVGAATGAHSFEEVQLVESGGGLVKPGGSLRLSCAASGFTFSSYDMSWVRQAPGKGLEWVSTISSGGSYTYYLDSIKGRFTISRDNAKNSLYLQMNSLRAEDTAVYYCARQGLDYWGRGTLVTVSSTREDLKNVFPPEVAVFEPSEAEISHTQKATLVCLATGFYPDHVELSWWVNGKEVHSGVCTDPQPLKEQPALNDSRYCLSSRLRVSATFWQNPRNHFRCQVQFYGLSENDEWTQDRAKPVTQIVSAEAWGRADCDVKLVEKSFETDTNLNFQNLSVIGFRILLLKVAGFNLLMTLRLWSS

SEQ ID NO: 12501 - protein, 627 aa, synthetic construct
MALPVTALLLPLALLLHAARPDIVMTQSPDSLAVSLGERATINCRASKSVSTSGYSFMHWYQQKPGQPPKLLIYLASNLESGVPDRFSGSGSGTDFTLTISSLQAEDVAVYYCQHSREVPWTFGQGTKVEIKRLEIQNPDPAVYQLRDSKSSDKSVCLFTDFDSQTNVSQSKDSDVYITDKCVLDMRSMDFKSNSAVAWSNKSDFACANAFNNSIIPEDTFFPSPESSCGFTSESYQQGVLSATILYEILLGKATLYAVLVSALVLMAMVKRKDSRGRAKRSGSGVKQTLNFDLLKLAGDVESNPGPTSMDWIWRILFLVGAATGAHSFEQVQLVQSGAEVKKPGASVKVSCKASGYTFTNYGMNWVRQAPGQGLEWMGWINTYTGEPTYADAFKGRFAFSLDTSTSTAYLQINSLRSDDTAVYYCARDYGDYGMDYWGQGTTVTVSSTREDLKNVFPPEVAVFEPSEAEISHTQKATLVCLATGFYPDHVELSWWVNGKEVHSGVCTDPQPLKEQPALNDSRYCLSSRLRVSATFWQNPRNHFRCQVQFYGLSENDEWTQDRAKPVTQIVSAEAWGRADCDVKLVEKSFETDTNLNFQNLSVIGFRILLLKVAGFNLLMTLRLWSS

SEQ ID NO: 12502 - protein, 623 aa, synthetic construct
MALPVTALLLPLALLLHAARPDIVMTQTPLTLSVTIGQPASISCKSSQSLLDSDGKTYLNWLLQRPGQSPERLIYLVSKLDSGVPDRFTGSGSGTDFTLKISRVEAEDLGVYCCWQGTHFPYTFGGGTKVEIKGLEIQNPDPAVYQLRDSKSSDKSVCLFTDFDSQTNVSQSKDSDVYITDKCVLDMRSMDFKSNSAVAWSNKSDFACANAFNNSIIPEDTFFPSPESSCGFTSESYQQGVLSATILYEILLGKATLYAVLVSALVLMAMVKRKDSRGRAKRSGSGVKQTLNFDLLKLAGDVESNPGPTSMDWIWRILFLVGAATGAHSFEQVQLQQPGAELVRPGASVKLSCKASGYTFTSYWMNWVKQRPGQGLEWIGMIDPSDSETHYNHIFKDKATLTVDKSSSTAYLQLSSLTSEDSAVYYCARNLYLWGQGTSVTVSSTREDLKNVFPPEVAVFEPSEAEISHTQKATLVCLATGFYPDHVELSWWVNGKEVHSGVCTDPQPLKEQPALNDSRYCLSSRLRVSATFWQNPRNHFRCQVQFYGLSENDEWTQDRAKPVTQIVSAEAWGRADCDVKLVEKSFETDTNLNFQNLSVIGFRILLLKVAGFNLLMTLRLWSS

SEQ ID NO: 12503 - protein, 631 aa, synthetic construct
MALPVTALLLPLALLLHAARPDIVMTQSPDSLAVSLGERATINCESSQSLLNSGNQKNYLTWYQQKPGQPPKPLIYWASTRESGVPDRFSGSGSGTDFTLTISSLQAEDVAVYYCQNDYSYPYTFGQGTKLEIKRLEIQNPDPAVYQLRDSKSSDKSVCLFTDFDSQTNVSQSKDSDVYITDKCVLDMRSMDFKSNSAVAWSNKSDFACANAFNNSIIPEDTFFPSPESSCGFTSESYQQGVLSATILYEILLGKATLYAVLVSALVLMAMVKRKDSRGRAKRSGSGVKQTLNFDLLKLAGDVESNPGPTSMDWIWRILFLVGAATGAHSFEEVQLVQSGAEVKKPGESLKISCKGSGYSFTDYYMKWARQMPGKGLEWMGDIIPSNGATFYNQKFKGQVTISADKSISTTYLQWSSLKASDTAMYYCARSHLLRASWFAYWGQGTMVTVSSTREDLKNVFPPEVAVFEPSEAEISHTQKATLVCLATGFYPDHVELSWWVNGKEVHSGVCTDPQPLKEQPALNDSRYCLSSRLRVSATFWQNPRNHFRCQVQFYGLSENDEWTQDRAKPVTQIVSAEAWGRADCDVKLVEKSFETDTNLNFQNLSVIGFRILLLKVAGFNLLMTLRLWSS

SEQ ID NO: 12504 - protein, 626 aa, synthetic construct
MALPVTALLLPLALLLHAARPDIQMTQSTSSLSASLGDRVTISCSASQGINNYLNWYQQKPDGTVELLIYYTSTLQSGVPSRFSGSGSGTDYSLTISNLEPEDIGTYYCQQYSKLPRTFGGGTKLEIKLEIQNPDPAVYQLRDSKSSDKSVCLFTDFDSQTNVSQSKDSDVYITDKCVLDMRSMDFKSNSAVAWSNKSDFACANAFNNSIIPEDTFFPSPESSCGFTSESYQQGVLSATILYEILLGKATLYAVLVSALVLMAMVKRKDSRGRAKRSGSGVKQTLNFDLLKLAGDVESNPGPTSMDWIWRILFLVGAATGAHSFEQVQLQQSGSELMMPGASVKISCKATGYTFSNYWIEWVKQRPGHGLEWIGEILPGTGRTIYNEKFKGKATFTADISSNTVQMQLSSLTSEDSAVYYCARRDYYGNFYYAMDYWGQGTSVTVSSTREDLKNVFPPEVAVFEPSEAEISHTQKATLVCLATGFYPDHVELSWWVNGKEVHSGVCTDPQPLKEQPALNDSRYCLSSRLRVSATFWQNPRNHFRCQVQFYGLSENDEWTQDRAKPVTQIVSAEAWGRADCDVKLVEKSFETDTNLNFQNLSVIGFRILLLKVAGFNLLMTLRLWSS

SEQ ID NO: 12505 - protein, 621 aa, synthetic construct
MALPVTALLLPLALLLHAARPDIQMTQSPASLSVSVGETVTITCRASENIYSNLAWYQQKQGKSPQLLVYAATNLADGVPSRFSGSGSGTQYSLKINSLQSEDFGSYYCQHFWGTWTFGGGTTLEIKLEIQNPDPAVYQLRDSKSSDKSVCLFTDFDSQTNVSQSKDSDVYITDKCVLDMRSMDFKSNSAVAWSNKSDFACANAFNNSIIPEDTFFPSPESSCGFTSESYQQGVLSATILYEILLGKATLYAVLVSALVLMAMVKRKDSRGRAKRSGSGVKQTLNFDLLKLAGDVESNPGPTSMDWIWRILFLVGAATGAHSFEEVQLQQSGPELVKPGASVKMSCKASGYTFTDYYMKWMKQSHGKSLEWIGDINPNNGGTTYNQKFKGKATLTVDKSSSTAYMQLNSLTSEDSAVYYCARDYGYGYFDYWGQGTTLTVSSTREDLKNVFPPEVAVFEPSEAEISHTQKATLVCLATGFYPDHVELSWWVNGKEVHSGVCTDPQPLKEQPALNDSRYCLSSRLRVSATFWQNPRNHFRCQVQFYGLSENDEWTQDRAKPVTQIVSAEAWGRADCDVKLVEKSFETDTNLNFQNLSVIGFRILLLKVAGFNLLMTLRLWSS

SEQ ID NO: 12506 - protein, 624 aa, synthetic construct
MALPVTALLLPLALLLHAARPEIVLTQSPGTLSLSPGERATLSCRASQSVGGYLAWYQQKPGQAPRLLIYDASNRATGIPARFSGSGSGTDFTLTISSLEPEDFAVYYCQQRNNWPPMYTFGQGTKLEIKRLEIQNPDPAVYQLRDSKSSDKSVCLFTDFDSQTNVSQSKDSDVYITDKCVLDMRSMDFKSNSAVAWSNKSDFACANAFNNSIIPEDTFFPSPESSCGFTSESYQQGVLSATILYEILLGKATLYAVLVSALVLMAMVKRKDSRGRAKRSGSGVKQTLNFDLLKLAGDVESNPGPTSMDWIWRILFLVGAATGAHSFEQVQLVQSGAEVKKPGSSVKVSCKASGGTFSSYAISWVRQAPGQGLEWMGGIIPILGTANYAQKFQGRVTITADESTSTAYMELSSLRSEDTAVYYCARWGGGAFDIWGQGTMVTVSSTREDLKNVFPPEVAVFEPSEAEISHTQKATLVCLATGFYPDHVELSWWVNGKEVHSGVCTDPQPLKEQPALNDSRYCLSSRLRVSATFWQNPRNHFRCQVQFYGLSENDEWTQDRAKPVTQIVSAEAWGRADCDVKLVEKSFETDTNLNFQNLSVIGFRILLLKVAGFNLLMTLRLWSS

SEQ ID NO: 12507 - protein, 619 aa, synthetic construct
MALPVTALLLPLALLLHAARPQIVLTQSPALMSASPGEKVTMTCSASSSVRYMYWYQQKPRSSPKPWIHLTSNLASGVPARFSGSGSGTSYSLTISSMEAEDAATYYCQQWSSHPFTFGSGTKLEIKLEIQNPDPAVYQLRDSKSSDKSVCLFTDFDSQTNVSQSKDSDVYITDKCVLDMRSMDFKSNSAVAWSNKSDFACANAFNNSIIPEDTFFPSPESSCGFTSESYQQGVLSATILYEILLGKATLYAVLVSALVLMAMVKRKDSRGRAKRSGSGVKQTLNFDLLKLAGDVESNPGPTSMDWIWRILFLVGAATGAHSFEDVQLQESGPGLVKPSQSLSLTCTVTGFSITSDYSWNWIRQFPGNKLEWMGYISYSGHTSYNPSLESRISITRDTSKNQFFLQLNSVTTEDTATYYCTRGNWDVVYWGQGTLVTVSATREDLKNVFPPEVAVFEPSEAEISHTQKATLVCLATGFYPDHVELSWWVNGKEVHSGVCTDPQPLKEQPALNDSRYCLSSRLRVSATFWQNPRNHFRCQVQFYGLSENDEWTQDRAKPVTQIVSAEAWGRADCDVKLVEKSFETDTNLNFQNLSVIGFRILLLKVAGFNLLMTLRLWSS

SEQ ID NO: 12508 - protein, 629 aa, synthetic construct
MALPVTALLLPLALLLHAARPDVVMTQSPLSLPVTLGQPASISCRSSQSIVHSDGNTYLEWYQQRPGQSPRRLIYKVSNRFSGVPDRFSGSGSGTDFTLKISRVEAEDVGVYYCFQGSHAPWTFGGGTKVEIKLEIQNPDPAVYQLRDSKSSDKSVCLFTDFDSQTNVSQSKDSDVYITDKCVLDMRSMDFKSNSAVAWSNKSDFACANAFNNSIIPEDTFFPSPESSCGFTSESYQQGVLSATILYEILLGKATLYAVLVSALVLMAMVKRKDSRGRAKRSGSGVKQTLNFDLLKLAGDVESNPGPTSMDWIWRILFLVGAATGAHSFEEVQLVESGGGLVQPGGSLRLSCAASGFTFSSYGMHWVRQAPGKGLEWVAYITTRSSTIYYADSVKGRFTISRDNAKNSLYLQMNSLRAEDTAVYYCTREPLTGYYAMDYWGQGTSVTVSSTREDLKNVFPPEVAVFEPSEAEISHTQKATLVCLATGFYPDHVELSWWVNGKEVHSGVCTDPQPLKEQPALNDSRYCLSSRLRVSATFWQNPRNHFRCQVQFYGLSENDEWTQDRAKPVTQIVSAEAWGRADCDVKLVEKSFETDTNLNFQNLSVIGFRILLLKVAGFNLLMTLRLWSS

SEQ ID NO: 12509 - protein, 621 aa, synthetic construct
MALPVTALLLPLALLLHAARPDIQMTQSPSSLSASVGDRVTITCRASQSISLWLNWYQQKPGKAPKLLIYAASTLQSGVPSRFSGSGSGTDFTLTISSLQPEDFATYYCQQYYTSPYTFGQGTKVEIKRLEIQNPDPAVYQLRDSKSSDKSVCLFTDFDSQTNVSQSKDSDVYITDKCVLDMRSMDFKSNSAVAWSNKSDFACANAFNNSIIPEDTFFPSPESSCGFTSESYQQGVLSATILYEILLGKATLYAVLVSALVLMAMVKRKDSRGRAKRSGSGVKQTLNFDLLKLAGDVESNPGPTSMDWIWRILFLVGAATGAHSFEQVQLLESGGGLVQPGGSLRLSCAASGFTFSSYAMSWVRQAPGKGLEWVSVIRSSGSSTYYADSVKGRFTISRDNSKNTLYLQMNSLRAEDTAVYYCARGGGYFDYWGQGTLVTVSSTREDLKNVFPPEVAVFEPSEAEISHTQKATLVCLATGFYPDHVELSWWVNGKEVHSGVCTDPQPLKEQPALNDSRYCLSSRLRVSATFWQNPRNHFRCQVQFYGLSENDEWTQDRAKPVTQIVSAEAWGRADCDVKLVEKSFETDTNLNFQNLSVIGFRILLLKVAGFNLLMTLRLWSS

SEQ ID NO: 12510 - protein, 624 aa, synthetic construct
MALPVTALLLPLALLLHAARPDIQMTQSPSSLSASVGDRVTITCRASQSISSYLNWYQQKPGKAPKLLIYAVSTLQSGVPSRFSGSGSGTDFTLTISSLQPEDFATYYCQQSGTFPPTTFGQGTKVEIKRLEIQNPDPAVYQLRDSKSSDKSVCLFTDFDSQTNVSQSKDSDVYITDKCVLDMRSMDFKSNSAVAWSNKSDFACANAFNNSIIPEDTFFPSPESSCGFTSESYQQGVLSATILYEILLGKATLYAVLVSALVLMAMVKRKDSRGRAKRSGSGVKQTLNFDLLKLAGDVESNPGPTSMDWIWRILFLVGAATGAHSFEQVQLLESGGGLVQPGGSLRLSCAASGFTFSSHGMHWVRQAPGKGLEWVSVISGSGSNTGYADSVKGRFTISRDNSKNTLYLQMNSLRAEDTAVYYCARQWGSYAFDSWGQGTLVTVSSTREDLKNVFPPEVAVFEPSEAEISHTQKATLVCLATGFYPDHVELSWWVNGKEVHSGVCTDPQPLKEQPALNDSRYCLSSRLRVSATFWQNPRNHFRCQVQFYGLSENDEWTQDRAKPVTQIVSAEAWGRADCDVKLVEKSFETDTNLNFQNLSVIGFRILLLKVAGFNLLMTLRLWSS

SEQ ID NO: 12511 - protein, 634 aa, synthetic construct
MALPVTALLLPLALLLHAARPDIVMSQSPSSLAVSVGEKVTMSCKSSQSLLHSSNQKNYLAWYQQKPGQSPKVLIYWASTRESGVPDRFTGSGSGTDFTLTITSVKSEDLAVYYCQQYYSYPWTFGGGTRLEIKRLEIQNPDPAVYQLRDSKSSDKSVCLFTDFDSQTNVSQSKDSDVYITDKCVLDMRSMDFKSNSAVAWSNKSDFACANAFNNSIIPEDTFFPSPESSCGFTSESYQQGVLSATILYEILLGKATLYAVLVSALVLMAMVKRKDSRGRAKRSGSGVKQTLNFDLLKLAGDVESNPGPTSMDWIWRILFLVGAATGAHSFEEVQLQQSVAELVKPGASVKMSCKVSGYTLTDHTIHWMKQRPEQGLEWIGYIYPRDGITGYNEKFKGKATLTADTSSSTAYMQLNSLTSEDSAVYFCARWGYSYRNYAYYYDYWGQGTTLTVSSTREDLKNVFPPEVAVFEPSEAEISHTQKATLVCLATGFYPDHVELSWWVNGKEVHSGVCTDPQPLKEQPALNDSRYCLSSRLRVSATFWQNPRNHFRCQVQFYGLSENDEWTQDRAKPVTQIVSAEAWGRADCDVKLVEKSFETDTNLNFQNLSVIGFRILLLKVAGFNLLMTLRLWSS

SEQ ID NO: 12512 - protein, 631 aa, synthetic construct
MALPVTALLLPLALLLHAARPEIVLTQSPGTLSLSPGERATLSCRASQSVSSSYLAWYQQKPGQAPRLLIYGTSSRATGIPDRFSGSGSGTDFTLTISRLEPEDFAVYYCQQYGSSPFTFGGGTKVEIKRLEIQNPDPAVYQLRDSKSSDKSVCLFTDFDSQTNVSQSKDSDVYITDKCVLDMRSMDFKSNSAVAWSNKSDFACANAFNNSIIPEDTFFPSPESSCGFTSESYQQGVLSATILYEILLGKATLYAVLVSALVLMAMVKRKDSRGRAKRSGSGVKQTLNFDLLKLAGDVESNPGPTSMDWIWRILFLVGAATGAHSFEQVQLQESGPGLAKPSETLSLTCTVSGDSITSYYWSWIRQPPGKGLEWIGYIYYSGSTNYNPSLKSRVTISVDTSKNQFSLKLSSVTAADTAVYYCARDQRRIAAAGTHFYGMDVWGQGTTVTVSSTREDLKNVFPPEVAVFEPSEAEISHTQKATLVCLATGFYPDHVELSWWVNGKEVHSGVCTDPQPLKEQPALNDSRYCLSSRLRVSATFWQNPRNHFRCQVQFYGLSENDEWTQDRAKPVTQIVSAEAWGRADCDVKLVEKSFETDTNLNFQNLSVIGFRILLLKVAGFNLLMTLRLWSS

SEQ ID NO: 12513 - protein, 623 aa, synthetic construct
MALPVTALLLPLALLLHAARPDILLTQSPVILSVSPGERVSFSCRASQSIGTNIHWYQQRTNGSPRLLIKYASESISGIPSRFSGSGSGTDFTLSINSVESEDIADYYCQQNNNWPTTFGAGTKLELKLEIQNPDPAVYQLRDSKSSDKSVCLFTDFDSQTNVSQSKDSDVYITDKCVLDMRSMDFKSNSAVAWSNKSDFACANAFNNSIIPEDTFFPSPESSCGFTSESYQQGVLSATILYEILLGKATLYAVLVSALVLMAMVKRKDSRGRAKRSGSGVKQTLNFDLLKLAGDVESNPGPTSMDWIWRILFLVGAATGAHSFEQVQLKQSGPGLVQPSQSLSITCTVSGFSLTNYGVHWVRQSPGKGLEWLGVIWSGGNTDYNTPFTSRLSINKDNSKSQVFFKMNSLQSNDTAIYYCARALTYYDYEFAYWGQGTLVTVSATREDLKNVFPPEVAVFEPSEAEISHTQKATLVCLATGFYPDHVELSWWVNGKEVHSGVCTDPQPLKEQPALNDSRYCLSSRLRVSATFWQNPRNHFRCQVQFYGLSENDEWTQDRAKPVTQIVSAEAWGRADCDVKLVEKSFETDTNLNFQNLSVIGFRILLLKVAGFNLLMTLRLWSS

SEQ ID NO: 12514 - protein, 616 aa, synthetic construct
MALPVTALLLPLALLLHAARPMTQSPKFLLVSAGDRVTLTCKASQSVNNDVYWYQQEPGQSPKLLIYWASTRESGVPDRFTGSGSGTDFTLTISSVQAEDLAVYYCKQSYNLYTFGGGTKLEIKRLEIQNPDPAVYQLRDSKSSDKSVCLFTDFDSQTNVSQSKDSDVYITDKCVLDMRSMDFKSNSAVAWSNKSDFACANAFNNSIIPEDTFFPSPESSCGFTSESYQQGVLSATILYEILLGKATLYAVLVSALVLMAMVKRKDSRGRAKRSGSGVKQTLNFDLLKLAGDVESNPGPTSMDWIWRILFLVGAATGAHSFEESGRGLVQPGGSRKLSCAASGFTFSTSGMHWVRQAPEKGLEWVAYISSGSTTIYHADTVKGRFTISRDNPKNTLFLQMTSLRSEDTAMYYCCARSGQFGNYFDYWGQGTTLTVSSTREDLKNVFPPEVAVFEPSEAEISHTQKATLVCLATGFYPDHVELSWWVNGKEVHSGVCTDPQPLKEQPALNDSRYCLSSRLRVSATFWQNPRNHFRCQVQFYGLSENDEWTQDRAKPVTQIVSAEAWGRADCDVKLVEKSFETDTNLNFQNLSVIGFRILLLKVAGFNLLMTLRLWSS

SEQ ID NO: 12515 - protein, 621 aa, synthetic construct
MALPVTALLLPLALLLHAARPQSPSSLAVSAGEKVTMSCKSSQSLLNSRTRKNYLAWYQQKPGQSPKLLIYWASTRESGVPDRFTGSGSGTDFTLTISSVQAEDLAVYYCKQSNLYTFGGGTKLEIKLEIQNPDPAVYQLRDSKSSDKSVCLFTDFDSQTNVSQSKDSDVYITDKCVLDMRSMDFKSNSAVAWSNKSDFACANAFNNSIIPEDTFFPSPESSCGFTSESYQQGVLSATILYEILLGKATLYAVLVSALVLMAMVKRKDSRGRAKRSGSGVKQTLNFDLLKLAGDVESNPGPTSMDWIWRILFLVGAATGAHSFEQVQLEESGPELVKPGASVKLSCKASGYTFTEYIIHWVKQRSGQGLEWIGWFYPGSGSIKYNEKFKDKATLTADKSSSTVYMELSGLTSEDSAVYFCARHDGYSYFDYWGQGTTLTVSSTREDLKNVFPPEVAVFEPSEAEISHTQKATLVCLATGFYPDHVELSWWVNGKEVHSGVCTDPQPLKEQPALNDSRYCLSSRLRVSATFWQNPRNHFRCQVQFYGLSENDEWTQDRAKPVTQIVSAEAWGRADCDVKLVEKSFETDTNLNFQNLSVIGFRILLLKVAGFNLLMTLRLWSS

SEQ ID NO: 12516 - protein, 624 aa, synthetic construct
MALPVTALLLPLALLLHAARPDIQMTQSPSSLSASLGERVSLTCRATQELSGYLSWLQQKPDGTIKRLIYAASTLDSGVPKRFSGNRSGSDYSLTISSLESEDFADYYCLQYAIYPYTFGGGTKLEIKLEIQNPDPAVYQLRDSKSSDKSVCLFTDFDSQTNVSQSKDSDVYITDKCVLDMRSMDFKSNSAVAWSNKSDFACANAFNNSIIPEDTFFPSPESSCGFTSESYQQGVLSATILYEILLGKATLYAVLVSALVLMAMVKRKDSRGRAKRSGSGVKQTLNFDLLKLAGDVESNPGPTSMDWIWRILFLVGAATGAHSFEEVQLQQSGPELVKPGASVKMSCKASGYTFTSYFIHWVKQKPGQGLEWIGFINPYNDGSKYNEKFKGKATLTSDKSSSTAYMELSSLTSEDSAVYYCTRDDGYYGYAMDYWGQGTSVTVSSTREDLKNVFPPEVAVFEPSEAEISHTQKATLVCLATGFYPDHVELSWWVNGKEVHSGVCTDPQPLKEQPALNDSRYCLSSRLRVSATFWQNPRNHFRCQVQFYGLSENDEWTQDRAKPVTQIVSAEAWGRADCDVKLVEKSFETDTNLNFQNLSVIGFRILLLKVAGFNLLMTLRLWSS

SEQ ID NO: 12517 - protein, 629 aa, synthetic construct
MALPVTALLLPLALLLHAARPDTIVLTQSPASLAVSLGQRATISCRASESVDSYGNSFMHWYQQKPGQPPKLLIYLASNLESGVPARFSGSGSRTDFTLTIDPVEADDAATYYCQQNNYDPWTFGGGTKLEIKLEIQNPDPAVYQLRDSKSSDKSVCLFTDFDSQTNVSQSKDSDVYITDKCVLDMRSMDFKSNSAVAWSNKSDFACANAFNNSIIPEDTFFPSPESSCGFTSESYQQGVLSATILYEILLGKATLYAVLVSALVLMAMVKRKDSRGRAKRSGSGVKQTLNFDLLKLAGDVESNPGPTSMDWIWRILFLVGAATGAHSFEEVQLQQSGPELVKPGASVKMSCKASGYTFTSYVMHWVKQKPGQGLEWIGYINPYNDGTKYNEKFKGKATLTSDTSSSTAYMELNSLTSEDSAVYFCARPIYFDNDYFDYWGQGTTLKVSSTREDLKNVFPPEVAVFEPSEAEISHTQKATLVCLATGFYPDHVELSWWVNGKEVHSGVCTDPQPLKEQPALNDSRYCLSSRLRVSATFWQNPRNHFRCQVQFYGLSENDEWTQDRAKPVTQIVSAEAWGRADCDVKLVEKSFETDTNLNFQNLSVIGFRILLLKVAGFNLLMTLRLWSS

SEQ ID NO: 12518 - protein, 624 aa, synthetic construct
MALPVTALLLPLALLLHAARPDIQMTQSPSSLSASVGDRVTITCKASQDVGIAVAWYQQKPGKVPKLLIYWASTRHTGVPDRFSGSGSGTDFTLTISSLQPEDVATYYCQQYSSYPYTFGQGTKVEIKRLEIQNPDPAVYQLRDSKSSDKSVCLFTDFDSQTNVSQSKDSDVYITDKCVLDMRSMDFKSNSAVAWSNKSDFACANAFNNSIIPEDTFFPSPESSCGFTSESYQQGVLSATILYEILLGKATLYAVLVSALVLMAMVKRKDSRGRAKRSGSGVKQTLNFDLLKLAGDVESNPGPTSMDWIWRILFLVGAATGAHSFEEVQLVESGGGLVQPGGSLRLSCAASGFDFSRYWMSWVRQAPGKGLEWIGEINPDSSTINYAPSLKDKFIISRDNAKNSLYLQMNSLRAEDTAVYYCARPDGNYWYFDVWGQGTLVTVSSTREDLKNVFPPEVAVFEPSEAEISHTQKATLVCLATGFYPDHVELSWWVNGKEVHSGVCTDPQPLKEQPALNDSRYCLSSRLRVSATFWQNPRNHFRCQVQFYGLSENDEWTQDRAKPVTQIVSAEAWGRADCDVKLVEKSFETDTNLNFQNLSVIGFRILLLKVAGFNLLMTLRLWSS

SEQ ID NO: 12519 - protein, 624 aa, synthetic construct
MALPVTALLLPLALLLHAARPDIVMTQSQKSMSTSVGDRVSITCKASQDVITGVAWYQQKPGQSPKLLIYSASYRYTGVPDRFTGSGSGTDFTFTISNVQAEDLAVYYCQQHYSTPLTFGAGTKLELKLEIQNPDPAVYQLRDSKSSDKSVCLFTDFDSQTNVSQSKDSDVYITDKCVLDMRSMDFKSNSAVAWSNKSDFACANAFNNSIIPEDTFFPSPESSCGFTSESYQQGVLSATILYEILLGKATLYAVLVSALVLMAMVKRKDSRGRAKRSGSGVKQTLNFDLLKLAGDVESNPGPTSMDWIWRILFLVGAATGAHSFEQVQLQQPGAELVRPGASVKLSCKASGYSFTTYWMNWVKQRPGQGLEWIGMIHPSDSETRLNQKFKDKATLTVDKSSSTAYMQLSSPTSEDSAVYYCARSTMIATRAMDYWGQGTSVTVSSTREDLKNVFPPEVAVFEPSEAEISHTQKATLVCLATGFYPDHVELSWWVNGKEVHSGVCTDPQPLKEQPALNDSRYCLSSRLRVSATFWQNPRNHFRCQVQFYGLSENDEWTQDRAKPVTQIVSAEAWGRADCDVKLVEKSFETDTNLNFQNLSVIGFRILLLKVAGFNLLMTLRLWSS

SEQ ID NO: 12520 - protein, 630 aa, synthetic construct
MALPVTALLLPLALLLHAARPQSVLTQPPSVSGAPGQRVTISCTGSGSNIGAPYDVSWYQQLPGTAPKLLIYHNNKRPSGVPDRFSGSKSGTSASLAITGLQAEDEADYYCATVEAGLSGSVFGGGTKLTVLGALEIQNPDPAVYQLRDSKSSDKSVCLFTDFDSQTNVSQSKDSDVYITDKCVLDMRSMDFKSNSAVAWSNKSDFACANAFNNSIIPEDTFFPSPESSCGFTSESYQQGVLSATILYEILLGKATLYAVLVSALVLMAMVKRKDSRGRAKRSGSGVKQTLNFDLLKLAGDVESNPGPTSMDWIWRILFLVGAATGAHSFEQVQLVQSGAEVKKPGASVKVSCKVSGYTLTELSIHWVRQAPGKGLEWMGGFDPEENEIVYAQRFQGRVTMTEDTSTDTAYMELSSLRSEDTAVYYCAIVGSFSPLTLGLWGQGTMVTVSSTREDLKNVFPPEVAVFEPSEAEISHTQKATLVCLATGFYPDHVELSWWVNGKEVHSGVCTDPQPLKEQPALNDSRYCLSSRLRVSATFWQNPRNHFRCQVQFYGLSENDEWTQDRAKPVTQIVSAEAWGRADCDVKLVEKSFETDTNLNFQNLSVIGFRILLLKVAGFNLLMTLRLWSS

SEQ ID NO: 12521 - protein, 630 aa, synthetic construct
MALPVTALLLPLALLLHAARPQSVLTQPPSVSGAPGQRVTISCTGSGSNIGAPYDVSWYQQLPGTAPKLLIYHNNKRPSGVPDRFSGSKSGTSASLAITGLQAEDEADYYCQSYDSSSISTIFGGGTKLTVLGALEIQNPDPAVYQLRDSKSSDKSVCLFTDFDSQTNVSQSKDSDVYITDKCVLDMRSMDFKSNSAVAWSNKSDFACANAFNNSIIPEDTFFPSPESSCGFTSESYQQGVLSATILYEILLGKATLYAVLVSALVLMAMVKRKDSRGRAKRSGSGVKQTLNFDLLKLAGDVESNPGPTSMDWIWRILFLVGAATGAHSFEQVQLVQSGAEVKKPGASVKVSCKVSGYTLTELSIHWVRQAPGKGLEWMGGFDPEENEIVYAQRFQGRVTMTEDTSTDTAYMELSSLRSEDTAVYYCAIVGSFSGIAYRPWGQGTMVTVSSTREDLKNVFPPEVAVFEPSEAEISHTQKATLVCLATGFYPDHVELSWWVNGKEVHSGVCTDPQPLKEQPALNDSRYCLSSRLRVSATFWQNPRNHFRCQVQFYGLSENDEWTQDRAKPVTQIVSAEAWGRADCDVKLVEKSFETDTNLNFQNLSVIGFRILLLKVAGFNLLMTLRLWSS

SEQ ID NO: 12522 - protein, 618 aa, synthetic construct
MALPVTALLLPLALLLHAARPDIQMTQSPSSLSASVGDRVTITCRASQGIRNNLAWYQQKPGKAPKRLIYAASNLQSGVPSRFTGSGSGTEFTLIVSSLQPEDFATYYCLQHHSYPLTSGGGTKVELEIQNPDPAVYQLRDSKSSDKSVCLFTDFDSQTNVSQSKDSDVYITDKCVLDMRSMDFKSNSAVAWSNKSDFACANAFNNSIIPEDTFFPSPESSCGFTSESYQQGVLSATILYEILLGKATLYAVLVSALVLMAMVKRKDSRGRAKRSGSGVKQTLNFDLLKLAGDVESNPGPTSMDWIWRILFLVGAATGAHSFEEVQVLESGGGLVQPGGSLRLSCAASGFTFSSYAMSWVRQAPGKGLEWVSAISGSGGSTNYADSVKGRFTISRDNSKNTLYLQMNSLRAEDTAVYYCAGSSGWSEYWGQGTLVTVSSTREDLKNVFPPEVAVFEPSEAEISHTQKATLVCLATGFYPDHVELSWWVNGKEVHSGVCTDPQPLKEQPALNDSRYCLSSRLRVSATFWQNPRNHFRCQVQFYGLSENDEWTQDRAKPVTQIVSAEAWGRADCDVKLVEKSFETDTNLNFQNLSVIGFRILLLKVAGFNLLMTLRLWSS

SEQ ID NO: 12523 - protein, 624 aa, synthetic construct
MALPVTALLLPLALLLHAARPDEIQLVQSGAEVKKPGESLRISCKGSGFNIEDYYIHWVRQMPGKGLEWMGRIDPENDETKYGPIFQGHVTISADTSINTVYLQWSSLKASDTAMYYCAFRGGVYWGQGTTVTVSSLEIQNPDPAVYQLRDSKSSDKSVCLFTDFDSQTNVSQSKDSDVYITDKCVLDMRSMDFKSNSAVAWSNKSDFACANAFNNSIIPEDTFFPSPESSCGFTSESYQQGVLSATILYEILLGKATLYAVLVSALVLMAMVKRKDSRGRAKRSGSGVKQTLNFDLLKLAGDVESNPGPTSMDWIWRILFLVGAATGAHSFEDVVMTQSPDSLAVSLGERATINCKSSQSLLDSDGKTYLNWLQQKPGQPPKRLISLVSKLDSGVPDRFSGSGSGTDFTLTISSLQAEDVAVYYCWQGTHFPGTFGGGTKVEIKTREDLKNVFPPEVAVFEPSEAEISHTQKATLVCLATGFYPDHVELSWWVNGKEVHSGVCTDPQPLKEQPALNDSRYCLSSRLRVSATFWQNPRNHFRCQVQFYGLSENDEWTQDRAKPVTQIVSAEAWGRADCDVKLVEKSFETDTNLNFQNLSVIGFRILLLKVAGFNLLMTLRLWSS

SEQ ID NO: 12524 - protein, 631 aa, synthetic construct
MALPVTALLLPLALLLHAARPDELVMTQSPSSLTVTAGEKVTMSCKSSQSLLNSGNQKNYLTWYQQKPGQPPKLLIYWASTRESGVPDRFTGSGSGTDFTLTISSVQAEDLAVYYCQNDYSYPLTFGAGTKLEIKLEIQNPDPAVYQLRDSKSSDKSVCLFTDFDSQTNVSQSKDSDVYITDKCVLDMRSMDFKSNSAVAWSNKSDFACANAFNNSIIPEDTFFPSPESSCGFTSESYQQGVLSATILYEILLGKATLYAVLVSALVLMAMVKRKDSRGRAKRSGSGVKQTLNFDLLKLAGDVESNPGPTSMDWIWRILFLVGAATGAHSFEEVQLLEQSGAELVRPGTSVKISCKASGYAFTNYWLGWVKQRPGHGLEWIGDIFPGSGNIHYNEKFKGKATLTADKSSSTAYMQLSSLTFEDSAVYFCARLRNWDEPMDYWGQGTTVTVSSTREDLKNVFPPEVAVFEPSEAEISHTQKATLVCLATGFYPDHVELSWWVNGKEVHSGVCTDPQPLKEQPALNDSRYCLSSRLRVSATFWQNPRNHFRCQVQFYGLSENDEWTQDRAKPVTQIVSAEAWGRADCDVKLVEKSFETDTNLNFQNLSVIGFRILLLKVAGFNLLMTLRLWSS

SEQ ID NO: 12525 - protein, 632 aa, synthetic construct
MALPVTALLLPLALLLHAARPDELQMTQSPSSLSASVGDRVTITCRASQSISSYLNWYQQKPGQPPKLLIYWASTRESGVPDRFSGSESGTNYTLTISSLQPEDFATYFCQQSDSLPITFGQGTRLDIQLEIQNPDPAVYQLRDSKSSDKSVCLFTDFDSQTNVSQSKDSDVYITDKCVLDMRSMDFKSNSAVAWSNKSDFACANAFNNSIIPEDTFFPSPESSCGFTSESYQQGVLSATILYEILLGKATLYAVLVSALVLMAMVKRKDSRGRAKRSGSGVKQTLNFDLLKLAGDVESNPGPTSMDWIWRILFLVGAATGAHSFEEVQLLESGGGVVQPGRSLRLSCAASGFTFSSYGMHWVRQAPGKGLEWVAVISYDGSNKYYADSVKGRFTISRDNSKNTLYLQMNSLRAEDTAVYYCAKDMGWGSGWRPYYYYGMDVWGQGTTVTVSSTREDLKNVFPPEVAVFEPSEAEISHTQKATLVCLATGFYPDHVELSWWVNGKEVHSGVCTDPQPLKEQPALNDSRYCLSSRLRVSATFWQNPRNHFRCQVQFYGLSENDEWTQDRAKPVTQIVSAEAWGRADCDVKLVEKSFETDTNLNFQNLSVIGFRILLLKVAGFNLLMTLRLWSS

SEQ ID NO: 12526 - protein, 629 aa, synthetic construct
MALPVTALLLPLALLLHAARPDDIQMTQSPSSLSASVGDRVTITCRASQSISSYLNWYQQKPGKAPKLLIYAASSLQSGVPSRFSGSGSGTDFTLTISSLQPEDLATYYCQQSYSTPFTFGPGTKVDIKLEIQNPDPAVYQLRDSKSSDKSVCLFTDFDSQTNVSQSKDSDVYITDKCVLDMRSMDFKSNSAVAWSNKSDFACANAFNNSIIPEDTFFPSPESSCGFTSESYQQGVLSATILYEILLGKATLYAVLVSALVLMAMVKRKDSRGRAKRSGSGVKQTLNFDLLKLAGDVESNPGPTSMDWIWRILFLVGAATGAHSFEVHEVQLVQSGAEVKKPGSSVKVSCKASGGTFSSYAISWVRQAPGQGLEWMGGIIPIFGTANYAQKFQGRVTITADKSTSTAYMELSSLRSEDTAVYYCATFALFGFREQAFDIWGQGTTVTVSSTREDLKNVFPPEVAVFEPSEAEISHTQKATLVCLATGFYPDHVELSWWVNGKEVHSGVCTDPQPLKEQPALNDSRYCLSSRLRVSATFWQNPRNHFRCQVQFYGLSENDEWTQDRAKPVTQIVSAEAWGRADCDVKLVEKSFETDTNLNFQNLSVIGFRILLLKVAGFNLLMTLRLWSS

SEQ ID NO: 12527 - protein, 627 aa, synthetic construct
MALPVTALLLPLALLLHAARPDIVLTQSPLSLAVSLGQPAIISCKASQSVSFAGTSLMHWYHQKPGQQPRLLIYRASNLEAGVPDRFSGSGSKTDFTLTISPVEAEDAATYYCQQSREYPYTFGGGTKLEIKRLEIQNPDPAVYQLRDSKSSDKSVCLFTDFDSQTNVSQSKDSDVYITDKCVLDMRSMDFKSNSAVAWSNKSDFACANAFNNSIIPEDTFFPSPESSCGFTSESYQQGVLSATILYEILLGKATLYAVLVSALVLMAMVKRKDSRGRAKRSGSGVKQTLNFDLLKLAGDVESNPGPTSMDWIWRILFLVGAATGAHSFEQVQLVQSGAEVVKPGASVKISCKASGYTFTGYFMNWVKQSPGQSLEWIGRIHPYDGDTFYNQKFQGKATLTVDKSSNTAHMELLSLTSEDFAVYYCTRYDGSRAMDYWGQGTTVTVSSTREDLKNVFPPEVAVFEPSEAEISHTQKATLVCLATGFYPDHVELSWWVNGKEVHSGVCTDPQPLKEQPALNDSRYCLSSRLRVSATFWQNPRNHFRCQVQFYGLSENDEWTQDRAKPVTQIVSAEAWGRADCDVKLVEKSFETDTNLNFQNLSVIGFRILLLKVAGFNLLMTLRLWSS

SEQ ID NO: 12528 - protein, 624 aa, synthetic construct
MALPVTALLLPLALLLHAARPDDVVMTQTPLSLPVTPGEPASISCRSSQSLVHRNGNTYLHWYLQKPGQSPKLLIHKVSNRFSGVPDRFSGSGSGTDFTLKISRVEAEDLGVYFCSQSTHVPPLTFGAGTKLELKLEIQNPDPAVYQLRDSKSSDKSVCLFTDFDSQTNVSQSKDSDVYITDKCVLDMRSMDFKSNSAVAWSNKSDFACANAFNNSIIPEDTFFPSPESSCGFTSESYQQGVLSATILYEILLGKATLYAVLVSALVLMAMVKRKDSRGRAKRSGSGVKQTLNFDLLKLAGDVESNPGPTSMDWIWRILFLVGAATGAHSFEEVQLVQSGAEVEKPGASVKISCKASGSSFTGYNMNWVRQNIGKSLEWIGAIDPYYGGTSYNQKFKGRATLTVDKSTSTAYMHLKSLRSEDTAVYYCVSGMEYWGQGTSVTVSSTREDLKNVFPPEVAVFEPSEAEISHTQKATLVCLATGFYPDHVELSWWVNGKEVHSGVCTDPQPLKEQPALNDSRYCLSSRLRVSATFWQNPRNHFRCQVQFYGLSENDEWTQDRAKPVTQIVSAEAWGRADCDVKLVEKSFETDTNLNFQNLSVIGFRILLLKVAGFNLLMTLRLWSS

SEQ ID NO: 12529 - protein, 622 aa, synthetic construct
MALPVTALLLPLALLLHAARPDEIVMTQTPATLSVSAGERVTITCKASQSVSNDVTWYQQKPGQAPRLLIYSASNRYSGVPARFSGSGYGTEFTFTISSVQSEDFAVYFCQQDYSSFGQGTKLEIKRLEIQNPDPAVYQLRDSKSSDKSVCLFTDFDSQTNVSQSKDSDVYITDKCVLDMRSMDFKSNSAVAWSNKSDFACANAFNNSIIPEDTFFPSPESSCGFTSESYQQGVLSATILYEILLGKATLYAVLVSALVLMAMVKRKDSRGRAKRSGSGVKQTLNFDLLKLAGDVESNPGPTSMDWIWRILFLVGAATGAHSFEQVQLVESGPGVVQPGRSLRISCAVSGFSVTNYGVHWVRQPPGKGLEWLGVIWAGGITNYNSAFMSRLTISKDNSKNTVYLQMNSLRAEDTAMYYCASRGGHYGYALDYWGQGTLVTVSSTREDLKNVFPPEVAVFEPSEAEISHTQKATLVCLATGFYPDHVELSWWVNGKEVHSGVCTDPQPLKEQPALNDSRYCLSSRLRVSATFWQNPRNHFRCQVQFYGLSENDEWTQDRAKPVTQIVSAEAWGRADCDVKLVEKSFETDTNLNFQNLSVIGFRILLLKVAGFNLLMTLRLWSS

SEQ ID NO: 12530 - protein, 624 aa, synthetic construct
MALPVTALLLPLALLLHAARPDIQMTQTASSLPASLGDRVTISCSASQDISNYLNWYQQKPDGTVKLLIFYSSNLHSGVPSRFSGGGSGTDYSLTISNLEPEDIATYFCHQYSKLPWTFGGGTKLEIKRLEIQNPDPAVYQLRDSKSSDKSVCLFTDFDSQTNVSQSKDSDVYITDKCVLDMRSMDFKSNSAVAWSNKSDFACANAFNNSIIPEDTFFPSPESSCGFTSESYQQGVLSATILYEILLGKATLYAVLVSALVLMAMVKRKDSRGRAKRSGSGVKQTLNFDLLKLAGDVESNPGPTSMDWIWRILFLVGAATGAHSFEEVTLVESGGDFVKPGGSLKVSCAASGFAFSHYAMSWVRQTPAKRLEWVAYISSGGSGTYYSDSVKGRFTISRDNAKNTLYLQMRSLRSEDSAMYFCTRVKLGTYYFDSWGQGTTLTVSSTREDLKNVFPPEVAVFEPSEAEISHTQKATLVCLATGFYPDHVELSWWVNGKEVHSGVCTDPQPLKEQPALNDSRYCLSSRLRVSATFWQNPRNHFRCQVQFYGLSENDEWTQDRAKPVTQIVSAEAWGRADCDVKLVEKSFETDTNLNFQNLSVIGFRILLLKVAGFNLLMTLRLWSS

SEQ ID NO: 12531 - protein, 626 aa, synthetic construct
MALPVTALLLPLALLLHAARPQFVLTQSPSASAALGASAKLTCTLSSAHKTYTIDWYQQQKGKAPRYLIQVKSDGTYTKATGVPDRFSGSSSGADRYLIIPSVQADDEADYYCGTDYTGGYVFGGGTQLTVTLEIQNPDPAVYQLRDSKSSDKSVCLFTDFDSQTNVSQSKDSDVYITDKCVLDMRSMDFKSNSAVAWSNKSDFACANAFNNSIIPEDTFFPSPESSCGFTSESYQQGVLSATILYEILLGKATLYAVLVSALVLMAMVKRKDSRGRAKRSGSGVKQTLNFDLLKLAGDVESNPGPTSMDWIWRILFLVGAATGAHSFEEQLKESGGGLFKPTDTLTLTCTVSGFSLSYYGVNWVRQAPGNGLEWIGTIGGSGDTYYASWAKSRSTIIRNTNENTVTLKMTSLTAADTATYFCVRYANIGYEYFNVWGPGTLVTVSSTREDLKNVFPPEVAVFEPSEAEISHTQKATLVCLATGFYPDHVELSWWVNGKEVHSGVCTDPQPLKEQPALNDSRYCLSSRLRVSATFWQNPRNHFRCQVQFYGLSENDEWTQDRAKPVTQIVSAEAWGRADCDVKLVEKSFETDTNLNFQNLSVIGFRILLLKVAGFNLLMTLRLWSS

SEQ ID NO: 12532 - protein, 631 aa, synthetic construct
MALPVTALLLPLALLLHAARPQFVLTQSPSVSAALGASAKLTCTLSSAHKTYTIDWYQQQQGEAPRYLMQVKSDGSYTKGTGVPDRFSGSSSGADRYLIIPSVQADDEAGYVCGADDNGGYVFGGGTQLTVTLEIQNPDPAVYQLRDSKSSDKSVCLFTDFDSQTNVSQSKDSDVYITDKCVLDMRSMDFKSNSAVAWSNKSDFACANAFNNSIIPEDTFFPSPESSCGFTSESYQQGVLSATILYEILLGKATLYAVLVSALVLMAMVKRKDSRGRAKRSGSGVKQTLNFDLLKLAGDVESNPGPTSMDWIWRILFLVGAATGAHSFEQSVKESEGGLFKPTDTLTLTCTVSGFSLSRHALTWVRQAPGNGLEWIGAIDNAGTTYYASWAKSRSTITRNTDLHTVTLKMTSLTASDTATYFCARVFYDINSGYYLDGMDLWGPGTLVTVSSTREDLKNVFPPEVAVFEPSEAEISHTQKATLVCLATGFYPDHVELSWWVNGKEVHSGVCTDPQPLKEQPALNDSRYCLSSRLRVSATFWQNPRNHFRCQVQFYGLSENDEWTQDRAKPVTQIVSAEAWGRADCDVKLVEKSFETDTNLNFQNLSVIGFRILLLKVAGFNLLMTLRLWSS

SEQ ID NO: 12533 - protein, 625 aa, synthetic construct
MALPVTALLLPLALLLHAARPDIQMTQSPSSLSASVGDRVTITCRASQGISSWLAWYQQKPEKAPKSLIYAASSLQSGVPSRFSGSGSGTDFTLTISSLQPEDFATYYCQQYNSYPPTFGGGTKVEIKLEIQNPDPAVYQLRDSKSSDKSVCLFTDFDSQTNVSQSKDSDVYITDKCVLDMRSMDFKSNSAVAWSNKSDFACANAFNNSIIPEDTFFPSPESSCGFTSESYQQGVLSATILYEILLGKATLYAVLVSALVLMAMVKRKDSRGRAKRSGSGVKQTLNFDLLKLAGDVESNPGPTSMDWIWRILFLVGAATGAHSFEEVQLVESGGGLVQPGESLRLSCVASGFTFSRYKMNWVRQAPGKGLEWVSYISRSGRDIYYADSVKGRFTISRDNAKNSLYLQMNSLRDEDTAVYYCAGTVTTYYYFGMDVWGHGTTVTVSSTREDLKNVFPPEVAVFEPSEAEISHTQKATLVCLATGFYPDHVELSWWVNGKEVHSGVCTDPQPLKEQPALNDSRYCLSSRLRVSATFWQNPRNHFRCQVQFYGLSENDEWTQDRAKPVTQIVSAEAWGRADCDVKLVEKSFETDTNLNFQNLSVIGFRILLLKVAGFNLLMTLRLWSS

SEQ ID NO: 12534 - protein, 626 aa, synthetic construct
MALPVTALLLPLALLLHAARPDIQMTQSPSSLSASVGDRVTITCRASQGISSWLAWYQQKPEKAPKSLIYAASSLQSGVPSRFSGSGSGTDFTLTISSLQPEDFATYYCQQYNSYPPTFGGGTKVEIKLEIQNPDPAVYQLRDSKSSDKSVCLFTDFDSQTNVSQSKDSDVYITDKCVLDMRSMDFKSNSAVAWSNKSDFACANAFNNSIIPEDTFFPSPESSCGFTSESYQQGVLSATILYEILLGKATLYAVLVSALVLMAMVKRKDSRGRAKRSGSGVKQTLNFDLLKLAGDVESNPGPTSMDWIWRILFLVGAATGAHSFEEVQLVESGGGSVQPGESLRLSCVASGFTFSRYKMNWVRQAPGKGLEWVSYISRSGRDIYYADSVKGRFTISRDNAKNSLYLQMNSLRDEDTAVYYCAGTVTTYYYDFGMDVWGQGTTVTVSSTREDLKNVFPPEVAVFEPSEAEISHTQKATLVCLATGFYPDHVELSWWVNGKEVHSGVCTDPQPLKEQPALNDSRYCLSSRLRVSATFWQNPRNHFRCQVQFYGLSENDEWTQDRAKPVTQIVSAEAWGRADCDVKLVEKSFETDTNLNFQNLSVIGFRILLLKVAGFNLLMTLRLWSS

SEQ ID NO: 12535 - protein, 624 aa, synthetic construct
MALPVTALLLPLALLLHAARPQSVLTQPPSASGTPGQRVTISCSGSRSNVGGNYVFWYQQVPGATPKLLIYRSNQRPSGVPDRFAGSKSGSSASLAISGLRSEDEADYYCATWDDSLSGFVFGTGTKVTVLGLEIQNPDPAVYQLRDSKSSDKSVCLFTDFDSQTNVSQSKDSDVYITDKCVLDMRSMDFKSNSAVAWSNKSDFACANAFNNSIIPEDTFFPSPESSCGFTSESYQQGVLSATILYEILLGKATLYAVLVSALVLMAMVKRKDSRGRAKRSGSGVKQTLNFDLLKLAGDVESNPGPTSMDWIWRILFLVGAATGAHSFEVQLVESGGGLVKPGGSLRLSCAASGFTFSDYYMSWIRQAPGKGLEWVSYISSSGSTIYYADSVKGRFTISRDNAKNSLYLQMNSLRAEDTAVYYCARGYGKAYDQWGQGTLVTVSSTREDLKNVFPPEVAVFEPSEAEISHTQKATLVCLATGFYPDHVELSWWVNGKEVHSGVCTDPQPLKEQPALNDSRYCLSSRLRVSATFWQNPRNHFRCQVQFYGLSENDEWTQDRAKPVTQIVSAEAWGRADCDVKLVEKSFETDTNLNFQNLSVIGFRILLLKVAGFNLLMTLRLWSS

SEQ ID NO: 12536 - protein, 623 aa, synthetic construct
MALPVTALLLPLALLLHAARPQSVVTQPPSMSAAPGQQVTISCSGGNSNIERNYVSWYLQLPGTAPKLVIFDNDRRPSGIPDRFSGSKSGTSATLGITGLQTGDEADYYCGTWDSSLRGWVFGGGTKLTVLGLEIQNPDPAVYQLRDSKSSDKSVCLFTDFDSQTNVSQSKDSDVYITDKCVLDMRSMDFKSNSAVAWSNKSDFACANAFNNSIIPEDTFFPSPESSCGFTSESYQQGVLSATILYEILLGKATLYAVLVSALVLMAMVKRKDSRGRAKRSGSGVKQTLNFDLLKLAGDVESNPGPTSMDWIWRILFLVGAATGAHSFEVQLVESGGGLIQPGGSLRLSCAASGFTFSNYAMNWVRQAPGKGLEWVSTINGRGSSTIYADSVKGRFTISRDNSKNTLYLQMNSLRAEDTATYYCARYISRGLGDSWGQGTLVTVTREDLKNVFPPEVAVFEPSEAEISHTQKATLVCLATGFYPDHVELSWWVNGKEVHSGVCTDPQPLKEQPALNDSRYCLSSRLRVSATFWQNPRNHFRCQVQFYGLSENDEWTQDRAKPVTQIVSAEAWGRADCDVKLVEKSFETDTNLNFQNLSVIGFRILLLKVAGFNLLMTLRLWSS

SEQ ID NO: 12537 - protein, 624 aa, synthetic construct
MALPVTALLLPLALLLHAARPDVVMTQTPLSLPVSLGDQASISCRSSQSLVHSNGNTYLHWYLQKPGQSPKLLIYKVSNRFSGVPDRFSGSGSGTDFTLKISRVEAEDLGVYFCSQNTPVPPKFGSGTKLEIKLEIQNPDPAVYQLRDSKSSDKSVCLFTDFDSQTNVSQSKDSDVYITDKCVLDMRSMDFKSNSAVAWSNKSDFACANAFNNSIIPEDTFFPSPESSCGFTSESYQQGVLSATILYEILLGKATLYAVLVSALVLMAMVKRKDSRGRAKRSGSGVKQTLNFDLLKLAGDVESNPGPTSMDWIWRILFLVGAATGAHSFEQVQLQQSGAELVRPGASVKLSCKASGYTFNDYEMHWVKQTPVHGLKWIGALEPKTGDTAYSQKFKGKATLTADKSSSTAYMELRSLTSEDSAVYYCTSCYYYTYSGQGTLVTVSATREDLKNVFPPEVAVFEPSEAEISHTQKATLVCLATGFYPDHVELSWWVNGKEVHSGVCTDPQPLKEQPALNDSRYCLSSRLRVSATFWQNPRNHFRCQVQFYGLSENDEWTQDRAKPVTQIVSAEAWGRADCDVKLVEKSFETDTNLNFQNLSVIGFRILLLKVAGFNLLMTLRLWSS

SEQ ID NO: 12538 - protein, 623 aa, synthetic construct
MALPVTALLLPLALLLHAARPDIQLTQSPSSLSASVGDRVTITCRASQGIRNDLGWYQQKPGKAPKRLIYAASSLQNGVPSRFSGSGSGTEFTLTISSLQPEDFATYYCLQHNTYPAFGQGTKVEIKRLEIQNPDPAVYQLRDSKSSDKSVCLFTDFDSQTNVSQSKDSDVYITDKCVLDMRSMDFKSNSAVAWSNKSDFACANAFNNSIIPEDTFFPSPESSCGFTSESYQQGVLSATILYEILLGKATLYAVLVSALVLMAMVKRKDSRGRAKRSGSGVKQTLNFDLLKLAGDVESNPGPTSMDWIWRILFLVGAATGAHSFEQVQLQESGPGLVKPSQTLSLTCTVSGGSISSFNYYWSWIRHHPGKGLEWIGYIYYSGSTYSNPSLKSRVTISVDTSKNQFSLTLSSVTAADTAVYYCARGYNWNYFDYWGQGTLVTVSSTREDLKNVFPPEVAVFEPSEAEISHTQKATLVCLATGFYPDHVELSWWVNGKEVHSGVCTDPQPLKEQPALNDSRYCLSSRLRVSATFWQNPRNHFRCQVQFYGLSENDEWTQDRAKPVTQIVSAEAWGRADCDVKLVEKSFETDTNLNFQNLSVIGFRILLLKVAGFNLLMTLRLWSS

SEQ ID NO: 12539 - protein, 625 aa, synthetic construct
MALPVTALLLPLALLLHAARPDDIVLTQSPASLAVSLGQSVTISCRASESVEYYGTSLMQWYQQKPGQPPKLLIYATSNVESGVPARFSGSGSGTDFSLNIHPVEEDDIAMYFCQQSRKLPSTFGGGTKLEIKLEIQNPDPAVYQLRDSKSSDKSVCLFTDFDSQTNVSQSKDSDVYITDKCVLDMRSMDFKSNSAVAWSNKSDFACANAFNNSIIPEDTFFPSPESSCGFTSESYQQGVLSATILYEILLGKATLYAVLVSALVLMAMVKRKDSRGRAKRSGSGVKQTLNFDLLKLAGDVESNPGPTSMDWIWRILFLVGAATGAHSFEDVRLQESGPGQVKPSQTVSLTCSVTGYSITNGNHWWNWIRQVSGSKLEWIGYISSSGSTDSNPSLKSRISITRDTSKNQLFLQLNSVTTEDIATYYCARGYYFDYWGQGTTLTVSSTREDLKNVFPPEVAVFEPSEAEISHTQKATLVCLATGFYPDHVELSWWVNGKEVHSGVCTDPQPLKEQPALNDSRYCLSSRLRVSATFWQNPRNHFRCQVQFYGLSENDEWTQDRAKPVTQIVSAEAWGRADCDVKLVEKSFETDTNLNFQNLSVIGFRILLLKVAGFNLLMTLRLWSS

SEQ ID NO: 12540 - protein, 624 aa, synthetic construct
MALPVTALLLPLALLLHAARPDIQMTQSPSSLSASVGDRVTITCRASQDVNTAVAWYQQKPGKAPKLLIYSASFLESGVPSRFSGSRSGTDFTLTISSLQPEDFATYYCQQHYTTPPTFGQTKVEIKRLEIQNPDPAVYQLRDSKSSDKSVCLFTDFDSQTNVSQSKDSDVYITDKCVLDMRSMDFKSNSAVAWSNKSDFACANAFNNSIIPEDTFFPSPESSCGFTSESYQQGVLSATILYEILLGKATLYAVLVSALVLMAMVKRKDSRGRAKRSGSGVKQTLNFDLLKLAGDVESNPGPTSMDWIWRILFLVGAATGAHSFEEVQLVESGGGLVQPGGSLRLSCAASGFNIKDTYIHWVRQAPGKGLEWVARIYPTNGYTRYADSVKGRFTISADTSKNTAYLQMNSLRAEDTAVYYCSRWGGDGFYAMDVWGQGTLVTVSSTREDLKNVFPPEVAVFEPSEAEISHTQKATLVCLATGFYPDHVELSWWVNGKEVHSGVCTDPQPLKEQPALNDSRYCLSSRLRVSATFWQNPRNHFRCQVQFYGLSENDEWTQDRAKPVTQIVSAEAWGRADCDVKLVEKSFETDTNLNFQNLSVIGFRILLLKVAGFNLLMTLRLWSS

SEQ ID NO: 12541 - protein, 623 aa, synthetic construct
MALPVTALLLPLALLLHAARPDQSVLTQPPSVSVAPGKTARIPCEGNYIGSSNVHWYQQKPGQAPVLVIHFDSDRPSGIPDRFSGSNSGNMATLTISRVEAGDEADYYCQVWENHGWVFGGGTKLTVLSLEIQNPDPAVYQLRDSKSSDKSVCLFTDFDSQTNVSQSKDSDVYITDKCVLDMRSMDFKSNSAVAWSNKSDFACANAFNNSIIPEDTFFPSPESSCGFTSESYQQGVLSATILYEILLGKATLYAVLVSALVLMAMVKRKDSRGRAKRSGSGVKQTLNFDLLKLAGDVESNPGPTSMDWIWRILFLVGAATGAHSFEEVQLVETGGGLVQPGESLRLSCAASGFTFSDYEMNWVRQAPGKGLEWVSYISSSGSTIYYADSVKGRFTIYRDNAKNSLYLQMNSLRAEDTALYYCARAWGVGPPDYWGQGTLVTVSSTREDLKNVFPPEVAVFEPSEAEISHTQKATLVCLATGFYPDHVELSWWVNGKEVHSGVCTDPQPLKEQPALNDSRYCLSSRLRVSATFWQNPRNHFRCQVQFYGLSENDEWTQDRAKPVTQIVSAEAWGRADCDVKLVEKSFETDTNLNFQNLSVIGFRILLLKVAGFNLLMTLRLWSS

SEQ ID NO: 12542 - protein, 631 aa, synthetic construct
MALPVTALLLPLALLLHAARPDIQMTQSPSSLSASVGDTVTITCQANGYLNWYQQRRGKAPKLLIYDGSKLERGVPSRFSGRRWGQEYNLTINNLQPEDIATYFCQVYEFVVPGTRLDLKRTVAAPLEIQNPDPAVYQLRDSKSSDKSVCLFTDFDSQTNVSQSKDSDVYITDKCVLDMRSMDFKSNSAVAWSNKSDFACANAFNNSIIPEDTFFPSPESSCGFTSESYQQGVLSATILYEILLGKATLYAVLVSALVLMAMVKRKDSRGRAKRSGSGVKQTLNFDLLKLAGDVESNPGPTSMDWIWRILFLVGAATGAHSFEQVQLLQSGAAVTKPGASVRVSCEASGYNIRDYFIHWWRQAPGQGLQWVGWINPKTGQPNNPRQFQGRVSLTRHASWDFDTFSFYMDLKALRSDDTAVYFCARQRSDYWDFDVWGSGTQVTVSSASTKGPTREDLKNVFPPEVAVFEPSEAEISHTQKATLVCLATGFYPDHVELSWWVNGKEVHSGVCTDPQPLKEQPALNDSRYCLSSRLRVSATFWQNPRNHFRCQVQFYGLSENDEWTQDRAKPVTQIVSAEAWGRADCDVKLVEKSFETDTNLNFQNLSVIGFRILLLKVAGFNLLMTLRLWSS

SEQ ID NO: 12543 - protein, 637 aa, synthetic construct
MALPVTALLLPLALLLHAARPQSALTQPPSASGSPGQSITISCTGTSNNFVSWYQQHAGKAPKLVIYDVNKRPSGVPDRFSGSKSGNTASLTVSGLQTDDEAVYYCGSLVGNWDVIFGGGTKLTVLLEIQNPDPAVYQLRDSKSSDKSVCLFTDFDSQTNVSQSKDSDVYITDKCVLDMRSMDFKSNSAVAWSNKSDFACANAFNNSIIPEDTFFPSPESSCGFTSESYQQGVLSATILYEILLGKATLYAVLVSALVLMAMVKRKDSRGRAKRSGSGVKQTLNFDLLKLAGDVESNPGPTSMDWIWRILFLVGAATGAHSFEQPQLQESGPTLVEASETLSLTCAVSGDSTAACNSFWGWVRQPPGKGLEWVGSLSHCASYWNRGWTYHNPSLKSRLTLALDTPKNLVFLKLNSVTAADTATYYCARFGGEVLRYTDWPKPAWVDLWGRGTLVTVSSTREDLKNVFPPEVAVFEPSEAEISHTQKATLVCLATGFYPDHVELSWWVNGKEVHSGVCTDPQPLKEQPALNDSRYCLSSRLRVSATFWQNPRNHFRCQVQFYGLSENDEWTQDRAKPVTQIVSAEAWGRADCDVKLVEKSFETDTNLNFQNLSVIGFRILLLKVAGFNLLMTLRLWSS

SEQ ID NO: 12544 - protein, 622 aa, synthetic construct
MALPVTALLLPLALLLHAARPEIVLTQSPGTLSLSPGETAIISCRTSQYGSLAWYQQRPGQAPRLVIYSGSTRAAGIPDRFSGSRWGPDYNLTISNLESGDFGVYYCQQYEFFGQGTKVQVDIKRLEIQNPDPAVYQLRDSKSSDKSVCLFTDFDSQTNVSQSKDSDVYITDKCVLDMRSMDFKSNSAVAWSNKSDFACANAFNNSIIPEDTFFPSPESSCGFTSESYQQGVLSATILYEILLGKATLYAVLVSALVLMAMVKRKDSRGRAKRSGSGVKQTLNFDLLKLAGDVESNPGPTSMDWIWRILFLVGAATGAHSFEQVQLVQSGGQMKKPGESMRISCRASGYEFIDCTLNWIRLAPGKRPEWMGWLKPRGGAVNYARPLQGRVTMTRDVYSDTAFLELRSLTVDDTAVYFCTRGKNCDYNWDFEHWGRGTPVIVSSTREDLKNVFPPEVAVFEPSEAEISHTQKATLVCLATGFYPDHVELSWWVNGKEVHSGVCTDPQPLKEQPALNDSRYCLSSRLRVSATFWQNPRNHFRCQVQFYGLSENDEWTQDRAKPVTQIVSAEAWGRADCDVKLVEKSFETDTNLNFQNLSVIGFRILLLKVAGFNLLMTLRLWSS

SEQ ID NO: 12545 - protein, 632 aa, synthetic construct
MALPVTALLLPLALLLHAARPELVLTQSPGTLSLSAGERATLSCRASQSVSSGSLAWYQQKPGQAPRLLIYGASTRATGIPDRFSGSGSGTDFTLTIGRLEPEDLAVYYCQQYGTSPYTFGQGTKLEILEIQNPDPAVYQLRDSKSSDKSVCLFTDFDSQTNVSQSKDSDVYITDKCVLDMRSMDFKSNSAVAWSNKSDFACANAFNNSIIPEDTFFPSPESSCGFTSESYQQGVLSATILYEILLGKATLYAVLVSALVLMAMVKRKDSRGRAKRSGSGVKQTLNFDLLKLAGDVESNPGPTSMDWIWRILFLVGAATGAHSFELEQSGAEVKKPGSSVQVSCKASGGTFSMYGFNWVRQAPGHGLEWMGGIIPIFGTSNYAQKFRGRVTFTADQATSTAYMELTNLRSDDTAVYYCARDFGPDWEDGDSYDGSGRGFFDFWGQGTLVTVSSTREDLKNVFPPEVAVFEPSEAEISHTQKATLVCLATGFYPDHVELSWWVNGKEVHSGVCTDPQPLKEQPALNDSRYCLSSRLRVSATFWQNPRNHFRCQVQFYGLSENDEWTQDRAKPVTQIVSAEAWGRADCDVKLVEKSFETDTNLNFQNLSVIGFRILLLKVAGFNLLMTLRLWSS

SEQ ID NO: 12546 - protein, 612 aa, synthetic construct
MALPVTALLLPLALLLHAARPDIQMTQSPSSLSASVGDRVTITCQASQDINNYLNWYQQKPGKAPKLLIYDASNLQTGVPSRFSGSGSGTDFTFTIEDIATYYCQQYTFGPGTKVDIKLEIQNPDPAVYQLRDSKSSDKSVCLFTDFDSQTNVSQSKDSDVYITDKCVLDMRSMDFKSNSAVAWSNKSDFACANAFNNSIIPEDTFFPSPESSCGFTSESYQQGVLSATILYEILLGKATLYAVLVSALVLMAMVKRKDSRGRAKRSGSGVKQTLNFDLLKLAGDVESNPGPTSMDWIWRILFLVGAATGAHSFEEVQLLESGGGLVQPGGSLRLSCAASGFTFSWYSMTWVRQAPGKGLEWVSSIVPWGDFTQYADSVKGRFTISRDNSKNTLYLQMNSLRAEDTAVYYCAKGPGWGSFDLWGRGTLVTVSSTREDLKNVFPPEVAVFEPSEAEISHTQKATLVCLATGFYPDHVELSWWVNGKEVHSGVCTDPQPLKEQPALNDSRYCLSSRLRVSATFWQNPRNHFRCQVQFYGLSENDEWTQDRAKPVTQIVSAEAWGRADCDVKLVEKSFETDTNLNFQNLSVIGFRILLLKVAGFNLLMTLRLWSS

SEQ ID NO: 12547 - protein, 622 aa, synthetic construct
MALPVTALLLPLALLLHAARPDIQMTQSPSSLSASVGDRVTITCTASLSVSSTYLHWYQQKPGSSPKLWIYSTSNLASGVPSRFSGSGSGTSYTLTISSLQPEDFATYYCHQYHRSPLTFGGGTKVEIKRLEIQNPDPAVYQLRDSKSSDKSVCLFTDFDSQTNVSQSKDSDVYITDKCVLDMRSMDFKSNSAVAWSNKSDFACANAFNNSIIPEDTFFPSPESSCGFTSESYQQGVLSATILYEILLGKATLYAVLVSALVLMAMVKRKDSRGRAKRSGSGVKQTLNFDLLKLAGDVESNPGPTSMDWIWRILFLVGAATGAHSFEEVQLVESGGGLVQPGGSLRLSCAASGFSLTKYGVHWVRQAPGKGLEWVGVKWAGGSTDYNSALMSRFTISKDNAKNSLYLQMNSLRAEDTAVYYCARDHRDAMDYWGQGTLVTVSSTREDLKNVFPPEVAVFEPSEAEISHTQKATLVCLATGFYPDHVELSWWVNGKEVHSGVCTDPQPLKEQPALNDSRYCLSSRLRVSATFWQNPRNHFRCQVQFYGLSENDEWTQDRAKPVTQIVSAEAWGRADCDVKLVEKSFETDTNLNFQNLSVIGFRILLLKVAGFNLLMTLRLWSS

SEQ ID NO: 12548 - protein, 626 aa, synthetic construct
MALPVTALLLPLALLLHAARPDIQMTQSPSSLSASVGDRVTITCKASQDVGTAVAWYQQKPGKAPKLLIYSASYRSTGVPSRFSGSGSGTDFTLTISSLQPEDFATYYCQHHYSAPWTFGGGTKVEIKLEIQNPDPAVYQLRDSKSSDKSVCLFTDFDSQTNVSQSKDSDVYITDKCVLDMRSMDFKSNSAVAWSNKSDFACANAFNNSIIPEDTFFPSPESSCGFTSESYQQGVLSATILYEILLGKATLYAVLVSALVLMAMVKRKDSRGRAKRSGSGVKQTLNFDLLKLAGDVESNPGPTSMDWIWRILFLVGAATGAHSFEEVQLVESGGGLVQPGGSLRLSCAASGFTFSRNGMSWVRQAPGKGLEWVATVSSGGSYIYYADSVKGRFTISRDNAKNSLYLQMNSLRAEDTAVYYCARQGTTALATRFFDVWGQGTLVTVSSTREDLKNVFPPEVAVFEPSEAEISHTQKATLVCLATGFYPDHVELSWWVNGKEVHSGVCTDPQPLKEQPALNDSRYCLSSRLRVSATFWQNPRNHFRCQVQFYGLSENDEWTQDRAKPVTQIVSAEAWGRADCDVKLVEKSFETDTNLNFQNLSVIGFRILLLKVAGFNLLMTLRLWSS

SEQ ID NO: 12549 - protein, 622 aa, synthetic construct
MALPVTALLLPLALLLHAARPDIQMTQSPPSLSASVGGKVTITCKASQDIDRYMAWYQDKPGKGPKLLIHDTSTLQPGIPSRFSGSGSGRDYSFSISNLEPEDIATYYCLQYDNLWTFGGGTKLEIKRLEIQNPDPAVYQLRDSKSSDKSVCLFTDFDSQTNVSQSKDSDVYITDKCVLDMRSMDFKSNSAVAWSNKSDFACANAFNNSIIPEDTFFPSPESSCGFTSESYQQGVLSATILYEILLGKATLYAVLVSALVLMAMVKRKDSRGRAKRSGSGVKQTLNFDLLKLAGDVESNPGPTSMDWIWRILFLVGAATGAHSFEQVQLVQSGAELVKPGASVKMSCKASGYIFTNYNIHWVKKSPGQGLEWIGAIYPGNGDAPYSQKFQDRATLTADTSSSTTYMELSSLTSEDSAVYYCVRANWDVAFAYWGQGTLVSVSSTREDLKNVFPPEVAVFEPSEAEISHTQKATLVCLATGFYPDHVELSWWVNGKEVHSGVCTDPQPLKEQPALNDSRYCLSSRLRVSATFWQNPRNHFRCQVQFYGLSENDEWTQDRAKPVTQIVSAEAWGRADCDVKLVEKSFETDTNLNFQNLSVIGFRILLLKVAGFNLLMTLRLWSS

SEQ ID NO: 12550 - protein, 623 aa, synthetic construct
MALPVTALLLPLALLLHAARPDIQMTQSPASLSASVGETVTITCRVSGNIHNYLAWYQQKQGKSPQLLVYNAKTLADGVPSRFSGSGSGTQYSLKINSLQPEDFGSYYCQHFWSNPYTFGGGTKLEIKLEIQNPDPAVYQLRDSKSSDKSVCLFTDFDSQTNVSQSKDSDVYITDKCVLDMRSMDFKSNSAVAWSNKSDFACANAFNNSIIPEDTFFPSPESSCGFTSESYQQGVLSATILYEILLGKATLYAVLVSALVLMAMVKRKDSRGRAKRSGSGVKQTLNFDLLKLAGDVESNPGPTSMDWIWRILFLVGAATGAHSFEQVQLQQSGASVKVSCKASELVRPGTGYAFTNYLIEWVKQRPGQGLEWIGVINPGSGGTNYNEKFKGKATLTADKSSSTAYMQLSSLTSDDSAVYFCARYRSYDWYFDVWGAGTTVTVSSTREDLKNVFPPEVAVFEPSEAEISHTQKATLVCLATGFYPDHVELSWWVNGKEVHSGVCTDPQPLKEQPALNDSRYCLSSRLRVSATFWQNPRNHFRCQVQFYGLSENDEWTQDRAKPVTQIVSAEAWGRADCDVKLVEKSFETDTNLNFQNLSVIGFRILLLKVAGFNLLMTLRLWSS

SEQ ID NO: 12551 - protein, 622 aa, synthetic construct
MALPVTALLLPLALLLHAARPDIQMTQSFSSLSASVGDRVTITCRASQDISNYLNWYQQKPGKAPKLLIYYTSRLHSGVPSRFSGSGSGTDYTLTISSLQPEDFATYFCQQGNTLPWTFGGGTKLEIKRLEIQNPDPAVYQLRDSKSSDKSVCLFTDFDSQTNVSQSKDSDVYITDKCVLDMRSMDFKSNSAVAWSNKSDFACANAFNNSIIPEDTFFPSPESSCGFTSESYQQGVLSATILYEILLGKATLYAVLVSALVLMAMVKRKDSRGRAKRSGSGVKQTLNFDLLKLAGDVESNPGPTSMDWIWRILFLVGAATGAHSFEEVQLVQSGGGLVQSGGSLRLSCRASGYTFTRYWMLWVRQRPGKGLEWVAEINPRNDRTNYNEKFKTRFTISVDRSKNTLYLQMDSLRAEDTAVYFCALGGGYAMDYWGQGTLVTVSSTREDLKNVFPPEVAVFEPSEAEISHTQKATLVCLATGFYPDHVELSWWVNGKEVHSGVCTDPQPLKEQPALNDSRYCLSSRLRVSATFWQNPRNHFRCQVQFYGLSENDEWTQDRAKPVTQIVSAEAWGRADCDVKLVEKSFETDTNLNFQNLSVIGFRILLLKVAGFNLLMTLRLWSS

SEQ ID NO: 12552 - protein, 623 aa, synthetic construct
MALPVTALLLPLALLLHAARPDIQMTQSPASLSASVGETVTIICRASVNIYSYLAWYQQKQGKSPQLLVYNAKILAEGVPSRFSGSGSGTQFSLKINSLQPEDFGSYYCQHHYGTFTFGSGTKLEIKRLEIQNPDPAVYQLRDSKSSDKSVCLFTDFDSQTNVSQSKDSDVYITDKCVLDMRSMDFKSNSAVAWSNKSDFACANAFNNSIIPEDTFFPSPESSCGFTSESYQQGVLSATILYEILLGKATLYAVLVSALVLMAMVKRKDSRGRAKRSGSGVKQTLNFDLLKLAGDVESNPGPTSMDWIWRILFLVGAATGAHSFEQVQLKESGPGLVAPSQSLSITCTISGFSLTSYGVHWVRQPPGKGLEWLVVIWSDGSTTYNSALKSRLSISKDNSKSQVFLKMNSLQTDDTAIYYCASHYGSTLAFASWGHGTLVTVSAATREDLKNVFPPEVAVFEPSEAEISHTQKATLVCLATGFYPDHVELSWWVNGKEVHSGVCTDPQPLKEQPALNDSRYCLSSRLRVSATFWQNPRNHFRCQVQFYGLSENDEWTQDRAKPVTQIVSAEAWGRADCDVKLVEKSFETDTNLNFQNLSVIGFRILLLKVAGFNLLMTLRLWSS

SEQ ID NO: 12553 - protein, 631 aa, synthetic construct
MALPVTALLLPLALLLHAARPDIVMTQSHKFMSTSVGDRVSVTCKASQNVGNNVAWYQQKPGQSPKVLIYSASYRYSGVPDRFTGSGSGTDFTLTISNVQSEDLAEYFCQQYNTYPFTFGSGTKLEIKLEIQNPDPAVYQLRDSKSSDKSVCLFTDFDSQTNVSQSKDSDVYITDKCVLDMRSMDFKSNSAVAWSNKSDFACANAFNNSIIPEDTFFPSPESSCGFTSESYQQGVLSATILYEILLGKATLYAVLVSALVLMAMVKRKDSRGRAKRSGSGVKQTLNFDLLKLAGDVESNPGPTSMDWIWRILFLVGAATGAHSFEEVQLEESGGGLVQPGGSMKLSCVASGFTFSNYWMNWVRQSPEKGLEWVAEIRFKSHNYATHFAESVKGRFTISRDDSKSSVYLQMNNLRAEDTGIYYCTRRIGNSDYDWWYFDVWGAGTSVTVSSASTREDLKNVFPPEVAVFEPSEAEISHTQKATLVCLATGFYPDHVELSWWVNGKEVHSGVCTDPQPLKEQPALNDSRYCLSSRLRVSATFWQNPRNHFRCQVQFYGLSENDEWTQDRAKPVTQIVSAEAWGRADCDVKLVEKSFETDTNLNFQNLSVIGFRILLLKVAGFNLLMTLRLWSS

SEQ ID NO: 12554 - protein, 624 aa, synthetic construct
MALPVTALLLPLALLLHAARPDQIVLTQSPAIMSASPGEKVTISCSASSSVSYMYWYQQKPGSSPKPWIYRTSNLASGVPARFSGSGSGTSYSLTISNMEAEDAAAYYCQQYHSYPTTFGGGTKLEVKLEIQNPDPAVYQLRDSKSSDKSVCLFTDFDSQTNVSQSKDSDVYITDKCVLDMRSMDFKSNSAVAWSNKSDFACANAFNNSIIPEDTFFPSPESSCGFTSESYQQGVLSATILYEILLGKATLYAVLVSALVLMAMVKRKDSRGRAKRSGSGVKQTLNFDLLKLAGDVESNPGPTSMDWIWRILFLVGAATGAHSFEEVQLVESGGGLVQPKGSLKLSCAASGFSFNTYAMNWVRQAPGKGLEWIAHIRSKSNNFATYYADSVKDRFSISRDASENILFLQMNNLKTEDTAMYYCVRQGGDFPMDYWGQGTSVTVSSTREDLKNVFPPEVAVFEPSEAEISHTQKATLVCLATGFYPDHVELSWWVNGKEVHSGVCTDPQPLKEQPALNDSRYCLSSRLRVSATFWQNPRNHFRCQVQFYGLSENDEWTQDRAKPVTQIVSAEAWGRADCDVKLVEKSFETDTNLNFQNLSVIGFRILLLKVAGFNLLMTLRLWSS

SEQ ID NO: 12555 - protein, 623 aa, synthetic construct
MALPVTALLLPLALLLHAARPDDIQMTQSSSSFSVSLGDRVTITCMASEDIYIRLAWYQQKPGNAPRLLISAATSLETGVPSRFSGSGSGKDYTLSITSLQTEDVGTYYCQQYWSSPWTFGGGTKLEINLEIQNPDPAVYQLRDSKSSDKSVCLFTDFDSQTNVSQSKDSDVYITDKCVLDMRSMDFKSNSAVAWSNKSDFACANAFNNSIIPEDTFFPSPESSCGFTSESYQQGVLSATILYEILLGKATLYAVLVSALVLMAMVKRKDSRGRAKRSGSGVKQTLNFDLLKLAGDVESNPGPTSMDWIWRILFLVGAATGAHSFEDVQLQESGPGLVKPSQSLSLTCTVTGYSITSDYTWNWIRQFPGNKLEWMGYITYSGSTSYNPSLKSRNSITRDTSKNQFFLQLNSVTTEDTATYYCARLGRRYTMDYWGQGTSVTVSSTREDLKNVFPPEVAVFEPSEAEISHTQKATLVCLATGFYPDHVELSWWVNGKEVHSGVCTDPQPLKEQPALNDSRYCLSSRLRVSATFWQNPRNHFRCQVQFYGLSENDEWTQDRAKPVTQIVSAEAWGRADCDVKLVEKSFETDTNLNFQNLSVIGFRILLLKVAGFNLLMTLRLWSS

SEQ ID NO: 12556 - protein, 626 aa, synthetic construct
MALPVTALLLPLALLLHAARPDDIQMTQSPSSLSASVGDRVTITCRASQSISSYLNWYQQKPGKAPKLLIYDASNLETGVPSRFSGSGSGTDFTFTISSLQPEDIATYYCQQYDNLPLTFGGGTKVDIKRLEIQNPDPAVYQLRDSKSSDKSVCLFTDFDSQTNVSQSKDSDVYITDKCVLDMRSMDFKSNSAVAWSNKSDFACANAFNNSIIPEDTFFPSPESSCGFTSESYQQGVLSATILYEILLGKATLYAVLVSALVLMAMVKRKDSRGRAKRSGSGVKQTLNFDLLKLAGDVESNPGPTSMDWIWRILFLVGAATGAHSFEQVQLVESGGGVVQPGRSLRLSCAASGFTFSSYAMHWVRQAPGKGLEWVAVISYDGSNKYYADSVKGRFTISRDNSKNTLYLQMNSLRAEDTAVYYCARAHNSSSWSFDYWGQGTLVTVSSTREDLKNVFPPEVAVFEPSEAEISHTQKATLVCLATGFYPDHVELSWWVNGKEVHSGVCTDPQPLKEQPALNDSRYCLSSRLRVSATFWQNPRNHFRCQVQFYGLSENDEWTQDRAKPVTQIVSAEAWGRADCDVKLVEKSFETDTNLNFQNLSVIGFRILLLKVAGFNLLMTLRLWSS

SEQ ID NO: 12557 - protein, 635 aa, synthetic construct
MALPVTALLLPLALLLHAARPDDVVMTQSPLSLPVSLGDQASISCRSSQRLVHSNGNTYLHWYLQKPGQSPKLLIYRVSNRFPGVPDRFSGSGSGTDFTLKISRVEAEDLGIYFCSQSTHVPYTFGGGTKLEIKRLEIQNPDPAVYQLRDSKSSDKSVCLFTDFDSQTNVSQSKDSDVYITDKCVLDMRSMDFKSNSAVAWSNKSDFACANAFNNSIIPEDTFFPSPESSCGFTSESYQQGVLSATILYEILLGKATLYAVLVSALVLMAMVKRKDSRGRAKRSGSGVKQTLNFDLLKLAGDVESNPGPTSMDWIWRILFLVGAATGAHSFEEVRLQQSGPDLIKPGASVKMSCKASGYTFTGYVMHWVKQRPGQGLEWIGFINPYNDDIQSNERFRGKATLTSDKSSTTAYMELSSLTSEDSAVYYCARGAGYNFDGAYRFFDFWGQGTTLTVSSTREDLKNVFPPEVAVFEPSEAEISHTQKATLVCLATGFYPDHVELSWWVNGKEVHSGVCTDPQPLKEQPALNDSRYCLSSRLRVSATFWQNPRNHFRCQVQFYGLSENDEWTQDRAKPVTQIVSAEAWGRADCDVKLVEKSFETDTNLNFQNLSVIGFRILLLKVAGFNLLMTLRLWSS

SEQ ID NO: 12558 - protein, 626 aa, synthetic construct
MALPVTALLLPLALLLHAARPDSYELTQPPSVSVSPGQTATISCSGDQLGGKYGHWYQKKPGQSPVLVLYQDRKRPAGIPERFSGSSSGNTITLTISGTQAVDEADYYCQAWDTNLGGVFGGGTKVTVLGQLEIQNPDPAVYQLRDSKSSDKSVCLFTDFDSQTNVSQSKDSDVYITDKCVLDMRSMDFKSNSAVAWSNKSDFACANAFNNSIIPEDTFFPSPESSCGFTSESYQQGVLSATILYEILLGKATLYAVLVSALVLMAMVKRKDSRGRAKRSGSGVKQTLNFDLLKLAGDVESNPGPTSMDWIWRILFLVGAATGAHSFEQVQLVESGAEVKKPGASVKVSCKASGYTFTGYYMHWVRQAPGQGLEWMGRINPNSGGTNYAQKFQGRVTMTRDTSISTAYMELSRLRSDDTAVYYCASPRGRGSAFDIWGQGTLVTVSSTREDLKNVFPPEVAVFEPSEAEISHTQKATLVCLATGFYPDHVELSWWVNGKEVHSGVCTDPQPLKEQPALNDSRYCLSSRLRVSATFWQNPRNHFRCQVQFYGLSENDEWTQDRAKPVTQIVSAEAWGRADCDVKLVEKSFETDTNLNFQNLSVIGFRILLLKVAGFNLLMTLRLWSS

SEQ ID NO: 12559 - protein, 629 aa, synthetic construct
MALPVTALLLPLALLLHAARPDNFMLTQPHSVSESPGKTVTISCTRSSGSIASKYVQWYQQRPGSSPTTVIYEDNQRPSGVPDRFSGSIDTSSNSASLTISGLRTEDEADYYCHSYDSNNHSVFGGGTKVTVLGQLEIQNPDPAVYQLRDSKSSDKSVCLFTDFDSQTNVSQSKDSDVYITDKCVLDMRSMDFKSNSAVAWSNKSDFACANAFNNSIIPEDTFFPSPESSCGFTSESYQQGVLSATILYEILLGKATLYAVLVSALVLMAMVKRKDSRGRAKRSGSGVKQTLNFDLLKLAGDVESNPGPTSMDWIWRILFLVGAATGAHSFEEVQLVESGGGVVQPGGSLRLSCAASGFTFSSYAMSWVRQAPGKGLEWVSAISGSGGSTYYADSVKGRFSISRDNSKNTLYLQMNSLRAEDTAVYYCARTRSSGAFDIWGQGTLVTVSSTREDLKNVFPPEVAVFEPSEAEISHTQKATLVCLATGFYPDHVELSWWVNGKEVHSGVCTDPQPLKEQPALNDSRYCLSSRLRVSATFWQNPRNHFRCQVQFYGLSENDEWTQDRAKPVTQIVSAEAWGRADCDVKLVEKSFETDTNLNFQNLSVIGFRILLLKVAGFNLLMTLRLWSS

SEQ ID NO: 12560 - protein, 624 aa, synthetic construct
MALPVTALLLPLALLLHAARPDIQMNQSPSSLSASLGDTITITCHASQNINVWLSWYQQKPGNIPKLLIYKASNLHTGVPSRFSGSGSGTGFTITISSLQPEDIATYYCQQGQSYPWTFGGGTKLEIKRLEIQNPDPAVYQLRDSKSSDKSVCLFTDFDSQTNVSQSKDSDVYITDKCVLDMRSMDFKSNSAVAWSNKSDFACANAFNNSIIPEDTFFPSPESSCGFTSESYQQGVLSATILYEILLGKATLYAVLVSALVLMAMVKRKDSRGRAKRSGSGVKQTLNFDLLKLAGDVESNPGPTSMDWIWRILFLVGAATGAHSFEEVQLQQSGPELVKPGASVKISCKASGYSFTGYFMNWVKQSHGKSLEYIGRFNPYNGETLYNQKFKGKATLTVDKSSSTVHMELLSVTSEDSAVYYCGRSGNDDAMDYWGQGTSVTVSSATREDLKNVFPPEVAVFEPSEAEISHTQKATLVCLATGFYPDHVELSWWVNGKEVHSGVCTDPQPLKEQPALNDSRYCLSSRLRVSATFWQNPRNHFRCQVQFYGLSENDEWTQDRAKPVTQIVSAEAWGRADCDVKLVEKSFETDTNLNFQNLSVIGFRILLLKVAGFNLLMTLRLWSS

SEQ ID NO: 12561 - protein, 625 aa, synthetic construct
MALPVTALLLPLALLLHAARPEIVLTQSPATLSLSPGERATLSCRASQSVRSYLAWYQQKPGQAPRLLIYDASNRATGIPARFSGSGSGTDFTLTISSLEPEDFAVYYCQQRSNWPPTFGQGTKVEIKLEIQNPDPAVYQLRDSKSSDKSVCLFTDFDSQTNVSQSKDSDVYITDKCVLDMRSMDFKSNSAVAWSNKSDFACANAFNNSIIPEDTFFPSPESSCGFTSESYQQGVLSATILYEILLGKATLYAVLVSALVLMAMVKRKDSRGRAKRSGSGVKQTLNFDLLKLAGDVESNPGPTSMDWIWRILFLVGAATGAHSFEQLQVQESGPGLVKPSETLSLTCTVSGGSISNSYFSWGWIRQPPGKGLEWIGSFYYGEKTYYNPSLKSRATISIDTSKSQFSLKLSSVTAADTAVYYCPRGPTMIRGVIDSWGQGTLVTVSSTREDLKNVFPPEVAVFEPSEAEISHTQKATLVCLATGFYPDHVELSWWVNGKEVHSGVCTDPQPLKEQPALNDSRYCLSSRLRVSATFWQNPRNHFRCQVQFYGLSENDEWTQDRAKPVTQIVSAEAWGRADCDVKLVEKSFETDTNLNFQNLSVIGFRILLLKVAGFNLLMTLRLWSS

SEQ ID NO: 12562 - protein, 634 aa, synthetic construct
MALPVTALLLPLALLLHAARPDIVMTQTPLSLPVTPGEPASISCRSSRSLLDSDDGNTYLDWYLQKPGQSPQLLIYTLSYRASGVPDRFSGSGSGTDFTLKISRVEAEDVGVYYCMQRVEFPITFGQGTRLEIKRLEIQNPDPAVYQLRDSKSSDKSVCLFTDFDSQTNVSQSKDSDVYITDKCVLDMRSMDFKSNSAVAWSNKSDFACANAFNNSIIPEDTFFPSPESSCGFTSESYQQGVLSATILYEILLGKATLYAVLVSALVLMAMVKRKDSRGRAKRSGSGVKQTLNFDLLKLAGDVESNPGPTSMDWIWRILFLVGAATGAHSFEQVQLVESGGGVVQPGRSLRLSCAASGFIFSRYGMHWVRQAPGKGLKWVAVIWYDGSNKLYADSVKGRFTISRDNSKNTLYLQMNSLRAEDTAVYYCARDYYDNSRHHWGFDYWGQGTLVTVSSTREDLKNVFPPEVAVFEPSEAEISHTQKATLVCLATGFYPDHVELSWWVNGKEVHSGVCTDPQPLKEQPALNDSRYCLSSRLRVSATFWQNPRNHFRCQVQFYGLSENDEWTQDRAKPVTQIVSAEAWGRADCDVKLVEKSFETDTNLNFQNLSVIGFRILLLKVAGFNLLMTLRLWSS

SEQ ID NO: 12563 - protein, 624 aa, synthetic construct
MALPVTALLLPLALLLHAARPEIQMTQSPSSMSASLGDTITITCQATQDIFKNLNWYQQKPGKPPSLLIYYATELAEGVPSRFSGSGSGSDYSLTISNLESEDFAAYYCLQFFEFPFTFGSGTKLEMKLEIQNPDPAVYQLRDSKSSDKSVCLFTDFDSQTNVSQSKDSDVYITDKCVLDMRSMDFKSNSAVAWSNKSDFACANAFNNSIIPEDTFFPSPESSCGFTSESYQQGVLSATILYEILLGKATLYAVLVSALVLMAMVKRKDSRGRAKRSGSGVKQTLNFDLLKLAGDVESNPGPTSMDWIWRILFLVGAATGAHSFEQVQLQQSGAELVRPGTSVKVSCKASGYVFTNYWIEWIKQRPGQGLEWIGVMNPGSGETTYNEKFKGKATLTADKSSSTAYMQLSSLTSVDSAVYFCARDHDRDYYAMDYWGQGTSVTVSSTREDLKNVFPPEVAVFEPSEAEISHTQKATLVCLATGFYPDHVELSWWVNGKEVHSGVCTDPQPLKEQPALNDSRYCLSSRLRVSATFWQNPRNHFRCQVQFYGLSENDEWTQDRAKPVTQIVSAEAWGRADCDVKLVEKSFETDTNLNFQNLSVIGFRILLLKVAGFNLLMTLRLWSS

SEQ ID NO: 12564 - protein, 621 aa, synthetic construct
MALPVTALLLPLALLLHAARPDILLTQSPAILSVSPGERVSFSCRASQNIGTSIHWYQQRTNGSPRLLIKYASESVSGIPSRFSGSGSGTDFTLSINSVESEDIADYYCQHTNSWPTTFGGGTKLEIKRLEIQNPDPAVYQLRDSKSSDKSVCLFTDFDSQTNVSQSKDSDVYITDKCVLDMRSMDFKSNSAVAWSNKSDFACANAFNNSIIPEDTFFPSPESSCGFTSESYQQGVLSATILYEILLGKATLYAVLVSALVLMAMVKRKDSRGRAKRSGSGVKQTLNFDLLKLAGDVESNPGPTSMDWIWRILFLVGAATGAHSFEQVQLQQSDAELVKPGASVKISCKASGYTFTDHAIHWVKQKPEQGLEWIGYFSPGNGDIKYNEKFKGKATLTADKSSSTAYMQLNSLTSEDSAVYFCKRSYGNYDYWGQGTTLTVSSTREDLKNVFPPEVAVFEPSEAEISHTQKATLVCLATGFYPDHVELSWWVNGKEVHSGVCTDPQPLKEQPALNDSRYCLSSRLRVSATFWQNPRNHFRCQVQFYGLSENDEWTQDRAKPVTQIVSAEAWGRADCDVKLVEKSFETDTNLNFQNLSVIGFRILLLKVAGFNLLMTLRLWSS

SEQ ID NO: 12565 - protein, 626 aa, synthetic construct
MALPVTALLLPLALLLHAARPDIVMTQSPDSLAVSLGERATINCKSSQSLLNSGDQKNYLTWYQQKPGQPPKLLIYWASTRESGVPDRFSGSGSGTDFTLTISSLQAEDVAVYYCQNDYSYPLTFGQGTKVEIKLEIQNPDPAVYQLRDSKSSDKSVCLFTDFDSQTNVSQSKDSDVYITDKCVLDMRSMDFKSNSAVAWSNKSDFACANAFNNSIIPEDTFFPSPESSCGFTSESYQQGVLSATILYEILLGKATLYAVLVSALVLMAMVKRKDSRGRAKRSGSGVKQTLNFDLLKLAGDVESNPGPTSMDWIWRILFLVGAATGAHSFEQVQLVQSGAEVKKTGSSVKVSCKASGYTFTDHAIHVWRQAPGQALEWMGHFSPGNTDIKYNDKFKGRVTLTVDRSMSTAYMELSSLRSEDTAMYYCKTSTFFFDYWGQGTMVTVSSTREDLKNVFPPEVAVFEPSEAEISHTQKATLVCLATGFYPDHVELSWWVNGKEVHSGVCTDPQPLKEQPALNDSRYCLSSRLRVSATFWQNPRNHFRCQVQFYGLSENDEWTQDRAKPVTQIVSAEAWGRADCDVKLVEKSFETDTNLNFQNLSVIGFRILLLKVAGFNLLMTLRLWSS

SEQ ID NO: 12566 - protein, 625 aa, synthetic construct
MALPVTALLLPLALLLHAARPDIQMTQSPSSLSASVGDRVTITCKASQDVSIAVAWYQQKPGKAPKVLIYSASYRYTGVPDRFSGSGSGTDFTFTISSLQPEDIAVYYCQQHYITPLTFGGGTKVEIKLEIQNPDPAVYQLRDSKSSDKSVCLFTDFDSQTNVSQSKDSDVYITDKCVLDMRSMDFKSNSAVAWSNKSDFACANAFNNSIIPEDTFFPSPESSCGFTSESYQQGVLSATILYEILLGKATLYAVLVSALVLMAMVKRKDSRGRAKRSGSGVKQTLNFDLLKLAGDVESNPGPTSMDWIWRILFLVGAATGAHSFEQIQLVQSGHEVKKPGASVKVSCKASGYTFTNYGMNWVRQAPGQGLEWMGWINTKTGEPTYAEEFKGRFVFSLETSASTAYLQISSLKAEDTAMYFCGRGGYGSSYWYFDVWGQGTTVTVSSTREDLKNVFPPEVAVFEPSEAEISHTQKATLVCLATGFYPDHVELSWWVNGKEVHSGVCTDPQPLKEQPALNDSRYCLSSRLRVSATFWQNPRNHFRCQVQFYGLSENDEWTQDRAKPVTQIVSAEAWGRADCDVKLVEKSFETDTNLNFQNLSVIGFRILLLKVAGFNLLMTLRLWSS

SEQ ID NO: 12567 - protein, 627 aa, synthetic construct
MALPVTALLLPLALLLHAARPDIVMTQSPDSLAVSLGERATINCRASKSVSTSGYSYMHWYQQKPGQPPKLLIYLASNLESGVPDRFSGSGSGTDFTLTISSLQAEDVAVYYCQHSRELPYTFGQGTKLEIKLEIQNPDPAVYQLRDSKSSDKSVCLFTDFDSQTNVSQSKDSDVYITDKCVLDMRSMDFKSNSAVAWSNKSDFACANAFNNSIIPEDTFFPSPESSCGFTSESYQQGVLSATILYEILLGKATLYAVLVSALVLMAMVKRKDSRGRAKRSGSGVKQTLNFDLLKLAGDVESNPGPTSMDWIWRILFLVGAATGAHSFEQVQLQESGPGLVKPSETLSLTCTVSGGSISSYGVHWIRQPPGKGLEWIGVIWTSGVTDYNSALMGRVTISVDTSKNQFSLKLSSVTAADTAVYYCARDGDYDRYTMDYWGQGTLVTVSSTREDLKNVFPPEVAVFEPSEAEISHTQKATLVCLATGFYPDHVELSWWVNGKEVHSGVCTDPQPLKEQPALNDSRYCLSSRLRVSATFWQNPRNHFRCQVQFYGLSENDEWTQDRAKPVTQIVSAEAWGRADCDVKLVEKSFETDTNLNFQNLSVIGFRILLLKVAGFNLLMTLRLWSS

SEQ ID NO: 12568 - protein, 627 aa, synthetic construct
MALPVTALLLPLALLLHAARPDIQMTQSPSSLSASVGDRVTITCRASQSIGTSLHWYQQKPGKAPKLLIKFASRLQSGVPSRFSGSGSGTDFTLTISSLQPEDFATYYCQQSPGFPPTFGQGTKLEIKRLEIQNPDPAVYQLRDSKSSDKSVCLFTDFDSQTNVSQSKDSDVYITDKCVLDMRSMDFKSNSAVAWSNKSDFACANAFNNSIIPEDTFFPSPESSCGFTSESYQQGVLSATILYEILLGKATLYAVLVSALVLMAMVKRKDSRGRAKRSGSGVKQTLNFDLLKLAGDVESNPGPTSMDWIWRILFLVGAATGAHSFEQVQLVESGGGLVKPGGSLRLSCAASGFSITTSGYYWTWIRQFPGKGLEWMGYIGYNSKTYYNPALKSRITISRDNAKNSLYLQMNSLRAEDTAVYYCARSLYGGYKDAFDSWGQGTLVTVSSTREDLKNVFPPEVAVFEPSEAEISHTQKATLVCLATGFYPDHVELSWWVNGKEVHSGVCTDPQPLKEQPALNDSRYCLSSRLRVSATFWQNPRNHFRCQVQFYGLSENDEWTQDRAKPVTQIVSAEAWGRADCDVKLVEKSFETDTNLNFQNLSVIGFRILLLKVAGFNLLMTLRLWSS

SEQ ID NO: 12569 - protein, 632 aa, synthetic construct
MALPVTALLLPLALLLHAARPDEIVLTQSPLSLPVTPGEPASISCRSSQSLLHSIGYNYLDWYLQKPGQSPQLLIYLGSNRASGVPDRFSGSGSGTDFTLKISRVEAEDVGVYYCMQALQTPLTFGGGTKVEIKRLEIQNPDPAVYQLRDSKSSDKSVCLFTDFDSQTNVSQSKDSDVYITDKCVLDMRSMDFKSNSAVAWSNKSDFACANAFNNSIIPEDTFFPSPESSCGFTSESYQQGVLSATILYEILLGKATLYAVLVSALVLMAMVKRKDSRGRAKRSGSGVKQTLNFDLLKLAGDVESNPGPTSMDWIWRILFLVGAATGAHSFEEVQLVESGGGVVQPGRSLRLSCAASGFTFRSYGMHWVRQAPGKGLEWVAVISYDGSNKYYTDSVNGRFTISRDNSKNTLYLQMNSLRAEDTAVYYCARGGGYYETSGPDYWGQGTLVTVSSTREDLKNVFPPEVAVFEPSEAEISHTQKATLVCLATGFYPDHVELSWWVNGKEVHSGVCTDPQPLKEQPALNDSRYCLSSRLRVSATFWQNPRNHFRCQVQFYGLSENDEWTQDRAKPVTQIVSAEAWGRADCDVKLVEKSFETDTNLNFQNLSVIGFRILLLKVAGFNLLMTLRLWSS

SEQ ID NO: 12570 - protein, 630 aa, synthetic construct
MALPVTALLLPLALLLHAARPDDVVMTQSPLSLPVTPGEPASISCRSSQSLLHSIGYNYLHWFLQKPGQSPQLLIYLGSNRASGVPDRFSGSGSGTDFTLKISRVEAEDVGVYYCMQALQTPPTFGQGTRLEIKRLEIQNPDPAVYQLRDSKSSDKSVCLFTDFDSQTNVSQSKDSDVYITDKCVLDMRSMDFKSNSAVAWSNKSDFACANAFNNSIIPEDTFFPSPESSCGFTSESYQQGVLSATILYEILLGKATLYAVLVSALVLMAMVKRKDSRGRAKRSGSGVKQTLNFDLLKLAGDVESNPGPTSMDWIWRILFLVGAATGAHSFEQLQLQESGPGLVKPSGTLSLTCAVSGGSISSSNWWSWVRQPPGKGLEWIGEIYHSGSTNYNPSLKSRVTISVDKSKNQFSLKLSSVTAADTAVYYCVGSPYGDYVLDYWGQGTLVTVSSTREDLKNVFPPEVAVFEPSEAEISHTQKATLVCLATGFYPDHVELSWWVNGKEVHSGVCTDPQPLKEQPALNDSRYCLSSRLRVSATFWQNPRNHFRCQVQFYGLSENDEWTQDRAKPVTQIVSAEAWGRADCDVKLVEKSFETDTNLNFQNLSVIGFRILLLKVAGFNLLMTLRLWSS

SEQ ID NO: 12571 - protein, 628 aa, synthetic construct
MALPVTALLLPLALLLHAARPDEIVLTQSPGTLSLSLGERATLSCRASQSISSSFLAWYQQKPGQAPKLLIYAASTRATGIPDRFSGSGSGTDFTLTISRLEPEDFAVYYCQQYGRSLSFGGGTKVEVKLEIQNPDPAVYQLRDSKSSDKSVCLFTDFDSQTNVSQSKDSDVYITDKCVLDMRSMDFKSNSAVAWSNKSDFACANAFNNSIIPEDTFFPSPESSCGFTSESYQQGVLSATILYEILLGKATLYAVLVSALVLMAMVKRKDSRGRAKRSGSGVKQTLNFDLLKLAGDVESNPGPTSMDWIWRILFLVGAATGAHSFEQVQLQQSGPGLVKPSQTLSLTCAISGDSVSGNSATWNWIRQSPSRGLEWLGRTYYRSKWNHDYAESVKSRITINPDTSKNQFSLQLNSVTPEDTAVYYCARGDSSSWYAFDYWGQGTLVTVSSTREDLKNVFPPEVAVFEPSEAEISHTQKATLVCLATGFYPDHVELSWWVNGKEVHSGVCTDPQPLKEQPALNDSRYCLSSRLRVSATFWQNPRNHFRCQVQFYGLSENDEWTQDRAKPVTQIVSAEAWGRADCDVKLVEKSFETDTNLNFQNLSVIGFRILLLKVAGFNLLMTLRLWSS

SEQ ID NO: 12572 - protein, 627 aa, synthetic construct
MALPVTALLLPLALLLHAARPDQSVVTQPPSVSVAPGKTARITCGRNNIGSKSVHWYQQKPGQAPVLVVYDDSDRPSGIPERFSGSNSGNTATLTISRVEAGDEADYYCQVWDSSSDHVVFGGGTKLTVLGLEIQNPDPAVYQLRDSKSSDKSVCLFTDFDSQTNVSQSKDSDVYITDKCVLDMRSMDFKSNSAVAWSNKSDFACANAFNNSIIPEDTFFPSPESSCGFTSESYQQGVLSATILYEILLGKATLYAVLVSALVLMAMVKRKDSRGRAKRSGSGVKQTLNFDLLKLAGDVESNPGPTSMDWIWRILFLVGAATGAHSFEVQLVQSGGGVMRPGGSLRLSCAASGFTFDDYGMSWVRQAPGKGLEWVSGINWNGGSTGYADSVRGRFTISRDNAKNSLYLQMNSLRAEDTALYYCARERGYGYHDPHDYWGQGTLVTVSSTREDLKNVFPPEVAVFEPSEAEISHTQKATLVCLATGFYPDHVELSWWVNGKEVHSGVCTDPQPLKEQPALNDSRYCLSSRLRVSATFWQNPRNHFRCQVQFYGLSENDEWTQDRAKPVTQIVSAEAWGRADCDVKLVEKSFETDTNLNFQNLSVIGFRILLLKVAGFNLLMTLRLWSS

SEQ ID NO: 12573 - protein, 640 aa, synthetic construct
MALPVTALLLPLALLLHAARPEQKLISEEDLEFQAVVTQPPSASGTPGQRVTISCSGSSSNIGSNTVNWYQQVPGTAPKLLIYSNNQRPSGVPDRFSGSKSGTSASLAISGLQSEDEADYYCAAWDDSLNGWVFGGGTKLTVLLEIQNPDPAVYQLRDSKSSDKSVCLFTDFDSQTNVSQSKDSDVYITDKCVLDMRSMDFKSNSAVAWSNKSDFACANAFNNSIIPEDTFFPSPESSCGFTSESYQQGVLSATILYEILLGKATLYAVLVSALVLMAMVKRKDSRGRAKRSGSGVKQTLNFDLLKLAGDVESNPGPTSMDWIWRILFLVGAATGAHSFEQMQLVQSGAEVKEPGESLRISCKGSGYSFTNFWISWVRQMPGKGLEWMGRVDPGYSYSTYSPSFQGHVTISADKSTSTAYLQWNSLKASDTAMYYCARVQYSGYYDWFDPWGQGTLVTVSSTREDLKNVFPPEVAVFEPSEAEISHTQKATLVCLATGFYPDHVELSWWVNGKEVHSGVCTDPQPLKEQPALNDSRYCLSSRLRVSATFWQNPRNHFRCQVQFYGLSENDEWTQDRAKPVTQIVSAEAWGRADCDVKLVEKSFETDTNLNFQNLSVIGFRILLLKVAGFNLLMTLRLWSS

SEQ ID NO: 12574 - protein, 634 aa, synthetic construct
MALPVTALLLPLALLLHAARPEQKLISEEDLEFDIQMTQSPSTLSASVGDRVTITCRASQNINKWLAWYQQRPGKAPQLLIYKASSLESGVPSRFSGSGSGTEYTLTISSLQPDDFATYYCQQYNSYATFGQGTKVEIKRLEIQNPDPAVYQLRDSKSSDKSVCLFTDFDSQTNVSQSKDSDVYITDKCVLDMRSMDFKSNSAVAWSNKSDFACANAFNNSIIPEDTFFPSPESSCGFTSESYQQGVLSATILYEILLGKATLYAVLVSALVLMAMVKRKDSRGRAKRSGSGVKQTLNFDLLKLAGDVESNPGPTSMDWIWRILFLVGAATGAHSFEQVQLVQSGAEVKKPGESLKISCKGSGYNFSNKWIGWVRQLPGRGLEWIAIIYPGYSDITYSPSFQGRVTISADTSINTAYLHWHSLKASDTAMYYCVRHTALAGFDYWGLGTLVTVSSTREDLKNVFPPEVAVFEPSEAEISHTQKATLVCLATGFYPDHVELSWWVNGKEVHSGVCTDPQPLKEQPALNDSRYCLSSRLRVSATFWQNPRNHFRCQVQFYGLSENDEWTQDRAKPVTQIVSAEAWGRADCDVKLVEKSFETDTNLNFQNLSVIGFRILLLKVAGFNLLMTLRLWSS

SEQ ID NO: 12575 - protein, 626 aa, synthetic construct
MALPVTALLLPLALLLHAARPDIVLTQSPASLAVSLGQRATISCRASESVDNYGNTFMHWYQQKPGQPPKLLIYRASNLESGIPARFSGSGSRTDFTLTINPVEADDVATYYCQQSNEDPPTFGAGTKLELKLEIQNPDPAVYQLRDSKSSDKSVCLFTDFDSQTNVSQSKDSDVYITDKCVLDMRSMDFKSNSAVAWSNKSDFACANAFNNSIIPEDTFFPSPESSCGFTSESYQQGVLSATILYEILLGKATLYAVLVSALVLMAMVKRKDSRGRAKRSGSGVKQTLNFDLLKLAGDVESNPGPTSMDWIWRILFLVGAATGAHSFEQIQLVQSGPELKKPGETVKISCKASGYIFTNYGMNWVKQAPGKSFKWMGWINTYTGESTYSADFKGRFAFSLETSASTAYLHINDLKNEDTATYFCARSGGYDPMDYWGQGTSVTVSSTREDLKNVFPPEVAVFEPSEAEISHTQKATLVCLATGFYPDHVELSWWVNGKEVHSGVCTDPQPLKEQPALNDSRYCLSSRLRVSATFWQNPRNHFRCQVQFYGLSENDEWTQDRAKPVTQIVSAEAWGRADCDVKLVEKSFETDTNLNFQNLSVIGFRILLLKVAGFNLLMTLRLWSS

SEQ ID NO: 12576 - protein, 625 aa, synthetic construct
MALPVTALLLPLALLLHAARPDEIVLTQSPGTLSLSPGERATLSCRASQSVSNTYLAWYHQRPGQAPRLLIYGASSRATGIPDRFSGSGSGTDFALTISSLEPEDFAVYYCQQYSNSWTFGQGTKVEIKRLEIQNPDPAVYQLRDSKSSDKSVCLFTDFDSQTNVSQSKDSDVYITDKCVLDMRSMDFKSNSAVAWSNKSDFACANAFNNSIIPEDTFFPSPESSCGFTSESYQQGVLSATILYEILLGKATLYAVLVSALVLMAMVKRKDSRGRAKRSGSGVKQTLNFDLLKLAGDVESNPGPTSMDWIWRILFLVGAATGAHSFEQVQLVESGGGVVQPGRSLRLSCAASGFTFSSYDMHWVRQAPGKGLEWVAVISYDGTNEYYADSVKGRFTISRDTSKNTLYLQMNSLRAEDTAVYYCARERYFDWSFDYWGQGTLVSVSSTREDLKNVFPPEVAVFEPSEAEISHTQKATLVCLATGFYPDHVELSWWVNGKEVHSGVCTDPQPLKEQPALNDSRYCLSSRLRVSATFWQNPRNHFRCQVQFYGLSENDEWTQDRAKPVTQIVSAEAWGRADCDVKLVEKSFETDTNLNFQNLSVIGFRILLLKVAGFNLLMTLRLWSS

SEQ ID NO: 12577 - protein, 624 aa, synthetic construct
MALPVTALLLPLALLLHAARPDELTQDPAVSVALGQTVRITCQGDSLRSNYANWYQQKPGQAPVLVIYGQNNRPSGIPDRFSGSSSGNTASLTITGAQAADEADYYCDSRVSTGNHVVFGGGTKLTVLGQLEIQNPDPAVYQLRDSKSSDKSVCLFTDFDSQTNVSQSKDSDVYITDKCVLDMRSMDFKSNSAVAWSNKSDFACANAFNNSIIPEDTFFPSPESSCGFTSESYQQGVLSATILYEILLGKATLYAVLVSALVLMAMVKRKDSRGRAKRSGSGVKQTLNFDLLKLAGDVESNPGPTSMDWIWRILFLVGAATGAHSFEEVQLVQSGAEVKKPGASVKVSCKASGYTFTSYAMHWVRQAPGQRLEWMGWINAGNGNTKYSQKFQGRVTITRDTSASTAYMELSSLRSEDTAVYYCARDISYGSFDYWGQGTLVTVSSTREDLKNVFPPEVAVFEPSEAEISHTQKATLVCLATGFYPDHVELSWWVNGKEVHSGVCTDPQPLKEQPALNDSRYCLSSRLRVSATFWQNPRNHFRCQVQFYGLSENDEWTQDRAKPVTQIVSAEAWGRADCDVKLVEKSFETDTNLNFQNLSVIGFRILLLKVAGFNLLMTLRLWSS

SEQ ID NO: 12578 - protein, 626 aa, synthetic construct
MALPVTALLLPLALLLHAARPDDIVLTQTPATLSVTPGDSVSLSCRASQSISNNLHWYQQKSHESPRLLIKNASQSISGIPSKFSGSGSGTDFTLRINSVETEDFGMYFCQQSNSWPYTFGSGTKLEIKLEIQNPDPAVYQLRDSKSSDKSVCLFTDFDSQTNVSQSKDSDVYITDKCVLDMRSMDFKSNSAVAWSNKSDFACANAFNNSIIPEDTFFPSPESSCGFTSESYQQGVLSATILYEILLGKATLYAVLVSALVLMAMVKRKDSRGRAKRSGSGVKQTLNFDLLKLAGDVESNPGPTSMDWIWRILFLVGAATGAHSFEQVKLQQSGPELVKPGASVKISCKASGYSFTGYYMHWVKQSHGNILDWIGYIYPYNGVSSYNQKFKGKATLTVDKSSSTAYMELRSLTSEDSAVYYCARERGLYQLRAMDYWGQGTSVTVSSTREDLKNVFPPEVAVFEPSEAEISHTQKATLVCLATGFYPDHVELSWWVNGKEVHSGVCTDPQPLKEQPALNDSRYCLSSRLRVSATFWQNPRNHFRCQVQFYGLSENDEWTQDRAKPVTQIVSAEAWGRADCDVKLVEKSFETDTNLNFQNLSVIGFRILLLKVAGFNLLMTLRLWSS

SEQ ID NO: 12579 - protein, 617 aa, synthetic construct
MALPVTALLLPLALLLHAARPDDIVMTQTPAIMSASPGQKVTITCSASSSVNYMHWYQQKLGSSPKLWIYDTSKLAPGVPARFSGSGSGTSYSLTISSMEAEDAASYFCHQWSSYPYTFGSGTKLEIKLEIQNPDPAVYQLRDSKSSDKSVCLFTDFDSQTNVSQSKDSDVYITDKCVLDMRSMDFKSNSAVAWSNKSDFACANAFNNSIIPEDTFFPSPESSCGFTSESYQQGVLSATILYEILLGKATLYAVLVSALVLMAMVKRKDSRGRAKRSGSGVKQTLNFDLLKLAGDVESNPGPTSMDWIWRILFLVGAATGAHSFEEVQLQESGPDLVKPSQSLSLTCTVTGYSITSGYGWHWIRQFPGNKLEWMGYIHYSGSTTYNPSLKSRISISRDTSKNQFFLQLNSVTTEDTATYYCARSLRYWGQGTTLTVSSTREDLKNVFPPEVAVFEPSEAEISHTQKATLVCLATGFYPDHVELSWWVNGKEVHSGVCTDPQPLKEQPALNDSRYCLSSRLRVSATFWQNPRNHFRCQVQFYGLSENDEWTQDRAKPVTQIVSAEAWGRADCDVKLVEKSFETDTNLNFQNLSVIGFRILLLKVAGFNLLMTLRLWSS

SEQ ID NO: 12580 - protein, 620 aa, synthetic construct
MALPVTALLLPLALLLHAARPDDIQMTQSPSSLSASVGDRVTITCSATSSISYMHWYQQKPGKAPKGWIYDTSKLAHGVPSRFSGSGSGTDFTLTISSLQPEDFATYYCHQRRSYPFTFGQGTKVEIKLEIQNPDPAVYQLRDSKSSDKSVCLFTDFDSQTNVSQSKDSDVYITDKCVLDMRSMDFKSNSAVAWSNKSDFACANAFNNSIIPEDTFFPSPESSCGFTSESYQQGVLSATILYEILLGKATLYAVLVSALVLMAMVKRKDSRGRAKRSGSGVKQTLNFDLLKLAGDVESNPGPTSMDWIWRILFLVGAATGAHSFEEVQLVQSGAEVKKPGASVKVSCKASGYTFTNFWIHWVRQAPGQGLEWIGEIDPSDSYTNYNQKFKGRVTITRDTSTSTAYLELSSLRSEDTAVYYCAREITTVDYWGQGTLVTVSSTREDLKNVFPPEVAVFEPSEAEISHTQKATLVCLATGFYPDHVELSWWVNGKEVHSGVCTDPQPLKEQPALNDSRYCLSSRLRVSATFWQNPRNHFRCQVQFYGLSENDEWTQDRAKPVTQIVSAEAWGRADCDVKLVEKSFETDTNLNFQNLSVIGFRILLLKVAGFNLLMTLRLWSS

SEQ ID NO: 12581 - protein, 627 aa, synthetic construct
MALPVTALLLPLALLLHAARPDDIQMTQSPSSLSASVGDRVTITCKASQGFNKYVAWYQQKPGKAPKLLIYYTSTLQPGVPSRFSGSGSGRDYTLTISSLQPEDFATYYCLQYGNLLYAFGQGTKVEIKRLEIQNPDPAVYQLRDSKSSDKSVCLFTDFDSQTNVSQSKDSDVYITDKCVLDMRSMDFKSNSAVAWSNKSDFACANAFNNSIIPEDTFFPSPESSCGFTSESYQQGVLSATILYEILLGKATLYAVLVSALVLMAMVKRKDSRGRAKRSGSGVKQTLNFDLLKLAGDVESNPGPTSMDWIWRILFLVGAATGAHSFEEVQLVQSGAEVKKPGASVKVSCKASGYTFTSYWIGWVRQAPGQGLEWIGDIYPGGGYTNYNEKFKGRVTITRDTSTSTAYLELSSLRSEDTAVYYCARLDGSSYRGAMDSWGQGTLVTVSSTREDLKNVFPPEVAVFEPSEAEISHTQKATLVCLATGFYPDHVELSWWVNGKEVHSGVCTDPQPLKEQPALNDSRYCLSSRLRVSATFWQNPRNHFRCQVQFYGLSENDEWTQDRAKPVTQIVSAEAWGRADCDVKLVEKSFETDTNLNFQNLSVIGFRILLLKVAGFNLLMTLRLWSS

SEQ ID NO: 12582 - protein, 623 aa, synthetic construct
MALPVTALLLPLALLLHAARPDDIQMTQSPSSLSASVGDRVTITCRASQDIRYYLNWYQQKPGKAPKLLIYVASSLQSGVPSRFSGSGSGTEFTLTVSSLQPEDFATYYCLQVYSTPRTFGQGTKVEIKLEIQNPDPAVYQLRDSKSSDKSVCLFTDFDSQTNVSQSKDSDVYITDKCVLDMRSMDFKSNSAVAWSNKSDFACANAFNNSIIPEDTFFPSPESSCGFTSESYQQGVLSATILYEILLGKATLYAVLVSALVLMAMVKRKDSRGRAKRSGSGVKQTLNFDLLKLAGDVESNPGPTSMDWIWRILFLVGAATGAHSFEEVQLVESGGGLAKPGGSLRLSCAASGFRFTFNNYYMDWVRQAPGQGLEWVSRISSSGDPTWYADSVKGRFTISRENAKNTLFLQMNSLRAEDTAVYYCASLTTGSDSWGQGVLVTVSSTREDLKNVFPPEVAVFEPSEAEISHTQKATLVCLATGFYPDHVELSWWVNGKEVHSGVCTDPQPLKEQPALNDSRYCLSSRLRVSATFWQNPRNHFRCQVQFYGLSENDEWTQDRAKPVTQIVSAEAWGRADCDVKLVEKSFETDTNLNFQNLSVIGFRILLLKVAGFNLLMTLRLWSS

SEQ ID NO: 12583 - protein, 623 aa, synthetic construct
MALPVTALLLPLALLLHAARPEIVMTQSPATLSVSPGERATLSCRASQSVSRNLAWYQQKPGQAPRLLIYGASTRATGIPARFSGSGSGTEFTLTIGSLQSEDFAVYYCQQYKTWPRTFGQGTNVEIKLEIQNPDPAVYQLRDSKSSDKSVCLFTDFDSQTNVSQSKDSDVYITDKCVLDMRSMDFKSNSAVAWSNKSDFACANAFNNSIIPEDTFFPSPESSCGFTSESYQQGVLSATILYEILLGKATLYAVLVSALVLMAMVKRKDSRGRAKRSGSGVKQTLNFDLLKLAGDVESNPGPTSMDWIWRILFLVGAATGAHSFEQVQLQQWGAGLLKPSETLSLTCAVFGGSFSGYYWSWIRQPPGKGLEWIGEINHRGNTNDNPSLKSRVTISVDTSKNQFALKLSSVTAADTAVYYCARERGYTYGNFDHWGQGTLVTVSSTREDLKNVFPPEVAVFEPSEAEISHTQKATLVCLATGFYPDHVELSWWVNGKEVHSGVCTDPQPLKEQPALNDSRYCLSSRLRVSATFWQNPRNHFRCQVQFYGLSENDEWTQDRAKPVTQIVSAEAWGRADCDVKLVEKSFETDTNLNFQNLSVIGFRILLLKVAGFNLLMTLRLWSS

SEQ ID NO: 12584 - protein, 624 aa, synthetic construct
MALPVTALLLPLALLLHAARPEIVMTPSSATLSVSPGERATLSCRASQSVSRNLAWYQQKPGQAPRLLIYGASTRATGIPARFSGSGSGTEFTLTISSLQSEDFAVYYCHQYSNWMCSFGQGTKLEIKLEIQNPDPAVYQLRDSKSSDKSVCLFTDFDSQTNVSQSKDSDVYITDKCVLDMRSMDFKSNSAVAWSNKSDFACANAFNNSIIPEDTFFPSPESSCGFTSESYQQGVLSATILYEILLGKATLYAVLVSALVLMAMVKRKDSRGRAKRSGSGVKQTLNFDLLKLAGDVESNPGPTSMDWIWRILFLVGAATGAHSFEEVQLLESGGGLVQPGGSLRLSCAASGFTFSRYAMNWVRQAPGKGLEWVSGISGSGGRTYYADSVKGRFTISRDNSKNTLYLQMNSLRAEDTAVYYCAKDRDFWSGPFDYWGQGTLVTVSSTREDLKNVFPPEVAVFEPSEAEISHTQKATLVCLATGFYPDHVELSWWVNGKEVHSGVCTDPQPLKEQPALNDSRYCLSSRLRVSATFWQNPRNHFRCQVQFYGLSENDEWTQDRAKPVTQIVSAEAWGRADCDVKLVEKSFETDTNLNFQNLSVIGFRILLLKVAGFNLLMTLRLWSS

SEQ ID NO: 12585 - protein, 629 aa, synthetic construct
MALPVTALLLPLALLLHAARPDIQMTQSPSSLSASVGDRVTITCKASKNIRSYLAWYQQKPGKAPKLLIYSGSTLHSGVPSRFSGSGSGTDFTLTISSLQPEDFATYYCQQHHEYPLTFGQGTKVEIKRLEIQNPDPAVYQLRDSKSSDKSVCLFTDFDSQTNVSQSKDSDVYITDKCVLDMRSMDFKSNSAVAWSNKSDFACANAFNNSIIPEDTFFPSPESSCGFTSESYQQGVLSATILYEILLGKATLYAVLVSALVLMAMVKRKDSRGRAKRSGSGVKQTLNFDLLKLAGDVESNPGPTSMDWIWRILFLVGAATGAHSFEQVQLQESGPGLVKPSETLSLTCTVSGYTITSGYDWSWIRQPPGKGLEWIGYINYGGSTNYKPSLGSRVTISVDTSKNQFSLKLSSVTAADTAVYYCARYNEYKSYIYDWYFDFWGQGTLVTVSSTREDLKNVFPPEVAVFEPSEAEISHTQKATLVCLATGFYPDHVELSWWVNGKEVHSGVCTDPQPLKEQPALNDSRYCLSSRLRVSATFWQNPRNHFRCQVQFYGLSENDEWTQDRAKPVTQIVSAEAWGRADCDVKLVEKSFETDTNLNFQNLSVIGFRILLLKVAGFNLLMTLRLWSS

SEQ ID NO: 12586 - protein, 631 aa, synthetic construct
MALPVTALLLPLALLLHAARPQSVVTQPPSVSAAPGQKVTISCSGSSSNIGNNYVSWYQQLPGTAPKLLIYDNNKRPSGIPDRFSGSKSGTSATLGITGLQTGDEADYYCGTWDGSLYTMLFGGGTKLTVLLEIQNPDPAVYQLRDSKSSDKSVCLFTDFDSQTNVSQSKDSDVYITDKCVLDMRSMDFKSNSAVAWSNKSDFACANAFNNSIIPEDTFFPSPESSCGFTSESYQQGVLSATILYEILLGKATLYAVLVSALVLMAMVKRKDSRGRAKRSGSGVKQTLNFDLLKLAGDVESNPGPTSMDWIWRILFLVGAATGAHSFEEVQLVESGGGLVKPGGSLRLSCAASGFTFSNAWMSWVRQAPGKGLEWVGFIRSKAYGGTTEYAASVKGRFTISRDDSKSIAYLQMNNLKTEDTAVYYCARDGLYSSSWYDSDYWGQGTLVTVSSTREDLKNVFPPEVAVFEPSEAEISHTQKATLVCLATGFYPDHVELSWWVNGKEVHSGVCTDPQPLKEQPALNDSRYCLSSRLRVSATFWQNPRNHFRCQVQFYGLSENDEWTQDRAKPVTQIVSAEAWGRADCDVKLVEKSFETDTNLNFQNLSVIGFRILLLKVAGFNLLMTLRLWSS

SEQ ID NO: 12587 - protein, 636 aa, synthetic construct
MALPVTALLLPLALLLHAARPQSVLTQPPSVSGAPGQRVTISCTGSSSNIGAGYDVHWYQQLPGTAPKLLIFGNSNRPSGVPDRFSGFKSGTSASLAITGLQAEDEADYFCQSYDSSLSGSGVFGTGTKVTVLGLEIQNPDPAVYQLRDSKSSDKSVCLFTDFDSQTNVSQSKDSDVYITDKCVLDMRSMDFKSNSAVAWSNKSDFACANAFNNSIIPEDTFFPSPESSCGFTSESYQQGVLSATILYEILLGKATLYAVLVSALVLMAMVKRKDSRGRAKRSGSGVKQTLNFDLLKLAGDVESNPGPTSMDWIWRILFLVGAATGAHSFEQMQLVQSGGGLVQPGRSLRLSCAASGFTFDDYAMHWVRQAPGKGLEWVSGISWNSGSIGYADSVKGRFTISRDNAKNSLYLQMNSLRAEDTALYYCAKDIHSGSYYGLLYYAMDVWGQGTTVTVSSTREDLKNVFPPEVAVFEPSEAEISHTQKATLVCLATGFYPDHVELSWWVNGKEVHSGVCTDPQPLKEQPALNDSRYCLSSRLRVSATFWQNPRNHFRCQVQFYGLSENDEWTQDRAKPVTQIVSAEAWGRADCDVKLVEKSFETDTNLNFQNLSVIGFRILLLKVAGFNLLMTLRLWSS

SEQ ID NO: 12588 - protein, 636 aa, synthetic construct
MALPVTALLLPLALLLHAARPLPVLTQPPSASGTPGQRVTISCSGRSSNIGSNSVNWYRQLPGAAPKLLIYSNNQRPPGVPVRFSGSKSGTSASLAISGLQSEDEATYYCATWDDNLNVHYVFGTGTKVTVLGSRLEIQNPDPAVYQLRDSKSSDKSVCLFTDFDSQTNVSQSKDSDVYITDKCVLDMRSMDFKSNSAVAWSNKSDFACANAFNNSIIPEDTFFPSPESSCGFTSESYQQGVLSATILYEILLGKATLYAVLVSALVLMAMVKRKDSRGRAKRSGSGVKQTLNFDLLKLAGDVESNPGPTSMDWIWRILFLVGAATGAHSFELEMAQVQLVQSGAEVKKPGSSVKVSCKASGGTFSSYAISWVRQAPGQGLEWMGRIIPILGIANYAQKFQGRVTITADKSTSTAYMELSSLRSEDTAVYYCARGGYYSHDMWSEDWGQGTLVTVSSTREDLKNVFPPEVAVFEPSEAEISHTQKATLVCLATGFYPDHVELSWWVNGKEVHSGVCTDPQPLKEQPALNDSRYCLSSRLRVSATFWQNPRNHFRCQVQFYGLSENDEWTQDRAKPVTQIVSAEAWGRADCDVKLVEKSFETDTNLNFQNLSVIGFRILLLKVAGFNLLMTLRLWSS

SEQ ID NO: 12589 - protein, 630 aa, synthetic construct
MALPVTALLLPLALLLHAARPDFVMTQSPDSLAVSLGERVTMSCKSSQSLLNSGNQKNYLTWYQQKPGQPPKLLIYWASTRESGVPDRFSGSGSGTDFTLTISSLQAEDVAVYYCQNDYSYPYTFGQGTKLEIKLEIQNPDPAVYQLRDSKSSDKSVCLFTDFDSQTNVSQSKDSDVYITDKCVLDMRSMDFKSNSAVAWSNKSDFACANAFNNSIIPEDTFFPSPESSCGFTSESYQQGVLSATILYEILLGKATLYAVLVSALVLMAMVKRKDSRGRAKRSGSGVKQTLNFDLLKLAGDVESNPGPTSMDWIWRILFLVGAATGAHSFEEVQLVQSGAELKKPGASVKVSCKASGYTFTDYYMKWVRQAPGQGLEWIGDIIPSNGATFYNQKFKGRVTITVDKSTSTAYMELSSLRSEDTAVYYCARSHLLRASWFAYWGQGTLVTVSSTREDLKNVFPPEVAVFEPSEAEISHTQKATLVCLATGFYPDHVELSWWVNGKEVHSGVCTDPQPLKEQPALNDSRYCLSSRLRVSATFWQNPRNHFRCQVQFYGLSENDEWTQDRAKPVTQIVSAEAWGRADCDVKLVEKSFETDTNLNFQNLSVIGFRILLLKVAGFNLLMTLRLWSS

SEQ ID NO: 12590 - protein, 630 aa, synthetic construct
MALPVTALLLPLALLLHAARPDFVMTQSPDSLAVSLGERVTMSCKSSQSLLNSGNQKNYLTWYQQKPGQPPKLLIYWASTRESGVPDRFSGSGSGTDFTLTISSLQAEDVAVYYCQNDYSYPYTFGQGTKLEIKLEIQNPDPAVYQLRDSKSSDKSVCLFTDFDSQTNVSQSKDSDVYITDKCVLDMRSMDFKSNSAVAWSNKSDFACANAFNNSIIPEDTFFPSPESSCGFTSESYQQGVLSATILYEILLGKATLYAVLVSALVLMAMVKRKDSRGRAKRSGSGVKQTLNFDLLKLAGDVESNPGPTSMDWIWRILFLVGAATGAHSFEQVQLVQSGAELKKPGASVKVSCKASGYTFTDYYMKWVRQAPGQGLEWIGDIIPSNGATFYNQKFKGRVTITVDKSTSTAYMELSSLRSEDTAVYYCARSHLLRASWFAYWGQGTLVTVSSTREDLKNVFPPEVAVFEPSEAEISHTQKATLVCLATGFYPDHVELSWWVNGKEVHSGVCTDPQPLKEQPALNDSRYCLSSRLRVSATFWQNPRNHFRCQVQFYGLSENDEWTQDRAKPVTQIVSAEAWGRADCDVKLVEKSFETDTNLNFQNLSVIGFRILLLKVAGFNLLMTLRLWSS

SEQ ID NO: 12591 - protein, 620 aa, synthetic construct
MALPVTALLLPLALLLHAARPDVQITQSPSYLAASPGETITINCRASKSISKDLAWYQEKPGKTNKLLIYSGSTLQSGIPSRFSGSGSGTDFTLTISSLEPEDFAMYYCQQHNKYPYTFGGGTKLEIKRLEIQNPDPAVYQLRDSKSSDKSVCLFTDFDSQTNVSQSKDSDVYITDKCVLDMRSMDFKSNSAVAWSNKSDFACANAFNNSIIPEDTFFPSPESSCGFTSESYQQGVLSATILYEILLGKATLYAVLVSALVLMAMVKRKDSRGRAKRSGSGVKQTLNFDLLKLAGDVESNPGPTSMDWIWRILFLVGAATGAHSFEQVQLQQPGAELVRPGASVKLSCKASGYTFTSYWMNWVKQRPDQGLEWIGRIDPYDSETHYNQKFKDKAILTVDKSSSTAYMQLSSLTSEDSAVYYCARGNWDDYWGQGTTLTVSSTREDLKNVFPPEVAVFEPSEAEISHTQKATLVCLATGFYPDHVELSWWVNGKEVHSGVCTDPQPLKEQPALNDSRYCLSSRLRVSATFWQNPRNHFRCQVQFYGLSENDEWTQDRAKPVTQIVSAEAWGRADCDVKLVEKSFETDTNLNFQNLSVIGFRILLLKVAGFNLLMTLRLWSS

SEQ ID NO: 12592 - protein, 622 aa, synthetic construct
MALPVTALLLPLALLLHAARPEIVLTQSPTSMTASPGEQVTITCRASSSINYMHWYQQKPGASPRPWIYETSKLASGVPDRFSGSASGTSYSLTINNMEAEDAATYYCQQWNYPSWTFGGGTKLELKLEIQNPDPAVYQLRDSKSSDKSVCLFTDFDSQTNVSQSKDSDVYITDKCVLDMRSMDFKSNSAVAWSNKSDFACANAFNNSIIPEDTFFPSPESSCGFTSESYQQGVLSATILYEILLGKATLYAVLVSALVLMAMVKRKDSRGRAKRSGSGVKQTLNFDLLKLAGDVESNPGPTSMDWIWRILFLVGAATGAHSFEEVQLVESGGGLVQPGRSLKLSCAASGFTFSDYNMAWVRQAPKKGLEWVATILYDGGRTYYRGSVKGRFTISRDNAKSTLYLRMDSLRSEDTATYYCATHSRGTDYFDYWGQGVMVTVSSTREDLKNVFPPEVAVFEPSEAEISHTQKATLVCLATGFYPDHVELSWWVNGKEVHSGVCTDPQPLKEQPALNDSRYCLSSRLRVSATFWQNPRNHFRCQVQFYGLSENDEWTQDRAKPVTQIVSAEAWGRADCDVKLVEKSFETDTNLNFQNLSVIGFRILLLKVAGFNLLMTLRLWSS

SEQ ID NO: 12593 - protein, 631 aa, synthetic construct
MALPVTALLLPLALLLHAARPDIVMTQSPSSLAVSEGETVTINCKSSQSFLSSGDGKNYVAWYQYKPGQSPKLLIYWASTRQSGVPDRFIGSGSGTDFTLTISTVQAEDLAIYYCQQYYDTPLTFGSGTKLEIKLEIQNPDPAVYQLRDSKSSDKSVCLFTDFDSQTNVSQSKDSDVYITDKCVLDMRSMDFKSNSAVAWSNKSDFACANAFNNSIIPEDTFFPSPESSCGFTSESYQQGVLSATILYEILLGKATLYAVLVSALVLMAMVKRKDSRGRAKRSGSGVKQTLNFDLLKLAGDVESNPGPTSMDWIWRILFLVGAATGAHSFEEVKLQESGPSLVQSSQTLSLTCTVSGFSLTSYHIHWVRQTPGKGLEWMGVMWSDGDTSYNSALKSRLSISRDTSQSQVFLKMNSLQTEDTATYYCARGYYSSYLYLWFAYWGQGTLVTVSSTREDLKNVFPPEVAVFEPSEAEISHTQKATLVCLATGFYPDHVELSWWVNGKEVHSGVCTDPQPLKEQPALNDSRYCLSSRLRVSATFWQNPRNHFRCQVQFYGLSENDEWTQDRAKPVTQIVSAEAWGRADCDVKLVEKSFETDTNLNFQNLSVIGFRILLLKVAGFNLLMTLRLWSS

SEQ ID NO: 12594 - protein, 635 aa, synthetic construct
MALPVTALLLPLALLLHAARPDVLMTQTPVSLPVSLGGQVSISCRSSQSLVHSDGDTYLHWYLQKPGQSPQLLIYRVSNRFSGVPDRFSGSGSGTDFTLKISRVEPEDLGLYYCLQTTHFPPWTFGGGTKLEMKLEIQNPDPAVYQLRDSKSSDKSVCLFTDFDSQTNVSQSKDSDVYITDKCVLDMRSMDFKSNSAVAWSNKSDFACANAFNNSIIPEDTFFPSPESSCGFTSESYQQGVLSATILYEILLGKATLYAVLVSALVLMAMVKRKDSRGRAKRSGSGVKQTLNFDLLKLAGDVESNPGPTSMDWIWRILFLVGAATGAHSFEQVQLQQSGPELRRPGSSVRLSCKASGYRIKDFLIHWIKNRPEHGLEWIGWIDPEDGETKYAQKFQTKATLTADTSSNTAYMQLSSLTSEDTATYFCARWGDVYYGLMRGHVMDAWGQGTSVTVSSTREDLKNVFPPEVAVFEPSEAEISHTQKATLVCLATGFYPDHVELSWWVNGKEVHSGVCTDPQPLKEQPALNDSRYCLSSRLRVSATFWQNPRNHFRCQVQFYGLSENDEWTQDRAKPVTQIVSAEAWGRADCDVKLVEKSFETDTNLNFQNLSVIGFRILLLKVAGFNLLMTLRLWSS

SEQ ID NO: 12595 - protein, 630 aa, synthetic construct
MALPVTALLLPLALLLHAARPDIVMTQSPATLSLSPGERATLSCRSSKSLQNVNGNTYLYWFQQKPGQSPQLLIYRMSNLNSGVPDRFSGSGSGTEFTLTISSLEPEDFAVYYCMQHLEYPITFGAGTKLEIKLEIQNPDPAVYQLRDSKSSDKSVCLFTDFDSQTNVSQSKDSDVYITDKCVLDMRSMDFKSNSAVAWSNKSDFACANAFNNSIIPEDTFFPSPESSCGFTSESYQQGVLSATILYEILLGKATLYAVLVSALVLMAMVKRKDSRGRAKRSGSGVKQTLNFDLLKLAGDVESNPGPTSMDWIWRILFLVGAATGAHSFEEVQLVESGGGLVKPGGSLKLSCAASGYTFTSYVMHWVRQAPGKGLEWIGYINPYNDGTKYNEKFQGRVTISSDKSISTAYMELSSLRSEDTAMYYCARGTYYYGTRVFDYWGQGTLVTVSSTREDLKNVFPPEVAVFEPSEAEISHTQKATLVCLATGFYPDHVELSWWVNGKEVHSGVCTDPQPLKEQPALNDSRYCLSSRLRVSATFWQNPRNHFRCQVQFYGLSENDEWTQDRAKPVTQIVSAEAWGRADCDVKLVEKSFETDTNLNFQNLSVIGFRILLLKVAGFNLLMTLRLWSS

SEQ ID NO: 12596 - protein, 626 aa, synthetic construct
MALPVTALLLPLALLLHAARPDIQMTQSPSSLSASVGDRVTITCKASDHINNWLAWYQQKPGQAPKLLIYGATTLETGVPSRFSGSGSGTDYTLTISSLQPEDFATYYCQQSWNTPWTFGQGTKLEIKRLEIQNPDPAVYQLRDSKSSDKSVCLFTDFDSQTNVSQSKDSDVYITDKCVLDMRSMDFKSNSAVAWSNKSDFACANAFNNSIIPEDTFFPSPESSCGFTSESYQQGVLSATILYEILLGKATLYAVLVSALVLMAMVKRKDSRGRAKRSGSGVKQTLNFDLLKLAGDVESNPGPTSMDWIWRILFLVGAATGAHSFEQVQLQQPGAELVKPGASVKMSCKASGYAFSSYWINWMKQKPGQGLEWIGQIYPGDGDTNYNGKFKGRATLTADTSSSTAYMQLSSLTSEDSAVYFCARSITTVVGCAMDYWGQGTSVTVSSTREDLKNVFPPEVAVFEPSEAEISHTQKATLVCLATGFYPDHVELSWWVNGKEVHSGVCTDPQPLKEQPALNDSRYCLSSRLRVSATFWQNPRNHFRCQVQFYGLSENDEWTQDRAKPVTQIVSAEAWGRADCDVKLVEKSFETDTNLNFQNLSVIGFRILLLKVAGFNLLMTLRLWSS

SEQ ID NO: 12597 - protein, 628 aa, synthetic construct
MALPVTALLLPLALLLHAARPQIVLSQSPAILSASPGEKVTMTCRASSSVSYMHWYQQKPGSSPKPWIYATSNLASGVPARFSGSGSGTSYSFTISRVEAEDAATYYCQQWTFNPPTFGGGTRLEIKRTVAALEIQNPDPAVYQLRDSKSSDKSVCLFTDFDSQTNVSQSKDSDVYITDKCVLDMRSMDFKSNSAVAWSNKSDFACANAFNNSIIPEDTFFPSPESSCGFTSESYQQGVLSATILYEILLGKATLYAVLVSALVLMAMVKRKDSRGRAKRSGSGVKQTLNFDLLKLAGDVESNPGPTSMDWIWRILFLVGAATGAHSFEQAYLQQSGAELVRPGASVKMSCKASGYTFTSYNMHWVKQTPRQGLEWIGGIYPGNGDTSYNQKFKGKATLTVGKSSSTAYMQLSSLTSEDSAVYFCARYDYNYAMDYWGQGTSVTVSSASTREDLKNVFPPEVAVFEPSEAEISHTQKATLVCLATGFYPDHVELSWWVNGKEVHSGVCTDPQPLKEQPALNDSRYCLSSRLRVSATFWQNPRNHFRCQVQFYGLSENDEWTQDRAKPVTQIVSAEAWGRADCDVKLVEKSFETDTNLNFQNLSVIGFRILLLKVAGFNLLMTLRLWSS

SEQ ID NO: 12598 - protein, 626 aa, synthetic construct
MALPVTALLLPLALLLHAARPEIVLTQSPATLSLSPGERATLSCRASQSVSSYLAWYQQKPGQAPRLLIYDASNRATGIPARFSGSGSGTDFTLTISSLEPEDFAVYYCQQRSNWPITFGQGTRLEIKLEIQNPDPAVYQLRDSKSSDKSVCLFTDFDSQTNVSQSKDSDVYITDKCVLDMRSMDFKSNSAVAWSNKSDFACANAFNNSIIPEDTFFPSPESSCGFTSESYQQGVLSATILYEILLGKATLYAVLVSALVLMAMVKRKDSRGRAKRSGSGVKQTLNFDLLKLAGDVESNPGPTSMDWIWRILFLVGAATGAHSFEEVQLVESGGGLVQPDRSLRLSCAASGFTFHDYAMHWVRQAPGKGLEWVSTISWNSGTIGYADSVKGRFTISRDNAKNSLYLQMNSLRAEDTALYYCAKDIQYGNYYYGMDVWGQGTTVTVSSTREDLKNVFPPEVAVFEPSEAEISHTQKATLVCLATGFYPDHVELSWWVNGKEVHSGVCTDPQPLKEQPALNDSRYCLSSRLRVSATFWQNPRNHFRCQVQFYGLSENDEWTQDRAKPVTQIVSAEAWGRADCDVKLVEKSFETDTNLNFQNLSVIGFRILLLKVAGFNLLMTLRLWSS

SEQ ID NO: 12599 - protein, 621 aa, synthetic construct
MALPVTALLLPLALLLHAARPDIQMTQSPSSLSASVGDRVTINCKASQDINSYLSWFQQKPGKAPKTLIYRANRLVDGVPSRFSGSGSGQDYTLTISSLQPEDFATYYCLQYDEFPLTFGGGTKVEIKLEIQNPDPAVYQLRDSKSSDKSVCLFTDFDSQTNVSQSKDSDVYITDKCVLDMRSMDFKSNSAVAWSNKSDFACANAFNNSIIPEDTFFPSPESSCGFTSESYQQGVLSATILYEILLGKATLYAVLVSALVLMAMVKRKDSRGRAKRSGSGVKQTLNFDLLKLAGDVESNPGPTSMDWIWRILFLVGAATGAHSFEQVQLVQSGAEVKKPGASVKVSCKASGYTFTNYDINWVRQAPGQGLEWIGWIYPGDGSTKYNEKFKAKATLTADTSTSTAYMELRSLRSDDTAVYYCASGYEDAMDYWGQGTTVTVSSTREDLKNVFPPEVAVFEPSEAEISHTQKATLVCLATGFYPDHVELSWWVNGKEVHSGVCTDPQPLKEQPALNDSRYCLSSRLRVSATFWQNPRNHFRCQVQFYGLSENDEWTQDRAKPVTQIVSAEAWGRADCDVKLVEKSFETDTNLNFQNLSVIGFRILLLKVAGFNLLMTLRLWSS

SEQ ID NO: 12600 - protein, 623 aa, synthetic construct
MALPVTALLLPLALLLHAARPDIVMTQTPLSLSVTPGQPASISCKSSQSLLDGDGKTYLNWLLQKPGQSPQRLIYLVSKLDSGVPDRFSGSGSGTDFTLKISRVEAEDVGVYYCWQGTHFPRTFGQGTKLEIKLEIQNPDPAVYQLRDSKSSDKSVCLFTDFDSQTNVSQSKDSDVYITDKCVLDMRSMDFKSNSAVAWSNKSDFACANAFNNSIIPEDTFFPSPESSCGFTSESYQQGVLSATILYEILLGKATLYAVLVSALVLMAMVKRKDSRGRAKRSGSGVKQTLNFDLLKLAGDVESNPGPTSMDWIWRILFLVGAATGAHSFEQVQLVQSGAEVKKPGASVKVSCKASGYTFKDTYIHWVRQAPGQGLEWMGRIDPANGNTKYDPKFQGRVTMTRDTSISTAYMELSRLRSDDTAVYYCARRGGVDWGQGTLVTVSSTREDLKNVFPPEVAVFEPSEAEISHTQKATLVCLATGFYPDHVELSWWVNGKEVHSGVCTDPQPLKEQPALNDSRYCLSSRLRVSATFWQNPRNHFRCQVQFYGLSENDEWTQDRAKPVTQIVSAEAWGRADCDVKLVEKSFETDTNLNFQNLSVIGFRILLLKVAGFNLLMTLRLWSS

SEQ ID NO: 12601 - protein, 624 aa, synthetic construct
MALPVTALLLPLALLLHAARPDIQMTQSPSSLSASVGDRVTITCKASQDVSTAVAWFQQKPGKAPKLLIYSPSYRYTGVPSRFSGSGSGTDFTLTISSLQPEDFTYYCQQLYSTPYTFGQGTKVEIKLEIQNPDPAVYQLRDSKSSDKSVCLFTDFDSQTNVSQSKDSDVYITDKCVLDMRSMDFKSNSAVAWSNKSDFACANAFNNSIIPEDTFFPSPESSCGFTSESYQQGVLSATILYEILLGKATLYAVLVSALVLMAMVKRKDSRGRAKRSGSGVKQTLNFDLLKLAGDVESNPGPTSMDWIWRILFLVGAATGAHSFEEVQLVQSGAEVKKPGASVKVSCKASGYTFTDYYLDVVVRQAPGQGLEWIGRVNPYNGGTIYNQKFKGRVTLTRDTSTSTAYLELSSLRSEDTAVYYCARDHYRYDPLLDYWGQGTLVTVSSTREDLKNVFPPEVAVFEPSEAEISHTQKATLVCLATGFYPDHVELSWWVNGKEVHSGVCTDPQPLKEQPALNDSRYCLSSRLRVSATFWQNPRNHFRCQVQFYGLSENDEWTQDRAKPVTQIVSAEAWGRADCDVKLVEKSFETDTNLNFQNLSVIGFRILLLKVAGFNLLMTLRLWSS

SEQ ID NO: 12602 - protein, 630 aa, synthetic construct
MALPVTALLLPLALLLHAARPDIQMTQSPSSLSASVGDRVTITCRASQSVSTSSYNYMHWYQQKPGKPPKLLIKYASNLESGVPSRFSGSGSGTDFTLTISSLQPEDFATYYCQHSWEIPLTFGQGTKVEIKLEIQNPDPAVYQLRDSKSSDKSVCLFTDFDSQTNVSQSKDSDVYITDKCVLDMRSMDFKSNSAVAWSNKSDFACANAFNNSIIPEDTFFPSPESSCGFTSESYQQGVLSATILYEILLGKATLYAVLVSALVLMAMVKRKDSRGRAKRSGSGVKQTLNFDLLKLAGDVESNPGPTSMDWIWRILFLVGAATGAHSFEEVQLVQSGAEVKKPGASVKVSCKASGYSFTDYYMHWVRQAPGQGLEWIGRINPYNGAAFYSQNFKDRVTLTVDTSTSTAYLELSSLRSEDTAVYYCAIERGADLEGYAMDYWGQGTLVTVSSTREDLKNVFPPEVAVFEPSEAEISHTQKATLVCLATGFYPDHVELSWWVNGKEVHSGVCTDPQPLKEQPALNDSRYCLSSRLRVSATFWQNPRNHFRCQVQFYGLSENDEWTQDRAKPVTQIVSAEAWGRADCDVKLVEKSFETDTNLNFQNLSVIGFRILLLKVAGFNLLMTLRLWSS

SEQ ID NO: 12603 - protein, 628 aa, synthetic construct
MALPVTALLLPLALLLHAARPEIVLTQSPATLSASPGERVTLTCRASSNVISSYVHWYQQKPGSSPRLFLYSTSNLASGVPSRFSGSGSGTDFTFTISSLEAEDAATYYCQQYSGYPLTFGQGTRLEIKLEIQNPDPAVYQLRDSKSSDKSVCLFTDFDSQTNVSQSKDSDVYITDKCVLDMRSMDFKSNSAVAWSNKSDFACANAFNNSIIPEDTFFPSPESSCGFTSESYQQGVLSATILYEILLGKATLYAVLVSALVLMAMVKRKDSRGRAKRSGSGVKQTLNFDLLKLAGDVESNPGPTSMDWIWRILFLVGAATGAHSFEQVQLQESGPGLVKPSETLSLTCAVSGYSITSAYYWNWIRQPPGKGLEWIGYISYDGRNNYNPSLKNRITINPDTSKNQFSLQLNSVTPEDTAVYYCAREGDYDVGNYYAMDYWGQGTLVTVSSTREDLKNVFPPEVAVFEPSEAEISHTQKATLVCLATGFYPDHVELSWWVNGKEVHSGVCTDPQPLKEQPALNDSRYCLSSRLRVSATFWQNPRNHFRCQVQFYGLSENDEWTQDRAKPVTQIVSAEAWGRADCDVKLVEKSFETDTNLNFQNLSVIGFRILLLKVAGFNLLMTLRLWSS

SEQ ID NO: 12604 - protein, 628 aa, synthetic construct
MALPVTALLLPLALLLHAARPEIVLTQSPATLSLSPGERATLSCRASSNVISSYVHWYQQKPGQAPRLLIYSTSNLASGIPARFSGSGSGTDFTLTISSLEPEDFAVYYCQQYSGYPLTFGQGTRLEIKLEIQNPDPAVYQLRDSKSSDKSVCLFTDFDSQTNVSQSKDSDVYITDKCVLDMRSMDFKSNSAVAWSNKSDFACANAFNNSIIPEDTFFPSPESSCGFTSESYQQGVLSATILYEILLGKATLYAVLVSALVLMAMVKRKDSRGRAKRSGSGVKQTLNFDLLKLAGDVESNPGPTSMDWIWRILFLVGAATGAHSFEEVQLVESGGGLVQPGRSLRLSCAASGYSITSAYYWNWVRQAPGKGLEWVSYISYDGRNNYNPSLKNRFTISRDNAKKSLYLQMNSLRAEDTALYYCAKEGDYDVGNYYAMDYWGQGTTVTVSSTREDLKNVFPPEVAVFEPSEAEISHTQKATLVCLATGFYPDHVELSWWVNGKEVHSGVCTDPQPLKEQPALNDSRYCLSSRLRVSATFWQNPRNHFRCQVQFYGLSENDEWTQDRAKPVTQIVSAEAWGRADCDVKLVEKSFETDTNLNFQNLSVIGFRILLLKVAGFNLLMTLRLWSS

SEQ ID NO: 12605 - protein, 627 aa, synthetic construct
MALPVTALLLPLALLLHAARPDVVMTQTPLSLPVSLGDQASISCRSSQSLVHSNGNTYLRWYLQKPGQSPKVLIYKVSNRVSGVPDRFSGSGSGTDFTLKINRVEAEDLGVYFCSQSTHVPWTFGGGTKLEIKLEIQNPDPAVYQLRDSKSSDKSVCLFTDFDSQTNVSQSKDSDVYITDKCVLDMRSMDFKSNSAVAWSNKSDFACANAFNNSIIPEDTFFPSPESSCGFTSESYQQGVLSATILYEILLGKATLYAVLVSALVLMAMVKRKDSRGRAKRSGSGVKQTLNFDLLKLAGDVESNPGPTSMDWIWRILFLVGAATGAHSFEGVKLDETGGGLVQPGGAMKLSCVTSGFTFGHYWMNWVRQSPEKGLEWVAQFRNKPYNYETYYSDSVKGRFTISRDDSKSSVYLQMNNLRVEDTGIYYCTGASYGMEYLGQGTSVTVSTTREDLKNVFPPEVAVFEPSEAEISHTQKATLVCLATGFYPDHVELSWWVNGKEVHSGVCTDPQPLKEQPALNDSRYCLSSRLRVSATFWQNPRNHFRCQVQFYGLSENDEWTQDRAKPVTQIVSAEAWGRADCDVKLVEKSFETDTNLNFQNLSVIGFRILLLKVAGFNLLMTLRLWSS

SEQ ID NO: 12606 - protein, 633 aa, synthetic construct
MALPVTALLLPLALLLHAARPQVQLVESGGNLVQPGGSLRLSCAASGFTFGSFSMSWVRQAPGGGLEWVAGLSARSSLTHYADSVKGRFTISRDNAKNSVYLQMNSLRVEDTAVYYCARRSYDSSGYWGHFYSYMDVWGQGTLVTVSLEIQNPDPAVYQLRDSKSSDKSVCLFTDFDSQTNVSQSKDSDVYITDKCVLDMRSMDFKSNSAVAWSNKSDFACANAFNNSIIPEDTFFPSPESSCGFTSESYQQGVLSATILYEILLGKATLYAVLVSALVLMAMVKRKDSRGRAKRSGSGVKQTLNFDLLKLAGDVESNPGPTSMDWIWRILFLVGAATGAHSFESVLTQPSSVSAAPGQKVTISCSGSTSNIGNNYVSWYQQHPGKAPKLMIYDVSKRPSGVPDRFSGSKSGNSASLDISGLQSEDEADYYCAAWDDSLSEFLFGTGTKLTVLGTREDLKNVFPPEVAVFEPSEAEISHTQKATLVCLATGFYPDHVELSWWVNGKEVHSGVCTDPQPLKEQPALNDSRYCLSSRLRVSATFWQNPRNHFRCQVQFYGLSENDEWTQDRAKPVTQIVSAEAWGRADCDVKLVEKSFETDTNLNFQNLSVIGFRILLLKVAGFNLLMTLRLWSS

SEQ ID NO: 12607 - protein, 628 aa, synthetic construct
MALPVTALLLPLALLLHAARPDVVMTQSPSSLSASVGDRVTITCQSSLDISHYLNWYQQKPGKAPKLLIYDASNLETGVPSRFSGSGSGTHFTFTISSLQPEDFATYYCQQYDNLPLTFGGGTKLEIKRLEIQNPDPAVYQLRDSKSSDKSVCLFTDFDSQTNVSQSKDSDVYITDKCVLDMRSMDFKSNSAVAWSNKSDFACANAFNNSIIPEDTFFPSPESSCGFTSESYQQGVLSATILYEILLGKATLYAVLVSALVLMAMVKRKDSRGRAKRSGSGVKQTLNFDLLKLAGDVESNPGPTSMDWIWRILFLVGAATGAHSFEQVQLVQSGGGVVQPGGSLRVSCAASGVTLSDYGMHWVRQAPGKGLEWVAFIRNDGSDKYYADSVKGRFTISRDNSEKTVSLQMSSLRAEDTAVYYCAKNGESGPLDYWYLDLWGRGTLVTVSSTREDLKNVFPPEVAVFEPSEAEISHTQKATLVCLATGFYPDHVELSWWVNGKEVHSGVCTDPQPLKEQPALNDSRYCLSSRLRVSATFWQNPRNHFRCQVQFYGLSENDEWTQDRAKPVTQIVSAEAWGRADCDVKLVEKSFETDTNLNFQNLSVIGFRILLLKVAGFNLLMTLRLWSS

SEQ ID NO: 12608 - protein, 632 aa, synthetic construct
MALPVTALLLPLALLLHAARPSYELTQPPSVSGTPGQRVAISCSGSSSNIGTRMVTWYQHVPGTAPKLLIFNNNQRPSGVPDRFSASKSGTSASLAIIGLQSDDEADYYCATWDDNVKSYVFGTGTKVTVLGSRLEIQNPDPAVYQLRDSKSSDKSVCLFTDFDSQTNVSQSKDSDVYITDKCVLDMRSMDFKSNSAVAWSNKSDFACANAFNNSIIPEDTFFPSPESSCGFTSESYQQGVLSATILYEILLGKATLYAVLVSALVLMAMVKRKDSRGRAKRSGSGVKQTLNFDLLKLAGDVESNPGPTSMDWIWRILFLVGAATGAHSFELEMAQVQLQQWGAGLLKPSETLSLTCAVYGGSFSGYYWSWIRQPPGKGLEWIGEINHSGSTNYNPSLKSRVTISVDTSKNQFSLKLSSVTAADTAVYYCARAPQSWYVGDVWGQGTLVTVSSTREDLKNVFPPEVAVFEPSEAEISHTQKATLVCLATGFYPDHVELSWWVNGKEVHSGVCTDPQPLKEQPALNDSRYCLSSRLRVSATFWQNPRNHFRCQVQFYGLSENDEWTQDRAKPVTQIVSAEAWGRADCDVKLVEKSFETDTNLNFQNLSVIGFRILLLKVAGFNLLMTLRLWSS

SEQ ID NO: 12609 - protein, 629 aa, synthetic construct
MALPVTALLLPLALLLHAARPQSVLTQPPSLSVAPGKTASITCGGNNIGMKSVHWYQQRPGQAPVLVIYYDSDRPSGIPGRFSGSNSGNTATLTISRVEAGDEADYYCQVWDTTGDHPGYVFGTGTKVTVLLEIQNPDPAVYQLRDSKSSDKSVCLFTDFDSQTNVSQSKDSDVYITDKCVLDMRSMDFKSNSAVAWSNKSDFACANAFNNSIIPEDTFFPSPESSCGFTSESYQQGVLSATILYEILLGKATLYAVLVSALVLMAMVKRKDSRGRAKRSGSGVKQTLNFDLLKLAGDVESNPGPTSMDWIWRILFLVGAATGAHSFEQVQLVQSGAEVKKPGSSVKVSCKASGGTFSSYAISWVRQAPGQGLEWMGGIIPIFGTANYAQKFQGRVTITADESTSTAYMELSSLRSEDTAVYYCARGVYGYSGSAPYDEWGQGTLVTVSSTREDLKNVFPPEVAVFEPSEAEISHTQKATLVCLATGFYPDHVELSWWVNGKEVHSGVCTDPQPLKEQPALNDSRYCLSSRLRVSATFWQNPRNHFRCQVQFYGLSENDEWTQDRAKPVTQIVSAEAWGRADCDVKLVEKSFETDTNLNFQNLSVIGFRILLLKVAGFNLLMTLRLWSS

SEQ ID NO: 12610 - protein, 627 aa, synthetic construct
MALPVTALLLPLALLLHAARPEVQLVESGGGLVQPGRSLRLSCAASGFTFDDYAMHWVRQAPGKGLEWVSGISWNSGSIGYADSVKGRFTISRDNAKNSLYLQMNSLRAEDTALYYCAKDKGGGYYDFWSGSDYWGQGTLVTVSSLEIQNPDPAVYQLRDSKSSDKSVCLFTDFDSQTNVSQSKDSDVYITDKCVLDMRSMDFKSNSAVAWSNKSDFACANAFNNSIIPEDTFFPSPESSCGFTSESYQQGVLSATILYEILLGKATLYAVLVSALVLMAMVKRKDSRGRAKRSGSGVKQTLNFDLLKLAGDVESNPGPTSMDWIWRILFLVGAATGAHSFESSELTQDPAVSVALGQTVRITCQGDSLRSYYASWYQQKPGQAPVLVIYGKNNRPSGIPDRFSGSSSGNTASLTITGAQAEDEADYYCNSRDSSGWVFGGGTKLTVLTREDLKNVFPPEVAVFEPSEAEISHTQKATLVCLATGFYPDHVELSWWVNGKEVHSGVCTDPQPLKEQPALNDSRYCLSSRLRVSATFWQNPRNHFRCQVQFYGLSENDEWTQDRAKPVTQIVSAEAWGRADCDVKLVEKSFETDTNLNFQNLSVIGFRILLLKVAGFNLLMTLRLWSS

SEQ ID NO: 12611 - protein, 636 aa, synthetic construct
MALPVTALLLPLALLLHAARPEVQLQQSGPGLVKPSQTLSLTCAISGDSVLSNSDTWNWIRQSPSRGLEWLGRTYHRSTWYDDYASSVRGRVSINVDTSKNQYSLQLNAVTPEDTGVYYCARDRLQDGNSWSDAFDVWGQGTMVTVSSLEIQNPDPAVYQLRDSKSSDKSVCLFTDFDSQTNVSQSKDSDVYITDKCVLDMRSMDFKSNSAVAWSNKSDFACANAFNNSIIPEDTFFPSPESSCGFTSESYQQGVLSATILYEILLGKATLYAVLVSALVLMAMVKRKDSRGRAKRSGSGVKQTLNFDLLKLAGDVESNPGPTSMDWIWRILFLVGAATGAHSFEQSALTQPASVSGSPGQSITISCTGTSSDVGGYNYVSWYQQHPGKAPKLMIYDVSNRPSGVSNRFSGSKSGNTASLTISGLQAEDEADYYCSSYTSSSTLVYVFGTGTKVTVLTREDLKNVFPPEVAVFEPSEAEISHTQKATLVCLATGFYPDHVELSWWVNGKEVHSGVCTDPQPLKEQPALNDSRYCLSSRLRVSATFWQNPRNHFRCQVQFYGLSENDEWTQDRAKPVTQIVSAEAWGRADCDVKLVEKSFETDTNLNFQNLSVIGFRILLLKVAGFNLLMTLRLWSS

SEQ ID NO: 12612 - protein, 614 aa, synthetic construct
MALPVTALLLPLALLLHAARPQVQLVQSGAEVKKPGASVKVSCKASGYTFTSYDINWVRQATGQGLEWMGWMNPNSGNTGYAQKFQGRVTMTRNTSISTAYMELSSLRSEDTAVYYCARGDSTKVEIKLEIQNPDPAVYQLRDSKSSDKSVCLFTDFDSQTNVSQSKDSDVYITDKCVLDMRSMDFKSNSAVAWSNKSDFACANAFNNSIIPEDTFFPSPESSCGFTSESYQQGVLSATILYEILLGKATLYAVLVSALVLMAMVKRKDSRGRAKRSGSGVKQTLNFDLLKLAGDVESNPGPTSMDWIWRILFLVGAATGAHSFEQSVLTQPRSVSGSPGQSVTISCTGTSSDVGGYNYVSWYQQHPGEAPKLIIYDADKRPSGISNRFSSGKSGNTASLTISGLQVEDEADYYCCSYAGGSTWVFGGGTKVTVLTREDLKNVFPPEVAVFEPSEAEISHTQKATLVCLATGFYPDHVELSWWVNGKEVHSGVCTDPQPLKEQPALNDSRYCLSSRLRVSATFWQNPRNHFRCQVQFYGLSENDEWTQDRAKPVTQIVSAEAWGRADCDVKLVEKSFETDTNLNFQNLSVIGFRILLLKVAGFNLLMTLRLWSS

SEQ ID NO: 12613 - protein, 636 aa, synthetic construct
MALPVTALLLPLALLLHAARPEVQLQQSGPGLVKPSQTLSLTCAISGDSVSSNSAAWNWIRQSPSRGLEWLGRTYYRSKWYSDYAVSVKSRITINPDTSKNQFSLQLNSVTPEDTAVYYCARDPYDFWSGYPDAFDIWGQGTMVTVSSLEIQNPDPAVYQLRDSKSSDKSVCLFTDFDSQTNVSQSKDSDVYITDKCVLDMRSMDFKSNSAVAWSNKSDFACANAFNNSIIPEDTFFPSPESSCGFTSESYQQGVLSATILYEILLGKATLYAVLVSALVLMAMVKRKDSRGRAKRSGSGVKQTLNFDLLKLAGDVESNPGPTSMDWIWRILFLVGAATGAHSFEQSALTQPASVSGSPGQSITISCTGTSSDVGGYNYVSWYQQHPGKAPKVIISEVNNRPSGVSHRFSGSKSGNTASLTISGLQAEDEADYFCSSYTSGRTLYVFGTGSKVTVLGTREDLKNVFPPEVAVFEPSEAEISHTQKATLVCLATGFYPDHVELSWWVNGKEVHSGVCTDPQPLKEQPALNDSRYCLSSRLRVSATFWQNPRNHFRCQVQFYGLSENDEWTQDRAKPVTQIVSAEAWGRADCDVKLVEKSFETDTNLNFQNLSVIGFRILLLKVAGFNLLMTLRLWSS

SEQ ID NO: 12614 - protein, 635 aa, synthetic construct
MALPVTALLLPLALLLHAARPQSALTQPASASGSPGQSVTISCTGTSSDVGGYNYVSWYQQHPGKAPKLMIYDVSNRPSGVSNRFSGSKSGNTASLTISGLQAEDEADYYCSSYTSSSTLYVFGTGTQLTVLLEIQNPDPAVYQLRDSKSSDKSVCLFTDFDSQTNVSQSKDSDVYITDKCVLDMRSMDFKSNSAVAWSNKSDFACANAFNNSIIPEDTFFPSPESSCGFTSESYQQGVLSATILYEILLGKATLYAVLVSALVLMAMVKRKDSRGRAKRSGSGVKQTLNFDLLKLAGDVESNPGPTSMDWIWRILFLVGAATGAHSFEEVQLQQSGPGLVKPSQTLSLTCAISGDSMLSNSDTWNWIRQSPSRGLEWLGRTYHRSTWYDDYASSVRGRVSINVDTSKNQYSLQLNAVTPEDTGVYYCARVRLQDGNSWSDAFDVWGQGTMVTVSSTREDLKNVFPPEVAVFEPSEAEISHTQKATLVCLATGFYPDHVELSWWVNGKEVHSGVCTDPQPLKEQPALNDSRYCLSSRLRVSATFWQNPRNHFRCQVQFYGLSENDEWTQDRAKPVTQIVSAEAWGRADCDVKLVEKSFETDTNLNFQNLSVIGFRILLLKVAGFNLLMTLRLWSS

SEQ ID NO: 12615 - protein, 635 aa, synthetic construct
MALPVTALLLPLALLLHAARPDVMLTQTPLSLPVSLGDQASISCRSSQSILHSTGDTYLEWYLQKPGQSPKLLINKVSNRLSGVPDRFSGSGSGTDFTLKISRVEAEDLGVYYCFQGSHVPWTFGGGTKLEIKRADAAPTVSIFPLEIQNPDPAVYQLRDSKSSDKSVCLFTDFDSQTNVSQSKDSDVYITDKCVLDMRSMDFKSNSAVAWSNKSDFACANAFNNSIIPEDTFFPSPESSCGFTSESYQQGVLSATILYEILLGKATLYAVLVSALVLMAMVKRKDSRGRAKRSGSGVKQTLNFDLLKLAGDVESNPGPTSMDWIWRILFLVGAATGAHSFEQVKLQQSGPSLVKPGASVKMSCKASGYTFTDFYMKWVKQSHGKSLEWIGDINPNIGDTFYNQKFKGKATLTVDKSSSTAYMQLNSLTSEDSAVYFCSVGYFDVWGAGTTVTVSSTREDLKNVFPPEVAVFEPSEAEISHTQKATLVCLATGFYPDHVELSWWVNGKEVHSGVCTDPQPLKEQPALNDSRYCLSSRLRVSATFWQNPRNHFRCQVQFYGLSENDEWTQDRAKPVTQIVSAEAWGRADCDVKLVEKSFETDTNLNFQNLSVIGFRILLLKVAGFNLLMTLRLWSS

SEQ ID NO: 12616 - protein, 631 aa, synthetic construct
MALPVTALLLPLALLLHAARPEIVLTQSPATLSLSPGERATLSCRASQSVSIYLAWYQQKPGQAPRLLIYDASNRATGIPARFSGSGSGTDFTLTISSLEPEDFAVYYCQQRSNWPPFTFGPGTKVDIKLEIQNPDPAVYQLRDSKSSDKSVCLFTDFDSQTNVSQSKDSDVYITDKCVLDMRSMDFKSNSAVAWSNKSDFACANAFNNSIIPEDTFFPSPESSCGFTSESYQQGVLSATILYEILLGKATLYAVLVSALVLMAMVKRKDSRGRAKRSGSGVKQTLNFDLLKLAGDVESNPGPTSMDWIWRILFLVGAATGAHSFEQVQLVESGGGVVQPGRSLRLSCAASGFTFSSYGMHWVRQAPGKGLEWVAVIWDDGSNKYYVDSVKGRFTISRDNSKNTLYLQMNSLRAEDTAVYYCARDDYYGSGSFNSYYGTDVWGQGTTVTVSSTREDLKNVFPPEVAVFEPSEAEISHTQKATLVCLATGFYPDHVELSWWVNGKEVHSGVCTDPQPLKEQPALNDSRYCLSSRLRVSATFWQNPRNHFRCQVQFYGLSENDEWTQDRAKPVTQIVSAEAWGRADCDVKLVEKSFETDTNLNFQNLSVIGFRILLLKVAGFNLLMTLRLWSS

SEQ ID NO: 12617 - protein, 616 aa, synthetic construct
MALPVTALLLPLALLLHAARPDIQMTQSPSSLSASVGDRVTITCRASQGISSWLAWYQQKPEKAPKSLIYAASSLQSGVPSRFSGSGSGTDFTLTISSLQPEDFATYYCQQYNSYPYTFGQGTKLEIKLEIQNPDPAVYQLRDSKSSDKSVCLFTDFDSQTNVSQSKDSDVYITDKCVLDMRSMDFKSNSAVAWSNKSDFACANAFNNSIIPEDTFFPSPESSCGFTSESYQQGVLSATILYEILLGKATLYAVLVSALVLMAMVKRKDSRGRAKRSGSGVKQTLNFDLLKLAGDVESNPGPTSMDWIWRILFLVGAATGAHSFEEVQLVQSGGGLVHPGGSLRLSCAGSGFTFSTYLMYWVRQAPGKTLEWVSAIGSGGDTYYADSVKGRFTISRDNAKNSLYLQMNSLRAEDMAVYYCARGLGYWGQGTLVTVSSTREDLKNVFPPEVAVFEPSEAEISHTQKATLVCLATGFYPDHVELSWWVNGKEVHSGVCTDPQPLKEQPALNDSRYCLSSRLRVSATFWQNPRNHFRCQVQFYGLSENDEWTQDRAKPVTQIVSAEAWGRADCDVKLVEKSFETDTNLNFQNLSVIGFRILLLKVAGFNLLMTLRLWSS

SEQ ID NO: 12618 - protein, 635 aa, synthetic construct
MALPVTALLLPLALLLHAARPLPVLTQPPSVSVAPGKTARITCGGNNIGSKSVHWYQQKPGQAPVLVVYDDSDRPSGIPERFSGSNSGNTATLTISRVEAGDEADYYCQVWDSSSDYVVFGGGTKLTVLLEIQNPDPAVYQLRDSKSSDKSVCLFTDFDSQTNVSQSKDSDVYITDKCVLDMRSMDFKSNSAVAWSNKSDFACANAFNNSIIPEDTFFPSPESSCGFTSESYQQGVLSATILYEILLGKATLYAVLVSALVLMAMVKRKDSRGRAKRSGSGVKQTLNFDLLKLAGDVESNPGPTSMDWIWRILFLVGAATGAHSFEEVQLVQSGAEVKKPGESLKISCKGSGYSFTSYWIGWVRQMPGKGLEWMGIIYPGDSDTRYSPSFQGQVTISADKSISTAYLQWSSLKASDTAMYYCARQVWGWQGGMYPRSNWWYNLDSWGQGTLVTVSSTREDLKNVFPPEVAVFEPSEAEISHTQKATLVCLATGFYPDHVELSWWVNGKEVHSGVCTDPQPLKEQPALNDSRYCLSSRLRVSATFWQNPRNHFRCQVQFYGLSENDEWTQDRAKPVTQIVSAEAWGRADCDVKLVEKSFETDTNLNFQNLSVIGFRILLLKVAGFNLLMTLRLWSS

SEQ ID NO: 12619 - protein, 628 aa, synthetic construct
MALPVTALLLPLALLLHAARPELVMTQSPASLAVSLGQRATISCRASESVDSYGKSFMHWYQLKPGQPPKLLIYRASNLESGVPARFSGSGSRTDFTLTIDPVEADDAATYYCQQNNEDPWTFGGGTKLEIKLEIQNPDPAVYQLRDSKSSDKSVCLFTDFDSQTNVSQSKDSDVYITDKCVLDMRSMDFKSNSAVAWSNKSDFACANAFNNSIIPEDTFFPSPESSCGFTSESYQQGVLSATILYEILLGKATLYAVLVSALVLMAMVKRKDSRGRAKRSGSGVKQTLNFDLLKLAGDVESNPGPTSMDWIWRILFLVGAATGAHSFEEVQLEQSGPELVKPGASVKMSCKASGYTFTNYYMKWVKQSHGKSLEWIGDLNPNNGDTFYNQKFKGKATLTVDKSSNTAYMQLNSLTSEDSAVYYCARTGRYEENAMDYWGQGTSVTVSSTREDLKNVFPPEVAVFEPSEAEISHTQKATLVCLATGFYPDHVELSWWVNGKEVHSGVCTDPQPLKEQPALNDSRYCLSSRLRVSATFWQNPRNHFRCQVQFYGLSENDEWTQDRAKPVTQIVSAEAWGRADCDVKLVEKSFETDTNLNFQNLSVIGFRILLLKVAGFNLLMTLRLWSS

SEQ ID NO: 12620 - protein, 622 aa, synthetic construct
MALPVTALLLPLALLLHAARPDVVMTQSPSSLSASVGDRVTITCMASEDIYIRLAWYQQKPGNAPKLLIYAATSLETGVPSRFSGSGSGTDFTLTISSLQPEDFATYYCQQYWSSPWTFGGGTKVEIKLEIQNPDPAVYQLRDSKSSDKSVCLFTDFDSQTNVSQSKDSDVYITDKCVLDMRSMDFKSNSAVAWSNKSDFACANAFNNSIIPEDTFFPSPESSCGFTSESYQQGVLSATILYEILLGKATLYAVLVSALVLMAMVKRKDSRGRAKRSGSGVKQTLNFDLLKLAGDVESNPGPTSMDWIWRILFLVGAATGAHSFEQVQLQESGPGLVKPSQTLSLTCTVSGYSITSDYTWNWIRQPPGNGLEWIGYITYSGSTSYNPSLKSRVLISVDTSKNQVSLKLSSVTAADTAVYYCARLGRRYTMDYWGQGTTVTVSSTREDLKNVFPPEVAVFEPSEAEISHTQKATLVCLATGFYPDHVELSWWVNGKEVHSGVCTDPQPLKEQPALNDSRYCLSSRLRVSATFWQNPRNHFRCQVQFYGLSENDEWTQDRAKPVTQIVSAEAWGRADCDVKLVEKSFETDTNLNFQNLSVIGFRILLLKVAGFNLLMTLRLWSS

SEQ ID NO: 12621 - protein, 626 aa, synthetic construct; identical to SEQ ID NO: 12484

SEQ ID NO: 12622 - protein, 626 aa, synthetic construct
MALPVTALLLPLALLLHAARPDIVLTQSPATLSLSPGDRATLSCRASESVTILGSHLIYWYQQKPGQAPRLLIQLASNVQTGIPARFSGSGSRTDFTLTISSLEPEDFAVYYCLQSRTIPRTFGQGTKLEIKRLEIQNPDPAVYQLRDSKSSDKSVCLFTDFDSQTNVSQSKDSDVYITDKCVLDMRSMDFKSNSAVAWSNKSDFACANAFNNSIIPEDTFFPSPESSCGFTSESYQQGVLSATILYEILLGKATLYAVLVSALVLMAMVKRKDSRGRAKRSGSGVKQTLNFDLLKLAGDVESNPGPTSMDWIWRILFLVGAATGAHSFEQVQLVQSGSELKKPGESVKISCKASGYTFTHYSMNWVRQAPGQGLEWMGRINTETGEPLYADDFKGRFVFSLDTSASTAYLQISSLKAEDTAVYYCSNDYLYSLDYWGQGTLVTVSSTREDLKNVFPPEVAVFEPSEAEISHTQKATLVCLATGFYPDHVELSWWVNGKEVHSGVCTDPQPLKEQPALNDSRYCLSSRLRVSATFWQNPRNHFRCQVQFYGLSENDEWTQDRAKPVTQIVSAEAWGRADCDVKLVEKSFETDTNLNFQNLSVIGFRILLLKVAGFNLLMTLRLWSS

SEQ ID NO: 12623 - protein, 627 aa, synthetic construct
MALPVTALLLPLALLLHAARPDIQLTQSPSFLSASVGDRVTITCRASQGISTDLNWYQQKPGKAPKLLIYAASNLESGVPSRFSGSGSGTEFTLTISSLQPEDFATYYCQQSYNWPYTFGGGTKVEIKRLEIQNPDPAVYQLRDSKSSDKSVCLFTDFDSQTNVSQSKDSDVYITDKCVLDMRSMDFKSNSAVAWSNKSDFACANAFNNSIIPEDTFFPSPESSCGFTSESYQQGVLSATILYEILLGKATLYAVLVSALVLMAMVKRKDSRGRAKRSGSGVKQTLNFDLLKLAGDVESNPGPTSMDWIWRILFLVGAATGAHSFEEVQLVESGGGLVKPGGSLRLSCAASGFTFSNFEMNWVRQAPGKGLEWVSGISSNGRYINYADSVKGRFTISRDNAKNSLYLQMNSLRAEDTAVYYCARVVDFDQDYNGFDYWGQGTLVTVSSTREDLKNVFPPEVAVFEPSEAEISHTQKATLVCLATGFYPDHVELSWWVNGKEVHSGVCTDPQPLKEQPALNDSRYCLSSRLRVSATFWQNPRNHFRCQVQFYGLSENDEWTQDRAKPVTQIVSAEAWGRADCDVKLVEKSFETDTNLNFQNLSVIGFRILLLKVAGFNLLMTLRLWSS

SEQ ID NO: 12624 - protein, 625 aa, synthetic construct
MALPVTALLLPLALLLHAARPDIQLTQSPSFLSASVGDRVTITCSLSLGISTWRDWFPPRLGRGLEPLTYAASTLQSGVPSRFSGSGSGTEFTLTISSLQPEDFATYYCQQLNSYPLTFGGGTKVEIKRLEIQNPDPAVYQLRDSKSSDKSVCLFTDFDSQTNVSQSKDSDVYITDKCVLDMRSMDFKSNSAVAWSNKSDFACANAFNNSIIPEDTFFPSPESSCGFTSESYQQGVLSATILYEILLGKATLYAVLVSALVLMAMVKRKDSRGRAKRSGSGVKQTLNFDLLKLAGDVESNPGPTSMDWIWRILFLVGAATGAHSFEEVQLVESGGGLVKPGGSLRLSCAASGFTFSTYGMSWVRQAPGKGLEWVAYINNGSGYIYYADSVKGRFTISRDNAKNSLYLQMNSLRAEDTAVYYCARGQWWSGGDFDYWGQGTLVTVSSTREDLKNVFPPEVAVFEPSEAEISHTQKATLVCLATGFYPDHVELSWWVNGKEVHSGVCTDPQPLKEQPALNDSRYCLSSRLRVSATFWQNPRNHFRCQVQFYGLSENDEWTQDRAKPVTQIVSAEAWGRADCDVKLVEKSFETDTNLNFQNLSVIGFRILLLKVAGFNLLMTLRLWSS

SEQ ID NO: 12625 - protein, 626 aa, synthetic construct
MALPVTALLLPLALLLHAARPEIVLTQSPATLSLSPGERATLSCSASSSVSYMYWYQQKPGQAPRLLIYRTSNLASGIPARFSGSGSGTDFTLTISSLEPEDFAVYYCQQYHSYPTTFGQGTKVEIKRTVLEIQNPDPAVYQLRDSKSSDKSVCLFTDFDSQTNVSQSKDSDVYITDKCVLDMRSMDFKSNSAVAWSNKSDFACANAFNNSIIPEDTFFPSPESSCGFTSESYQQGVLSATILYEILLGKATLYAVLVSALVLMAMVKRKDSRGRAKRSGSGVKQTLNFDLLKLAGDVESNPGPTSMDWIWRILFLVGAATGAHSFEEVQLVESGGGLVQPGGSLRLSCAASGFSFNTYAMNWVRQAPGKGLEWVSHIRSKSNNFATYYADSVKDRFTISRDNAKNSLYLQMNSLRAEDTAVYYCARQGGDFPMDYWGQGTLVTVSSTREDLKNVFPPEVAVFEPSEAEISHTQKATLVCLATGFYPDHVELSWWVNGKEVHSGVCTDPQPLKEQPALNDSRYCLSSRLRVSATFWQNPRNHFRCQVQFYGLSENDEWTQDRAKPVTQIVSAEAWGRADCDVKLVEKSFETDTNLNFQNLSVIGFRILLLKVAGFNLLMTLRLWSS

SEQ ID NO: 12626 - protein, 622 aa, synthetic construct
MALPVTALLLPLALLLHAARPDVVMTQSPSSLSASVGDRVTITCKASEDIYIRLAWYQQKPGKAPKLLIYAATSLETGVPSRFSGSGSGTDFTLTISSLQPEDFATYYCQQYWTTPWTFGGGTKVEIKLEIQNPDPAVYQLRDSKSSDKSVCLFTDFDSQTNVSQSKDSDVYITDKCVLDMRSMDFKSNSAVAWSNKSDFACANAFNNSIIPEDTFFPSPESSCGFTSESYQQGVLSATILYEILLGKATLYAVLVSALVLMAMVKRKDSRGRAKRSGSGVKQTLNFDLLKLAGDVESNPGPTSMDWIWRILFLVGAATGAHSFEQVQLQESGPGLVKPSQTLSLTCTVSGYSITIDYTWNWIRQPPGKGLEWIGYITYSGSTDYNPSLKSRVLISVDTSKNQVSLKLSSVTAADTAVYYCARLGRRYALDYWGQGTTVTVSSTREDLKNVFPPEVAVFEPSEAEISHTQKATLVCLATGFYPDHVELSWWVNGKEVHSGVCTDPQPLKEQPALNDSRYCLSSRLRVSATFWQNPRNHFRCQVQFYGLSENDEWTQDRAKPVTQIVSAEAWGRADCDVKLVEKSFETDTNLNFQNLSVIGFRILLLKVAGFNLLMTLRLWSS

SEQ ID NO: 12627 - protein, 626 aa, synthetic construct
MALPVTALLLPLALLLHAARPDIQMTQTTSSLSASLGDRVTISCRASQDISNYLNWYQQKPDGTVKLLIYYTSILHSGVPSRFSGSGSGTDYSLTISNLEQEDFATYFCQQGNTLPWTFGGGTKLEIKALEIQNPDPAVYQLRDSKSSDKSVCLFTDFDSQTNVSQSKDSDVYITDKCVLDMRSMDFKSNSAVAWSNKSDFACANAFNNSIIPEDTFFPSPESSCGFTSESYQQGVLSATILYEILLGKATLYAVLVSALVLMAMVKRKDSRGRAKRSGSGVKQTLNFDLLKLAGDVESNPGPTSMDWIWRILFLVGAATGAHSFEVQLVESGGGLVKPGGSLKLSCAASGFAFSIYDMSWVRQTPEKRLEWVAYISSGGGTYYPDTVKGRFTISRDNAKNTLYLQMSSLKSEDTAMYYCARHSGYGTHWGVLFAYWGQGTLVTVSATREDLKNVFPPEVAVFEPSEAEISHTQKATLVCLATGFYPDHVELSWWVNGKEVHSGVCTDPQPLKEQPALNDSRYCLSSRLRVSATFWQNPRNHFRCQVQFYGLSENDEWTQDRAKPVTQIVSAEAWGRADCDVKLVEKSFETDTNLNFQNLSVIGFRILLLKVAGFNLLMTLRLWSS

SEQ ID NO: 12628 - protein, 637 aa, synthetic construct
MALPVTALLLPLALLLHAARPDIVMTQSPDSLAVSLGERATINCKSSQSLLYRSNQKNYLAWYQQKPGQPPKLLIYWASTRESGVPDRFSGSGSGTDFTLTISSLQAEDVAVYYCQQYYNYPRTFGQGTKVEIKRTVLEIQNPDPAVYQLRDSKSSDKSVCLFTDFDSQTNVSQSKDSDVYITDKCVLDMRSMDFKSNSAVAWSNKSDFACANAFNNSIIPEDTFFPSPESSCGFTSESYQQGVLSATILYEILLGKATLYAVLVSALVLMAMVKRKDSRGRAKRSGSGVKQTLNFDLLKLAGDVESNPGPTSMDWIWRILFLVGAATGAHSFEEVQLLESGGGLVQPGGSLRLSCAASGYSITSDYAWNWVRQAPGKGLEWVSYISNSGSTSYNPSLKSRFTISRDNSKNTLYLQMNSLRAEDTAVYYCAKERNYDYDDYYYAMDYWGQGTLVTVSSTREDLKNVFPPEVAVFEPSEAEISHTQKATLVCLATGFYPDHVELSWWVNGKEVHSGVCTDPQPLKEQPALNDSRYCLSSRLRVSATFWQNPRNHFRCQVQFYGLSENDEWTQDRAKPVTQIVSAEAWGRADCDVKLVEKSFETDTNLNFQNLSVIGFRILLLKVAGFNLLMTLRLWSS

SEQ ID NO: 12629 - protein, 630 aa, synthetic construct
MALPVTALLLPLALLLHAARPDVVMTQSPLSLPVTLGQPASISCRSSQSLLHSSGNTYLEWYQQRPGQSPRPLIYKISTRFSGVPDRFSGSGSGTDFTLKISRVEAEDVGVYYCFQGSHVPYTFGGGTKVEIKRLEIQNPDPAVYQLRDSKSSDKSVCLFTDFDSQTNVSQSKDSDVYITDKCVLDMRSMDFKSNSAVAWSNKSDFACANAFNNSIIPEDTFFPSPESSCGFTSESYQQGVLSATILYEILLGKATLYAVLVSALVLMAMVKRKDSRGRAKRSGSGVKQTLNFDLLKLAGDVESNPGPTSMDWIWRILFLVGAATGAHSFEQVQLVQSGAEVKKPGASVKVSCKASGLTIEDYYMHWVRQAPGQGLEWMGWIDPENGDTEYGPKFQGRVTMTRDTSINTAYMELSRLRSDDTAVYYCAVHNAHYGTWFAYWGQGTLVTVSSTREDLKNVFPPEVAVFEPSEAEISHTQKATLVCLATGFYPDHVELSWWVNGKEVHSGVCTDPQPLKEQPALNDSRYCLSSRLRVSATFWQNPRNHFRCQVQFYGLSENDEWTQDRAKPVTQIVSAEAWGRADCDVKLVEKSFETDTNLNFQNLSVIGFRILLLKVAGFNLLMTLRLWSS

SEQ ID NO: 12630 - protein, 622 aa, synthetic construct
MALPVTALLLPLALLLHAARPDIQMTQSPSSLSASVGDRVTITCRASENIYSNLAWYQQKPGKAPKLLIYAATNLADGVPSRFSGSGSGTDFTLTISSLQPEDFATYYCQHFWGTPTFGQGTKVEIKRTVLEIQNPDPAVYQLRDSKSSDKSVCLFTDFDSQTNVSQSKDSDVYITDKCVLDMRSMDFKSNSAVAWSNKSDFACANAFNNSIIPEDTFFPSPESSCGFTSESYQQGVLSATILYEILLGKATLYAVLVSALVLMAMVKRKDSRGRAKRSGSGVKQTLNFDLLKLAGDVESNPGPTSMDWIWRILFLVGAATGAHSFEEVQLVESGGGLVQPGGSLRLSCAASGFSLTNYGVHWVRQAPGKGLEWVSVIWSGGSTDYNAAFISRFTISADTSKNTAYLQMNSLRAEDTAVYYCARELIHAMDNWGQGTLVTVSSTREDLKNVFPPEVAVFEPSEAEISHTQKATLVCLATGFYPDHVELSWWVNGKEVHSGVCTDPQPLKEQPALNDSRYCLSSRLRVSATFWQNPRNHFRCQVQFYGLSENDEWTQDRAKPVTQIVSAEAWGRADCDVKLVEKSFETDTNLNFQNLSVIGFRILLLKVAGFNLLMTLRLWSS

SEQ ID NO: 12631 - protein, 629 aa, synthetic construct
MALPVTALLLPLALLLHAARPDFVMTQSPLSLPVTPGEPASISCRSSQSIVHSNGNTYLEWYLQKPGQSPQLLIYKVSNRFSGVPDRFSGSGSGTDFTLKISRVEAEDVGVYYCFQGSHVPLTFGQGTKLEIKRLEIQNPDPAVYQLRDSKSSDKSVCLFTDFDSQTNVSQSKDSDVYITDKCVLDMRSMDFKSNSAVAWSNKSDFACANAFNNSIIPEDTFFPSPESSCGFTSESYQQGVLSATILYEILLGKATLYAVLVSALVLMAMVKRKDSRGRAKRSGSGVKQTLNFDLLKLAGDVESNPGPTSMDWIWRILFLVGAATGAHSFEEVQLVESGAEVKKPGASVKVSCKASGYTFTSYWIHWVRQAPGQGLEWMGENDPSNGRTNYNEKFKNRVTLTVDTSISTAYMELSRLRSDDTAVYYCARGPNYFYSMDYWGQGTMVTVSSTREDLKNVFPPEVAVFEPSEAEISHTQKATLVCLATGFYPDHVELSWWVNGKEVHSGVCTDPQPLKEQPALNDSRYCLSSRLRVSATFWQNPRNHFRCQVQFYGLSENDEWTQDRAKPVTQIVSAEAWGRADCDVKLVEKSFETDTNLNFQNLSVIGFRILLLKVAGFNLLMTLRLWSS

SEQ ID NO: 12632 - protein, 622 aa, synthetic construct
MALPVTALLLPLALLLHAARPDIQLTQSPSFLSASVGDRVTITCSARSSISFMYWYQQKPGKAPKLLIYDTSNLASGVPSRFSGSGSGTEFTLTISSLEAEDAATYYCQQWSSYPLTFGQGTKLEIKLEIQNPDPAVYQLRDSKSSDKSVCLFTDFDSQTNVSQSKDSDVYITDKCVLDMRSMDFKSNSAVAWSNKSDFACANAFNNSIIPEDTFFPSPESSCGFTSESYQQGVLSATILYEILLGKATLYAVLVSALVLMAMVKRKDSRGRAKRSGSGVKQTLNFDLLKLAGDVESNPGPTSMDWIWRILFLVGAATGAHSFEQVQLVQSGAEVKKPGASVKVSCKASGYTFTGSWMNWVRQAPGQGLEWIGRIYPGDGETNYNGKFKDRVTITADKSTSTAYMELSSLRSEDTAVYYCARIYGNNVYFDVWGQGTTVTVSSTREDLKNVFPPEVAVFEPSEAEISHTQKATLVCLATGFYPDHVELSWWVNGKEVHSGVCTDPQPLKEQPALNDSRYCLSSRLRVSATFWQNPRNHFRCQVQFYGLSENDEWTQDRAKPVTQIVSAEAWGRADCDVKLVEKSFETDTNLNFQNLSVIGFRILLLKVAGFNLLMTLRLWSS

SEQ ID NO: 12633 - protein, 630 aa, synthetic construct
MALPVTALLLPLALLLHAARPQLVLTQSPSASASLGSSVKLTCTLSSGHKTDTIDWYQQQPGKAPRYLMKLEGSGSYNKGSGVPDRFSGSSSGADWYLTISSLQSEDEADYYCGTDYPGNYLFGGGTQLTVLGLEIQNPDPAVYQLRDSKSSDKSVCLFTDFDSQTNVSQSKDSDVYITDKCVLDMRSMDFKSNSAVAWSNKSDFACANAFNNSIIPEDTFFPSPESSCGFTSESYQQGVLSATILYEILLGKATLYAVLVSALVLMAMVKRKDSRGRAKRSGSGVKQTLNFDLLKLAGDVESNPGPTSMDWIWRILFLVGAATGAHSFEQEQLVESGGGLVQPGGSLRLSCAASGFTFSDYYMSWIRQAPGKGLEWVATIYPSSGKTYYADSAKGRLTISSDNAKDSLYLQMNSLRAEDTAVYYCTRDSYADDAALFDIWGQGTTVTVSSTREDLKNVFPPEVAVFEPSEAEISHTQKATLVCLATGFYPDHVELSWWVNGKEVHSGVCTDPQPLKEQPALNDSRYCLSSRLRVSATFWQNPRNHFRCQVQFYGLSENDEWTQDRAKPVTQIVSAEAWGRADCDVKLVEKSFETDTNLNFQNLSVIGFRILLLKVAGFNLLMTLRLWSS

SEQ ID NO: 12634 - protein, 622 aa, synthetic construct; identical to SEQ ID NO: 12630

SEQ ID NO: 12635 - protein, 629 aa, synthetic construct; identical to SEQ ID NO: 12631

SEQ ID NO: 12636 - protein, 622 aa, synthetic construct; identical to SEQ ID NO: 12632

SEQ ID NO: 12637 - protein, 630 aa, synthetic construct; identical to SEQ ID NO: 12633

SEQ ID NO: 12638 - protein, 629 aa, synthetic construct
MALPVTALLLPLALLLHAARPDIQLTQSPSSLSASVGDRVSFTCQASQDINNFLNWYQQKPGKAPKLLIYDASNLETGVPSRFSGSGSGTDFTFTISSLQPEDIATYYCQQYGNLPFTFGGGTKVEIKRLEIQNPDPAVYQLRDSKSSDKSVCLFTDFDSQTNVSQSKDSDVYITDKCVLDMRSMDFKSNSAVAWSNKSDFACANAFNNSIIPEDTFFPSPESSCGFTSESYQQGVLSATILYEILLGKATLYAVLVSALVLMAMVKRKDSRGRAKRSGSGVKQTLNFDLLKLAGDVESNPGPTSMDWIWRILFLVGAATGAHSFEQVQLQESGPGLVKPSQTLSLTCTVSGGSISSGGFYWSWIRQHPGKGLEWIGYIHHSGSTHYNPSLKSRVTISIDTSKNLFSLRLSSVTAADTAVYYCASLVYCGGDCYSGFDYWGQGTLVTVSSTREDLKNVFPPEVAVFEPSEAEISHTQKATLVCLATGFYPDHVELSWWVNGKEVHSGVCTDPQPLKEQPALNDSRYCLSSRLRVSATFWQNPRNHFRCQVQFYGLSENDEWTQDRAKPVTQIVSAEAWGRADCDVKLVEKSFETDTNLNFQNLSVIGFRILLLKVAGFNLLMTLRLWSS

SEQ ID NO: 12639 - protein, 625 aa, synthetic construct
MALPVTALLLPLALLLHAARPDIQMTQSPSSLSASVGDRVTITCKSSQSVLYSSNQKNYLAWFQQKPGKAPKLLIYWASTRESGVPSRFSGSGSGTDFTLTISSLQPEDFATYFCHQYLSSYTFGQGTKVEIKRLEIQNPDPAVYQLRDSKSSDKSVCLFTDFDSQTNVSQSKDSDVYITDKCVLDMRSMDFKSNSAVAWSNKSDFACANAFNNSIIPEDTFFPSPESSCGFTSESYQQGVLSATILYEILLGKATLYAVLVSALVLMAMVKRKDSRGRAKRSGSGVKQTLNFDLLKLAGDVESNPGPTSMDWIWRILFLVGAATGAHSFEEVQLVESGGGLVQPGGSLRLSCAASGYTFTTYWMHWVRQAPGKGLEWVGYIRPSTGYTEYNQKFKDRFTISADTSKNTAYLQMNSLRAEDTAVYYCARSRWLLDYWGQGTLVTVSTREDLKNVFPPEVAVFEPSEAEISHTQKATLVCLATGFYPDHVELSWWVNGKEVHSGVCTDPQPLKEQPALNDSRYCLSSRLRVSATFWQNPRNHFRCQVQFYGLSENDEWTQDRAKPVTQIVSAEAWGRADCDVKLVEKSFETDTNLNFQNLSVIGFRILLLKVAGFNLLMTLRLWSS

SEQ ID NO: 12640 - protein, 622 aa, synthetic construct
MALPVTALLLPLALLLHAARPDIQMTQSPSSLSASVGDRVTITCRASQDISNYLNWYQQKPGKAPKLLIYYTSRLHSGVPSRFSGSGSGTDFTLTISSLQPEDFATYYCQQGNTLPYTFGQGTKVEIKRLEIQNPDPAVYQLRDSKSSDKSVCLFTDFDSQTNVSQSKDSDVYITDKCVLDMRSMDFKSNSAVAWSNKSDFACANAFNNSIIPEDTFFPSPESSCGFTSESYQQGVLSATILYEILLGKATLYAVLVSALVLMAMVKRKDSRGRAKRSGSGVKQTLNFDLLKLAGDVESNPGPTSMDWIWRILFLVGAATGAHSFEEVQLVESGGGLVQPGGSLRLSCAASGFTFSDYFMSWVRQAPGKGLEWVATISNGGTYTYYPDSVKGRFTISRDNSKNTLYLQMNSLRAEDTAVYYCARFDGYIFDYWGQGTLVTVSSTREDLKNVFPPEVAVFEPSEAEISHTQKATLVCLATGFYPDHVELSWWVNGKEVHSGVCTDPQPLKEQPALNDSRYCLSSRLRVSATFWQNPRNHFRCQVQFYGLSENDEWTQDRAKPVTQIVSAEAWGRADCDVKLVEKSFETDTNLNFQNLSVIGFRILLLKVAGFNLLMTLRLWSS

SEQ ID NO: 12641 - protein, 754 aa, synthetic construct
MALPVTALLLPLALLLHAARPEVQLVESGGGLVQPGGSLRLSCAASGFSFSDFWMSWVRQAPGKGLEWVATISQAGSEKDYVDSVKGRFTISRDNAKKSLYLQMNSLRAEDTAVYYCASGVYSFDYRGQGTLVTVSSGTGGGGSGGGGSGGGGSEFDIQMTQTTSSLSASLGDRVTISCRASQDISKYLNWYQQKPDGTVKLLIYHTSRLHSGVPSRFSGSGSGTDYSLTISNLEQEDIATYFCQQGNTLPYTFGGGTKLEITLEDLKNVFPPEVAVFEPSEAEISHTQKATLVCLATGFYPDHVELSWWVNGKEVHSGVCTDPQPLKEQPALNDSRYCLSSRLRVSATFWQNPRNHFRCQVQFYGLSENDEWTQDRAKPVTQIVSAEAWGRADCDVKLVEKSFETDTNLNFQNLSVIGFRILLLKVAGFNLLMTLRLWSSRAKRSGSGATNFSLLKQAGDVEENPGPTSMDWIWRILFLVGAATGAHSFEVKLQESGPGLVAPSQSLSVTCTVSGVSLPDYGVSWIRQPPRKGLEWLGVIWGSETTYYNSALKSRLTIIKDNSKSQVFLKMNSLQTDDTAIYYCAKHYYYGGSYAMDYWGQGTSVTVSSTRIQNPDPAVYQLRDSKSSDKSVCLFTDFDSQTNVSQSKDSDVYITDKCVLDMRSMDFKSNSAVAWSNKSDFACANAFNNSIIPEDTFFPSPESSCGFTSESYQQGVLSATILYEILLGKATLYAVLVSALVLMAMVKRKDSRG

SEQ ID NO: 12642 - protein, 755 aa, synthetic construct
MALPVTALLLPLALLLHAARPEVQLVESGGGLVQPGGSLRLSCAASGFSFSDFWMSWVRQAPGKGLEWVATISQAGSEKDYVDSVKGRFTISRDNAKKSLYLQMNSLRAEDTAVYYCASGVYSFDYRGQGTLVTVSSGTGGGGSGGGGSGGGGSEFEIVMTQSPATLSLSPGERATLSCRASQDISKYLNWYQQKPGQAPRLLIYHTSRLHSGIPARFSGSGSGTDYTLTISSLQPEDFAVYFCQQGNTLPYTFGQGTKLEIKLEDLKNVFPPEVAVFEPSEAEISHTQKATLVCLATGFYPDHVELSWWVNGKEVHSGVCTDPQPLKEQPALNDSRYCLSSRLRVSATFWQNPRNHFRCQVQFYGLSENDEWTQDRAKPVTQIVSAEAWGRADCDVKLVEKSFETDTNLNFQNLSVIGFRILLLKVAGFNLLMTLRLWSSRAKRSGSGATNFSLLKQAGDVEENPGPTSMDWIWRILFLVGAATGAHSFEQVQLQESGPGLVKPSETLSLTCTVSGVSLPDYGVSWIRQPPGKGLEWIGVIWGSETTYYNSSLKSRVTISKDNSKNQVSLKLSSVTAADTAVYYCAKHYYYGGSYAMDYWGQGTLVTVSSTRIQNPDPAVYQLRDSKSSDKSVCLFTDFDSQTNVSQSKDSDVYITDKCVLDMRSMDFKSNSAVAWSNKSDFACANAFNNSIIPEDTFFPSPESSCGFTSESYQQGVLSATILYEILLGKATLYAVLVSALVLMAMVKRKDSRG

SEQ ID NO: 12643 - protein, 756 aa, synthetic construct
MALPVTALLLPLALLLHAARPEVQLVESGGGLVQPGGSLRLSCAASGFSFSDFWMSWVRQAPGKGLEWVATISQAGSEKDYVDSVKGRFTISRDNAKKSLYLQMNSLRAEDTAVYYCASGVYSFDYRGQGTLVTVSSGTGGGGSGGGGSGGGGSEFDEIVLTQSPATLSLSPGERATLSCSASSSVSYMHWYQQKPGQAPRLLIYDTSKLASGIPARFSGSGSGTDFTLTISSLEPEDVAVYYCFQGSVYPFTFGQGTKLEIKRLEDLKNVFPPEVAVFEPSEAEISHTQKATLVCLATGFYPDHVELSWWVNGKEVHSGVCTDPQPLKEQPALNDSRYCLSSRLRVSATFWQNPRNHFRCQVQFYGLSENDEWTQDRAKPVTQIVSAEAWGRADCDVKLVEKSFETDTNLNFQNLSVIGFRILLLKVAGFNLLMTLRLWSSRAKRSGSGATNFSLLKQAGDVEENPGPTSMDWIWRILFLVGAATGAHSFEQVQLQESGPGLVKPSQTLSLTCTVSGGSISTSGMGVGWIRQHPGKGLEWIGHIWWDDDKRYNPALKSRVTISVDTSKNQFSLKLSSVTAADTAVYYCARMELWSYYFDYWGQGTLVTVSSTRIQNPDPAVYQLRDSKSSDKSVCLFTDFDSQTNVSQSKDSDVYITDKCVLDMRSMDFKSNSAVAWSNKSDFACANAFNNSIIPEDTFFPSPESSCGFTSESYQQGVLSATILYEILLGKATLYAVLVSALVLMAMVKRKDSRG

SEQ ID NO: 12644 - protein, 754 aa, synthetic construct
MALPVTALLLPLALLLHAARPEVQLVESGGGLVQPGGSLRLSCAASGFSFSDFWMSWVRQAPGKGLEWVATISQAGSEKDYVDSVKGRFTISRDNAKKSLYLQMNSLRAEDTAVYYCASGVYSFDYRGQGTLVTVSSGTGGGGSGGGGSGGGGSEFDYIHVTQSPSSLSVSIGDRVTINCQTSQGVGSDLHWYQHKPGRAPKLLIHHASSVEDGVPSRFSGTGFHTSFNLTINDLQADDIGTYYCQVLQSFGRGSRLDTKLEDLKNVFPPEVAVFEPSEAEISHTQKATLVCLATGFYPDHVELSWWVNGKEVHSGVCTDPQPLKEQPALNDSRYCLSSRLRVSATFWQNPRNHFRCQVQFYGLSENDEWTQDRAKPVTQIVSAEAWGRADCDVKLVEKSFETDTNLNFQNLSVIGFRILLLKVAGFNLLMTLRLWSSRAKRSGSGATNFSLLKQAGDVEENPGPTSMDWIWRILFLVGAATGAHSFERAHLVQSGTAMKKPGASVRVSCQTSGYTFTAHILFWFRQAPGRGLEWVGWIKPQYGAVNFGGGFRDRVTLTRDVYREIAYMDIRGLKPDDTAVYYCARDRSYGDSSWALDAWGQGTTVVVSATRIQNPDPAVYQLRDSKSSDKSVCLFTDFDSQTNVSQSKDSDVYITDKCVLDMRSMDFKSNSAVAWSNKSDFACANAFNNSIIPEDTFFPSPESSCGFTSESYQQGVLSATILYEILLGKATLYAVLVSALVLMAMVKRKDSRG

SEQ ID NO: 12645 - protein, 764 aa, synthetic construct
MALPVTALLLPLALLLHAARPEVQLVESGGGLVQPGGSLRLSCAASGFSFSDFWMSWVRQAPGKGLEWVATISQAGSEKDYVDSVKGRFTISRDNAKKSLYLQMNSLRAEDTAVYYCASGVYSFDYRGQGTLVTVSSGTGGGGSGGGGSGGGGSEFDVQMIQTPDSLAVSLGQRATISCRASESVDNYGISFMHWYQQKPGQSPKLLIYRASNLESGIPARFSGSGSRTDFTLTINPVETDDVATYYCQQNNKDPPTFGGGTKLEIKLEDLKNVFPPEVAVFEPSEAEISHTQKATLVCLATGFYPDHVELSWWVNGKEVHSGVCTDPQPLKEQPALNDSRYCLSSRLRVSATFWQNPRNHFRCQVQFYGLSENDEWTQDRAKPVTQIVSAEAWGRADCDVKLVEKSFETDTNLNFQNLSVIGFRILLLKVAGFNLLMTLRLWSSRAKRSGSGATNFSLLKQAGDVEENPGPTSMDWIWRILFLVGAATGAHSFEGGGGSQVQLQQSGAELVKPGASVKISCKASGYAFSSYWMNWVKQRPGKGLEWIGQIYPGDGDTTYNGKFKGKATLTADKSSSTVYMQLNSLTSEDSAVYFCVRYYYGSSGYFDYWGQGTTLTVSSTRIQNPDPAVYQLRDSKSSDKSVCLFTDFDSQTNVSQSKDSDVYITDKCVLDMRSMDFKSNSAVAWSNKSDFACANAFNNSIIPEDTFFPSPESSCGFTSESYQQGVLSATILYEILLGKATLYAVLVSALVLMAMVKRKDSRG

SEQ ID NO: 12646 - protein, 755 aa, synthetic construct
MALPVTALLLPLALLLHAARPEVQLVESGGGLVQPGGSLRLSCAASGFSFSDFWMSWVRQAPGKGLEWVATISQAGSEKDYVDSVKGRFTISRDNAKKSLYLQMNSLRAEDTAVYYCASGVYSFDYRGQGTLVTVSSGTGGGGSGGGGSGGGGSEFDVQMIQTPSSLSASLGDRVTISCRASQDIGNYLNWYQQKPDGTVKLLIYYTSRLHSGVPSRFSGSGSGTEYSLTISNLEQEDIATYFCQQGSALPPTFGGGTKLEINLEDLKNVFPPEVAVFEPSEAEISHTQKATLVCLATGFYPDHVELSWWVNGKEVHSGVCTDPQPLKEQPALNDSRYCLSSRLRVSATFWQNPRNHFRCQVQFYGLSENDEWTQDRAKPVTQIVSAEAWGRADCDVKLVEKSFETDTNLNFQNLSVIGFRILLLKVAGFNLLMTLRLWSSRAKRSGSGATNFSLLKQAGDVEENPGPTSMDWIWRILFLVGAATGAHSFEALQLQQSGAELVRPGASVTLSCKASGYTFTDYEMHWVKQTPVHGLEWIGAIDPETGGTAYNQKFEGKAILTADKSSSTAYMELRSLTSEDSPVYYCARRRYYGSSSFDYWGQGTTLTVSSTRIQNPDPAVYQLRDSKSSDKSVCLFTDFDSQTNVSQSKDSDVYITDKCVLDMRSMDFKSNSAVAWSNKSDFACANAFNNSIIPEDTFFPSPESSCGFTSESYQQGVLSATILYEILLGKATLYAVLVSALVLMAMVKRKDSRG

SEQ ID NO: 12647 - protein, 759 aa, synthetic construct
MALPVTALLLPLALLLHAARPEVQLVESGGGLVQPGGSLRLSCAASGFSFSDFWMSWVRQAPGKGLEWVATISQAGSEKDYVDSVKGRFTISRDNAKKSLYLQMNSLRAEDTAVYYCASGVYSFDYRGQGTLVTVSSGTGGGGSGGGGSGGGGSEFDIVLTQSPASLAVSLGQRATISCRASKSVSTSGYSYLHWYQQKPGQPPKLLIYLASNLESGVPARFSGSGSGTDFTLNIHPVEEEDAATYYCQHSRELPFTFGSGTKLEIKLEDLKNVFPPEVAVFEPSEAEISHTQKATLVCLATGFYPDHVELSWWVNGKEVHSGVCTDPQPLKEQPALNDSRYCLSSRLRVSATFWQNPRNHFRCQVQFYGLSENDEWTQDRAKPVTQIVSAEAWGRADCDVKLVEKSFETDTNLNFQNLSVIGFRILLLKVAGFNLLMTLRLWSSRAKRSGSGATNFSLLKQAGDVEENPGPTSMDWIWRILFLVGAATGAHSFEQVQLVESGGGLVQPGGSLKLSCAASGFDFSRYWMSWVRQAPGKGLEWIGEINPTSSTINFTPSLKDKVFISRDNAKNTLYLQMSKVRSEDTALYYCARGNYYRYGDAMDYWGQGTSVTVSTRIQNPDPAVYQLRDSKSSDKSVCLFTDFDSQTNVSQSKDSDVYITDKCVLDMRSMDFKSNSAVAWSNKSDFACANAFNNSIIPEDTFFPSPESSCGFTSESYQQGVLSATILYEILLGKATLYAVLVSALVLMAMVKRKDSRG

SEQ ID NO: 12648 - protein, 757 aa, synthetic construct
MALPVTALLLPLALLLHAARPEVQLVESGGGLVQPGGSLRLSCAASGFSFSDFWMSWVRQAPGKGLEWVATISQAGSEKDYVDSVKGRFTISRDNAKKSLYLQMNSLRAEDTAVYYCASGVYSFDYRGQGTLVTVSSGTGGGGSGGGGSGGGGSEFDIQMTQSPSSLSASVGDRVTITCSASQDISNYLNWYQQKPGKAPKLLIYYTSNLHSGVPSRFSGSGSGTDFTLTISSLQPEDFATYYCQQYRKLPWTFGQGTKLEIKRLEDLKNVFPPEVAVFEPSEAEISHTQKATLVCLATGFYPDHVELSWWVNGKEVHSGVCTDPQPLKEQPALNDSRYCLSSRLRVSATFWQNPRNHFRCQVQFYGLSENDEWTQDRAKPVTQIVSAEAWGRADCDVKLVEKSFETDTNLNFQNLSVIGFRILLLKVAGFNLLMTLRLWSSRAKRSGSGATNFSLLKQAGDVEENPGPTSMDWIWRILFLVGAATGAHSFEQVQLVQSGAEVKKPGSSVKVSCKASGGTFSNYWMHWVRQAPGQGLEWMGATYRGHSDTYYNQKFKGRVTITADKSTSTAYMELSSLRSEDTAVYYCARGAIYDGYDVLDNWGQGTLVTVSSTRIQNPDPAVYQLRDSKSSDKSVCLFTDFDSQTNVSQSKDSDVYITDKCVLDMRSMDFKSNSAVAWSNKSDFACANAFNNSIIPEDTFFPSPESSCGFTSESYQQGVLSATILYEILLGKATLYAVLVSALVLMAMVKRKDSRG

SEQ ID NO: 12649 - protein, 757 aa, synthetic construct
MALPVTALLLPLALLLHAARPEVQLVESGGGLVQPGGSLRLSCAASGFSFSDFWMSWVRQAPGKGLEWVATISQAGSEKDYVDSVKGRFTISRDNAKKSLYLQMNSLRAEDTAVYYCASGVYSFDYRGQGTLVTVSSGTGGGGSGGGGSGGGGSEFDIVLTQSPATLSLSPGDRATISCRASESVTILGSHLIYWYQQKPGQPPRLLIQLASNVQTGVPARFSGSGSRTDFTLTISSVEPEDFAVYYCLQSRTIPRTFGQGTKLEIKRLEDLKNVFPPEVAVFEPSEAEISHTQKATLVCLATGFYPDHVELSWWVNGKEVHSGVCTDPQPLKEQPALNDSRYCLSSRLRVSATFWQNPRNHFRCQVQFYGLSENDEWTQDRAKPVTQIVSAEAWGRADCDVKLVEKSFETDTNLNFQNLSVIGFRILLLKVAGFNLLMTLRLWSSRAKRSGSGATNFSLLKQAGDVEENPGPTSMDWIWRILFLVGAATGAHSFEQVQLVQSGPEVKKPGESVKISCKASGYTFRHYSMNWVKQAPGQGLKWMGRINTESGVPIYADDFKGRFSFTVDTSASTAYLEISSLTSEDTAVYFCSNDYLYSLDFWGQGTTLTVSSTRIQNPDPAVYQLRDSKSSDKSVCLFTDFDSQTNVSQSKDSDVYITDKCVLDMRSMDFKSNSAVAWSNKSDFACANAFNNSIIPEDTFFPSPESSCGFTSESYQQGVLSATILYEILLGKATLYAVLVSALVLMAMVKRKDSRG

SEQ ID NO: 12650 - protein, 758 aa, synthetic construct
MALPVTALLLPLALLLHAARPEVQLVESGGGLVQPGGSLRLSCAASGFSFSDFWMSWVRQAPGKGLEWVATISQAGSEKDYVDSVKGRFTISRDNAKKSLYLQMNSLRAEDTAVYYCASGVYSFDYRGQGTLVTVSSGTGGGGSGGGGSGGGGSEFQSVLTQPPSVSGAPGQRVTISCTGSSSNIGAGFDVHWYQQLPGTAPKLLIYGNSNRPSGVPDRFSGSKSGTSASLAITGLQAEDEADYYCQSYDSSLSGYVFGTGTKVTVLGLEDLKNVFPPEVAVFEPSEAEISHTQKATLVCLATGFYPDHVELSWWVNGKEVHSGVCTDPQPLKEQPALNDSRYCLSSRLRVSATFWQNPRNHFRCQVQFYGLSENDEWTQDRAKPVTQIVSAEAWGRADCDVKLVEKSFETDTNLNFQNLSVIGFRILLLKVAGFNLLMTLRLWSSRAKRSGSGATNFSLLKQAGDVEENPGPTSMDWIWRILFLVGAATGAHSFEQVQLVQSGAEVKKPGASVKVSCKASGYTFTDYYMHWVRQAPGQRLEWMGWINPNSGGTNYAQKFQDRITVTRDTSSNTGYMELTRLRSDDTAVYYCARSPYSGVLDKWGQGTLVTVSSTRIQNPDPAVYQLRDSKSSDKSVCLFTDFDSQTNVSQSKDSDVYITDKCVLDMRSMDFKSNSAVAWSNKSDFACANAFNNSIIPEDTFFPSPESSCGFTSESYQQGVLSATILYEILLGKATLYAVLVSALVLMAMVKRKDSRG

SEQ ID NO: 12651 - protein, 755 aa, synthetic construct
MALPVTALLLPLALLLHAARPEVQLVESGGGLVQPGGSLRLSCAASGFSFSDFWMSWVRQAPGKGLEWVATISQAGSEKDYVDSVKGRFTISRDNAKKSLYLQMNSLRAEDTAVYYCASGVYSFDYRGQGTLVTVSSGTGGGGSGGGGSGGGGSEFQAVLTQPPSASGTPGQRVTISCSGSSSNIGSYTVSWYQQLPGTAPKFLIYSNNQRPSGVPDRFSGSKSGTSASLAISGLQSEDEADYYCAAWDDSLNGYVFGTGTKVTVLGLEDLKNVFPPEVAVFEPSEAEISHTQKATLVCLATGFYPDHVELSWWVNGKEVHSGVCTDPQPLKEQPALNDSRYCLSSRLRVSATFWQNPRNHFRCQVQFYGLSENDEWTQDRAKPVTQIVSAEAWGRADCDVKLVEKSFETDTNLNFQNLSVIGFRILLLKVAGFNLLMTLRLWSSRAKRSGSGATNFSLLKQAGDVEENPGPTSMDWIWRILFLVGAATGAHSFEVQLVQSGAEVKKPGESLKISCKGSGYDFTTYWIGWVRQMPGKGLEWMGIIYPGDSDTRYSPSVRGRVTISADKSINTAYLQWSSLEASDTAMYYCARMWTFSQDGWGQGTLVTVSSTRIQNPDPAVYQLRDSKSSDKSVCLFTDFDSQTNVSQSKDSDVYITDKCVLDMRSMDFKSNSAVAWSNKSDFACANAFNNSIIPEDTFFPSPESSCGFTSESYQQGVLSATILYEILLGKATLYAVLVSALVLMAMVKRKDSRG

SEQ ID NO: 12652 - protein, 758 aa, synthetic construct
MALPVTALLLPLALLLHAARPEVQLVESGGGLVQPGGSLRLSCAASGFSFSDFWMSWVRQAPGKGLEWVATISQAGSEKDYVDSVKGRFTISRDNAKKSLYLQMNSLRAEDTAVYYCASGVYSFDYRGQGTLVTVSSGTGGGGSGGGGSGGGGSEFDIVMTQSPDSLAVSLGERATINCKSSQSILYSSNQKNYLAWYQQKPGQSPKLLIYWASTRESGVPDRFSGSGSGTDFTLTISSLQAEDVAVYYCHQYISSYTFGQGTKLEIKLEDLKNVFPPEVAVFEPSEAEISHTQKATLVCLATGFYPDHVELSWWVNGKEVHSGVCTDPQPLKEQPALNDSRYCLSSRLRVSATFWQNPRNHFRCQVQFYGLSENDEWTQDRAKPVTQIVSAEAWGRADCDVKLVEKSFETDTNLNFQNLSVIGFRILLLKVAGFNLLMTLRLWSSRAKRSGSGATNFSLLKQAGDVEENPGPTSMDWIWRILFLVGAATGAHSFEQVQLVQSGAEVKKPGASVKVSCKASGYTFASQWMHWMRQAPGQGLEWIGWINPGNVNTKYNEKFKGRATLTVDTSTNTAYMELSSLRSEDTAVYYCARSTWYRPLDYWGQGTLVTVSSTRIQNPDPAVYQLRDSKSSDKSVCLFTDFDSQTNVSQSKDSDVYITDKCVLDMRSMDFKSNSAVAWSNKSDFACANAFNNSIIPEDTFFPSPESSCGFTSESYQQGVLSATILYEILLGKATLYAVLVSALVLMAMVKRKDSRG

SEQ ID NO: 12653 - protein, 758 aa, synthetic construct
MALPVTALLLPLALLLHAARPEVQLVESGGGLVQPGGSLRLSCAASGFSFSDFWMSWVRQAPGKGLEWVATISQAGSEKDYVDSVKGRFTISRDNAKKSLYLQMNSLRAEDTAVYYCASGVYSFDYRGQGTLVTVSSGTGGGGSGGGGSGGGGSEFDHIVLTQSPSSLSASLGDRVTISCRASQDISTYLNWYQQKPDGTVKLLIFYTSRLHAGVPSRFSGSGSGTHHSLTISNLEQEDIATYFCQQGNSLPFTFGSGTKLEIKRLEDLKNVFPPEVAVFEPSEAEISHTQKATLVCLATGFYPDHVELSWWVNGKEVHSGVCTDPQPLKEQPALNDSRYCLSSRLRVSATFWQNPRNHFRCQVQFYGLSENDEWTQDRAKPVTQIVSAEAWGRADCDVKLVEKSFETDTNLNFQNLSVIGFRILLLKVAGFNLLMTLRLWSSRAKRSGSGATNFSLLKQAGDVEENPGPTSMDWIWRILFLVGAATGAHSFEQVQLKESGPELEKPGASVKISCKASGYSFTAYSMNWVKQNNGMSLEWIGSIDPYYGDTKYAQKFKGKATLTVDKASSTAYLQLKSLTSEDSAVYYCARRMITTGDWYFDVWGAGTTVTVSSTRIQNPDPAVYQLRDSKSSDKSVCLFTDFDSQTNVSQSKDSDVYITDKCVLDMRSMDFKSNSAVAWSNKSDFACANAFNNSIIPEDTFFPSPESSCGFTSESYQQGVLSATILYEILLGKATLYAVLVSALVLMAMVKRKDSRG

SEQ ID NO: 12654 - protein, 758 aa, synthetic construct; identical to SEQ ID NO: 12653

SEQ ID NO: 12655 - protein, 758 aa, synthetic construct
MALPVTALLLPLALLLHAARPEVQLVESGGGLVQPGGSLRLSCAASGFSFSDFWMSWVRQAPGKGLEWVATISQAGSEKDYVDSVKGRFTISRDNAKKSLYLQMNSLRAEDTAVYYCASGVYSFDYRGQGTLVTVSSGTGGGGSGGGGSGGGGSEFDEIVLTQSPATLSLSPGERATLSCRASQSVSSYLAWYQQKPGQAPRLLIYDASNRATGIPARFSGSGSGTDFTLTISSLEPEDFAVYYCQQRSNWPITFGQGTRLEIKLEDLKNVFPPEVAVFEPSEAEISHTQKATLVCLATGFYPDHVELSWWVNGKEVHSGVCTDPQPLKEQPALNDSRYCLSSRLRVSATFWQNPRNHFRCQVQFYGLSENDEWTQDRAKPVTQIVSAEAWGRADCDVKLVEKSFETDTNLNFQNLSVIGFRILLLKVAGFNLLMTLRLWSSRAKRSGSGATNFSLLKQAGDVEENPGPTSMDWIWRILFLVGAATGAHSFEEVQLVESGGGLVQPGRSLRLSCAASGFTFNDYAMHWVRQAPGKGLEWVSTISWNSGSIGYADSVKGRFTISRDNAKKSLYLQMNSLRAEDTALYYCAKDIQYGNYYYGMDVWGQGTTVTVSSTRIQNPDPAVYQLRDSKSSDKSVCLFTDFDSQTNVSQSKDSDVYITDKCVLDMRSMDFKSNSAVAWSNKSDFACANAFNNSIIPEDTFFPSPESSCGFTSESYQQGVLSATILYEILLGKATLYAVLVSALVLMAMVKRKDSRG

SEQ ID NO: 12656 - protein, 760 aa, synthetic construct
MALPVTALLLPLALLLHAARPEVQLVESGGGLVQPGGSLRLSCAASGFSFSDFWMSWVRQAPGKGLEWVATISQAGSEKDYVDSVKGRFTISRDNAKKSLYLQMNSLRAEDTAVYYCASGVYSFDYRGQGTLVTVSSGTGGGGSGGGGSGGGGSEFDIVMTQTPLSLPVTPGEPASISCRSSKSLLHSNGITYLYWYLQKPGQSPQLLIYQMSNLVSGVPDRFSGSGSGTDFTLKISRVEAEDVGVYYCAQNLELPYTFGGGTKVEIKRLEDLKNVFPPEVAVFEPSEAEISHTQKATLVCLATGFYPDHVELSWWVNGKEVHSGVCTDPQPLKEQPALNDSRYCLSSRLRVSATFWQNPRNHFRCQVQFYGLSENDEWTQDRAKPVTQIVSAEAWGRADCDVKLVEKSFETDTNLNFQNLSVIGFRILLLKVAGFNLLMTLRLWSSRAKRSGSGATNFSLLKQAGDVEENPGPTSMDWIWRILFLVGAATGAHSFEQVQLVQSGAEVKKPGSSVKVSCKASGYAFSYSWINWVRQAPGQGLEWMGRIFPGDGDTDYNGKFKGRVTITADKSTSTAYMELSSLRSEDTAVYYCARNVFDGYWLVYWGQGTLVTVSSTRIQNPDPAVYQLRDSKSSDKSVCLFTDFDSQTNVSQSKDSDVYITDKCVLDMRSMDFKSNSAVAWSNKSDFACANAFNNSIIPEDTFFPSPESSCGFTSESYQQGVLSATILYEILLGKATLYAVLVSALVLMAMVKRKDSRG

SEQ ID NO: 12657 - protein, 761 aa, synthetic construct
MALPVTALLLPLALLLHAARPEVQLVESGGGLVQPGGSLRLSCAASGFSFSDFWMSWVRQAPGKGLEWVATISQAGSEKDYVDSVKGRFTISRDNAKKSLYLQMNSLRAEDTAVYYCASGVYSFDYRGQGTLVTVSSGTGGGGSGGGGSGGGGSEFDIQMTQSPSSLSASVGDRVTITCRSSQSIVHSVGNTFLEWYQQKPGKAPKLLIYKVSNRFSGVPSRFSGSGSGTDFTLTISSLQPEDFATYYCFQGSQFPYTFGQGTKVEIKRLEDLKNVFPPEVAVFEPSEAEISHTQKATLVCLATGFYPDHVELSWWVNGKEVHSGVCTDPQPLKEQPALNDSRYCLSSRLRVSATFWQNPRNHFRCQVQFYGLSENDEWTQDRAKPVTQIVSAEAWGRADCDVKLVEKSFETDTNLNFQNLSVIGFRILLLKVAGFNLLMTLRLWSSRAKRSGSGATNFSLLKQAGDVEENPGPTSMDWIWRILFLVGAATGAHSFEEVQLVESGGGLVQPGGSLRLSCAASGYEFSRSWMNWVRQAPGKGLEWVGRIYPGDGDTNYSGKFKGRFTISADTSKNTAYLQMNSLRAEDTAVYYCARDGSSWDWYFDVWGQGTLVTVSSTRIQNPDPAVYQLRDSKSSDKSVCLFTDFDSQTNVSQSKDSDVYITDKCVLDMRSMDFKSNSAVAWSNKSDFACANAFNNSIIPEDTFFPSPESSCGFTSESYQQGVLSATILYEILLGKATLYAVLVSALVLMAMVKRKDSRG

SEQ ID NO: 12658 - protein, 759 aa, synthetic construct
MALPVTALLLPLALLLHAARPEVQLVESGGGLVQPGGSLRLSCAASGFSFSDFWMSWVRQAPGKGLEWVATISQAGSEKDYVDSVKGRFTISRDNAKKSLYLQMNSLRAEDTAVYYCASGVYSFDYRGQGTLVTVSSGTGGGGSGGGGSGGGGSEFDIQMTQSPSSLSASVGDRVTITCRASQTIWSYLNWYQQRPGKAPNLLIYAASSLQSGVPSRFSGRGSGTDFTLTISSLQAEDFATYYCQQSYSIPQIFGQGTKLEIKLEDLKNVFPPEVAVFEPSEAEISHTQKATLVCLATGFYPDHVELSWWVNGKEVHSGVCTDPQPLKEQPALNDSRYCLSSRLRVSATFWQNPRNHFRCQVQFYGLSENDEWTQDRAKPVTQIVSAEAWGRADCDVKLVEKSFETDTNLNFQNLSVIGFRILLLKVAGFNLLMTLRLWSSRAKRSGSGATNFSLLKQAGDVEENPGPTSMDWIWRILFLVGAATGAHSFEQVQLQQSGPGLVKPSQTLSLTCAISGDSVSSNSAAWNWIRQSPSRGLEWLGRTYYRSKWYNDYAVSVKSRITINPDTSKNQFSLQLNSVTPEDTAVYYCAREVTGDLEDAFDIWGQGTMVTVSSTRIQNPDPAVYQLRDSKSSDKSVCLFTDFDSQTNVSQSKDSDVYITDKCVLDMRSMDFKSNSAVAWSNKSDFACANAFNNSIIPEDTFFPSPESSCGFTSESYQQGVLSATILYEILLGKATLYAVLVSALVLMAMVKRKDSRG

SEQ ID NO: 12659 - protein, 752 aa, synthetic construct
MALPVTALLLPLALLLHAARPEVQLVESGGGLVQPGGSLRLSCAASGFSFSDFWMSWVRQAPGKGLEWVATISQAGSEKDYVDSVKGRFTISRDNAKKSLYLQMNSLRAEDTAVYYCASGVYSFDYRGQGTLVTVSSGTGGGGSGGGGSGGGGSEFDIQMTQSPATIENTSLSASVGDRVTITCRASQGISSWLTWYQQKPEKAPKSLIYAASSLQSGVPSRFSGSGSGTDFTLTISSLQPEDFATYYCQQYDSYPITFGQGTRLEIKLEDLKNVFPPEVAVFEPSEAEISHTQKATLVCLATGFYPDHVELSWWVNGKEVHSGVCTDPQPLKEQPALNDSRYCLSSRLRVSATFWQNPRNHFRCQVQFYGLSENDEWTQDRAKPVTQIVSAEAWGRADCDVKLVEKSFETDTNLNFQNLSVIGFRILLLKVAGFNLLMTLRLWSSRAKRSGSGATNFSLLKQAGDVEENPGPTSMDWIWRILFLVGAATGAHSFEQVQLQQWGAGLLKPSETLSLTCAVYGGSFSAYYWSWIRQPPGKGLEWIGDINHGGGTNYNPSLKSRVTISVDTSKNQFSLKLNSVTAADTAVYYCASLTAYWGQGSLVTVSSTRIQNPDPAVYQLRDSKSSDKSVCLFTDFDSQTNVSQSKDSDVYITDKCVLDMRSMDFKSNSAVAWSNKSDFACANAFNNSIIPEDTFFPSPESSCGFTSESYQQGVLSATILYEILLGKATLYAVLVSALVLMAMVKRKDSRG

SEQ ID NO: 12660 - protein, 757 aa, synthetic construct
MALPVTALLLPLALLLHAARPEVQLVESGGGLVQPGGSLRLSCAASGFSFSDFWMSWVRQAPGKGLEWVATISQAGSEKDYVDSVKGRFTISRDNAKKSLYLQMNSLRAEDTAVYYCASGVYSFDYRGQGTLVTVSSGTGGGGSGGGGSGGGGSEFDEIVLTQSPDSLAVSLGERATINCKASQSVDFDGDSYLNWYQQKPGQPPKVLIYAASTLQSGVPSRFSGSGSGTDFTLTINSLEAEDAATYYCQQSNEDPWTFGGGTKVEIKLEDLKNVFPPEVAVFEPSEAEISHTQKATLVCLATGFYPDHVELSWWVNGKEVHSGVCTDPQPLKEQPALNDSRYCLSSRLRVSATFWQNPRNHFRCQVQFYGLSENDEWTQDRAKPVTQIVSAEAWGRADCDVKLVEKSFETDTNLNFQNLSVIGFRILLLKVAGFNLLMTLRLWSSRAKRSGSGATNFSLLKQAGDVEENPGPTSMDWIWRILFLVGAATGAHSFEQVQLVQSGAEVKKPGASVKVSCKVSGYTFTDYYITWVRQAPGQALEWMGWIYPGSGNTKYSQKFQGRFVFSVDTSASTAYLQLSSLKAEDTAVYYCANYGNYWFAYWGQGTLVTVSSTRIQNPDPAVYQLRDSKSSDKSVCLFTDFDSQTNVSQSKDSDVYITDKCVLDMRSMDFKSNSAVAWSNKSDFACANAFNNSIIPEDTFFPSPESSCGFTSESYQQGVLSATILYEILLGKATLYAVLVSALVLMAMVKRKDSRG

SEQ ID NO: 12661 - protein, 754 aa, synthetic construct
MALPVTALLLPLALLLHAARPEVQLVESGGGLVQPGGSLRLSCAASGFSFSDFWMSWVRQAPGKGLEWVATISQAGSEKDYVDSVKGRFTISRDNAKKSLYLQMNSLRAEDTAVYYCASGVYSFDYRGQGTLVTVSSGTGGGGSGGGGSGGGGSEFDIQMTQSPSSLSASVGDRVTITCRASQGISSWLAWYQQKPEKAPKSLIYAASSLQSGVPSRFSGSGSGTDFTLTISSLQPEDFATYYCQQYNSYPPTFGGGTKVEIKLEDLKNVFPPEVAVFEPSEAEISHTQKATLVCLATGFYPDHVELSWWVNGKEVHSGVCTDPQPLKEQPALNDSRYCLSSRLRVSATFWQNPRNHFRCQVQFYGLSENDEWTQDRAKPVTQIVSAEAWGRADCDVKLVEKSFETDTNLNFQNLSVIGFRILLLKVAGFNLLMTLRLWSSRAKRSGSGATNFSLLKQAGDVEENPGPTSMDWIWRILFLVGAATGAHSFEEVQLVQSGGGLVHPGGSLRLSCAGSGFAFSSSTMHWIRQAPGKGLEWISLIGSGGGIYYGDSVKGRFTISRDNAKNSLYLQMNSLRAEDMAVYYCVRGYFDWVDYFDYWGQGTLVTVSSTRIQNPDPAVYQLRDSKSSDKSVCLFTDFDSQTNVSQSKDSDVYITDKCVLDMRSMDFKSNSAVAWSNKSDFACANAFNNSIIPEDTFFPSPESSCGFTSESYQQGVLSATILYEILLGKATLYAVLVSALVLMAMVKRKDSRG

SEQ ID NO: 12662 - protein, 764 aa, synthetic construct
MALPVTALLLPLALLLHAARPEVQLVESGGGLVQPGGSLRLSCAASGFSFSDFWMSWVRQAPGKGLEWVATISQAGSEKDYVDSVKGRFTISRDNAKKSLYLQMNSLRAEDTAVYYCASGVYSFDYRGQGTLVTVSSGTGGGGSGGGGSGGGGSEFDDIVMTQSPDSLTVSLGERTTINCKSSQSVLDSSKNKNSLAWYQQKPGQPPKLLLSWASTRESGIPDRFSGSGSGTDFTLTIDSLQPEDSATYYCQQSAHFPITFGQGTRLEIKLEDLKNVFPPEVAVFEPSEAEISHTQKATLVCLATGFYPDHVELSWWVNGKEVHSGVCTDPQPLKEQPALNDSRYCLSSRLRVSATFWQNPRNHFRCQVQFYGLSENDEWTQDRAKPVTQIVSAEAWGRADCDVKLVEKSFETDTNLNFQNLSVIGFRILLLKVAGFNLLMTLRLWSSRAKRSGSGATNFSLLKQAGDVEENPGPTSMDWIWRILFLVGAATGAHSFEQVQLVQSGAEVKKPGASVKVSCKASGYTFTNYGMNWVKQAPGQGLKWMGWINTYTGEPTYADDFKGRVTMTSDTSTSTAYLELHNLRSDDTAVYYCARWSWSDGYYVYFDYWGQGTTVTVSSTRIQNPDPAVYQLRDSKSSDKSVCLFTDFDSQTNVSQSKDSDVYITDKCVLDMRSMDFKSNSAVAWSNKSDFACANAFNNSIIPEDTFFPSPESSCGFTSESYQQGVLSATILYEILLGKATLYAVLVSALVLMAMVKRKDSRG

SEQ ID NO: 12663 - protein, 760 aa, synthetic construct
MALPVTALLLPLALLLHAARPEVQLVESGGGLVQPGGSLRLSCAASGFSFSDFWMSWVRQAPGKGLEWVATISQAGSEKDYVDSVKGRFTISRDNAKKSLYLQMNSLRAEDTAVYYCASGVYSFDYRGQGTLVTVSSGTGGGGSGGGGSGGGGSEFDEIVLTQSPGSLAVSPGERVTMSCKSSQSVFFSSSQKNYLAWYQQIPGQSPRLLIYWASTRESGVPDRFTGSGSGTDFTLTISSVQPEDLAIYYCHQYLSSRTFGQGTKLEIKRLEDLKNVFPPEVAVFEPSEAEISHTQKATLVCLATGFYPDHVELSWWVNGKEVHSGVCTDPQPLKEQPALNDSRYCLSSRLRVSATFWQNPRNHFRCQVQFYGLSENDEWTQDRAKPVTQIVSAEAWGRADCDVKLVEKSFETDTNLNFQNLSVIGFRILLLKVAGFNLLMTLRLWSSRAKRSGSGATNFSLLKQAGDVEENPGPTSMDWIWRILFLVGAATGAHSFEQVQLQQPGAEVVKPGASVKMSCKASGYTFTSYYIHWIKQTPGQGLEWVGVIYPGNDDISYNQKFQGKATLTADKSSTTAYMQLSSLTSEDSAVYYCAREVRLRYFDVWGQGTTVTVSSTRIQNPDPAVYQLRDSKSSDKSVCLFTDFDSQTNVSQSKDSDVYITDKCVLDMRSMDFKSNSAVAWSNKSDFACANAFNNSIIPEDTFFPSPESSCGFTSESYQQGVLSATILYEILLGKATLYAVLVSALVLMAMVKRKDSRG

SEQ ID NO: 12664 - protein, 764 aa, synthetic construct
MALPVTALLLPLALLLHAARPEVQLVESGGGLVQPGGSLRLSCAASGFSFSDFWMSWVRQAPGKGLEWVATISQAGSEKDYVDSVKGRFTISRDNAKKSLYLQMNSLRAEDTAVYYCASGVYSFDYRGQGTLVTVSSGTGGGGSGGGGSGGGGSEFDVLLTQSPLSLPVTLGQPASISCRSSQTIVHSNGNTYLEWFQQRPGQSPRLLIYQVSNRFSGVPDRFSGSGSGTDFTLKISRVEAEDVGVYYCFQGSHVPRTFGGGTKVEIKRALEDLKNVFPPEVAVFEPSEAEISHTQKATLVCLATGFYPDHVELSWWVNGKEVHSGVCTDPQPLKEQPALNDSRYCLSSRLRVSATFWQNPRNHFRCQVQFYGLSENDEWTQDRAKPVTQIVSAEAWGRADCDVKLVEKSFETDTNLNFQNLSVIGFRILLLKVAGFNLLMTLRLWSSRAKRSGSGATNFSLLKQAGDVEENPGPTSMDWIWRILFLVGAATGAHSFEQIQLVQSGSELKKPGASVKVSCKASGYTFTNYGMNWVRQAPGQGLKWMGWINTNTGEPKYAEEFKGRFALSLDTSVSTAYLQINSLKAEDTAVYFCARGYGNYARGAWLAYWGQGTLVTVSSTRIQNPDPAVYQLRDSKSSDKSVCLFTDFDSQTNVSQSKDSDVYITDKCVLDMRSMDFKSNSAVAWSNKSDFACANAFNNSIIPEDTFFPSPESSCGFTSESYQQGVLSATILYEILLGKATLYAVLVSALVLMAMVKRKDSRG

SEQ ID NO: 12665 - protein, 749 aa, synthetic construct
MALPVTALLLPLALLLHAARPEVQLVESGGGLVQPGGSLRLSCAASGFSFSDFWMSWVRQAPGKGLEWVATISQAGSEKDYVDSVKGRFTISRDNAKKSLYLQMNSLRAEDTAVYYCASGVYSFDYRGQGTLVTVSSGTGGGGSGGGGSGGGGSEFDEIVLTQSPATLSLSPGERATLSCSASSSINYIYWLQQKPGQAPRILIYLTSNLASGVPARFSGSGSGTDFTLTISSLEPEDFAVYYCLQWSSNPLTFGGGTKVEIKLEDLKNVFPPEVAVFEPSEAEISHTQKATLVCLATGFYPDHVELSWWVNGKEVHSGVCTDPQPLKEQPALNDSRYCLSSRLRVSATFWQNPRNHFRCQVQFYGLSENDEWTQDRAKPVTQIVSAEAWGRADCDVKLVEKSFETDTNLNFQNLSVIGFRILLLKVAGFNLLMTLRLWSSRAKRSGSGATNFSLLKQAGDVEENPGPTSMDWIWRILFLVGAATGAHSFEEVQLVESGGGLVKPGGSLRLSCAASGFTFSSYDMSWVRQAPGKGLEWVSTISSGGSYTYYLDSIKGRFTISRDNAKNSLYLQMNSLRAEDTAVYYCARQGLDYWGRGTLVTVSSTRIQNPDPAVYQLRDSKSSDKSVCLFTDFDSQTNVSQSKDSDVYITDKCVLDMRSMDFKSNSAVAWSNKSDFACANAFNNSIIPEDTFFPSPESSCGFTSESYQQGVLSATILYEILLGKATLYAVLVSALVLMAMVKRKDSRG

SEQ ID NO: 12666 - protein, 758 aa, synthetic construct
MALPVTALLLPLALLLHAARPEVQLVESGGGLVQPGGSLRLSCAASGFSFSDFWMSWVRQAPGKGLEWVATISQAGSEKDYVDSVKGRFTISRDNAKKSLYLQMNSLRAEDTAVYYCASGVYSFDYRGQGTLVTVSSGTGGGGSGGGGSGGGGSEFDIVMTQSPDSLAVSLGERATINCRASKSVSTSGYSFMHWYQQKPGQPPKLLIYLASNLESGVPDRFSGSGSGTDFTLTISSLQAEDVAVYYCQHSREVPWTFGQGTKVEIKRLEDLKNVFPPEVAVFEPSEAEISHTQKATLVCLATGFYPDHVELSWWVNGKEVHSGVCTDPQPLKEQPALNDSRYCLSSRLRVSATFWQNPRNHFRCQVQFYGLSENDEWTQDRAKPVTQIVSAEAWGRADCDVKLVEKSFETDTNLNFQNLSVIGFRILLLKVAGFNLLMTLRLWSSRAKRSGSGATNFSLLKQAGDVEENPGPTSMDWIWRILFLVGAATGAHSFEQVQLVQSGAEVKKPGASVKVSCKASGYTFTNYGMNWVRQAPGQGLEWMGWINTYTGEPTYADAFKGRFAFSLDTSTSTAYLQINSLRSDDTAVYYCARDYGDYGMDYWGQGTTVTVSSTRIQNPDPAVYQLRDSKSSDKSVCLFTDFDSQTNVSQSKDSDVYITDKCVLDMRSMDFKSNSAVAWSNKSDFACANAFNNSIIPEDTFFPSPESSCGFTSESYQQGVLSATILYEILLGKATLYAVLVSALVLMAMVKRKDSRG

SEQ ID NO: 12667 - protein, 754 aa, synthetic construct
MALPVTALLLPLALLLHAARPEVQLVESGGGLVQPGGSLRLSCAASGFSFSDFWMSWVRQAPGKGLEWVATISQAGSEKDYVDSVKGRFTISRDNAKKSLYLQMNSLRAEDTAVYYCASGVYSFDYRGQGTLVTVSSGTGGGGSGGGGSGGGGSEFDIVMTQTPLTLSVTIGQPASISCKSSQSLLDSDGKTYLNWLLQRPGQSPERLIYLVSKLDSGVPDRFTGSGSGTDFTLKISRVEAEDLGVYCCWQGTHFPYTFGGGTKVEIKGLEDLKNVFPPEVAVFEPSEAEISHTQKATLVCLATGFYPDHVELSWWVNGKEVHSGVCTDPQPLKEQPALNDSRYCLSSRLRVSATFWQNPRNHFRCQVQFYGLSENDEWTQDRAKPVTQIVSAEAWGRADCDVKLVEKSFETDTNLNFQNLSVIGFRILLLKVAGFNLLMTLRLWSSRAKRSGSGATNFSLLKQAGDVEENPGPTSMDWIWRILFLVGAATGAHSFEQVQLQQPGAELVRPGASVKLSCKASGYTFTSYWMNWVKQRPGQGLEWIGMIDPSDSETHYNHIFKDKATLTVDKSSSTAYLQLSSLTSEDSAVYYCARNLYLWGQGTSVTVSSTRIQNPDPAVYQLRDSKSSDKSVCLFTDFDSQTNVSQSKDSDVYITDKCVLDMRSMDFKSNSAVAWSNKSDFACANAFNNSIIPEDTFFPSPESSCGFTSESYQQGVLSATILYEILLGKATLYAVLVSALVLMAMVKRKDSRG

SEQ ID NO: 12668 - protein, 762 aa, synthetic construct
MALPVTALLLPLALLLHAARPEVQLVESGGGLVQPGGSLRLSCAASGFSFSDFWMSWVRQAPGKGLEWVATISQAGSEKDYVDSVKGRFTISRDNAKKSLYLQMNSLRAEDTAVYYCASGVYSFDYRGQGTLVTVSSGTGGGGSGGGGSGGGGSEFDIVMTQSPDSLAVSLGERATINCESSQSLLNSGNQKNYLTWYQQKPGQPPKPLIYWASTRESGVPDRFSGSGSGTDFTLTISSLQAEDVAVYYCQNDYSYPYTFGQGTKLEIKRLEDLKNVFPPEVAVFEPSEAEISHTQKATLVCLATGFYPDHVELSWWVNGKEVHSGVCTDPQPLKEQPALNDSRYCLSSRLRVSATFWQNPRNHFRCQVQFYGLSENDEWTQDRAKPVTQIVSAEAWGRADCDVKLVEKSFETDTNLNFQNLSVIGFRILLLKVAGFNLLMTLRLWSSRAKRSGSGATNFSLLKQAGDVEENPGPTSMDWIWRILFLVGAATGAHSFEEVQLVQSGAEVKKPGESLKISCKGSGYSFTDYYMKWARQMPGKGLEWMGDIIPSNGATFYNQKFKGQVTISADKSISTTYLQWSSLKASDTAMYYCARSHLLRASWFAYWGQGTMVTVSSTRIQNPDPAVYQLRDSKSSDKSVCLFTDFDSQTNVSQSKDSDVYITDKCVLDMRSMDFKSNSAVAWSNKSDFACANAFNNSIIPEDTFFPSPESSCGFTSESYQQGVLSATILYEILLGKATLYAVLVSALVLMAMVKRKDSRG

SEQ ID NO: 12669 - protein, 757 aa, synthetic construct
MALPVTALLLPLALLLHAARPEVQLVESGGGLVQPGGSLRLSCAASGFSFSDFWMSWVRQAPGKGLEWVATISQAGSEKDYVDSVKGRFTISRDNAKKSLYLQMNSLRAEDTAVYYCASGVYSFDYRGQGTLVTVSSGTGGGGSGGGGSGGGGSEFDIQMTQSTSSLSASLGDRVTISCSASQGINNYLNWYQQKPDGTVELLIYYTSTLQSGVPSRFSGSGSGTDYSLTISNLEPEDIGTYYCQQYSKLPRTFGGGTKLEIKLEDLKNVFPPEVAVFEPSEAEISHTQKATLVCLATGFYPDHVELSWWVNGKEVHSGVCTDPQPLKEQPALNDSRYCLSSRLRVSATFWQNPRNHFRCQVQFYGLSENDEWTQDRAKPVTQIVSAEAWGRADCDVKLVEKSFETDTNLNFQNLSVIGFRILLLKVAGFNLLMTLRLWSSRAKRSGSGATNFSLLKQAGDVEENPGPTSMDWIWRILFLVGAATGAHSFEQVQLQQSGSELMMPGASVKISCKATGYTFSNYWIEWVKQRPGHGLEWIGEILPGTGRTIYNEKFKGKATFTADISSNTVQMQLSSLTSEDSAVYYCARRDYYGNFYYAMDYWGQGTSVTVSSTRIQNPDPAVYQLRDSKSSDKSVCLFTDFDSQTNVSQSKDSDVYITDKCVLDMRSMDFKSNSAVAWSNKSDFACANAFNNSIIPEDTFFPSPESSCGFTSESYQQGVLSATILYEILLGKATLYAVLVSALVLMAMVKRKDSRG

SEQ ID NO: 12670 - protein, 752 aa, synthetic construct
MALPVTALLLPLALLLHAARPEVQLVESGGGLVQPGGSLRLSCAASGFSFSDFWMSWVRQAPGKGLEWVATISQAGSEKDYVDSVKGRFTISRDNAKKSLYLQMNSLRAEDTAVYYCASGVYSFDYRGQGTLVTVSSGTGGGGSGGGGSGGGGSEFDIQMTQSPASLSVSVGETVTITCRASENIYSNLAWYQQKQGKSPQLLVYAATNLADGVPSRFSGSGSGTQYSLKINSLQSEDFGSYYCQHFWGTWTFGGGTTLEIKLEDLKNVFPPEVAVFEPSEAEISHTQKATLVCLATGFYPDHVELSWWVNGKEVHSGVCTDPQPLKEQPALNDSRYCLSSRLRVSATFWQNPRNHFRCQVQFYGLSENDEWTQDRAKPVTQIVSAEAWGRADCDVKLVEKSFETDTNLNFQNLSVIGFRILLLKVAGFNLLMTLRLWSSRAKRSGSGATNFSLLKQAGDVEENPGPTSMDWIWRILFLVGAATGAHSFEEVQLQQSGPELVKPGASVKMSCKASGYTFTDYYMKWMKQSHGKSLEWIGDINPNNGGTTYNQKFKGKATLTVDKSSSTAYMQLNSLTSEDSAVYYCARDYGYGYFDYWGQGTTLTVSSTRIQNPDPAVYQLRDSKSSDKSVCLFTDFDSQTNVSQSKDSDVYITDKCVLDMRSMDFKSNSAVAWSNKSDFACANAFNNSIIPEDTFFPSPESSCGFTSESYQQGVLSATILYEILLGKATLYAVLVSALVLMAMVKRKDSRG

SEQ ID NO: 12671 - protein, 755 aa, synthetic construct
MALPVTALLLPLALLLHAARPEVQLVESGGGLVQPGGSLRLSCAASGFSFSDFWMSWVRQAPGKGLEWVATISQAGSEKDYVDSVKGRFTISRDNAKKSLYLQMNSLRAEDTAVYYCASGVYSFDYRGQGTLVTVSSGTGGGGSGGGGSGGGGSEFEIVLTQSPGTLSLSPGERATLSCRASQSVGGYLAWYQQKPGQAPRLLIYDASNRATGIPARFSGSGSGTDFTLTISSLEPEDFAVYYCQQRNNWPPMYTFGQGTKLEIKRLEDLKNVFPPEVAVFEPSEAEISHTQKATLVCLATGFYPDHVELSWWVNGKEVHSGVCTDPQPLKEQPALNDSRYCLSSRLRVSATFWQNPRNHFRCQVQFYGLSENDEWTQDRAKPVTQIVSAEAWGRADCDVKLVEKSFETDTNLNFQNLSVIGFRILLLKVAGFNLLMTLRLWSSRAKRSGSGATNFSLLKQAGDVEENPGPTSMDWIWRILFLVGAATGAHSFEQVQLVQSGAEVKKPGSSVKVSCKASGGTFSSYAISWVRQAPGQGLEWMGGIIPILGTANYAQKFQGRVTITADESTSTAYMELSSLRSEDTAVYYCARWGGGAFDIWGQGTMVTVSSTRIQNPDPAVYQLRDSKSSDKSVCLFTDFDSQTNVSQSKDSDVYITDKCVLDMRSMDFKSNSAVAWSNKSDFACANAFNNSIIPEDTFFPSPESSCGFTSESYQQGVLSATILYEILLGKATLYAVLVSALVLMAMVKRKDSRG

SEQ ID NO: 12672 - protein, 750 aa, synthetic construct
MALPVTALLLPLALLLHAARPEVQLVESGGGLVQPGGSLRLSCAASGFSFSDFWMSWVRQAPGKGLEWVATISQAGSEKDYVDSVKGRFTISRDNAKKSLYLQMNSLRAEDTAVYYCASGVYSFDYRGQGTLVTVSSGTGGGGSGGGGSGGGGSEFQIVLTQSPALMSASPGEKVTMTCSASSSVRYMYWYQQKPRSSPKPWIHLTSNLASGVPARFSGSGSGTSYSLTISSMEAEDAATYYCQQWSSHPFTFGSGTKLEIKLEDLKNVFPPEVAVFEPSEAEISHTQKATLVCLATGFYPDHVELSWWVNGKEVHSGVCTDPQPLKEQPALNDSRYCLSSRLRVSATFWQNPRNHFRCQVQFYGLSENDEWTQDRAKPVTQIVSAEAWGRADCDVKLVEKSFETDTNLNFQNLSVIGFRILLLKVAGFNLLMTLRLWSSRAKRSGSGATNFSLLKQAGDVEENPGPTSMDWIWRILFLVGAATGAHSFEDVQLQESGPGLVKPSQSLSLTCTVTGFSITSDYSWNWIRQFPGNKLEWMGYISYSGHTSYNPSLESRISITRDTSKNQFFLQLNSVTTEDTATYYCTRGNWDVVYWGQGTLVTVSATRIQNPDPAVYQLRDSKSSDKSVCLFTDFDSQTNVSQSKDSDVYITDKCVLDMRSMDFKSNSAVAWSNKSDFACANAFNNSIIPEDTFFPSPESSCGFTSESYQQGVLSATILYEILLGKATLYAVLVSALVLMAMVKRKDSRG

SEQ ID NO: 12673 - protein, 760 aa, synthetic construct
MALPVTALLLPLALLLHAARPEVQLVESGGGLVQPGGSLRLSCAASGFSFSDFWMSWVRQAPGKGLEWVATISQAGSEKDYVDSVKGRFTISRDNAKKSLYLQMNSLRAEDTAVYYCASGVYSFDYRGQGTLVTVSSGTGGGGSGGGGSGGGGSEFDVVMTQSPLSLPVTLGQPASISCRSSQSIVHSDGNTYLEWYQQRPGQSPRRLIYKVSNRFSGVPDRFSGSGSGTDFTLKISRVEAEDVGVYYCFQGSHAPWTFGGGTKVEIKLEDLKNVFPPEVAVFEPSEAEISHTQKATLVCLATGFYPDHVELSWWVNGKEVHSGVCTDPQPLKEQPALNDSRYCLSSRLRVSATFWQNPRNHFRCQVQFYGLSENDEWTQDRAKPVTQIVSAEAWGRADCDVKLVEKSFETDTNLNFQNLSVIGFRILLLKVAGFNLLMTLRLWSSRAKRSGSGATNFSLLKQAGDVEENPGPTSMDWIWRILFLVGAATGAHSFEEVQLVESGGGLVQPGGSLRLSCAASGFTFSSYGMHWVRQAPGKGLEWVAYITTRSSTIYYADSVKGRFTISRDNAKNSLYLQMNSLRAEDTAVYYCTREPLTGYYAMDYWGQGTSVTVSSTRIQNPDPAVYQLRDSKSSDKSVCLFTDFDSQTNVSQSKDSDVYITDKCVLDMRSMDFKSNSAVAWSNKSDFACANAFNNSIIPEDTFFPSPESSCGFTSESYQQGVLSATILYEILLGKATLYAVLVSALVLMAMVKRKDSRG

SEQ ID NO: 12674 - protein, 752 aa, synthetic construct
MALPVTALLLPLALLLHAARPEVQLVESGGGLVQPGGSLRLSCAASGFSFSDFWMSWVRQAPGKGLEWVATISQAGSEKDYVDSVKGRFTISRDNAKKSLYLQMNSLRAEDTAVYYCASGVYSFDYRGQGTLVTVSSGTGGGGSGGGGSGGGGSEFDIQMTQSPSSLSASVGDRVTITCRASQSISLWLNWYQQKPGKAPKLLIYAASTLQSGVPSRFSGSGSGTDFTLTISSLQPEDFATYYCQQYYTSPYTFGQGTKVEIKRLEDLKNVFPPEVAVFEPSEAEISHTQKATLVCLATGFYPDHVELSWWVNGKEVHSGVCTDPQPLKEQPALNDSRYCLSSRLRVSATFWQNPRNHFRCQVQFYGLSENDEWTQDRAKPVTQIVSAEAWGRADCDVKLVEKSFETDTNLNFQNLSVIGFRILLLKVAGFNLLMTLRLWSSRAKRSGSGATNFSLLKQAGDVEENPGPTSMDWIWRILFLVGAATGAHSFEQVQLLESGGGLVQPGGSLRLSCAASGFTFSSYAMSWVRQAPGKGLEWVSVIRSSGSSTYYADSVKGRFTISRDNSKNTLYLQMNSLRAEDTAVYYCARGGGYFDYWGQGTLVTVSSTRIQNPDPAVYQLRDSKSSDKSVCLFTDFDSQTNVSQSKDSDVYITDKCVLDMRSMDFKSNSAVAWSNKSDFACANAFNNSIIPEDTFFPSPESSCGFTSESYQQGVLSATILYEILLGKATLYAVLVSALVLMAMVKRKDSRG

SEQ ID NO: 12675 - protein, 755 aa, synthetic construct
MALPVTALLLPLALLLHAARPEVQLVESGGGLVQPGGSLRLSCAASGFSFSDFWMSWVRQAPGKGLEWVATISQAGSEKDYVDSVKGRFTISRDNAKKSLYLQMNSLRAEDTAVYYCASGVYSFDYRGQGTLVTVSSGTGGGGSGGGGSGGGGSEFDIQMTQSPSSLSASVGDRVTITCRASQSISSYLNWYQQKPGKAPKLLIYAVSTLQSGVPSRFSGSGSGTDFTLTISSLQPEDFATYYCQQSGTFPPTTFGQGTKVEIKRLEDLKNVFPPEVAVFEPSEAEISHTQKATLVCLATGFYPDHVELSWWVNGKEVHSGVCTDPQPLKEQPALNDSRYCLSSRLRVSATFWQNPRNHFRCQVQFYGLSENDEWTQDRAKPVTQIVSAEAWGRADCDVKLVEKSFETDTNLNFQNLSVIGFRILLLKVAGFNLLMTLRLWSSRAKRSGSGATNFSLLKQAGDVEENPGPTSMDWIWRILFLVGAATGAHSFEQVQLLESGGGLVQPGGSLRLSCAASGFTFSSHGMHWVRQAPGKGLEWVSVISGSGSNTGYADSVKGRFTISRDNSKNTLYLQMNSLRAEDTAVYYCARQWGSYAFDSWGQGTLVTVSSTRIQNPDPAVYQLRDSKSSDKSVCLFTDFDSQTNVSQSKDSDVYITDKCVLDMRSMDFKSNSAVAWSNKSDFACANAFNNSIIPEDTFFPSPESSCGFTSESYQQGVLSATILYEILLGKATLYAVLVSALVLMAMVKRKDSRG

SEQ ID NO: 12676 - protein, 765 aa, synthetic construct
MALPVTALLLPLALLLHAARPEVQLVESGGGLVQPGGSLRLSCAASGFSFSDFWMSWVRQAPGKGLEWVATISQAGSEKDYVDSVKGRFTISRDNAKKSLYLQMNSLRAEDTAVYYCASGVYSFDYRGQGTLVTVSSGTGGGGSGGGGSGGGGSEFDIVMSQSPSSLAVSVGEKVTMSCKSSQSLLHSSNQKNYLAWYQQKPGQSPKVLIYWASTRESGVPDRFTGSGSGTDFTLTITSVKSEDLAVYYCQQYYSYPWTFGGGTRLEIKRLEDLKNVFPPEVAVFEPSEAEISHTQKATLVCLATGFYPDHVELSWWVNGKEVHSGVCTDPQPLKEQPALNDSRYCLSSRLRVSATFWQNPRNHFRCQVQFYGLSENDEWTQDRAKPVTQIVSAEAWGRADCDVKLVEKSFETDTNLNFQNLSVIGFRILLLKVAGFNLLMTLRLWSSRAKRSGSGATNFSLLKQAGDVEENPGPTSMDWIWRILFLVGAATGAHSFEEVQLQQSVAELVKPGASVKMSCKVSGYTLTDHTIHWMKQRPEQGLEWIGYIYPRDGITGYNEKFKGKATLTADTSSSTAYMQLNSLTSEDSAVYFCARWGYSYRNYAYYYDYWGQGTTLTVSSTRIQNPDPAVYQLRDSKSSDKSVCLFTDFDSQTNVSQSKDSDVYITDKCVLDMRSMDFKSNSAVAWSNKSDFACANAFNNSIIPEDTFFPSPESSCGFTSESYQQGVLSATILYEILLGKATLYAVLVSALVLMAMVKRKDSRG

SEQ ID NO: 12677 - protein, 762 aa, synthetic construct
MALPVTALLLPLALLLHAARPEVQLVESGGGLVQPGGSLRLSCAASGFSFSDFWMSWVRQAPGKGLEWVATISQAGSEKDYVDSVKGRFTISRDNAKKSLYLQMNSLRAEDTAVYYCASGVYSFDYRGQGTLVTVSSGTGGGGSGGGGSGGGGSEFEIVLTQSPGTLSLSPGERATLSCRASQSVSSSYLAWYQQKPGQAPRLLIYGTSSRATGIPDRFSGSGSGTDFTLTISRLEPEDFAVYYCQQYGSSPFTFGGGTKVEIKRLEDLKNVFPPEVAVFEPSEAEISHTQKATLVCLATGFYPDHVELSWWVNGKEVHSGVCTDPQPLKEQPALNDSRYCLSSRLRVSATFWQNPRNHFRCQVQFYGLSENDEWTQDRAKPVTQIVSAEAWGRADCDVKLVEKSFETDTNLNFQNLSVIGFRILLLKVAGFNLLMTLRLWSSRAKRSGSGATNFSLLKQAGDVEENPGPTSMDWIWRILFLVGAATGAHSFEQVQLQESGPGLAKPSETLSLTCTVSGDSITSYYWSWIRQPPGKGLEWIGYIYYSGSTNYNPSLKSRVTISVDTSKNQFSLKLSSVTAADTAVYYCARDQRRIAAAGTHFYGMDVWGQGTTVTVSSTRIQNPDPAVYQLRDSKSSDKSVCLFTDFDSQTNVSQSKDSDVYITDKCVLDMRSMDFKSNSAVAWSNKSDFACANAFNNSIIPEDTFFPSPESSCGFTSESYQQGVLSATILYEILLGKATLYAVLVSALVLMAMVKRKDSRG

SEQ ID NO: 12678 - protein, 754 aa, synthetic construct
MALPVTALLLPLALLLHAARPEVQLVESGGGLVQPGGSLRLSCAASGFSFSDFWMSWVRQAPGKGLEWVATISQAGSEKDYVDSVKGRFTISRDNAKKSLYLQMNSLRAEDTAVYYCASGVYSFDYRGQGTLVTVSSGTGGGGSGGGGSGGGGSEFDILLTQSPVILSVSPGERVSFSCRASQSIGTNIHWYQQRTNGSPRLLIKYASESISGIPSRFSGSGSGTDFTLSINSVESEDIADYYCQQNNNWPTTFGAGTKLELKLEDLKNVFPPEVAVFEPSEAEISHTQKATLVCLATGFYPDHVELSWWVNGKEVHSGVCTDPQPLKEQPALNDSRYCLSSRLRVSATFWQNPRNHFRCQVQFYGLSENDEWTQDRAKPVTQIVSAEAWGRADCDVKLVEKSFETDTNLNFQNLSVIGFRILLLKVAGFNLLMTLRLWSSRAKRSGSGATNFSLLKQAGDVEENPGPTSMDWIWRILFLVGAATGAHSFEQVQLKQSGPGLVQPSQSLSITCTVSGFSLTNYGVHWVRQSPGKGLEWLGVIWSGGNTDYNTPFTSRLSINKDNSKSQVFFKMNSLQSNDTAIYYCARALTYYDYEFAYWGQGTLVTVSATRIQNPDPAVYQLRDSKSSDKSVCLFTDFDSQTNVSQSKDSDVYITDKCVLDMRSMDFKSNSAVAWSNKSDFACANAFNNSIIPEDTFFPSPESSCGFTSESYQQGVLSATILYEILLGKATLYAVLVSALVLMAMVKRKDSRG

SEQ ID NO: 12679 - protein, 747 aa, synthetic construct
MALPVTALLLPLALLLHAARPEVQLVESGGGLVQPGGSLRLSCAASGFSFSDFWMSWVRQAPGKGLEWVATISQAGSEKDYVDSVKGRFTISRDNAKKSLYLQMNSLRAEDTAVYYCASGVYSFDYRGQGTLVTVSSGTGGGGSGGGGSGGGGSEFMTQSPKFLLVSAGDRVTLTCKASQSVNNDVYWYQQEPGQSPKLLIYWASTRESGVPDRFTGSGSGTDFTLTISSVQAEDLAVYYCKQSYNLYTFGGGTKLEIKRLEDLKNVFPPEVAVFEPSEAEISHTQKATLVCLATGFYPDHVELSWWVNGKEVHSGVCTDPQPLKEQPALNDSRYCLSSRLRVSATFWQNPRNHFRCQVQFYGLSENDEWTQDRAKPVTQIVSAEAWGRADCDVKLVEKSFETDTNLNFQNLSVIGFRILLLKVAGFNLLMTLRLWSSRAKRSGSGATNFSLLKQAGDVEENPGPTSMDWIWRILFLVGAATGAHSFEESGRGLVQPGGSRKLSCAASGFTFSTSGMHWVRQAPEKGLEWVAYISSGSTTIYHADTVKGRFTISRDNPKNTLFLQMTSLRSEDTAMYYCCARSGQFGNYFDYWGQGTTLTVSSTRIQNPDPAVYQLRDSKSSDKSVCLFTDFDSQTNVSQSKDSDVYITDKCVLDMRSMDFKSNSAVAWSNKSDFACANAFNNSIIPEDTFFPSPESSCGFTSESYQQGVLSATILYEILLGKATLYAVLVSALVLMAMVKRKDSRG

SEQ ID NO: 12680 - protein, 752 aa, synthetic construct
MALPVTALLLPLALLLHAARPEVQLVESGGGLVQPGGSLRLSCAASGFSFSDFWMSWVRQAPGKGLEWVATISQAGSEKDYVDSVKGRFTISRDNAKKSLYLQMNSLRAEDTAVYYCASGVYSFDYRGQGTLVTVSSGTGGGGSGGGGSGGGGSEFQSPSSLAVSAGEKVTMSCKSSQSLLNSRTRKNYLAWYQQKPGQSPKLLIYWASTRESGVPDRFTGSGSGTDFTLTISSVQAEDLAVYYCKQSNLYTFGGGTKLEIKLEDLKNVFPPEVAVFEPSEAEISHTQKATLVCLATGFYPDHVELSWWVNGKEVHSGVCTDPQPLKEQPALNDSRYCLSSRLRVSATFWQNPRNHFRCQVQFYGLSENDEWTQDRAKPVTQIVSAEAWGRADCDVKLVEKSFETDTNLNFQNLSVIGFRILLLKVAGFNLLMTLRLWSSRAKRSGSGATNFSLLKQAGDVEENPGPTSMDWIWRILFLVGAATGAHSFEQVQLEESGPELVKPGASVKLSCKASGYTFTEYIIHWVKQRSGQGLEWIGWFYPGSGSIKYNEKFKDKATLTADKSSSTVYMELSGLTSEDSAVYFCARHDGYSYFDYWGQGTTLTVSSTRIQNPDPAVYQLRDSKSSDKSVCLFTDFDSQTNVSQSKDSDVYITDKCVLDMRSMDFKSNSAVAWSNKSDFACANAFNNSIIPEDTFFPSPESSCGFTSESYQQGVLSATILYEILLGKATLYAVLVSALVLMAMVKRKDSRG

SEQ ID NO: 12681 - protein, 755 aa, synthetic construct
MALPVTALLLPLALLLHAARPEVQLVESGGGLVQPGGSLRLSCAASGFSFSDFWMSWVRQAPGKGLEWVATISQAGSEKDYVDSVKGRFTISRDNAKKSLYLQMNSLRAEDTAVYYCASGVYSFDYRGQGTLVTVSSGTGGGGSGGGGSGGGGSEFDIQMTQSPSSLSASLGERVSLTCRATQELSGYLSWLQQKPDGTIKRLIYAASTLDSGVPKRFSGNRSGSDYSLTISSLESEDFADYYCLQYAIYPYTFGGGTKLEIKLEDLKNVFPPEVAVFEPSEAEISHTQKATLVCLATGFYPDHVELSWWVNGKEVHSGVCTDPQPLKEQPALNDSRYCLSSRLRVSATFWQNPRNHFRCQVQFYGLSENDEWTQDRAKPVTQIVSAEAWGRADCDVKLVEKSFETDTNLNFQNLSVIGFRILLLKVAGFNLLMTLRLWSSRAKRSGSGATNFSLLKQAGDVEENPGPTSMDWIWRILFLVGAATGAHSFEEVQLQQSGPELVKPGASVKMSCKASGYTFTSYFIHWVKQKPGQGLEWIGFINPYNDGSKYNEKFKGKATLTSDKSSSTAYMELSSLTSEDSAVYYCTRDDGYYGYAMDYWGQGTSVTVSSTRIQNPDPAVYQLRDSKSSDKSVCLFTDFDSQTNVSQSKDSDVYITDKCVLDMRSMDFKSNSAVAWSNKSDFACANAFNNSIIPEDTFFPSPESSCGFTSESYQQGVLSATILYEILLGKATLYAVLVSALVLMAMVKRKDSRG

SEQ ID NO: 12682 - protein, 760 aa, synthetic construct
MALPVTALLLPLALLLHAARPEVQLVESGGGLVQPGGSLRLSCAASGFSFSDFWMSWVRQAPGKGLEWVATISQAGSEKDYVDSVKGRFTISRDNAKKSLYLQMNSLRAEDTAVYYCASGVYSFDYRGQGTLVTVSSGTGGGGSGGGGSGGGGSEFDTIVLTQSPASLAVSLGQRATISCRASESVDSYGNSFMHWYQQKPGQPPKLLIYLASNLESGVPARFSGSGSRTDFTLTIDPVEADDAATYYCQQNNYDPWTFGGGTKLEIKLEDLKNVFPPEVAVFEPSEAEISHTQKATLVCLATGFYPDHVELSWWVNGKEVHSGVCTDPQPLKEQPALNDSRYCLSSRLRVSATFWQNPRNHFRCQVQFYGLSENDEWTQDRAKPVTQIVSAEAWGRADCDVKLVEKSFETDTNLNFQNLSVIGFRILLLKVAGFNLLMTLRLWSSRAKRSGSGATNFSLLKQAGDVEENPGPTSMDWIWRILFLVGAATGAHSFEEVQLQQSGPELVKPGASVKMSCKASGYTFTSYVMHWVKQKPGQGLEWIGYINPYNDGTKYNEKFKGKATLTSDTSSSTAYMELNSLTSEDSAVYFCARPIYFDNDYFDYWGQGTTLKVSSTRIQNPDPAVYQLRDSKSSDKSVCLFTDFDSQTNVSQSKDSDVYITDKCVLDMRSMDFKSNSAVAWSNKSDFACANAFNNSIIPEDTFFPSPESSCGFTSESYQQGVLSATILYEILLGKATLYAVLVSALVLMAMVKRKDSRG

SEQ ID NO: 12683 - protein, 755 aa, synthetic construct
MALPVTALLLPLALLLHAARPEVQLVESGGGLVQPGGSLRLSCAASGFSFSDFWMSWVRQAPGKGLEWVATISQAGSEKDYVDSVKGRFTISRDNAKKSLYLQMNSLRAEDTAVYYCASGVYSFDYRGQGTLVTVSSGTGGGGSGGGGSGGGGSEFDIQMTQSPSSLSASVGDRVTITCKASQDVGIAVAWYQQKPGKVPKLLIYWASTRHTGVPDRFSGSGSGTDFTLTISSLQPEDVATYYCQQYSSYPYTFGQGTKVEIKRLEDLKNVFPPEVAVFEPSEAEISHTQKATLVCLATGFYPDHVELSWWVNGKEVHSGVCTDPQPLKEQPALNDSRYCLSSRLRVSATFWQNPRNHFRCQVQFYGLSENDEWTQDRAKPVTQIVSAEAWGRADCDVKLVEKSFETDTNLNFQNLSVIGFRILLLKVAGFNLLMTLRLWSSRAKRSGSGATNFSLLKQAGDVEENPGPTSMDWIWRILFLVGAATGAHSFEEVQLVESGGGLVQPGGSLRLSCAASGFDFSRYWMSWVRQAPGKGLEWIGEINPDSSTINYAPSLKDKFIISRDNAKNSLYLQMNSLRAEDTAVYYCARPDGNYWYFDVWGQGTLVTVSSTRIQNPDPAVYQLRDSKSSDKSVCLFTDFDSQTNVSQSKDSDVYITDKCVLDMRSMDFKSNSAVAWSNKSDFACANAFNNSIIPEDTFFPSPESSCGFTSESYQQGVLSATILYEILLGKATLYAVLVSALVLMAMVKRKDSRG

SEQ ID NO: 12684 - protein, 755 aa, synthetic construct
MALPVTALLLPLALLLHAARPEVQLVESGGGLVQPGGSLRLSCAASGFSFSDFWMSWVRQAPGKGLEWVATISQAGSEKDYVDSVKGRFTISRDNAKKSLYLQMNSLRAEDTAVYYCASGVYSFDYRGQGTLVTVSSGTGGGGSGGGGSGGGGSEFDIVMTQSQKSMSTSVGDRVSITCKASQDVITGVAWYQQKPGQSPKLLIYSASYRYTGVPDRFTGSGSGTDFTFTISNVQAEDLAVYYCQQHYSTPLTFGAGTKLELKLEDLKNVFPPEVAVFEPSEAEISHTQKATLVCLATGFYPDHVELSWWVNGKEVHSGVCTDPQPLKEQPALNDSRYCLSSRLRVSATFWQNPRNHFRCQVQFYGLSENDEWTQDRAKPVTQIVSAEAWGRADCDVKLVEKSFETDTNLNFQNLSVIGFRILLLKVAGFNLLMTLRLWSSRAKRSGSGATNFSLLKQAGDVEENPGPTSMDWIWRILFLVGAATGAHSFEQVQLQQPGAELVRPGASVKLSCKASGYSFTTYWMNWVKQRPGQGLEWIGMIHPSDSETRLNQKFKDKATLTVDKSSSTAYMQLSSPTSEDSAVYYCARSTMIATRAMDYWGQGTSVTVSSTRIQNPDPAVYQLRDSKSSDKSVCLFTDFDSQTNVSQSKDSDVYITDKCVLDMRSMDFKSNSAVAWSNKSDFACANAFNNSIIPEDTFFPSPESSCGFTSESYQQGVLSATILYEILLGKATLYAVLVSALVLMAMVKRKDSRG

SEQ ID NO: 12685 - protein, 761 aa, synthetic construct
MALPVTALLLPLALLLHAARPEVQLVESGGGLVQPGGSLRLSCAASGFSFSDFWMSWVRQAPGKGLEWVATISQAGSEKDYVDSVKGRFTISRDNAKKSLYLQMNSLRAEDTAVYYCASGVYSFDYRGQGTLVTVSSGTGGGGSGGGGSGGGGSEFQSVLTQPPSVSGAPGQRVTISCTGSGSNIGAPYDVSWYQQLPGTAPKLLIYHNNKRPSGVPDRFSGSKSGTSASLAITGLQAEDEADYYCATVEAGLSGSVFGGGTKLTVLGALEDLKNVFPPEVAVFEPSEAEISHTQKATLVCLATGFYPDHVELSWWVNGKEVHSGVCTDPQPLKEQPALNDSRYCLSSRLRVSATFWQNPRNHFRCQVQFYGLSENDEWTQDRAKPVTQIVSAEAWGRADCDVKLVEKSFETDTNLNFQNLSVIGFRILLLKVAGFNLLMTLRLWSSRAKRSGSGATNFSLLKQAGDVEENPGPTSMDWIWRILFLVGAATGAHSFEQVQLVQSGAEVKKPGASVKVSCKVSGYTLTELSIHWVRQAPGKGLEWMGGFDPEENEIVYAQRFQGRVTMTEDTSTDTAYMELSSLRSEDTAVYYCAIVGSFSPLTLGLWGQGTMVTVSSTRIQNPDPAVYQLRDSKSSDKSVCLFTDFDSQTNVSQSKDSDVYITDKCVLDMRSMDFKSNSAVAWSNKSDFACANAFNNSIIPEDTFFPSPESSCGFTSESYQQGVLSATILYEILLGKATLYAVLVSALVLMAMVKRKDSRG

SEQ ID NO: 12686 - protein, 761 aa, synthetic construct
MALPVTALLLPLALLLHAARPEVQLVESGGGLVQPGGSLRLSCAASGFSFSDFWMSWVRQAPGKGLEWVATISQAGSEKDYVDSVKGRFTISRDNAKKSLYLQMNSLRAEDTAVYYCASGVYSFDYRGQGTLVTVSSGTGGGGSGGGGSGGGGSEFQSVLTQPPSVSGAPGQRVTISCTGSGSNIGAPYDVSWYQQLPGTAPKLLIYHNNKRPSGVPDRFSGSKSGTSASLAITGLQAEDEADYYCQSYDSSSISTIFGGGTKLTVLGALEDLKNVFPPEVAVFEPSEAEISHTQKATLVCLATGFYPDHVELSWWVNGKEVHSGVCTDPQPLKEQPALNDSRYCLSSRLRVSATFWQNPRNHFRCQVQFYGLSENDEWTQDRAKPVTQIVSAEAWGRADCDVKLVEKSFETDTNLNFQNLSVIGFRILLLKVAGFNLLMTLRLWSSRAKRSGSGATNFSLLKQAGDVEENPGPTSMDWIWRILFLVGAATGAHSFEQVQLVQSGAEVKKPGASVKVSCKVSGYTLTELSIHWVRQAPGKGLEWMGGFDPEENEIVYAQRFQGRVTMTEDTSTDTAYMELSSLRSEDTAVYYCAIVGSFSGIAYRPWGQGTMVTVSSTRIQNPDPAVYQLRDSKSSDKSVCLFTDFDSQTNVSQSKDSDVYITDKCVLDMRSMDFKSNSAVAWSNKSDFACANAFNNSIIPEDTFFPSPESSCGFTSESYQQGVLSATILYEILLGKATLYAVLVSALVLMAMVKRKDSRG

SEQ ID NO: 12687 - protein, 749 aa, synthetic construct
MALPVTALLLPLALLLHAARPEVQLVESGGGLVQPGGSLRLSCAASGFSFSDFWMSWVRQAPGKGLEWVATISQAGSEKDYVDSVKGRFTISRDNAKKSLYLQMNSLRAEDTAVYYCASGVYSFDYRGQGTLVTVSSGTGGGGSGGGGSGGGGSEFDIQMTQSPSSLSASVGDRVTITCRASQGIRNNLAWYQQKPGKAPKRLIYAASNLQSGVPSRFTGSGSGTEFTLIVSSLQPEDFATYYCLQHHSYPLTSGGGTKVELEDLKNVFPPEVAVFEPSEAEISHTQKATLVCLATGFYPDHVELSWWVNGKEVHSGVCTDPQPLKEQPALNDSRYCLSSRLRVSATFWQNPRNHFRCQVQFYGLSENDEWTQDRAKPVTQIVSAEAWGRADCDVKLVEKSFETDTNLNFQNLSVIGFRILLLKVAGFNLLMTLRLWSSRAKRSGSGATNFSLLKQAGDVEENPGPTSMDWIWRILFLVGAATGAHSFEEVQVLESGGGLVQPGGSLRLSCAASGFTFSSYAMSWVRQAPGKGLEWVSAISGSGGSTNYADSVKGRFTISRDNSKNTLYLQMNSLRAEDTAVYYCAGSSGWSEYWGQGTLVTVSSTRIQNPDPAVYQLRDSKSSDKSVCLFTDFDSQTNVSQSKDSDVYITDKCVLDMRSMDFKSNSAVAWSNKSDFACANAFNNSIIPEDTFFPSPESSCGFTSESYQQGVLSATILYEILLGKATLYAVLVSALVLMAMVKRKDSRG

SEQ ID NO: 12688 - protein, 755 aa, synthetic construct
MALPVTALLLPLALLLHAARPEVQLVESGGGLVQPGGSLRLSCAASGFSFSDFWMSWVRQAPGKGLEWVATISQAGSEKDYVDSVKGRFTISRDNAKKSLYLQMNSLRAEDTAVYYCASGVYSFDYRGQGTLVTVSSGTGGGGSGGGGSGGGGSEFDEIQLVQSGAEVKKPGESLRISCKGSGFNIEDYYIHWVRQMPGKGLEWMGRIDPENDETKYGPIFQGHVTISADTSINTVYLQWSSLKASDTAMYYCAFRGGVYWGQGTTVTVSSLEDLKNVFPPEVAVFEPSEAEISHTQKATLVCLATGFYPDHVELSWWVNGKEVHSGVCTDPQPLKEQPALNDSRYCLSSRLRVSATFWQNPRNHFRCQVQFYGLSENDEWTQDRAKPVTQIVSAEAWGRADCDVKLVEKSFETDTNLNFQNLSVIGFRILLLKVAGFNLLMTLRLWSSRAKRSGSGATNFSLLKQAGDVEENPGPTSMDWIWRILFLVGAATGAHSFEDVVMTQSPDSLAVSLGERATINCKSSQSLLDSDGKTYLNWLQQKPGQPPKRLISLVSKLDSGVPDRFSGSGSGTDFTLTISSLQAEDVAVYYCWQGTHFPGTFGGGTKVEIKTRIQNPDPAVYQLRDSKSSDKSVCLFTDFDSQTNVSQSKDSDVYITDKCVLDMRSMDFKSNSAVAWSNKSDFACANAFNNSIIPEDTFFPSPESSCGFTSESYQQGVLSATILYEILLGKATLYAVLVSALVLMAMVKRKDSRG

SEQ ID NO: 12689 - protein, 762 aa, synthetic construct
MALPVTALLLPLALLLHAARPEVQLVESGGGLVQPGGSLRLSCAASGFSFSDFWMSWVRQAPGKGLEWVATISQAGSEKDYVDSVKGRFTISRDNAKKSLYLQMNSLRAEDTAVYYCASGVYSFDYRGQGTLVTVSSGTGGGGSGGGGSGGGGSEFDELVMTQSPSSLTVTAGEKVTMSCKSSQSLLNSGNQKNYLTWYQQKPGQPPKLLIYWASTRESGVPDRFTGSGSGTDFTLTISSVQAEDLAVYYCQNDYSYPLTFGAGTKLEIKLEDLKNVFPPEVAVFEPSEAEISHTQKATLVCLATGFYPDHVELSWWVNGKEVHSGVCTDPQPLKEQPALNDSRYCLSSRLRVSATFWQNPRNHFRCQVQFYGLSENDEWTQDRAKPVTQIVSAEAWGRADCDVKLVEKSFETDTNLNFQNLSVIGFRILLLKVAGFNLLMTLRLWSSRAKRSGSGATNFSLLKQAGDVEENPGPTSMDWIWRILFLVGAATGAHSFEEVQLLEQSGAELVRPGTSVKISCKASGYAFTNYWLGWVKQRPGHGLEWIGDIFPGSGNIHYNEKFKGKATLTADKSSSTAYMQLSSLTFEDSAVYFCARLRNWDEPMDYWGQGTTVTVSSTRIQNPDPAVYQLRDSKSSDKSVCLFTDFDSQTNVSQSKDSDVYITDKCVLDMRSMDFKSNSAVAWSNKSDFACANAFNNSIIPEDTFFPSPESSCGFTSESYQQGVLSATILYEILLGKATLYAVLVSALVLMAMVKRKDSRG

SEQ ID NO: 12690 - protein, 763 aa, synthetic construct
MALPVTALLLPLALLLHAARPEVQLVESGGGLVQPGGSLRLSCAASGFSFSDFWMSWVRQAPGKGLEWVATISQAGSEKDYVDSVKGRFTISRDNAKKSLYLQMNSLRAEDTAVYYCASGVYSFDYRGQGTLVTVSSGTGGGGSGGGGSGGGGSEFDELQMTQSPSSLSASVGDRVTITCRASQSISSYLNWYQQKPGQPPKLLIYWASTRESGVPDRFSGSESGTNYTLTISSLQPEDFATYFCQQSDSLPITFGQGTRLDIQLEDLKNVFPPEVAVFEPSEAEISHTQKATLVCLATGFYPDHVELSWWVNGKEVHSGVCTDPQPLKEQPALNDSRYCLSSRLRVSATFWQNPRNHFRCQVQFYGLSENDEWTQDRAKPVTQIVSAEAWGRADCDVKLVEKSFETDTNLNFQNLSVIGFRILLLKVAGFNLLMTLRLWSSRAKRSGSGATNFSLLKQAGDVEENPGPTSMDWIWRILFLVGAATGAHSFEEVQLLESGGGVVQPGRSLRLSCAASGFTFSSYGMHWVRQAPGKGLEWVAVISYDGSNKYYADSVKGRFTISRDNSKNTLYLQMNSLRAEDTAVYYCAKDMGWGSGWRPYYYYGMDVWGQGTTVTVSSTRIQNPDPAVYQLRDSKSSDKSVCLFTDFDSQTNVSQSKDSDVYITDKCVLDMRSMDFKSNSAVAWSNKSDFACANAFNNSIIPEDTFFPSPESSCGFTSESYQQGVLSATILYEILLGKATLYAVLVSALVLMAMVKRKDSRG

SEQ ID NO: 12691 - protein, 760 aa, synthetic construct
MALPVTALLLPLALLLHAARPEVQLVESGGGLVQPGGSLRLSCAASGFSFSDFWMSWVRQAPGKGLEWVATISQAGSEKDYVDSVKGRFTISRDNAKKSLYLQMNSLRAEDTAVYYCASGVYSFDYRGQGTLVTVSSGTGGGGSGGGGSGGGGSEFDDIQMTQSPSSLSASVGDRVTITCRASQSISSYLNWYQQKPGKAPKLLIYAASSLQSGVPSRFSGSGSGTDFTLTISSLQPEDLATYYCQQSYSTPFTFGPGTKVDIKLEDLKNVFPPEVAVFEPSEAEISHTQKATLVCLATGFYPDHVELSWWVNGKEVHSGVCTDPQPLKEQPALNDSRYCLSSRLRVSATFWQNPRNHFRCQVQFYGLSENDEWTQDRAKPVTQIVSAEAWGRADCDVKLVEKSFETDTNLNFQNLSVIGFRILLLKVAGFNLLMTLRLWSSRAKRSGSGATNFSLLKQAGDVEENPGPTSMDWIWRILFLVGAATGAHSFEVHEVQLVQSGAEVKKPGSSVKVSCKASGGTFSSYAISWVRQAPGQGLEWMGGIIPIFGTANYAQKFQGRVTITADKSTSTAYMELSSLRSEDTAVYYCATFALFGFREQAFDIWGQGTTVTVSSTRIQNPDPAVYQLRDSKSSDKSVCLFTDFDSQTNVSQSKDSDVYITDKCVLDMRSMDFKSNSAVAWSNKSDFACANAFNNSIIPEDTFFPSPESSCGFTSESYQQGVLSATILYEILLGKATLYAVLVSALVLMAMVKRKDSRG

SEQ ID NO: 12692 - protein, 758 aa, synthetic construct
MALPVTALLLPLALLLHAARPEVQLVESGGGLVQPGGSLRLSCAASGFSFSDFWMSWVRQAPGKGLEWVATISQAGSEKDYVDSVKGRFTISRDNAKKSLYLQMNSLRAEDTAVYYCASGVYSFDYRGQGTLVTVSSGTGGGGSGGGGSGGGGSEFDIVLTQSPLSLAVSLGQPAIISCKASQSVSFAGTSLMHWYHQKPGQQPRLLIYRASNLEAGVPDRFSGSGSKTDFTLTISPVEAEDAATYYCQQSREYPYTFGGGTKLEIKRLEDLKNVFPPEVAVFEPSEAEISHTQKATLVCLATGFYPDHVELSWWVNGKEVHSGVCTDPQPLKEQPALNDSRYCLSSRLRVSATFWQNPRNHFRCQVQFYGLSENDEWTQDRAKPVTQIVSAEAWGRADCDVKLVEKSFETDTNLNFQNLSVIGFRILLLKVAGFNLLMTLRLWSSRAKRSGSGATNFSLLKQAGDVEENPGPTSMDWIWRILFLVGAATGAHSFEQVQLVQSGAEVVKPGASVKISCKASGYTFTGYFMNWVKQSPGQSLEWIGRIHPYDGDTFYNQKFQGKATLTVDKSSNTAHMELLSLTSEDFAVYYCTRYDGSRAMDYWGQGTTVTVSSTRIQNPDPAVYQLRDSKSSDKSVCLFTDFDSQTNVSQSKDSDVYITDKCVLDMRSMDFKSNSAVAWSNKSDFACANAFNNSIIPEDTFFPSPESSCGFTSESYQQGVLSATILYEILLGKATLYAVLVSALVLMAMVKRKDSRG

SEQ ID NO: 12693 - protein, 755 aa, synthetic construct
MALPVTALLLPLALLLHAARPEVQLVESGGGLVQPGGSLRLSCAASGFSFSDFWMSWVRQAPGKGLEWVATISQAGSEKDYVDSVKGRFTISRDNAKKSLYLQMNSLRAEDTAVYYCASGVYSFDYRGQGTLVTVSSGTGGGGSGGGGSGGGGSEFDDVVMTQTPLSLPVTPGEPASISCRSSQSLVHRNGNTYLHWYLQKPGQSPKLLIHKVSNRFSGVPDRFSGSGSGTDFTLKISRVEAEDLGVYFCSQSTHVPPLTFGAGTKLELKLEDLKNVFPPEVAVFEPSEAEISHTQKATLVCLATGFYPDHVELSWWVNGKEVHSGVCTDPQPLKEQPALNDSRYCLSSRLRVSATFWQNPRNHFRCQVQFYGLSENDEWTQDRAKPVTQIVSAEAWGRADCDVKLVEKSFETDTNLNFQNLSVIGFRILLLKVAGFNLLMTLRLWSSRAKRSGSGATNFSLLKQAGDVEENPGPTSMDWIWRILFLVGAATGAHSFEEVQLVQSGAEVEKPGASVKISCKASGSSFTGYNMNWVRQNIGKSLEWIGAIDPYYGGTSYNQKFKGRATLTVDKSTSTAYMHLKSLRSEDTAVYYCVSGMEYWGQGTSVTVSSTRIQNPDPAVYQLRDSKSSDKSVCLFTDFDSQTNVSQSKDSDVYITDKCVLDMRSMDFKSNSAVAWSNKSDFACANAFNNSIIPEDTFFPSPESSCGFTSESYQQGVLSATILYEILLGKATLYAVLVSALVLMAMVKRKDSRG

SEQ ID NO: 12694 - protein, 753 aa, synthetic construct
MALPVTALLLPLALLLHAARPEVQLVESGGGLVQPGGSLRLSCAASGFSFSDFWMSWVRQAPGKGLEWVATISQAGSEKDYVDSVKGRFTISRDNAKKSLYLQMNSLRAEDTAVYYCASGVYSFDYRGQGTLVTVSSGTGGGGSGGGGSGGGGSEFDEIVMTQTPATLSVSAGERVTITCKASQSVSNDVTWYQQKPGQAPRLLIYSASNRYSGVPARFSGSGYGTEFTFTISSVQSEDFAVYFCQQDYSSFGQGTKLEIKRLEDLKNVFPPEVAVFEPSEAEISHTQKATLVCLATGFYPDHVELSWWVNGKEVHSGVCTDPQPLKEQPALNDSRYCLSSRLRVSATFWQNPRNHFRCQVQFYGLSENDEWTQDRAKPVTQIVSAEAWGRADCDVKLVEKSFETDTNLNFQNLSVIGFRILLLKVAGFNLLMTLRLWSSRAKRSGSGATNFSLLKQAGDVEENPGPTSMDWIWRILFLVGAATGAHSFEQVQLVESGPGVVQPGRSLRISCAVSGFSVTNYGVHWVRQPPGKGLEWLGVIWAGGITNYNSAFMSRLTISKDNSKNTVYLQMNSLRAEDTAMYYCASRGGHYGYALDYWGQGTLVTVSSTRIQNPDPAVYQLRDSKSSDKSVCLFTDFDSQTNVSQSKDSDVYITDKCVLDMRSMDFKSNSAVAWSNKSDFACANAFNNSIIPEDTFFPSPESSCGFTSESYQQGVLSATILYEILLGKATLYAVLVSALVLMAMVKRKDSRG

SEQ ID NO: 12695 - protein, 755 aa, synthetic construct
MALPVTALLLPLALLLHAARPEVQLVESGGGLVQPGGSLRLSCAASGFSFSDFWMSWVRQAPGKGLEWVATISQAGSEKDYVDSVKGRFTISRDNAKKSLYLQMNSLRAEDTAVYYCASGVYSFDYRGQGTLVTVSSGTGGGGSGGGGSGGGGSEFDIQMTQTASSLPASLGDRVTISCSASQDISNYLNWYQQKPDGTVKLLIFYSSNLHSGVPSRFSGGGSGTDYSLTISNLEPEDIATYFCHQYSKLPWTFGGGTKLEIKRLEDLKNVFPPEVAVFEPSEAEISHTQKATLVCLATGFYPDHVELSWWVNGKEVHSGVCTDPQPLKEQPALNDSRYCLSSRLRVSATFWQNPRNHFRCQVQFYGLSENDEWTQDRAKPVTQIVSAEAWGRADCDVKLVEKSFETDTNLNFQNLSVIGFRILLLKVAGFNLLMTLRLWSSRAKRSGSGATNFSLLKQAGDVEENPGPTSMDWIWRILFLVGAATGAHSFEEVTLVESGGDFVKPGGSLKVSCAASGFAFSHYAMSWVRQTPAKRLEWVAYISSGGSGTYYSDSVKGRFTISRDNAKNTLYLQMRSLRSEDSAMYFCTRVKLGTYYFDSWGQGTTLTVSSTRIQNPDPAVYQLRDSKSSDKSVCLFTDFDSQTNVSQSKDSDVYITDKCVLDMRSMDFKSNSAVAWSNKSDFACANAFNNSIIPEDTFFPSPESSCGFTSESYQQGVLSATILYEILLGKATLYAVLVSALVLMAMVKRKDSRG

SEQ ID NO: 12696 - protein, 757 aa, synthetic construct
MALPVTALLLPLALLLHAARPEVQLVESGGGLVQPGGSLRLSCAASGFSFSDFWMSWVRQAPGKGLEWVATISQAGSEKDYVDSVKGRFTISRDNAKKSLYLQMNSLRAEDTAVYYCASGVYSFDYRGQGTLVTVSSGTGGGGSGGGGSGGGGSEFQFVLTQSPSASAALGASAKLTCTLSSAHKTYTIDWYQQQKGKAPRYLIQVKSDGTYTKATGVPDRFSGSSSGADRYLIIPSVQADDEADYYCGTDYTGGYVFGGGTQLTVTLEDLKNVFPPEVAVFEPSEAEISHTQKATLVCLATGFYPDHVELSWWVNGKEVHSGVCTDPQPLKEQPALNDSRYCLSSRLRVSATFWQNPRNHFRCQVQFYGLSENDEWTQDRAKPVTQIVSAEAWGRADCDVKLVEKSFETDTNLNFQNLSVIGFRILLLKVAGFNLLMTLRLWSSRAKRSGSGATNFSLLKQAGDVEENPGPTSMDWIWRILFLVGAATGAHSFEEQLKESGGGLFKPTDTLTLTCTVSGFSLSYYGVNWVRQAPGNGLEWIGTIGGSGDTYYASWAKSRSTIIRNTNENTVTLKMTSLTAADTATYFCVRYANIGYEYFNVWGPGTLVTVSSTRIQNPDPAVYQLRDSKSSDKSVCLFTDFDSQTNVSQSKDSDVYITDKCVLDMRSMDFKSNSAVAWSNKSDFACANAFNNSIIPEDTFFPSPESSCGFTSESYQQGVLSATILYEILLGKATLYAVLVSALVLMAMVKRKDSRG

SEQ ID NO: 12697 - protein, 762 aa, synthetic construct
MALPVTALLLPLALLLHAARPEVQLVESGGGLVQPGGSLRLSCAASGFSFSDFWMSWVRQAPGKGLEWVATISQAGSEKDYVDSVKGRFTISRDNAKKSLYLQMNSLRAEDTAVYYCASGVYSFDYRGQGTLVTVSSGTGGGGSGGGGSGGGGSEFQFVLTQSPSVSAALGASAKLTCTLSSAHKTYTIDWYQQQQGEAPRYLMQVKSDGSYTKGTGVPDRFSGSSSGADRYLIIPSVQADDEAGYVCGADDNGGYVFGGGTQLTVTLEDLKNVFPPEVAVFEPSEAEISHTQKATLVCLATGFYPDHVELSWWVNGKEVHSGVCTDPQPLKEQPALNDSRYCLSSRLRVSATFWQNPRNHFRCQVQFYGLSENDEWTQDRAKPVTQIVSAEAWGRADCDVKLVEKSFETDTNLNFQNLSVIGFRILLLKVAGFNLLMTLRLWSSRAKRSGSGATNFSLLKQAGDVEENPGPTSMDWIWRILFLVGAATGAHSFEQSVKESEGGLFKPTDTLTLTCTVSGFSLSRHALTWVRQAPGNGLEWIGAIDNAGTTYYASWAKSRSTITRNTDLHTVTLKMTSLTASDTATYFCARVFYDINSGYYLDGMDLWGPGTLVTVSSTRIQNPDPAVYQLRDSKSSDKSVCLFTDFDSQTNVSQSKDSDVYITDKCVLDMRSMDFKSNSAVAWSNKSDFACANAFNNSIIPEDTFFPSPESSCGFTSESYQQGVLSATILYEILLGKATLYAVLVSALVLMAMVKRKDSRG

SEQ ID NO: 12698 - protein, 756 aa, synthetic construct
MALPVTALLLPLALLLHAARPEVQLVESGGGLVQPGGSLRLSCAASGFSFSDFWMSWVRQAPGKGLEWVATISQAGSEKDYVDSVKGRFTISRDNAKKSLYLQMNSLRAEDTAVYYCASGVYSFDYRGQGTLVTVSSGTGGGGSGGGGSGGGGSEFDIQMTQSPSSLSASVGDRVTITCRASQGISSWLAWYQQKPEKAPKSLIYAASSLQSGVPSRFSGSGSGTDFTLTISSLQPEDFATYYCQQYNSYPPTFGGGTKVEIKLEDLKNVFPPEVAVFEPSEAEISHTQKATLVCLATGFYPDHVELSWWVNGKEVHSGVCTDPQPLKEQPALNDSRYCLSSRLRVSATFWQNPRNHFRCQVQFYGLSENDEWTQDRAKPVTQIVSAEAWGRADCDVKLVEKSFETDTNLNFQNLSVIGFRILLLKVAGFNLLMTLRLWSSRAKRSGSGATNFSLLKQAGDVEENPGPTSMDWIWRILFLVGAATGAHSFEEVQLVESGGGLVQPGESLRLSCVASGFTFSRYKMNWVRQAPGKGLEWVSYISRSGRDIYYADSVKGRFTISRDNAKNSLYLQMNSLRDEDTAVYYCAGTVTTYYYFGMDVWGHGTTVTVSSTRIQNPDPAVYQLRDSKSSDKSVCLFTDFDSQTNVSQSKDSDVYITDKCVLDMRSMDFKSNSAVAWSNKSDFACANAFNNSIIPEDTFFPSPESSCGFTSESYQQGVLSATILYEILLGKATLYAVLVSALVLMAMVKRKDSRG

SEQ ID NO: 12699 - protein, 757 aa, synthetic construct
MALPVTALLLPLALLLHAARPEVQLVESGGGLVQPGGSLRLSCAASGFSFSDFWMSWVRQAPGKGLEWVATISQAGSEKDYVDSVKGRFTISRDNAKKSLYLQMNSLRAEDTAVYYCASGVYSFDYRGQGTLVTVSSGTGGGGSGGGGSGGGGSEFDIQMTQSPSSLSASVGDRVTITCRASQGISSWLAWYQQKPEKAPKSLIYAASSLQSGVPSRFSGSGSGTDFTLTISSLQPEDFATYYCQQYNSYPPTFGGGTKVEIKLEDLKNVFPPEVAVFEPSEAEISHTQKATLVCLATGFYPDHVELSWWVNGKEVHSGVCTDPQPLKEQPALNDSRYCLSSRLRVSATFWQNPRNHFRCQVQFYGLSENDEWTQDRAKPVTQIVSAEAWGRADCDVKLVEKSFETDTNLNFQNLSVIGFRILLLKVAGFNLLMTLRLWSSRAKRSGSGATNFSLLKQAGDVEENPGPTSMDWIWRILFLVGAATGAHSFEEVQLVESGGGSVQPGESLRLSCVASGFTFSRYKMNWVRQAPGKGLEWVSYISRSGRDIYYADSVKGRFTISRDNAKNSLYLQMNSLRDEDTAVYYCAGTVTTYYYDFGMDVWGQGTTVTVSSTRIQNPDPAVYQLRDSKSSDKSVCLFTDFDSQTNVSQSKDSDVYITDKCVLDMRSMDFKSNSAVAWSNKSDFACANAFNNSIIPEDTFFPSPESSCGFTSESYQQGVLSATILYEILLGKATLYAVLVSALVLMAMVKRKDSRG

SEQ ID NO: 12700 - protein, 755 aa, synthetic construct
MALPVTALLLPLALLLHAARPEVQLVESGGGLVQPGGSLRLSCAASGFSFSDFWMSWVRQAPGKGLEWVATISQAGSEKDYVDSVKGRFTISRDNAKKSLYLQMNSLRAEDTAVYYCASGVYSFDYRGQGTLVTVSSGTGGGGSGGGGSGGGGSEFQSVLTQPPSASGTPGQRVTISCSGSRSNVGGNYVFWYQQVPGATPKLLIYRSNQRPSGVPDRFAGSKSGSSASLAISGLRSEDEADYYCATWDDSLSGFVFGTGTKVTVLGLEDLKNVFPPEVAVFEPSEAEISHTQKATLVCLATGFYPDHVELSWWVNGKEVHSGVCTDPQPLKEQPALNDSRYCLSSRLRVSATFWQNPRNHFRCQVQFYGLSENDEWTQDRAKPVTQIVSAEAWGRADCDVKLVEKSFETDTNLNFQNLSVIGFRILLLKVAGFNLLMTLRLWSSRAKRSGSGATNFSLLKQAGDVEENPGPTSMDWIWRILFLVGAATGAHSFEVQLVESGGGLVKPGGSLRLSCAASGFTFSDYYMSWIRQAPGKGLEWVSYISSSGSTIYYADSVKGRFTISRDNAKNSLYLQMNSLRAEDTAVYYCARGYGKAYDQWGQGTLVTVSSTRIQNPDPAVYQLRDSKSSDKSVCLFTDFDSQTNVSQSKDSDVYITDKCVLDMRSMDFKSNSAVAWSNKSDFACANAFNNSIIPEDTFFPSPESSCGFTSESYQQGVLSATILYEILLGKATLYAVLVSALVLMAMVKRKDSRG

SEQ ID NO: 12701 - protein, 754 aa, synthetic construct
MALPVTALLLPLALLLHAARPEVQLVESGGGLVQPGGSLRLSCAASGFSFSDFWMSWVRQAPGKGLEWVATISQAGSEKDYVDSVKGRFTISRDNAKKSLYLQMNSLRAEDTAVYYCASGVYSFDYRGQGTLVTVSSGTGGGGSGGGGSGGGGSEFQSVVTQPPSMSAAPGQQVTISCSGGNSNIERNYVSWYLQLPGTAPKLVIFDNDRRPSGIPDRFSGSKSGTSATLGITGLQTGDEADYYCGTWDSSLRGWVFGGGTKLTVLGLEDLKNVFPPEVAVFEPSEAEISHTQKATLVCLATGFYPDHVELSWWVNGKEVHSGVCTDPQPLKEQPALNDSRYCLSSRLRVSATFWQNPRNHFRCQVQFYGLSENDEWTQDRAKPVTQIVSAEAWGRADCDVKLVEKSFETDTNLNFQNLSVIGFRILLLKVAGFNLLMTLRLWSSRAKRSGSGATNFSLLKQAGDVEENPGPTSMDWIWRILFLVGAATGAHSFEVQLVESGGGLIQPGGSLRLSCAASGFTFSNYAMNWVRQAPGKGLEWVSTINGRGSSTIYADSVKGRFTISRDNSKNTLYLQMNSLRAEDTATYYCARYISRGLGDSWGQGTLVTVTRIQNPDPAVYQLRDSKSSDKSVCLFTDFDSQTNVSQSKDSDVYITDKCVLDMRSMDFKSNSAVAWSNKSDFACANAFNNSIIPEDTFFPSPESSCGFTSESYQQGVLSATILYEILLGKATLYAVLVSALVLMAMVKRKDSRG

SEQ ID NO: 12702 - protein, 755 aa, synthetic construct
MALPVTALLLPLALLLHAARPEVQLVESGGGLVQPGGSLRLSCAASGFSFSDFWMSWVRQAPGKGLEWVATISQAGSEKDYVDSVKGRFTISRDNAKKSLYLQMNSLRAEDTAVYYCASGVYSFDYRGQGTLVTVSSGTGGGGSGGGGSGGGGSEFDVVMTQTPLSLPVSLGDQASISCRSSQSLVHSNGNTYLHWYLQKPGQSPKLLIYKVSNRFSGVPDRFSGSGSGTDFTLKISRVEAEDLGVYFCSQNTPVPPKFGSGTKLEIKLEDLKNVFPPEVAVFEPSEAEISHTQKATLVCLATGFYPDHVELSWWVNGKEVHSGVCTDPQPLKEQPALNDSRYCLSSRLRVSATFWQNPRNHFRCQVQFYGLSENDEWTQDRAKPVTQIVSAEAWGRADCDVKLVEKSFETDTNLNFQNLSVIGFRILLLKVAGFNLLMTLRLWSSRAKRSGSGATNFSLLKQAGDVEENPGPTSMDWIWRILFLVGAATGAHSFEQVQLQQSGAELVRPGASVKLSCKASGYTFNDYEMHWVKQTPVHGLKWIGALEPKTGDTAYSQKFKGKATLTADKSSSTAYMELRSLTSEDSAVYYCTSCYYYTYSGQGTLVTVSATRIQNPDPAVYQLRDSKSSDKSVCLFTDFDSQTNVSQSKDSDVYITDKCVLDMRSMDFKSNSAVAWSNKSDFACANAFNNSIIPEDTFFPSPESSCGFTSESYQQGVLSATILYEILLGKATLYAVLVSALVLMAMVKRKDSRG

SEQ ID NO: 12703 - protein, 754 aa, synthetic construct
MALPVTALLLPLALLLHAARPEVQLVESGGGLVQPGGSLRLSCAASGFSFSDFWMSWVRQAPGKGLEWVATISQAGSEKDYVDSVKGRFTISRDNAKKSLYLQMNSLRAEDTAVYYCASGVYSFDYRGQGTLVTVSSGTGGGGSGGGGSGGGGSEFDIQLTQSPSSLSASVGDRVTITCRASQGIRNDLGWYQQKPGKAPKRLIYAASSLQNGVPSRFSGSGSGTEFTLTISSLQPEDFATYYCLQHNTYPAFGQGTKVEIKRLEDLKNVFPPEVAVFEPSEAEISHTQKATLVCLATGFYPDHVELSWWVNGKEVHSGVCTDPQPLKEQPALNDSRYCLSSRLRVSATFWQNPRNHFRCQVQFYGLSENDEWTQDRAKPVTQIVSAEAWGRADCDVKLVEKSFETDTNLNFQNLSVIGFRILLLKVAGFNLLMTLRLWSSRAKRSGSGATNFSLLKQAGDVEENPGPTSMDWIWRILFLVGAATGAHSFEQVQLQESGPGLVKPSQTLSLTCTVSGGSISSFNYYWSWIRHHPGKGLEWIGYIYYSGSTYSNPSLKSRVTISVDTSKNQFSLTLSSVTAADTAVYYCARGYNWNYFDYWGQGTLVTVSSTRIQNPDPAVYQLRDSKSSDKSVCLFTDFDSQTNVSQSKDSDVYITDKCVLDMRSMDFKSNSAVAWSNKSDFACANAFNNSIIPEDTFFPSPESSCGFTSESYQQGVLSATILYEILLGKATLYAVLVSALVLMAMVKRKDSRG

SEQ ID NO: 12704 - protein, 756 aa, synthetic construct
MALPVTALLLPLALLLHAARPEVQLVESGGGLVQPGGSLRLSCAASGFSFSDFWMSWVRQAPGKGLEWVATISQAGSEKDYVDSVKGRFTISRDNAKKSLYLQMNSLRAEDTAVYYCASGVYSFDYRGQGTLVTVSSGTGGGGSGGGGSGGGGSEFDDIVLTQSPASLAVSLGQSVTISCRASESVEYYGTSLMQWYQQKPGQPPKLLIYATSNVESGVPARFSGSGSGTDFSLNIHPVEEDDIAMYFCQQSRKLPSTFGGGTKLEIKLEDLKNVFPPEVAVFEPSEAEISHTQKATLVCLATGFYPDHVELSWWVNGKEVHSGVCTDPQPLKEQPALNDSRYCLSSRLRVSATFWQNPRNHFRCQVQFYGLSENDEWTQDRAKPVTQIVSAEAWGRADCDVKLVEKSFETDTNLNFQNLSVIGFRILLLKVAGFNLLMTLRLWSSRAKRSGSGATNFSLLKQAGDVEENPGPTSMDWIWRILFLVGAATGAHSFEDVRLQESGPGQVKPSQTVSLTCSVTGYSITNGNHWWNWIRQVSGSKLEWIGYISSSGSTDSNPSLKSRISITRDTSKNQLFLQLNSVTTEDIATYYCARGYYFDYWGQGTTLTVSSTRIQNPDPAVYQLRDSKSSDKSVCLFTDFDSQTNVSQSKDSDVYITDKCVLDMRSMDFKSNSAVAWSNKSDFACANAFNNSIIPEDTFFPSPESSCGFTSESYQQGVLSATILYEILLGKATLYAVLVSALVLMAMVKRKDSRG

SEQ ID NO: 12705 - protein, 755 aa, synthetic construct
MALPVTALLLPLALLLHAARPEVQLVESGGGLVQPGGSLRLSCAASGFSFSDFWMSWVRQAPGKGLEWVATISQAGSEKDYVDSVKGRFTISRDNAKKSLYLQMNSLRAEDTAVYYCASGVYSFDYRGQGTLVTVSSGTGGGGSGGGGSGGGGSEFDIQMTQSPSSLSASVGDRVTITCRASQDVNTAVAWYQQKPGKAPKLLIYSASFLESGVPSRFSGSRSGTDFTLTISSLQPEDFATYYCQQHYTTPPTFGQTKVEIKRLEDLKNVFPPEVAVFEPSEAEISHTQKATLVCLATGFYPDHVELSWWVNGKEVHSGVCTDPQPLKEQPALNDSRYCLSSRLRVSATFWQNPRNHFRCQVQFYGLSENDEWTQDRAKPVTQIVSAEAWGRADCDVKLVEKSFETDTNLNFQNLSVIGFRILLLKVAGFNLLMTLRLWSSRAKRSGSGATNFSLLKQAGDVEENPGPTSMDWIWRILFLVGAATGAHSFEEVQLVESGGGLVQPGGSLRLSCAASGFNIKDTYIHWVRQAPGKGLEWVARIYPTNGYTRYADSVKGRFTISADTSKNTAYLQMNSLRAEDTAVYYCSRWGGDGFYAMDVWGQGTLVTVSSTRIQNPDPAVYQLRDSKSSDKSVCLFTDFDSQTNVSQSKDSDVYITDKCVLDMRSMDFKSNSAVAWSNKSDFACANAFNNSIIPEDTFFPSPESSCGFTSESYQQGVLSATILYEILLGKATLYAVLVSALVLMAMVKRKDSRG

SEQ ID NO: 12706 - protein, 754 aa, synthetic construct
MALPVTALLLPLALLLHAARPEVQLVESGGGLVQPGGSLRLSCAASGFSFSDFWMSWVRQAPGKGLEWVATISQAGSEKDYVDSVKGRFTISRDNAKKSLYLQMNSLRAEDTAVYYCASGVYSFDYRGQGTLVTVSSGTGGGGSGGGGSGGGGSEFDQSVLTQPPSVSVAPGKTARIPCEGNYIGSSNVHWYQQKPGQAPVLVIHFDSDRPSGIPDRFSGSNSGNMATLTISRVEAGDEADYYCQVWENHGWVFGGGTKLTVLSLEDLKNVFPPEVAVFEPSEAEISHTQKATLVCLATGFYPDHVELSWWVNGKEVHSGVCTDPQPLKEQPALNDSRYCLSSRLRVSATFWQNPRNHFRCQVQFYGLSENDEWTQDRAKPVTQIVSAEAWGRADCDVKLVEKSFETDTNLNFQNLSVIGFRILLLKVAGFNLLMTLRLWSSRAKRSGSGATNFSLLKQAGDVEENPGPTSMDWIWRILFLVGAATGAHSFEEVQLVETGGGLVQPGESLRLSCAASGFTFSDYEMNWVRQAPGKGLEWVSYISSSGSTIYYADSVKGRFTIYRDNAKNSLYLQMNSLRAEDTALYYCARAWGVGPPDYWGQGTLVTVSSTRIQNPDPAVYQLRDSKSSDKSVCLFTDFDSQTNVSQSKDSDVYITDKCVLDMRSMDFKSNSAVAWSNKSDFACANAFNNSIIPEDTFFPSPESSCGFTSESYQQGVLSATILYEILLGKATLYAVLVSALVLMAMVKRKDSRG

SEQ ID NO: 12707 - protein, 762 aa, synthetic construct
MALPVTALLLPLALLLHAARPEVQLVESGGGLVQPGGSLRLSCAASGFSFSDFWMSWVRQAPGKGLEWVATISQAGSEKDYVDSVKGRFTISRDNAKKSLYLQMNSLRAEDTAVYYCASGVYSFDYRGQGTLVTVSSGTGGGGSGGGGSGGGGSEFDIQMTQSPSSLSASVGDTVTITCQANGYLNWYQQRRGKAPKLLIYDGSKLERGVPSRFSGRRWGQEYNLTINNLQPEDIATYFCQVYEFVVPGTRLDLKRTVAAPLEDLKNVFPPEVAVFEPSEAEISHTQKATLVCLATGFYPDHVELSWWVNGKEVHSGVCTDPQPLKEQPALNDSRYCLSSRLRVSATFWQNPRNHFRCQVQFYGLSENDEWTQDRAKPVTQIVSAEAWGRADCDVKLVEKSFETDTNLNFQNLSVIGFRILLLKVAGFNLLMTLRLWSSRAKRSGSGATNFSLLKQAGDVEENPGPTSMDWIWRILFLVGAATGAHSFEQVQLLQSGAAVTKPGASVRVSCEASGYNIRDYFIHWWRQAPGQGLQWVGWINPKTGQPNNPRQFQGRVSLTRHASWDFDTFSFYMDLKALRSDDTAVYFCARQRSDYWDFDVWGSGTQVTVSSASTKGPTRIQNPDPAVYQLRDSKSSDKSVCLFTDFDSQTNVSQSKDSDVYITDKCVLDMRSMDFKSNSAVAWSNKSDFACANAFNNSIIPEDTFFPSPESSCGFTSESYQQGVLSATILYEILLGKATLYAVLVSALVLMAMVKRKDSRG

SEQ ID NO: 12708 - protein, 768 aa, synthetic construct
MALPVTALLLPLALLLHAARPEVQLVESGGGLVQPGGSLRLSCAASGFSFSDFWMSWVRQAPGKGLEWVATISQAGSEKDYVDSVKGRFTISRDNAKKSLYLQMNSLRAEDTAVYYCASGVYSFDYRGQGTLVTVSSGTGGGGSGGGGSGGGGSEFQSALTQPPSASGSPGQSITISCTGTSNNFVSWYQQHAGKAPKLVIYDVNKRPSGVPDRFSGSKSGNTASLTVSGLQTDDEAVYYCGSLVGNWDVIFGGGTKLTVLLEDLKNVFPPEVAVFEPSEAEISHTQKATLVCLATGFYPDHVELSWWVNGKEVHSGVCTDPQPLKEQPALNDSRYCLSSRLRVSATFWQNPRNHFRCQVQFYGLSENDEWTQDRAKPVTQIVSAEAWGRADCDVKLVEKSFETDTNLNFQNLSVIGFRILLLKVAGFNLLMTLRLWSSRAKRSGSGATNFSLLKQAGDVEENPGPTSMDWIWRILFLVGAATGAHSFEQPQLQESGPTLVEASETLSLTCAVSGDSTAACNSFWGWVRQPPGKGLEWVGSLSHCASYWNRGWTYHNPSLKSRLTLALDTPKNLVFLKLNSVTAADTATYYCARFGGEVLRYTDWPKPAWVDLWGRGTLVTVSSTRIQNPDPAVYQLRDSKSSDKSVCLFTDFDSQTNVSQSKDSDVYITDKCVLDMRSMDFKSNSAVAWSNKSDFACANAFNNSIIPEDTFFPSPESSCGFTSESYQQGVLSATILYEILLGKATLYAVLVSALVLMAMVKRKDSRG

SEQ ID NO: 12709 - protein, 753 aa, synthetic construct
MALPVTALLLPLALLLHAARPEVQLVESGGGLVQPGGSLRLSCAASGFSFSDFWMSWVRQAPGKGLEWVATISQAGSEKDYVDSVKGRFTISRDNAKKSLYLQMNSLRAEDTAVYYCASGVYSFDYRGQGTLVTVSSGTGGGGSGGGGSGGGGSEFEIVLTQSPGTLSLSPGETAIISCRTSQYGSLAWYQQRPGQAPRLVIYSGSTRAAGIPDRFSGSRWGPDYNLTISNLESGDFGVYYCQQYEFFGQGTKVQVDIKRLEDLKNVFPPEVAVFEPSEAEISHTQKATLVCLATGFYPDHVELSWWVNGKEVHSGVCTDPQPLKEQPALNDSRYCLSSRLRVSATFWQNPRNHFRCQVQFYGLSENDEWTQDRAKPVTQIVSAEAWGRADCDVKLVEKSFETDTNLNFQNLSVIGFRILLLKVAGFNLLMTLRLWSSRAKRSGSGATNFSLLKQAGDVEENPGPTSMDWIWRILFLVGAATGAHSFEQVQLVQSGGQMKKPGESMRISCRASGYEFIDCTLNWIRLAPGKRPEWMGWLKPRGGAVNYARPLQGRVTMTRDVYSDTAFLELRSLTVDDTAVYFCTRGKNCDYNWDFEHWGRGTPVIVSSTRIQNPDPAVYQLRDSKSSDKSVCLFTDFDSQTNVSQSKDSDVYITDKCVLDMRSMDFKSNSAVAWSNKSDFACANAFNNSIIPEDTFFPSPESSCGFTSESYQQGVLSATILYEILLGKATLYAVLVSALVLMAMVKRKDSRG

SEQ ID NO: 12710 - protein, 763 aa, synthetic construct
MALPVTALLLPLALLLHAARPEVQLVESGGGLVQPGGSLRLSCAASGFSFSDFWMSWVRQAPGKGLEWVATISQAGSEKDYVDSVKGRFTISRDNAKKSLYLQMNSLRAEDTAVYYCASGVYSFDYRGQGTLVTVSSGTGGGGSGGGGSGGGGSEFELVLTQSPGTLSLSAGERATLSCRASQSVSSGSLAWYQQKPGQAPRLLIYGASTRATGIPDRFSGSGSGTDFTLTIGRLEPEDLAVYYCQQYGTSPYTFGQGTKLEILEDLKNVFPPEVAVFEPSEAEISHTQKATLVCLATGFYPDHVELSWWVNGKEVHSGVCTDPQPLKEQPALNDSRYCLSSRLRVSATFWQNPRNHFRCQVQFYGLSENDEWTQDRAKPVTQIVSAEAWGRADCDVKLVEKSFETDTNLNFQNLSVIGFRILLLKVAGFNLLMTLRLWSSRAKRSGSGATNFSLLKQAGDVEENPGPTSMDWIWRILFLVGAATGAHSFELEQSGAEVKKPGSSVQVSCKASGGTFSMYGFNWVRQAPGHGLEWMGGIIPIFGTSNYAQKFRGRVTFTADQATSTAYMELTNLRSDDTAVYYCARDFGPDWEDGDSYDGSGRGFFDFWGQGTLVTVSSTRIQNPDPAVYQLRDSKSSDKSVCLFTDFDSQTNVSQSKDSDVYITDKCVLDMRSMDFKSNSAVAWSNKSDFACANAFNNSIIPEDTFFPSPESSCGFTSESYQQGVLSATILYEILLGKATLYAVLVSALVLMAMVKRKDSRG

SEQ ID NO: 12711 - protein, 743 aa, synthetic construct
MALPVTALLLPLALLLHAARPEVQLVESGGGLVQPGGSLRLSCAASGFSFSDFWMSWVRQAPGKGLEWVATISQAGSEKDYVDSVKGRFTISRDNAKKSLYLQMNSLRAEDTAVYYCASGVYSFDYRGQGTLVTVSSGTGGGGSGGGGSGGGGSEFDIQMTQSPSSLSASVGDRVTITCQASQDINNYLNWYQQKPGKAPKLLIYDASNLQTGVPSRFSGSGSGTDFTFTIEDIATYYCQQYTFGPGTKVDIKLEDLKNVFPPEVAVFEPSEAEISHTQKATLVCLATGFYPDHVELSWWVNGKEVHSGVCTDPQPLKEQPALNDSRYCLSSRLRVSATFWQNPRNHFRCQVQFYGLSENDEWTQDRAKPVTQIVSAEAWGRADCDVKLVEKSFETDTNLNFQNLSVIGFRILLLKVAGFNLLMTLRLWSSRAKRSGSGATNFSLLKQAGDVEENPGPTSMDWIWRILFLVGAATGAHSFEEVQLLESGGGLVQPGGSLRLSCAASGFTFSWYSMTWVRQAPGKGLEWVSSIVPWGDFTQYADSVKGRFTISRDNSKNTLYLQMNSLRAEDTAVYYCAKGPGWGSFDLWGRGTLVTVSSTRIQNPDPAVYQLRDSKSSDKSVCLFTDFDSQTNVSQSKDSDVYITDKCVLDMRSMDFKSNSAVAWSNKSDFACANAFNNSIIPEDTFFPSPESSCGFTSESYQQGVLSATILYEILLGKATLYAVLVSALVLMAMVKRKDSRG

SEQ ID NO: 12712 - protein, 753 aa, synthetic construct
MALPVTALLLPLALLLHAARPEVQLVESGGGLVQPGGSLRLSCAASGFSFSDFWMSWVRQAPGKGLEWVATISQAGSEKDYVDSVKGRFTISRDNAKKSLYLQMNSLRAEDTAVYYCASGVYSFDYRGQGTLVTVSSGTGGGGSGGGGSGGGGSEFDIQMTQSPSSLSASVGDRVTITCTASLSVSSTYLHWYQQKPGSSPKLWIYSTSNLASGVPSRFSGSGSGTSYTLTISSLQPEDFATYYCHQYHRSPLTFGGGTKVEIKRLEDLKNVFPPEVAVFEPSEAEISHTQKATLVCLATGFYPDHVELSWWVNGKEVHSGVCTDPQPLKEQPALNDSRYCLSSRLRVSATFWQNPRNHFRCQVQFYGLSENDEWTQDRAKPVTQIVSAEAWGRADCDVKLVEKSFETDTNLNFQNLSVIGFRILLLKVAGFNLLMTLRLWSSRAKRSGSGATNFSLLKQAGDVEENPGPTSMDWIWRILFLVGAATGAHSFEEVQLVESGGGLVQPGGSLRLSCAASGFSLTKYGVHWVRQAPGKGLEWVGVKWAGGSTDYNSALMSRFTISKDNAKNSLYLQMNSLRAEDTAVYYCARDHRDAMDYWGQGTLVTVSSTRIQNPDPAVYQLRDSKSSDKSVCLFTDFDSQTNVSQSKDSDVYITDKCVLDMRSMDFKSNSAVAWSNKSDFACANAFNNSIIPEDTFFPSPESSCGFTSESYQQGVLSATILYEILLGKATLYAVLVSALVLMAMVKRKDSRG

SEQ ID NO: 12713 - protein, 757 aa, synthetic construct
MALPVTALLLPLALLLHAARPEVQLVESGGGLVQPGGSLRLSCAASGFSFSDFWMSWVRQAPGKGLEWVATISQAGSEKDYVDSVKGRFTISRDNAKKSLYLQMNSLRAEDTAVYYCASGVYSFDYRGQGTLVTVSSGTGGGGSGGGGSGGGGSEFDIQMTQSPSSLSASVGDRVTITCKASQDVGTAVAWYQQKPGKAPKLLIYSASYRSTGVPSRFSGSGSGTDFTLTISSLQPEDFATYYCQHHYSAPWTFGGGTKVEIKLEDLKNVFPPEVAVFEPSEAEISHTQKATLVCLATGFYPDHVELSWWVNGKEVHSGVCTDPQPLKEQPALNDSRYCLSSRLRVSATFWQNPRNHFRCQVQFYGLSENDEWTQDRAKPVTQIVSAEAWGRADCDVKLVEKSFETDTNLNFQNLSVIGFRILLLKVAGFNLLMTLRLWSSRAKRSGSGATNFSLLKQAGDVEENPGPTSMDWIWRILFLVGAATGAHSFEEVQLVESGGGLVQPGGSLRLSCAASGFTFSRNGMSWVRQAPGKGLEWVATVSSGGSYIYYADSVKGRFTISRDNAKNSLYLQMNSLRAEDTAVYYCARQGTTALATRFFDVWGQGTLVTVSSTRIQNPDPAVYQLRDSKSSDKSVCLFTDFDSQTNVSQSKDSDVYITDKCVLDMRSMDFKSNSAVAWSNKSDFACANAFNNSIIPEDTFFPSPESSCGFTSESYQQGVLSATILYEILLGKATLYAVLVSALVLMAMVKRKDSRG

SEQ ID NO: 12714 - protein, 753 aa, synthetic construct
MALPVTALLLPLALLLHAARPEVQLVESGGGLVQPGGSLRLSCAASGFSFSDFWMSWVRQAPGKGLEWVATISQAGSEKDYVDSVKGRFTISRDNAKKSLYLQMNSLRAEDTAVYYCASGVYSFDYRGQGTLVTVSSGTGGGGSGGGGSGGGGSEFDIQMTQSPPSLSASVGGKVTITCKASQDIDRYMAWYQDKPGKGPKLLIHDTSTLQPGIPSRFSGSGSGRDYSFSISNLEPEDIATYYCLQYDNLWTFGGGTKLEIKRLEDLKNVFPPEVAVFEPSEAEISHTQKATLVCLATGFYPDHVELSWWVNGKEVHSGVCTDPQPLKEQPALNDSRYCLSSRLRVSATFWQNPRNHFRCQVQFYGLSENDEWTQDRAKPVTQIVSAEAWGRADCDVKLVEKSFETDTNLNFQNLSVIGFRILLLKVAGFNLLMTLRLWSSRAKRSGSGATNFSLLKQAGDVEENPGPTSMDWIWRILFLVGAATGAHSFEQVQLVQSGAELVKPGASVKMSCKASGYIFTNYNIHWVKKSPGQGLEWIGAIYPGNGDAPYSQKFQDRATLTADTSSSTTYMELSSLTSEDSAVYYCVRANWDVAFAYWGQGTLVSVSSTRIQNPDPAVYQLRDSKSSDKSVCLFTDFDSQTNVSQSKDSDVYITDKCVLDMRSMDFKSNSAVAWSNKSDFACANAFNNSIIPEDTFFPSPESSCGFTSESYQQGVLSATILYEILLGKATLYAVLVSALVLMAMVKRKDSRG

SEQ ID NO: 12715 - protein, 754 aa, synthetic construct
MALPVTALLLPLALLLHAARPEVQLVESGGGLVQPGGSLRLSCAASGFSFSDFWMSWVRQAPGKGLEWVATISQAGSEKDYVDSVKGRFTISRDNAKKSLYLQMNSLRAEDTAVYYCASGVYSFDYRGQGTLVTVSSGTGGGGSGGGGSGGGGSEFDIQMTQSPASLSASVGETVTITCRVSGNIHNYLAWYQQKQGKSPQLLVYNAKTLADGVPSRFSGSGSGTQYSLKINSLQPEDFGSYYCQHFWSNPYTFGGGTKLEIKLEDLKNVFPPEVAVFEPSEAEISHTQKATLVCLATGFYPDHVELSWWVNGKEVHSGVCTDPQPLKEQPALNDSRYCLSSRLRVSATFWQNPRNHFRCQVQFYGLSENDEWTQDRAKPVTQIVSAEAWGRADCDVKLVEKSFETDTNLNFQNLSVIGFRILLLKVAGFNLLMTLRLWSSRAKRSGSGATNFSLLKQAGDVEENPGPTSMDWIWRILFLVGAATGAHSFEQVQLQQSGASVKVSCKASELVRPGTGYAFTNYLIEWVKQRPGQGLEWIGVINPGSGGTNYNEKFKGKATLTADKSSSTAYMQLSSLTSDDSAVYFCARYRSYDWYFDVWGAGTTVTVSSTRIQNPDPAVYQLRDSKSSDKSVCLFTDFDSQTNVSQSKDSDVYITDKCVLDMRSMDFKSNSAVAWSNKSDFACANAFNNSIIPEDTFFPSPESSCGFTSESYQQGVLSATILYEILLGKATLYAVLVSALVLMAMVKRKDSRG

SEQ ID NO: 12716 - protein, 753 aa, synthetic construct
MALPVTALLLPLALLLHAARPEVQLVESGGGLVQPGGSLRLSCAASGFSFSDFWMSWVRQAPGKGLEWVATISQAGSEKDYVDSVKGRFTISRDNAKKSLYLQMNSLRAEDTAVYYCASGVYSFDYRGQGTLVTVSSGTGGGGSGGGGSGGGGSEFDIQMTQSFSSLSASVGDRVTITCRASQDISNYLNWYQQKPGKAPKLLIYYTSRLHSGVPSRFSGSGSGTDYTLTISSLQPEDFATYFCQQGNTLPWTFGGGTKLEIKRLEDLKNVFPPEVAVFEPSEAEISHTQKATLVCLATGFYPDHVELSWWVNGKEVHSGVCTDPQPLKEQPALNDSRYCLSSRLRVSATFWQNPRNHFRCQVQFYGLSENDEWTQDRAKPVTQIVSAEAWGRADCDVKLVEKSFETDTNLNFQNLSVIGFRILLLKVAGFNLLMTLRLWSSRAKRSGSGATNFSLLKQAGDVEENPGPTSMDWIWRILFLVGAATGAHSFEEVQLVQSGGGLVQSGGSLRLSCRASGYTFTRYWMLWVRQRPGKGLEWVAEINPRNDRTNYNEKFKTRFTISVDRSKNTLYLQMDSLRAEDTAVYFCALGGGYAMDYWGQGTLVTVSSTRIQNPDPAVYQLRDSKSSDKSVCLFTDFDSQTNVSQSKDSDVYITDKCVLDMRSMDFKSNSAVAWSNKSDFACANAFNNSIIPEDTFFPSPESSCGFTSESYQQGVLSATILYEILLGKATLYAVLVSALVLMAMVKRKDSRG

SEQ ID NO: 12717 - protein, 754 aa, synthetic construct
MALPVTALLLPLALLLHAARPEVQLVESGGGLVQPGGSLRLSCAASGFSFSDFWMSWVRQAPGKGLEWVATISQAGSEKDYVDSVKGRFTISRDNAKKSLYLQMNSLRAEDTAVYYCASGVYSFDYRGQGTLVTVSSGTGGGGSGGGGSGGGGSEFDIQMTQSPASLSASVGETVTIICRASVNIYSYLAWYQQKQGKSPQLLVYNAKILAEGVPSRFSGSGSGTQFSLKINSLQPEDFGSYYCQHHYGTFTFGSGTKLEIKRLEDLKNVFPPEVAVFEPSEAEISHTQKATLVCLATGFYPDHVELSWWVNGKEVHSGVCTDPQPLKEQPALNDSRYCLSSRLRVSATFWQNPRNHFRCQVQFYGLSENDEWTQDRAKPVTQIVSAEAWGRADCDVKLVEKSFETDTNLNFQNLSVIGFRILLLKVAGFNLLMTLRLWSSRAKRSGSGATNFSLLKQAGDVEENPGPTSMDWIWRILFLVGAATGAHSFEQVQLKESGPGLVAPSQSLSITCTISGFSLTSYGVHWVRQPPGKGLEWLVVIWSDGSTTYNSALKSRLSISKDNSKSQVFLKMNSLQTDDTAIYYCASHYGSTLAFASWGHGTLVTVSAATRIQNPDPAVYQLRDSKSSDKSVCLFTDFDSQTNVSQSKDSDVYITDKCVLDMRSMDFKSNSAVAWSNKSDFACANAFNNSIIPEDTFFPSPESSCGFTSESYQQGVLSATILYEILLGKATLYAVLVSALVLMAMVKRKDSRG

SEQ ID NO: 12718 - protein, 762 aa, synthetic construct
MALPVTALLLPLALLLHAARPEVQLVESGGGLVQPGGSLRLSCAASGFSFSDFWMSWVRQAPGKGLEWVATISQAGSEKDYVDSVKGRFTISRDNAKKSLYLQMNSLRAEDTAVYYCASGVYSFDYRGQGTLVTVSSGTGGGGSGGGGSGGGGSEFDIVMTQSHKFMSTSVGDRVSVTCKASQNVGNNVAWYQQKPGQSPKVLIYSASYRYSGVPDRFTGSGSGTDFTLTISNVQSEDLAEYFCQQYNTYPFTFGSGTKLEIKLEDLKNVFPPEVAVFEPSEAEISHTQKATLVCLATGFYPDHVELSWWVNGKEVHSGVCTDPQPLKEQPALNDSRYCLSSRLRVSATFWQNPRNHFRCQVQFYGLSENDEWTQDRAKPVTQIVSAEAWGRADCDVKLVEKSFETDTNLNFQNLSVIGFRILLLKVAGFNLLMTLRLWSSRAKRSGSGATNFSLLKQAGDVEENPGPTSMDWIWRILFLVGAATGAHSFEEVQLEESGGGLVQPGGSMKLSCVASGFTFSNYWMNWVRQSPEKGLEWVAEIRFKSHNYATHFAESVKGRFTISRDDSKSSVYLQMNNLRAEDTGIYYCTRRIGNSDYDWWYFDVWGAGTSVTVSSASTRIQNPDPAVYQLRDSKSSDKSVCLFTDFDSQTNVSQSKDSDVYITDKCVLDMRSMDFKSNSAVAWSNKSDFACANAFNNSIIPEDTFFPSPESSCGFTSESYQQGVLSATILYEILLGKATLYAVLVSALVLMAMVKRKDSRG

SEQ ID NO: 12719 - protein, 755 aa, synthetic construct
MALPVTALLLPLALLLHAARPEVQLVESGGGLVQPGGSLRLSCAASGFSFSDFWMSWVRQAPGKGLEWVATISQAGSEKDYVDSVKGRFTISRDNAKKSLYLQMNSLRAEDTAVYYCASGVYSFDYRGQGTLVTVSSGTGGGGSGGGGSGGGGSEFDQIVLTQSPAIMSASPGEKVTISCSASSSVSYMYWYQQKPGSSPKPWIYRTSNLASGVPARFSGSGSGTSYSLTISNMEAEDAAAYYCQQYHSYPTTFGGGTKLEVKLEDLKNVFPPEVAVFEPSEAEISHTQKATLVCLATGFYPDHVELSWWVNGKEVHSGVCTDPQPLKEQPALNDSRYCLSSRLRVSATFWQNPRNHFRCQVQFYGLSENDEWTQDRAKPVTQIVSAEAWGRADCDVKLVEKSFETDTNLNFQNLSVIGFRILLLKVAGFNLLMTLRLWSSRAKRSGSGATNFSLLKQAGDVEENPGPTSMDWIWRILFLVGAATGAHSFEEVQLVESGGGLVQPKGSLKLSCAASGFSFNTYAMNWVRQAPGKGLEWIAHIRSKSNNFATYYADSVKDRFSISRDASENILFLQMNNLKTEDTAMYYCVRQGGDFPMDYWGQGTSVTVSSTRIQNPDPAVYQLRDSKSSDKSVCLFTDFDSQTNVSQSKDSDVYITDKCVLDMRSMDFKSNSAVAWSNKSDFACANAFNNSIIPEDTFFPSPESSCGFTSESYQQGVLSATILYEILLGKATLYAVLVSALVLMAMVKRKDSRG

SEQ ID NO: 12720 - protein, 754 aa, synthetic construct
MALPVTALLLPLALLLHAARPEVQLVESGGGLVQPGGSLRLSCAASGFSFSDFWMSWVRQAPGKGLEWVATISQAGSEKDYVDSVKGRFTISRDNAKKSLYLQMNSLRAEDTAVYYCASGVYSFDYRGQGTLVTVSSGTGGGGSGGGGSGGGGSEFDDIQMTQSSSSFSVSLGDRVTITCMASEDIYIRLAWYQQKPGNAPRLLISAATSLETGVPSRFSGSGSGKDYTLSITSLQTEDVGTYYCQQYWSSPWTFGGGTKLEINLEDLKNVFPPEVAVFEPSEAEISHTQKATLVCLATGFYPDHVELSWWVNGKEVHSGVCTDPQPLKEQPALNDSRYCLSSRLRVSATFWQNPRNHFRCQVQFYGLSENDEWTQDRAKPVTQIVSAEAWGRADCDVKLVEKSFETDTNLNFQNLSVIGFRILLLKVAGFNLLMTLRLWSSRAKRSGSGATNFSLLKQAGDVEENPGPTSMDWIWRILFLVGAATGAHSFEDVQLQESGPGLVKPSQSLSLTCTVTGYSITSDYTWNWIRQFPGNKLEWMGYITYSGSTSYNPSLKSRNSITRDTSKNQFFLQLNSVTTEDTATYYCARLGRRYTMDYWGQGTSVTVSSTRIQNPDPAVYQLRDSKSSDKSVCLFTDFDSQTNVSQSKDSDVYITDKCVLDMRSMDFKSNSAVAWSNKSDFACANAFNNSIIPEDTFFPSPESSCGFTSESYQQGVLSATILYEILLGKATLYAVLVSALVLMAMVKRKDSRG

SEQ ID NO: 12721 - protein, 757 aa, synthetic construct
MALPVTALLLPLALLLHAARPEVQLVESGGGLVQPGGSLRLSCAASGFSFSDFWMSWVRQAPGKGLEWVATISQAGSEKDYVDSVKGRFTISRDNAKKSLYLQMNSLRAEDTAVYYCASGVYSFDYRGQGTLVTVSSGTGGGGSGGGGSGGGGSEFDDIQMTQSPSSLSASVGDRVTITCRASQSISSYLNWYQQKPGKAPKLLIYDASNLETGVPSRFSGSGSGTDFTFTISSLQPEDIATYYCQQYDNLPLTFGGGTKVDIKRLEDLKNVFPPEVAVFEPSEAEISHTQKATLVCLATGFYPDHVELSWWVNGKEVHSGVCTDPQPLKEQPALNDSRYCLSSRLRVSATFWQNPRNHFRCQVQFYGLSENDEWTQDRAKPVTQIVSAEAWGRADCDVKLVEKSFETDTNLNFQNLSVIGFRILLLKVAGFNLLMTLRLWSSRAKRSGSGATNFSLLKQAGDVEENPGPTSMDWIWRILFLVGAATGAHSFEQVQLVESGGGVVQPGRSLRLSCAASGFTFSSYAMHWVRQAPGKGLEWVAVISYDGSNKYYADSVKGRFTISRDNSKNTLYLQMNSLRAEDTAVYYCARAHNSSSWSFDYWGQGTLVTVSSTRIQNPDPAVYQLRDSKSSDKSVCLFTDFDSQTNVSQSKDSDVYITDKCVLDMRSMDFKSNSAVAWSNKSDFACANAFNNSIIPEDTFFPSPESSCGFTSESYQQGVLSATILYEILLGKATLYAVLVSALVLMAMVKRKDSRG

SEQ ID NO: 12722 - protein, 766 aa, synthetic construct
MALPVTALLLPLALLLHAARPEVQLVESGGGLVQPGGSLRLSCAASGFSFSDFWMSWVRQAPGKGLEWVATISQAGSEKDYVDSVKGRFTISRDNAKKSLYLQMNSLRAEDTAVYYCASGVYSFDYRGQGTLVTVSSGTGGGGSGGGGSGGGGSEFDDVVMTQSPLSLPVSLGDQASISCRSSQRLVHSNGNTYLHWYLQKPGQSPKLLIYRVSNRFPGVPDRFSGSGSGTDFTLKISRVEAEDLGIYFCSQSTHVPYTFGGGTKLEIKRLEDLKNVFPPEVAVFEPSEAEISHTQKATLVCLATGFYPDHVELSWWVNGKEVHSGVCTDPQPLKEQPALNDSRYCLSSRLRVSATFWQNPRNHFRCQVQFYGLSENDEWTQDRAKPVTQIVSAEAWGRADCDVKLVEKSFETDTNLNFQNLSVIGFRILLLKVAGFNLLMTLRLWSSRAKRSGSGATNFSLLKQAGDVEENPGPTSMDWIWRILFLVGAATGAHSFEEVRLQQSGPDLIKPGASVKMSCKASGYTFTGYVMHWVKQRPGQGLEWIGFINPYNDDIQSNERFRGKATLTSDKSSTTAYMELSSLTSEDSAVYYCARGAGYNFDGAYRFFDFWGQGTTLTVSSTRIQNPDPAVYQLRDSKSSDKSVCLFTDFDSQTNVSQSKDSDVYITDKCVLDMRSMDFKSNSAVAWSNKSDFACANAFNNSIIPEDTFFPSPESSCGFTSESYQQGVLSATILYEILLGKATLYAVLVSALVLMAMVKRKDSRG

SEQ ID NO: 12723 - protein, 757 aa, synthetic construct
MALPVTALLLPLALLLHAARPEVQLVESGGGLVQPGGSLRLSCAASGFSFSDFWMSWVRQAPGKGLEWVATISQAGSEKDYVDSVKGRFTISRDNAKKSLYLQMNSLRAEDTAVYYCASGVYSFDYRGQGTLVTVSSGTGGGGSGGGGSGGGGSEFDSYELTQPPSVSVSPGQTATISCSGDQLGGKYGHWYQKKPGQSPVLVLYQDRKRPAGIPERFSGSSSGNTITLTISGTQAVDEADYYCQAWDTNLGGVFGGGTKVTVLGQLEDLKNVFPPEVAVFEPSEAEISHTQKATLVCLATGFYPDHVELSWWVNGKEVHSGVCTDPQPLKEQPALNDSRYCLSSRLRVSATFWQNPRNHFRCQVQFYGLSENDEWTQDRAKPVTQIVSAEAWGRADCDVKLVEKSFETDTNLNFQNLSVIGFRILLLKVAGFNLLMTLRLWSSRAKRSGSGATNFSLLKQAGDVEENPGPTSMDWIWRILFLVGAATGAHSFEQVQLVESGAEVKKPGASVKVSCKASGYTFTGYYMHWVRQAPGQGLEWMGRINPNSGGTNYAQKFQGRVTMTRDTSISTAYMELSRLRSDDTAVYYCASPRGRGSAFDIWGQGTLVTVSSTRIQNPDPAVYQLRDSKSSDKSVCLFTDFDSQTNVSQSKDSDVYITDKCVLDMRSMDFKSNSAVAWSNKSDFACANAFNNSIIPEDTFFPSPESSCGFTSESYQQGVLSATILYEILLGKATLYAVLVSALVLMAMVKRKDSRG

SEQ ID NO: 12724 - protein, 760 aa, synthetic construct
MALPVTALLLPLALLLHAARPEVQLVESGGGLVQPGGSLRLSCAASGFSFSDFWMSWVRQAPGKGLEWVATISQAGSEKDYVDSVKGRFTISRDNAKKSLYLQMNSLRAEDTAVYYCASGVYSFDYRGQGTLVTVSSGTGGGGSGGGGSGGGGSEFDNFMLTQPHSVSESPGKTVTISCTRSSGSIASKYVQWYQQRPGSSPTTVIYEDNQRPSGVPDRFSGSIDTSSNSASLTISGLRTEDEADYYCHSYDSNNHSVFGGGTKVTVLGQLEDLKNVFPPEVAVFEPSEAEISHTQKATLVCLATGFYPDHVELSWWVNGKEVHSGVCTDPQPLKEQPALNDSRYCLSSRLRVSATFWQNPRNHFRCQVQFYGLSENDEWTQDRAKPVTQIVSAEAWGRADCDVKLVEKSFETDTNLNFQNLSVIGFRILLLKVAGFNLLMTLRLWSSRAKRSGSGATNFSLLKQAGDVEENPGPTSMDWIWRILFLVGAATGAHSFEEVQLVESGGGVVQPGGSLRLSCAASGFTFSSYAMSWVRQAPGKGLEWVSAISGSGGSTYYADSVKGRFSISRDNSKNTLYLQMNSLRAEDTAVYYCARTRSSGAFDIWGQGTLVTVSSTRIQNPDPAVYQLRDSKSSDKSVCLFTDFDSQTNVSQSKDSDVYITDKCVLDMRSMDFKSNSAVAWSNKSDFACANAFNNSIIPEDTFFPSPESSCGFTSESYQQGVLSATILYEILLGKATLYAVLVSALVLMAMVKRKDSRG

SEQ ID NO: 12725 - protein, 755 aa, synthetic construct
MALPVTALLLPLALLLHAARPEVQLVESGGGLVQPGGSLRLSCAASGFSFSDFWMSWVRQAPGKGLEWVATISQAGSEKDYVDSVKGRFTISRDNAKKSLYLQMNSLRAEDTAVYYCASGVYSFDYRGQGTLVTVSSGTGGGGSGGGGSGGGGSEFDIQMNQSPSSLSASLGDTITITCHASQNINVWLSWYQQKPGNIPKLLIYKASNLHTGVPSRFSGSGSGTGFTITISSLQPEDIATYYCQQGQSYPWTFGGGTKLEIKRLEDLKNVFPPEVAVFEPSEAEISHTQKATLVCLATGFYPDHVELSWWVNGKEVHSGVCTDPQPLKEQPALNDSRYCLSSRLRVSATFWQNPRNHFRCQVQFYGLSENDEWTQDRAKPVTQIVSAEAWGRADCDVKLVEKSFETDTNLNFQNLSVIGFRILLLKVAGFNLLMTLRLWSSRAKRSGSGATNFSLLKQAGDVEENPGPTSMDWIWRILFLVGAATGAHSFEEVQLQQSGPELVKPGASVKISCKASGYSFTGYFMNWVKQSHGKSLEYIGRFNPYNGETLYNQKFKGKATLTVDKSSSTVHMELLSVTSEDSAVYYCGRSGNDDAMDYWGQGTSVTVSSATRIQNPDPAVYQLRDSKSSDKSVCLFTDFDSQTNVSQSKDSDVYITDKCVLDMRSMDFKSNSAVAWSNKSDFACANAFNNSIIPEDTFFPSPESSCGFTSESYQQGVLSATILYEILLGKATLYAVLVSALVLMAMVKRKDSRG

SEQ ID NO: 12726 - protein, 756 aa, synthetic construct
MALPVTALLLPLALLLHAARPEVQLVESGGGLVQPGGSLRLSCAASGFSFSDFWMSWVRQAPGKGLEWVATISQAGSEKDYVDSVKGRFTISRDNAKKSLYLQMNSLRAEDTAVYYCASGVYSFDYRGQGTLVTVSSGTGGGGSGGGGSGGGGSEFEIVLTQSPATLSLSPGERATLSCRASQSVRSYLAWYQQKPGQAPRLLIYDASNRATGIPARFSGSGSGTDFTLTISSLEPEDFAVYYCQQRSNWPPTFGQGTKVEIKLEDLKNVFPPEVAVFEPSEAEISHTQKATLVCLATGFYPDHVELSWWVNGKEVHSGVCTDPQPLKEQPALNDSRYCLSSRLRVSATFWQNPRNHFRCQVQFYGLSENDEWTQDRAKPVTQIVSAEAWGRADCDVKLVEKSFETDTNLNFQNLSVIGFRILLLKVAGFNLLMTLRLWSSRAKRSGSGATNFSLLKQAGDVEENPGPTSMDWIWRILFLVGAATGAHSFEQLQVQESGPGLVKPSETLSLTCTVSGGSISNSYFSWGWIRQPPGKGLEWIGSFYYGEKTYYNPSLKSRATISIDTSKSQFSLKLSSVTAADTAVYYCPRGPTMIRGVIDSWGQGTLVTVSSTRIQNPDPAVYQLRDSKSSDKSVCLFTDFDSQTNVSQSKDSDVYITDKCVLDMRSMDFKSNSAVAWSNKSDFACANAFNNSIIPEDTFFPSPESSCGFTSESYQQGVLSATILYEILLGKATLYAVLVSALVLMAMVKRKDSRG

SEQ ID NO: 12727 - protein, 765 aa, synthetic construct
MALPVTALLLPLALLLHAARPEVQLVESGGGLVQPGGSLRLSCAASGFSFSDFWMSWVRQAPGKGLEWVATISQAGSEKDYVDSVKGRFTISRDNAKKSLYLQMNSLRAEDTAVYYCASGVYSFDYRGQGTLVTVSSGTGGGGSGGGGSGGGGSEFDIVMTQTPLSLPVTPGEPASISCRSSRSLLDSDDGNTYLDWYLQKPGQSPQLLIYTLSYRASGVPDRFSGSGSGTDFTLKISRVEAEDVGVYYCMQRVEFPITFGQGTRLEIKRLEDLKNVFPPEVAVFEPSEAEISHTQKATLVCLATGFYPDHVELSWWVNGKEVHSGVCTDPQPLKEQPALNDSRYCLSSRLRVSATFWQNPRNHFRCQVQFYGLSENDEWTQDRAKPVTQIVSAEAWGRADCDVKLVEKSFETDTNLNFQNLSVIGFRILLLKVAGFNLLMTLRLWSSRAKRSGSGATNFSLLKQAGDVEENPGPTSMDWIWRILFLVGAATGAHSFEQVQLVESGGGVVQPGRSLRLSCAASGFIFSRYGMHWVRQAPGKGLKWVAVIWYDGSNKLYADSVKGRFTISRDNSKNTLYLQMNSLRAEDTAVYYCARDYYDNSRHHWGFDYWGQGTLVTVSSTRIQNPDPAVYQLRDSKSSDKSVCLFTDFDSQTNVSQSKDSDVYITDKCVLDMRSMDFKSNSAVAWSNKSDFACANAFNNSIIPEDTFFPSPESSCGFTSESYQQGVLSATILYEILLGKATLYAVLVSALVLMAMVKRKDSRG

SEQ ID NO: 12728 - protein, 755 aa, synthetic construct
MALPVTALLLPLALLLHAARPEVQLVESGGGLVQPGGSLRLSCAASGFSFSDFWMSWVRQAPGKGLEWVATISQAGSEKDYVDSVKGRFTISRDNAKKSLYLQMNSLRAEDTAVYYCASGVYSFDYRGQGTLVTVSSGTGGGGSGGGGSGGGGSEFEIQMTQSPSSMSASLGDTITITCQATQDIFKNLNWYQQKPGKPPSLLIYYATELAEGVPSRFSGSGSGSDYSLTISNLESEDFAAYYCLQFFEFPFTFGSGTKLEMKLEDLKNVFPPEVAVFEPSEAEISHTQKATLVCLATGFYPDHVELSWWVNGKEVHSGVCTDPQPLKEQPALNDSRYCLSSRLRVSATFWQNPRNHFRCQVQFYGLSENDEWTQDRAKPVTQIVSAEAWGRADCDVKLVEKSFETDTNLNFQNLSVIGFRILLLKVAGFNLLMTLRLWSSRAKRSGSGATNFSLLKQAGDVEENPGPTSMDWIWRILFLVGAATGAHSFEQVQLQQSGAELVRPGTSVKVSCKASGYVFTNYWIEWIKQRPGQGLEWIGVMNPGSGETTYNEKFKGKATLTADKSSSTAYMQLSSLTSVDSAVYFCARDHDRDYYAMDYWGQGTSVTVSSTRIQNPDPAVYQLRDSKSSDKSVCLFTDFDSQTNVSQSKDSDVYITDKCVLDMRSMDFKSNSAVAWSNKSDFACANAFNNSIIPEDTFFPSPESSCGFTSESYQQGVLSATILYEILLGKATLYAVLVSALVLMAMVKRKDSRG

SEQ ID NO: 12729 - protein, 752 aa, synthetic construct
MALPVTALLLPLALLLHAARPEVQLVESGGGLVQPGGSLRLSCAASGFSFSDFWMSWVRQAPGKGLEWVATISQAGSEKDYVDSVKGRFTISRDNAKKSLYLQMNSLRAEDTAVYYCASGVYSFDYRGQGTLVTVSSGTGGGGSGGGGSGGGGSEFDILLTQSPAILSVSPGERVSFSCRASQNIGTSIHWYQQRTNGSPRLLIKYASESVSGIPSRFSGSGSGTDFTLSINSVESEDIADYYCQHTNSWPTTFGGGTKLEIKRLEDLKNVFPPEVAVFEPSEAEISHTQKATLVCLATGFYPDHVELSWWVNGKEVHSGVCTDPQPLKEQPALNDSRYCLSSRLRVSATFWQNPRNHFRCQVQFYGLSENDEWTQDRAKPVTQIVSAEAWGRADCDVKLVEKSFETDTNLNFQNLSVIGFRILLLKVAGFNLLMTLRLWSSRAKRSGSGATNFSLLKQAGDVEENPGPTSMDWIWRILFLVGAATGAHSFEQVQLQQSDAELVKPGASVKISCKASGYTFTDHAIHWVKQKPEQGLEWIGYFSPGNGDIKYNEKFKGKATLTADKSSSTAYMQLNSLTSEDSAVYFCKRSYGNYDYWGQGTTLTVSSTRIQNPDPAVYQLRDSKSSDKSVCLFTDFDSQTNVSQSKDSDVYITDKCVLDMRSMDFKSNSAVAWSNKSDFACANAFNNSIIPEDTFFPSPESSCGFTSESYQQGVLSATILYEILLGKATLYAVLVSALVLMAMVKRKDSRG

SEQ ID NO: 12730 - protein, 757 aa, synthetic construct
MALPVTALLLPLALLLHAARPEVQLVESGGGLVQPGGSLRLSCAASGFSFSDFWMSWVRQAPGKGLEWVATISQAGSEKDYVDSVKGRFTISRDNAKKSLYLQMNSLRAEDTAVYYCASGVYSFDYRGQGTLVTVSSGTGGGGSGGGGSGGGGSEFDIVMTQSPDSLAVSLGERATINCKSSQSLLNSGDQKNYLTWYQQKPGQPPKLLIYWASTRESGVPDRFSGSGSGTDFTLTISSLQAEDVAVYYCQNDYSYPLTFGQGTKVEIKLEDLKNVFPPEVAVFEPSEAEISHTQKATLVCLATGFYPDHVELSWWVNGKEVHSGVCTDPQPLKEQPALNDSRYCLSSRLRVSATFWQNPRNHFRCQVQFYGLSENDEWTQDRAKPVTQIVSAEAWGRADCDVKLVEKSFETDTNLNFQNLSVIGFRILLLKVAGFNLLMTLRLWSSRAKRSGSGATNFSLLKQAGDVEENPGPTSMDWIWRILFLVGAATGAHSFEQVQLVQSGAEVKKTGSSVKVSCKASGYTFTDHAIHVWRQAPGQALEWMGHFSPGNTDIKYNDKFKGRVTLTVDRSMSTAYMELSSLRSEDTAMYYCKTSTFFFDYWGQGTMVTVSSTRIQNPDPAVYQLRDSKSSDKSVCLFTDFDSQTNVSQSKDSDVYITDKCVLDMRSMDFKSNSAVAWSNKSDFACANAFNNSIIPEDTFFPSPESSCGFTSESYQQGVLSATILYEILLGKATLYAVLVSALVLMAMVKRKDSRG

SEQ ID NO: 12731 - protein, 756 aa, synthetic construct
MALPVTALLLPLALLLHAARPEVQLVESGGGLVQPGGSLRLSCAASGFSFSDFWMSWVRQAPGKGLEWVATISQAGSEKDYVDSVKGRFTISRDNAKKSLYLQMNSLRAEDTAVYYCASGVYSFDYRGQGTLVTVSSGTGGGGSGGGGSGGGGSEFDIQMTQSPSSLSASVGDRVTITCKASQDVSIAVAWYQQKPGKAPKVLIYSASYRYTGVPDRFSGSGSGTDFTFTISSLQPEDIAVYYCQQHYITPLTFGGGTKVEIKLEDLKNVFPPEVAVFEPSEAEISHTQKATLVCLATGFYPDHVELSWWVNGKEVHSGVCTDPQPLKEQPALNDSRYCLSSRLRVSATFWQNPRNHFRCQVQFYGLSENDEWTQDRAKPVTQIVSAEAWGRADCDVKLVEKSFETDTNLNFQNLSVIGFRILLLKVAGFNLLMTLRLWSSRAKRSGSGATNFSLLKQAGDVEENPGPTSMDWIWRILFLVGAATGAHSFEQIQLVQSGHEVKKPGASVKVSCKASGYTFTNYGMNWVRQAPGQGLEWMGWINTKTGEPTYAEEFKGRFVFSLETSASTAYLQISSLKAEDTAMYFCGRGGYGSSYWYFDVWGQGTTVTVSSTRIQNPDPAVYQLRDSKSSDKSVCLFTDFDSQTNVSQSKDSDVYITDKCVLDMRSMDFKSNSAVAWSNKSDFACANAFNNSIIPEDTFFPSPESSCGFTSESYQQGVLSATILYEILLGKATLYAVLVSALVLMAMVKRKDSRG

SEQ ID NO: 12732 - protein, 758 aa, synthetic construct
MALPVTALLLPLALLLHAARPEVQLVESGGGLVQPGGSLRLSCAASGFSFSDFWMSWVRQAPGKGLEWVATISQAGSEKDYVDSVKGRFTISRDNAKKSLYLQMNSLRAEDTAVYYCASGVYSFDYRGQGTLVTVSSGTGGGGSGGGGSGGGGSEFDIVMTQSPDSLAVSLGERATINCRASKSVSTSGYSYMHWYQQKPGQPPKLLIYLASNLESGVPDRFSGSGSGTDFTLTISSLQAEDVAVYYCQHSRELPYTFGQGTKLEIKLEDLKNVFPPEVAVFEPSEAEISHTQKATLVCLATGFYPDHVELSWWVNGKEVHSGVCTDPQPLKEQPALNDSRYCLSSRLRVSATFWQNPRNHFRCQVQFYGLSENDEWTQDRAKPVTQIVSAEAWGRADCDVKLVEKSFETDTNLNFQNLSVIGFRILLLKVAGFNLLMTLRLWSSRAKRSGSGATNFSLLKQAGDVEENPGPTSMDWIWRILFLVGAATGAHSFEQVQLQESGPGLVKPSETLSLTCTVSGGSISSYGVHWIRQPPGKGLEWIGVIWTSGVTDYNSALMGRVTISVDTSKNQFSLKLSSVTAADTAVYYCARDGDYDRYTMDYWGQGTLVTVSSTRIQNPDPAVYQLRDSKSSDKSVCLFTDFDSQTNVSQSKDSDVYITDKCVLDMRSMDFKSNSAVAWSNKSDFACANAFNNSIIPEDTFFPSPESSCGFTSESYQQGVLSATILYEILLGKATLYAVLVSALVLMAMVKRKDSRG

SEQ ID NO: 12733 - protein, 758 aa, synthetic construct
MALPVTALLLPLALLLHAARPEVQLVESGGGLVQPGGSLRLSCAASGFSFSDFWMSWVRQAPGKGLEWVATISQAGSEKDYVDSVKGRFTISRDNAKKSLYLQMNSLRAEDTAVYYCASGVYSFDYRGQGTLVTVSSGTGGGGSGGGGSGGGGSEFDIQMTQSPSSLSASVGDRVTITCRASQSIGTSLHWYQQKPGKAPKLLIKFASRLQSGVPSRFSGSGSGTDFTLTISSLQPEDFATYYCQQSPGFPPTFGQGTKLEIKRLEDLKNVFPPEVAVFEPSEAEISHTQKATLVCLATGFYPDHVELSWWVNGKEVHSGVCTDPQPLKEQPALNDSRYCLSSRLRVSATFWQNPRNHFRCQVQFYGLSENDEWTQDRAKPVTQIVSAEAWGRADCDVKLVEKSFETDTNLNFQNLSVIGFRILLLKVAGFNLLMTLRLWSSRAKRSGSGATNFSLLKQAGDVEENPGPTSMDWIWRILFLVGAATGAHSFEQVQLVESGGGLVKPGGSLRLSCAASGFSITTSGYYWTWIRQFPGKGLEWMGYIGYNSKTYYNPALKSRITISRDNAKNSLYLQMNSLRAEDTAVYYCARSLYGGYKDAFDSWGQGTLVTVSSTRIQNPDPAVYQLRDSKSSDKSVCLFTDFDSQTNVSQSKDSDVYITDKCVLDMRSMDFKSNSAVAWSNKSDFACANAFNNSIIPEDTFFPSPESSCGFTSESYQQGVLSATILYEILLGKATLYAVLVSALVLMAMVKRKDSRG

SEQ ID NO: 12734 - protein, 763 aa, synthetic construct
MALPVTALLLPLALLLHAARPEVQLVESGGGLVQPGGSLRLSCAASGFSFSDFWMSWVRQAPGKGLEWVATISQAGSEKDYVDSVKGRFTISRDNAKKSLYLQMNSLRAEDTAVYYCASGVYSFDYRGQGTLVTVSSGTGGGGSGGGGSGGGGSEFDEIVLTQSPLSLPVTPGEPASISCRSSQSLLHSIGYNYLDWYLQKPGQSPQLLIYLGSNRASGVPDRFSGSGSGTDFTLKISRVEAEDVGVYYCMQALQTPLTFGGGTKVEIKRLEDLKNVFPPEVAVFEPSEAEISHTQKATLVCLATGFYPDHVELSWWVNGKEVHSGVCTDPQPLKEQPALNDSRYCLSSRLRVSATFWQNPRNHFRCQVQFYGLSENDEWTQDRAKPVTQIVSAEAWGRADCDVKLVEKSFETDTNLNFQNLSVIGFRILLLKVAGFNLLMTLRLWSSRAKRSGSGATNFSLLKQAGDVEENPGPTSMDWIWRILFLVGAATGAHSFEEVQLVESGGGVVQPGRSLRLSCAASGFTFRSYGMHWVRQAPGKGLEWVAVISYDGSNKYYTDSVNGRFTISRDNSKNTLYLQMNSLRAEDTAVYYCARGGGYYETSGPDYWGQGTLVTVSSTRIQNPDPAVYQLRDSKSSDKSVCLFTDFDSQTNVSQSKDSDVYITDKCVLDMRSMDFKSNSAVAWSNKSDFACANAFNNSIIPEDTFFPSPESSCGFTSESYQQGVLSATILYEILLGKATLYAVLVSALVLMAMVKRKDSRG

SEQ ID NO: 12735 - protein, 761 aa, synthetic construct
MALPVTALLLPLALLLHAARPEVQLVESGGGLVQPGGSLRLSCAASGFSFSDFWMSWVRQAPGKGLEWVATISQAGSEKDYVDSVKGRFTISRDNAKKSLYLQMNSLRAEDTAVYYCASGVYSFDYRGQGTLVTVSSGTGGGGSGGGGSGGGGSEFDDVVMTQSPLSLPVTPGEPASISCRSSQSLLHSIGYNYLHWFLQKPGQSPQLLIYLGSNRASGVPDRFSGSGSGTDFTLKISRVEAEDVGVYYCMQALQTPPTFGQGTRLEIKRLEDLKNVFPPEVAVFEPSEAEISHTQKATLVCLATGFYPDHVELSWWVNGKEVHSGVCTDPQPLKEQPALNDSRYCLSSRLRVSATFWQNPRNHFRCQVQFYGLSENDEWTQDRAKPVTQIVSAEAWGRADCDVKLVEKSFETDTNLNFQNLSVIGFRILLLKVAGFNLLMTLRLWSSRAKRSGSGATNFSLLKQAGDVEENPGPTSMDWIWRILFLVGAATGAHSFEQLQLQESGPGLVKPSGTLSLTCAVSGGSISSSNWWSWVRQPPGKGLEWIGEIYHSGSTNYNPSLKSRVTISVDKSKNQFSLKLSSVTAADTAVYYCVGSPYGDYVLDYWGQGTLVTVSSTRIQNPDPAVYQLRDSKSSDKSVCLFTDFDSQTNVSQSKDSDVYITDKCVLDMRSMDFKSNSAVAWSNKSDFACANAFNNSIIPEDTFFPSPESSCGFTSESYQQGVLSATILYEILLGKATLYAVLVSALVLMAMVKRKDSRG

SEQ ID NO: 12736 - protein, 759 aa, synthetic construct
MALPVTALLLPLALLLHAARPEVQLVESGGGLVQPGGSLRLSCAASGFSFSDFWMSWVRQAPGKGLEWVATISQAGSEKDYVDSVKGRFTISRDNAKKSLYLQMNSLRAEDTAVYYCASGVYSFDYRGQGTLVTVSSGTGGGGSGGGGSGGGGSEFDEIVLTQSPGTLSLSLGERATLSCRASQSISSSFLAWYQQKPGQAPKLLIYAASTRATGIPDRFSGSGSGTDFTLTISRLEPEDFAVYYCQQYGRSLSFGGGTKVEVKLEDLKNVFPPEVAVFEPSEAEISHTQKATLVCLATGFYPDHVELSWWVNGKEVHSGVCTDPQPLKEQPALNDSRYCLSSRLRVSATFWQNPRNHFRCQVQFYGLSENDEWTQDRAKPVTQIVSAEAWGRADCDVKLVEKSFETDTNLNFQNLSVIGFRILLLKVAGFNLLMTLRLWSSRAKRSGSGATNFSLLKQAGDVEENPGPTSMDWIWRILFLVGAATGAHSFEQVQLQQSGPGLVKPSQTLSLTCAISGDSVSGNSATWNWIRQSPSRGLEWLGRTYYRSKWNHDYAESVKSRITINPDTSKNQFSLQLNSVTPEDTAVYYCARGDSSSWYAFDYWGQGTLVTVSSTRIQNPDPAVYQLRDSKSSDKSVCLFTDFDSQTNVSQSKDSDVYITDKCVLDMRSMDFKSNSAVAWSNKSDFACANAFNNSIIPEDTFFPSPESSCGFTSESYQQGVLSATILYEILLGKATLYAVLVSALVLMAMVKRKDSRG

SEQ ID NO: 12737 - protein, 758 aa, synthetic construct
MALPVTALLLPLALLLHAARPEVQLVESGGGLVQPGGSLRLSCAASGFSFSDFWMSWVRQAPGKGLEWVATISQAGSEKDYVDSVKGRFTISRDNAKKSLYLQMNSLRAEDTAVYYCASGVYSFDYRGQGTLVTVSSGTGGGGSGGGGSGGGGSEFDQSVVTQPPSVSVAPGKTARITCGRNNIGSKSVHWYQQKPGQAPVLVVYDDSDRPSGIPERFSGSNSGNTATLTISRVEAGDEADYYCQVWDSSSDHVVFGGGTKLTVLGLEDLKNVFPPEVAVFEPSEAEISHTQKATLVCLATGFYPDHVELSWWVNGKEVHSGVCTDPQPLKEQPALNDSRYCLSSRLRVSATFWQNPRNHFRCQVQFYGLSENDEWTQDRAKPVTQIVSAEAWGRADCDVKLVEKSFETDTNLNFQNLSVIGFRILLLKVAGFNLLMTLRLWSSRAKRSGSGATNFSLLKQAGDVEENPGPTSMDWIWRILFLVGAATGAHSFEVQLVQSGGGVMRPGGSLRLSCAASGFTFDDYGMSWVRQAPGKGLEWVSGINWNGGSTGYADSVRGRFTISRDNAKNSLYLQMNSLRAEDTALYYCARERGYGYHDPHDYWGQGTLVTVSSTRIQNPDPAVYQLRDSKSSDKSVCLFTDFDSQTNVSQSKDSDVYITDKCVLDMRSMDFKSNSAVAWSNKSDFACANAFNNSIIPEDTFFPSPESSCGFTSESYQQGVLSATILYEILLGKATLYAVLVSALVLMAMVKRKDSRG

SEQ ID NO: 12738 - protein, 771 aa, synthetic construct
MALPVTALLLPLALLLHAARPEVQLVESGGGLVQPGGSLRLSCAASGFSFSDFWMSWVRQAPGKGLEWVATISQAGSEKDYVDSVKGRFTISRDNAKKSLYLQMNSLRAEDTAVYYCASGVYSFDYRGQGTLVTVSSGTGGGGSGGGGSGGGGSEFEQKLISEEDLEFQAVVTQPPSASGTPGQRVTISCSGSSSNIGSNTVNWYQQVPGTAPKLLIYSNNQRPSGVPDRFSGSKSGTSASLAISGLQSEDEADYYCAAWDDSLNGWVFGGGTKLTVLLEDLKNVFPPEVAVFEPSEAEISHTQKATLVCLATGFYPDHVELSWWVNGKEVHSGVCTDPQPLKEQPALNDSRYCLSSRLRVSATFWQNPRNHFRCQVQFYGLSENDEWTQDRAKPVTQIVSAEAWGRADCDVKLVEKSFETDTNLNFQNLSVIGFRILLLKVAGFNLLMTLRLWSSRAKRSGSGATNFSLLKQAGDVEENPGPTSMDWIWRILFLVGAATGAHSFEQMQLVQSGAEVKEPGESLRISCKGSGYSFTNFWISWVRQMPGKGLEWMGRVDPGYSYSTYSPSFQGHVTISADKSTSTAYLQWNSLKASDTAMYYCARVQYSGYYDWFDPWGQGTLVTVSSTRIQNPDPAVYQLRDSKSSDKSVCLFTDFDSQTNVSQSKDSDVYITDKCVLDMRSMDFKSNSAVAWSNKSDFACANAFNNSIIPEDTFFPSPESSCGFTSESYQQGVLSATILYEILLGKATLYAVLVSALVLMAMVKRKDSRG

SEQ ID NO: 12739 - protein, 765 aa, synthetic construct
MALPVTALLLPLALLLHAARPEVQLVESGGGLVQPGGSLRLSCAASGFSFSDFWMSWVRQAPGKGLEWVATISQAGSEKDYVDSVKGRFTISRDNAKKSLYLQMNSLRAEDTAVYYCASGVYSFDYRGQGTLVTVSSGTGGGGSGGGGSGGGGSEFEQKLISEEDLEFDIQMTQSPSTLSASVGDRVTITCRASQNINKWLAWYQQRPGKAPQLLIYKASSLESGVPSRFSGSGSGTEYTLTISSLQPDDFATYYCQQYNSYATFGQGTKVEIKRLEDLKNVFPPEVAVFEPSEAEISHTQKATLVCLATGFYPDHVELSWWVNGKEVHSGVCTDPQPLKEQPALNDSRYCLSSRLRVSATFWQNPRNHFRCQVQFYGLSENDEWTQDRAKPVTQIVSAEAWGRADCDVKLVEKSFETDTNLNFQNLSVIGFRILLLKVAGFNLLMTLRLWSSRAKRSGSGATNFSLLKQAGDVEENPGPTSMDWIWRILFLVGAATGAHSFEQVQLVQSGAEVKKPGESLKISCKGSGYNFSNKWIGWVRQLPGRGLEWIAIIYPGYSDITYSPSFQGRVTISADTSINTAYLHWHSLKASDTAMYYCVRHTALAGFDYWGLGTLVTVSSTRIQNPDPAVYQLRDSKSSDKSVCLFTDFDSQTNVSQSKDSDVYITDKCVLDMRSMDFKSNSAVAWSNKSDFACANAFNNSIIPEDTFFPSPESSCGFTSESYQQGVLSATILYEILLGKATLYAVLVSALVLMAMVKRKDSRG

SEQ ID NO: 12740 - protein, 756 aa, synthetic construct
MALPVTALLLPLALLLHAARPEVQLVESGGGLVQPGGSLRLSCAASGFSFSDFWMSWVRQAPGKGLEWVATISQAGSEKDYVDSVKGRFTISRDNAKKSLYLQMNSLRAEDTAVYYCASGVYSFDYRGQGTLVTVSSGTGGGGSGGGGSGGGGSEFIVLTQSPASLAVSLGQRATISCRASESVDNYGNTFMHWYQQKPGQPPKLLIYRASNLESGIPARFSGSGSRTDFTLTINPVEADDVATYYCQQSNEDPPTFGAGTKLELKLEDLKNVFPPEVAVFEPSEAEISHTQKATLVCLATGFYPDHVELSWWVNGKEVHSGVCTDPQPLKEQPALNDSRYCLSSRLRVSATFWQNPRNHFRCQVQFYGLSENDEWTQDRAKPVTQIVSAEAWGRADCDVKLVEKSFETDTNLNFQNLSVIGFRILLLKVAGFNLLMTLRLWSSRAKRSGSGATNFSLLKQAGDVEENPGPTSMDWIWRILFLVGAATGAHSFEQIQLVQSGPELKKPGETVKISCKASGYIFTNYGMNWVKQAPGKSFKWMGWINTYTGESTYSADFKGRFAFSLETSASTAYLHINDLKNEDTATYFCARSGGYDPMDYWGQGTSVTVSSTRIQNPDPAVYQLRDSKSSDKSVCLFTDFDSQTNVSQSKDSDVYITDKCVLDMRSMDFKSNSAVAWSNKSDFACANAFNNSIIPEDTFFPSPESSCGFTSESYQQGVLSATILYEILLGKATLYAVLVSALVLMAMVKRKDSRG

SEQ ID NO: 12741 - protein, 755 aa, synthetic construct
MALPVTALLLPLALLLHAARPEVQLVESGGGLVQPGGSLRLSCAASGFSFSDFWMSWVRQAPGKGLEWVATISQAGSEKDYVDSVKGRFTISRDNAKKSLYLQMNSLRAEDTAVYYCASGVYSFDYRGQGTLVTVSSGTGGGGSGGGGSGGGGSEFEIVLTQSPGTLSLSPGERATLSCRASQSVSNTYLAWYHQRPGQAPRLLIYGASSRATGIPDRFSGSGSGTDFALTISSLEPEDFAVYYCQQYSNSWTFGQGTKVEIKRLEDLKNVFPPEVAVFEPSEAEISHTQKATLVCLATGFYPDHVELSWWVNGKEVHSGVCTDPQPLKEQPALNDSRYCLSSRLRVSATFWQNPRNHFRCQVQFYGLSENDEWTQDRAKPVTQIVSAEAWGRADCDVKLVEKSFETDTNLNFQNLSVIGFRILLLKVAGFNLLMTLRLWSSRAKRSGSGATNFSLLKQAGDVEENPGPTSMDWIWRILFLVGAATGAHSFEQVQLVESGGGVVQPGRSLRLSCAASGFTFSSYDMHWVRQAPGKGLEWVAVISYDGTNEYYADSVKGRFTISRDTSKNTLYLQMNSLRAEDTAVYYCARERYFDWSFDYWGQGTLVSVSSTRIQNPDPAVYQLRDSKSSDKSVCLFTDFDSQTNVSQSKDSDVYITDKCVLDMRSMDFKSNSAVAWSNKSDFACANAFNNSIIPEDTFFPSPESSCGFTSESYQQGVLSATILYEILLGKATLYAVLVSALVLMAMVKRKDSRG

SEQ ID NO: 12742 - protein, 754 aa, synthetic construct
MALPVTALLLPLALLLHAARPEVQLVESGGGLVQPGGSLRLSCAASGFSFSDFWMSWVRQAPGKGLEWVATISQAGSEKDYVDSVKGRFTISRDNAKKSLYLQMNSLRAEDTAVYYCASGVYSFDYRGQGTLVTVSSGTGGGGSGGGGSGGGGSEFELTQDPAVSVALGQTVRITCQGDSLRSNYANWYQQKPGQAPVLVIYGQNNRPSGIPDRFSGSSSGNTASLTITGAQAADEADYYCDSRVSTGNHVVFGGGTKLTVLGQLEDLKNVFPPEVAVFEPSEAEISHTQKATLVCLATGFYPDHVELSWWVNGKEVHSGVCTDPQPLKEQPALNDSRYCLSSRLRVSATFWQNPRNHFRCQVQFYGLSENDEWTQDRAKPVTQIVSAEAWGRADCDVKLVEKSFETDTNLNFQNLSVIGFRILLLKVAGFNLLMTLRLWSSRAKRSGSGATNFSLLKQAGDVEENPGPTSMDWIWRILFLVGAATGAHSFEEVQLVQSGAEVKKPGASVKVSCKASGYTFTSYAMHWVRQAPGQRLEWMGWINAGNGNTKYSQKFQGRVTITRDTSASTAYMELSSLRSEDTAVYYCARDISYGSFDYWGQGTLVTVSSTRIQNPDPAVYQLRDSKSSDKSVCLFTDFDSQTNVSQSKDSDVYITDKCVLDMRSMDFKSNSAVAWSNKSDFACANAFNNSIIPEDTFFPSPESSCGFTSESYQQGVLSATILYEILLGKATLYAVLVSALVLMAMVKRKDSRG

SEQ ID NO: 12743 - protein, 756 aa, synthetic construct
MALPVTALLLPLALLLHAARPEVQLVESGGGLVQPGGSLRLSCAASGFSFSDFWMSWVRQAPGKGLEWVATISQAGSEKDYVDSVKGRFTISRDNAKKSLYLQMNSLRAEDTAVYYCASGVYSFDYRGQGTLVTVSSGTGGGGSGGGGSGGGGSEFDIVLTQTPATLSVTPGDSVSLSCRASQSISNNLHWYQQKSHESPRLLIKNASQSISGIPSKFSGSGSGTDFTLRINSVETEDFGMYFCQQSNSWPYTFGSGTKLEIKLEDLKNVFPPEVAVFEPSEAEISHTQKATLVCLATGFYPDHVELSWWVNGKEVHSGVCTDPQPLKEQPALNDSRYCLSSRLRVSATFWQNPRNHFRCQVQFYGLSENDEWTQDRAKPVTQIVSAEAWGRADCDVKLVEKSFETDTNLNFQNLSVIGFRILLLKVAGFNLLMTLRLWSSRAKRSGSGATNFSLLKQAGDVEENPGPTSMDWIWRILFLVGAATGAHSFEQVKLQQSGPELVKPGASVKISCKASGYSFTGYYMHWVKQSHGNILDWIGYIYPYNGVSSYNQKFKGKATLTVDKSSSTAYMELRSLTSEDSAVYYCARERGLYQLRAMDYWGQGTSVTVSSTRIQNPDPAVYQLRDSKSSDKSVCLFTDFDSQTNVSQSKDSDVYITDKCVLDMRSMDFKSNSAVAWSNKSDFACANAFNNSIIPEDTFFPSPESSCGFTSESYQQGVLSATILYEILLGKATLYAVLVSALVLMAMVKRKDSRG

SEQ ID NO: 12744 - protein, 747 aa, synthetic construct
MALPVTALLLPLALLLHAARPEVQLVESGGGLVQPGGSLRLSCAASGFSFSDFWMSWVRQAPGKGLEWVATISQAGSEKDYVDSVKGRFTISRDNAKKSLYLQMNSLRAEDTAVYYCASGVYSFDYRGQGTLVTVSSGTGGGGSGGGGSGGGGSEFDIVMTQTPAIMSASPGQKVTITCSASSSVNYMHWYQQKLGSSPKLWIYDTSKLAPGVPARFSGSGSGTSYSLTISSMEAEDAASYFCHQWSSYPYTFGSGTKLEIKLEDLKNVFPPEVAVFEPSEAEISHTQKATLVCLATGFYPDHVELSWWVNGKEVHSGVCTDPQPLKEQPALNDSRYCLSSRLRVSATFWQNPRNHFRCQVQFYGLSENDEWTQDRAKPVTQIVSAEAWGRADCDVKLVEKSFETDTNLNFQNLSVIGFRILLLKVAGFNLLMTLRLWSSRAKRSGSGATNFSLLKQAGDVEENPGPTSMDWIWRILFLVGAATGAHSFEEVQLQESGPDLVKPSQSLSLTCTVTGYSITSGYGWHWIRQFPGNKLEWMGYIHYSGSTTYNPSLKSRISISRDTSKNQFFLQLNSVTTEDTATYYCARSLRYWGQGTTLTVSSTRIQNPDPAVYQLRDSKSSDKSVCLFTDFDSQTNVSQSKDSDVYITDKCVLDMRSMDFKSNSAVAWSNKSDFACANAFNNSIIPEDTFFPSPESSCGFTSESYQQGVLSATILYEILLGKATLYAVLVSALVLMAMVKRKDSRG

SEQ ID NO: 12745 - protein, 750 aa, synthetic construct
MALPVTALLLPLALLLHAARPEVQLVESGGGLVQPGGSLRLSCAASGFSFSDFWMSWVRQAPGKGLEWVATISQAGSEKDYVDSVKGRFTISRDNAKKSLYLQMNSLRAEDTAVYYCASGVYSFDYRGQGTLVTVSSGTGGGGSGGGGSGGGGSEFDIQMTQSPSSLSASVGDRVTITCSATSSISYMHWYQQKPGKAPKGWIYDTSKLAHGVPSRFSGSGSGTDFTLTISSLQPEDFATYYCHQRRSYPFTFGQGTKVEIKLEDLKNVFPPEVAVFEPSEAEISHTQKATLVCLATGFYPDHVELSWWVNGKEVHSGVCTDPQPLKEQPALNDSRYCLSSRLRVSATFWQNPRNHFRCQVQFYGLSENDEWTQDRAKPVTQIVSAEAWGRADCDVKLVEKSFETDTNLNFQNLSVIGFRILLLKVAGFNLLMTLRLWSSRAKRSGSGATNFSLLKQAGDVEENPGPTSMDWIWRILFLVGAATGAHSFEEVQLVQSGAEVKKPGASVKVSCKASGYTFTNFWIHWVRQAPGQGLEWIGEIDPSDSYTNYNQKFKGRVTITRDTSTSTAYLELSSLRSEDTAVYYCAREITTVDYWGQGTLVTVSSTRIQNPDPAVYQLRDSKSSDKSVCLFTDFDSQTNVSQSKDSDVYITDKCVLDMRSMDFKSNSAVAWSNKSDFACANAFNNSIIPEDTFFPSPESSCGFTSESYQQGVLSATILYEILLGKATLYAVLVSALVLMAMVKRKDSRG

SEQ ID NO: 12746 - protein, 757 aa, synthetic construct
MALPVTALLLPLALLLHAARPEVQLVESGGGLVQPGGSLRLSCAASGFSFSDFWMSWVRQAPGKGLEWVATISQAGSEKDYVDSVKGRFTISRDNAKKSLYLQMNSLRAEDTAVYYCASGVYSFDYRGQGTLVTVSSGTGGGGSGGGGSGGGGSEFDIQMTQSPSSLSASVGDRVTITCKASQGFNKYVAWYQQKPGKAPKLLIYYTSTLQPGVPSRFSGSGSGRDYTLTISSLQPEDFATYYCLQYGNLLYAFGQGTKVEIKRLEDLKNVFPPEVAVFEPSEAEISHTQKATLVCLATGFYPDHVELSWWVNGKEVHSGVCTDPQPLKEQPALNDSRYCLSSRLRVSATFWQNPRNHFRCQVQFYGLSENDEWTQDRAKPVTQIVSAEAWGRADCDVKLVEKSFETDTNLNFQNLSVIGFRILLLKVAGFNLLMTLRLWSSRAKRSGSGATNFSLLKQAGDVEENPGPTSMDWIWRILFLVGAATGAHSFEEVQLVQSGAEVKKPGASVKVSCKASGYTFTSYWIGWVRQAPGQGLEWIGDIYPGGGYTNYNEKFKGRVTITRDTSTSTAYLELSSLRSEDTAVYYCARLDGSSYRGAMDSWGQGTLVTVSSTRIQNPDPAVYQLRDSKSSDKSVCLFTDFDSQTNVSQSKDSDVYITDKCVLDMRSMDFKSNSAVAWSNKSDFACANAFNNSIIPEDTFFPSPESSCGFTSESYQQGVLSATILYEILLGKATLYAVLVSALVLMAMVKRKDSRG

SEQ ID NO: 12747 - protein, 753 aa, synthetic construct
MALPVTALLLPLALLLHAARPEVQLVESGGGLVQPGGSLRLSCAASGFSFSDFWMSWVRQAPGKGLEWVATISQAGSEKDYVDSVKGRFTISRDNAKKSLYLQMNSLRAEDTAVYYCASGVYSFDYRGQGTLVTVSSGTGGGGSGGGGSGGGGSEFDIQMTQSPSSLSASVGDRVTITCRASQDIRYYLNWYQQKPGKAPKLLIYVASSLQSGVPSRFSGSGSGTEFTLTVSSLQPEDFATYYCLQVYSTPRTFGQGTKVEIKLEDLKNVFPPEVAVFEPSEAEISHTQKATLVCLATGFYPDHVELSWWVNGKEVHSGVCTDPQPLKEQPALNDSRYCLSSRLRVSATFWQNPRNHFRCQVQFYGLSENDEWTQDRAKPVTQIVSAEAWGRADCDVKLVEKSFETDTNLNFQNLSVIGFRILLLKVAGFNLLMTLRLWSSRAKRSGSGATNFSLLKQAGDVEENPGPTSMDWIWRILFLVGAATGAHSFEEVQLVESGGGLAKPGGSLRLSCAASGFRFTFNNYYMDWVRQAPGQGLEWVSRISSSGDPTWYADSVKGRFTISRENAKNTLFLQMNSLRAEDTAVYYCASLTTGSDSWGQGVLVTVSSTRIQNPDPAVYQLRDSKSSDKSVCLFTDFDSQTNVSQSKDSDVYITDKCVLDMRSMDFKSNSAVAWSNKSDFACANAFNNSIIPEDTFFPSPESSCGFTSESYQQGVLSATILYEILLGKATLYAVLVSALVLMAMVKRKDSRG

SEQ ID NO: 12748 - protein, 754 aa, synthetic construct
MALPVTALLLPLALLLHAARPEVQLVESGGGLVQPGGSLRLSCAASGFSFSDFWMSWVRQAPGKGLEWVATISQAGSEKDYVDSVKGRFTISRDNAKKSLYLQMNSLRAEDTAVYYCASGVYSFDYRGQGTLVTVSSGTGGGGSGGGGSGGGGSEFEIVMTQSPATLSVSPGERATLSCRASQSVSRNLAWYQQKPGQAPRLLIYGASTRATGIPARFSGSGSGTEFTLTIGSLQSEDFAVYYCQQYKTWPRTFGQGTNVEIKLEDLKNVFPPEVAVFEPSEAEISHTQKATLVCLATGFYPDHVELSWWVNGKEVHSGVCTDPQPLKEQPALNDSRYCLSSRLRVSATFWQNPRNHFRCQVQFYGLSENDEWTQDRAKPVTQIVSAEAWGRADCDVKLVEKSFETDTNLNFQNLSVIGFRILLLKVAGFNLLMTLRLWSSRAKRSGSGATNFSLLKQAGDVEENPGPTSMDWIWRILFLVGAATGAHSFEQVQLQQWGAGLLKPSETLSLTCAVFGGSFSGYYWSWIRQPPGKGLEWIGEINHRGNTNDNPSLKSRVTISVDTSKNQFALKLSSVTAADTAVYYCARERGYTYGNFDHWGQGTLVTVSSTRIQNPDPAVYQLRDSKSSDKSVCLFTDFDSQTNVSQSKDSDVYITDKCVLDMRSMDFKSNSAVAWSNKSDFACANAFNNSIIPEDTFFPSPESSCGFTSESYQQGVLSATILYEILLGKATLYAVLVSALVLMAMVKRKDSRG

SEQ ID NO: 12749 - protein, 755 aa, synthetic construct
MALPVTALLLPLALLLHAARPEVQLVESGGGLVQPGGSLRLSCAASGFSFSDFWMSWVRQAPGKGLEWVATISQAGSEKDYVDSVKGRFTISRDNAKKSLYLQMNSLRAEDTAVYYCASGVYSFDYRGQGTLVTVSSGTGGGGSGGGGSGGGGSEFEIVMTPSSATLSVSPGERATLSCRASQSVSRNLAWYQQKPGQAPRLLIYGASTRATGIPARFSGSGSGTEFTLTISSLQSEDFAVYYCHQYSNWMCSFGQGTKLEIKLEDLKNVFPPEVAVFEPSEAEISHTQKATLVCLATGFYPDHVELSWWVNGKEVHSGVCTDPQPLKEQPALNDSRYCLSSRLRVSATFWQNPRNHFRCQVQFYGLSENDEWTQDRAKPVTQIVSAEAWGRADCDVKLVEKSFETDTNLNFQNLSVIGFRILLLKVAGFNLLMTLRLWSSRAKRSGSGATNFSLLKQAGDVEENPGPTSMDWIWRILFLVGAATGAHSFEEVQLLESGGGLVQPGGSLRLSCAASGFTFSRYAMNWVRQAPGKGLEWVSGISGSGGRTYYADSVKGRFTISRDNSKNTLYLQMNSLRAEDTAVYYCAKDRDFWSGPFDYWGQGTLVTVSSTRIQNPDPAVYQLRDSKSSDKSVCLFTDFDSQTNVSQSKDSDVYITDKCVLDMRSMDFKSNSAVAWSNKSDFACANAFNNSIIPEDTFFPSPESSCGFTSESYQQGVLSATILYEILLGKATLYAVLVSALVLMAMVKRKDSRG

SEQ ID NO: 12750 - protein, 760 aa, synthetic construct
MALPVTALLLPLALLLHAARPEVQLVESGGGLVQPGGSLRLSCAASGFSFSDFWMSWVRQAPGKGLEWVATISQAGSEKDYVDSVKGRFTISRDNAKKSLYLQMNSLRAEDTAVYYCASGVYSFDYRGQGTLVTVSSGTGGGGSGGGGSGGGGSEFDIQMTQSPSSLSASVGDRVTITCKASKNIRSYLAWYQQKPGKAPKLLIYSGSTLHSGVPSRFSGSGSGTDFTLTISSLQPEDFATYYCQQHHEYPLTFGQGTKVEIKRLEDLKNVFPPEVAVFEPSEAEISHTQKATLVCLATGFYPDHVELSWWVNGKEVHSGVCTDPQPLKEQPALNDSRYCLSSRLRVSATFWQNPRNHFRCQVQFYGLSENDEWTQDRAKPVTQIVSAEAWGRADCDVKLVEKSFETDTNLNFQNLSVIGFRILLLKVAGFNLLMTLRLWSSRAKRSGSGATNFSLLKQAGDVEENPGPTSMDWIWRILFLVGAATGAHSFEQVQLQESGPGLVKPSETLSLTCTVSGYTITSGYDWSWIRQPPGKGLEWIGYINYGGSTNYKPSLGSRVTISVDTSKNQFSLKLSSVTAADTAVYYCARYNEYKSYIYDWYFDFWGQGTLVTVSSTRIQNPDPAVYQLRDSKSSDKSVCLFTDFDSQTNVSQSKDSDVYITDKCVLDMRSMDFKSNSAVAWSNKSDFACANAFNNSIIPEDTFFPSPESSCGFTSESYQQGVLSATILYEILLGKATLYAVLVSALVLMAMVKRKDSRG

SEQ ID NO: 12751 - protein, 762 aa, synthetic construct
MALPVTALLLPLALLLHAARPEVQLVESGGGLVQPGGSLRLSCAASGFSFSDFWMSWVRQAPGKGLEWVATISQAGSEKDYVDSVKGRFTISRDNAKKSLYLQMNSLRAEDTAVYYCASGVYSFDYRGQGTLVTVSSGTGGGGSGGGGSGGGGSEFQSVVTQPPSVSAAPGQKVTISCSGSSSNIGNNYVSWYQQLPGTAPKLLIYDNNKRPSGIPDRFSGSKSGTSATLGITGLQTGDEADYYCGTWDGSLYTMLFGGGTKLTVLLEDLKNVFPPEVAVFEPSEAEISHTQKATLVCLATGFYPDHVELSWWVNGKEVHSGVCTDPQPLKEQPALNDSRYCLSSRLRVSATFWQNPRNHFRCQVQFYGLSENDEWTQDRAKPVTQIVSAEAWGRADCDVKLVEKSFETDTNLNFQNLSVIGFRILLLKVAGFNLLMTLRLWSSRAKRSGSGATNFSLLKQAGDVEENPGPTSMDWIWRILFLVGAATGAHSFEEVQLVESGGGLVKPGGSLRLSCAASGFTFSNAWMSWVRQAPGKGLEWVGFIRSKAYGGTTEYAASVKGRFTISRDDSKSIAYLQMNNLKTEDTAVYYCARDGLYSSSWYDSDYWGQGTLVTVSSTRIQNPDPAVYQLRDSKSSDKSVCLFTDFDSQTNVSQSKDSDVYITDKCVLDMRSMDFKSNSAVAWSNKSDFACANAFNNSIIPEDTFFPSPESSCGFTSESYQQGVLSATILYEILLGKATLYAVLVSALVLMAMVKRKDSRG

SEQ ID NO: 12752 - protein, 767 aa, synthetic construct
MALPVTALLLPLALLLHAARPEVQLVESGGGLVQPGGSLRLSCAASGFSFSDFWMSWVRQAPGKGLEWVATISQAGSEKDYVDSVKGRFTISRDNAKKSLYLQMNSLRAEDTAVYYCASGVYSFDYRGQGTLVTVSSGTGGGGSGGGGSGGGGSEFQSVLTQPPSVSGAPGQRVTISCTGSSSNIGAGYDVHWYQQLPGTAPKLLIFGNSNRPSGVPDRFSGFKSGTSASLAITGLQAEDEADYFCQSYDSSLSGSGVFGTGTKVTVLGLEDLKNVFPPEVAVFEPSEAEISHTQKATLVCLATGFYPDHVELSWWVNGKEVHSGVCTDPQPLKEQPALNDSRYCLSSRLRVSATFWQNPRNHFRCQVQFYGLSENDEWTQDRAKPVTQIVSAEAWGRADCDVKLVEKSFETDTNLNFQNLSVIGFRILLLKVAGFNLLMTLRLWSSRAKRSGSGATNFSLLKQAGDVEENPGPTSMDWIWRILFLVGAATGAHSFEQMQLVQSGGGLVQPGRSLRLSCAASGFTFDDYAMHWVRQAPGKGLEWVSGISWNSGSIGYADSVKGRFTISRDNAKNSLYLQMNSLRAEDTALYYCAKDIHSGSYYGLLYYAMDVWGQGTTVTVSSTRIQNPDPAVYQLRDSKSSDKSVCLFTDFDSQTNVSQSKDSDVYITDKCVLDMRSMDFKSNSAVAWSNKSDFACANAFNNSIIPEDTFFPSPESSCGFTSESYQQGVLSATILYEILLGKATLYAVLVSALVLMAMVKRKDSRG

SEQ ID NO: 12753 - protein, 767 aa, synthetic construct
MALPVTALLLPLALLLHAARPEVQLVESGGGLVQPGGSLRLSCAASGFSFSDFWMSWVRQAPGKGLEWVATISQAGSEKDYVDSVKGRFTISRDNAKKSLYLQMNSLRAEDTAVYYCASGVYSFDYRGQGTLVTVSSGTGGGGSGGGGSGGGGSEFLPVLTQPPSASGTPGQRVTISCSGRSSNIGSNSVNWYRQLPGAAPKLLIYSNNQRPPGVPVRFSGSKSGTSASLAISGLQSEDEATYYCATWDDNLNVHYVFGTGTKVTVLGSRLEDLKNVFPPEVAVFEPSEAEISHTQKATLVCLATGFYPDHVELSWWVNGKEVHSGVCTDPQPLKEQPALNDSRYCLSSRLRVSATFWQNPRNHFRCQVQFYGLSENDEWTQDRAKPVTQIVSAEAWGRADCDVKLVEKSFETDTNLNFQNLSVIGFRILLLKVAGFNLLMTLRLWSSRAKRSGSGATNFSLLKQAGDVEENPGPTSMDWIWRILFLVGAATGAHSFELEMAQVQLVQSGAEVKKPGSSVKVSCKASGGTFSSYAISWVRQAPGQGLEWMGRIIPILGIANYAQKFQGRVTITADKSTSTAYMELSSLRSEDTAVYYCARGGYYSHDMWSEDWGQGTLVTVSSTRIQNPDPAVYQLRDSKSSDKSVCLFTDFDSQTNVSQSKDSDVYITDKCVLDMRSMDFKSNSAVAWSNKSDFACANAFNNSIIPEDTFFPSPESSCGFTSESYQQGVLSATILYEILLGKATLYAVLVSALVLMAMVKRKDSRG

SEQ ID NO: 12754 - protein, 761 aa, synthetic construct
MALPVTALLLPLALLLHAARPEVQLVESGGGLVQPGGSLRLSCAASGFSFSDFWMSWVRQAPGKGLEWVATISQAGSEKDYVDSVKGRFTISRDNAKKSLYLQMNSLRAEDTAVYYCASGVYSFDYRGQGTLVTVSSGTGGGGSGGGGSGGGGSEFDFVMTQSPDSLAVSLGERVTMSCKSSQSLLNSGNQKNYLTWYQQKPGQPPKLLIYWASTRESGVPDRFSGSGSGTDFTLTISSLQAEDVAVYYCQNDYSYPYTFGQGTKLEIKLEDLKNVFPPEVAVFEPSEAEISHTQKATLVCLATGFYPDHVELSWWVNGKEVHSGVCTDPQPLKEQPALNDSRYCLSSRLRVSATFWQNPRNHFRCQVQFYGLSENDEWTQDRAKPVTQIVSAEAWGRADCDVKLVEKSFETDTNLNFQNLSVIGFRILLLKVAGFNLLMTLRLWSSRAKRSGSGATNFSLLKQAGDVEENPGPTSMDWIWRILFLVGAATGAHSFEEVQLVQSGAELKKPGASVKVSCKASGYTFTDYYMKWVRQAPGQGLEWIGDIIPSNGATFYNQKFKGRVTITVDKSTSTAYMELSSLRSEDTAVYYCARSHLLRASWFAYWGQGTLVTVSSTRIQNPDPAVYQLRDSKSSDKSVCLFTDFDSQTNVSQSKDSDVYITDKCVLDMRSMDFKSNSAVAWSNKSDFACANAFNNSIIPEDTFFPSPESSCGFTSESYQQGVLSATILYEILLGKATLYAVLVSALVLMAMVKRKDSRG

SEQ ID NO: 12755 - protein, 761 aa, synthetic construct
MALPVTALLLPLALLLHAARPEVQLVESGGGLVQPGGSLRLSCAASGFSFSDFWMSWVRQAPGKGLEWVATISQAGSEKDYVDSVKGRFTISRDNAKKSLYLQMNSLRAEDTAVYYCASGVYSFDYRGQGTLVTVSSGTGGGGSGGGGSGGGGSEFDFVMTQSPDSLAVSLGERVTMSCKSSQSLLNSGNQKNYLTWYQQKPGQPPKLLIYWASTRESGVPDRFSGSGSGTDFTLTISSLQAEDVAVYYCQNDYSYPYTFGQGTKLEIKLEDLKNVFPPEVAVFEPSEAEISHTQKATLVCLATGFYPDHVELSWWVNGKEVHSGVCTDPQPLKEQPALNDSRYCLSSRLRVSATFWQNPRNHFRCQVQFYGLSENDEWTQDRAKPVTQIVSAEAWGRADCDVKLVEKSFETDTNLNFQNLSVIGFRILLLKVAGFNLLMTLRLWSSRAKRSGSGATNFSLLKQAGDVEENPGPTSMDWIWRILFLVGAATGAHSFEQVQLVQSGAELKKPGASVKVSCKASGYTFTDYYMKWVRQAPGQGLEWIGDIIPSNGATFYNQKFKGRVTITVDKSTSTAYMELSSLRSEDTAVYYCARSHLLRASWFAYWGQGTLVTVSSTRIQNPDPAVYQLRDSKSSDKSVCLFTDFDSQTNVSQSKDSDVYITDKCVLDMRSMDFKSNSAVAWSNKSDFACANAFNNSIIPEDTFFPSPESSCGFTSESYQQGVLSATILYEILLGKATLYAVLVSALVLMAMVKRKDSRG

SEQ ID NO: 12756 - protein, 751 aa, synthetic construct
MALPVTALLLPLALLLHAARPEVQLVESGGGLVQPGGSLRLSCAASGFSFSDFWMSWVRQAPGKGLEWVATISQAGSEKDYVDSVKGRFTISRDNAKKSLYLQMNSLRAEDTAVYYCASGVYSFDYRGQGTLVTVSSGTGGGGSGGGGSGGGGSEFDVQITQSPSYLAASPGETITINCRASKSISKDLAWYQEKPGKTNKLLIYSGSTLQSGIPSRFSGSGSGTDFTLTISSLEPEDFAMYYCQQHNKYPYTFGGGTKLEIKRLEDLKNVFPPEVAVFEPSEAEISHTQKATLVCLATGFYPDHVELSWWVNGKEVHSGVCTDPQPLKEQPALNDSRYCLSSRLRVSATFWQNPRNHFRCQVQFYGLSENDEWTQDRAKPVTQIVSAEAWGRADCDVKLVEKSFETDTNLNFQNLSVIGFRILLLKVAGFNLLMTLRLWSSRAKRSGSGATNFSLLKQAGDVEENPGPTSMDWIWRILFLVGAATGAHSFEQVQLQQPGAELVRPGASVKLSCKASGYTFTSYWMNWVKQRPDQGLEWIGRIDPYDSETHYNQKFKDKAILTVDKSSSTAYMQLSSLTSEDSAVYYCARGNWDDYWGQGTTLTVSSTRIQNPDPAVYQLRDSKSSDKSVCLFTDFDSQTNVSQSKDSDVYITDKCVLDMRSMDFKSNSAVAWSNKSDFACANAFNNSIIPEDTFFPSPESSCGFTSESYQQGVLSATILYEILLGKATLYAVLVSALVLMAMVKRKDSRG

SEQ ID NO: 12757 - protein, 753 aa, synthetic construct
MALPVTALLLPLALLLHAARPEVQLVESGGGLVQPGGSLRLSCAASGFSFSDFWMSWVRQAPGKGLEWVATISQAGSEKDYVDSVKGRFTISRDNAKKSLYLQMNSLRAEDTAVYYCASGVYSFDYRGQGTLVTVSSGTGGGGSGGGGSGGGGSEFEIVLTQSPTSMTASPGEQVTITCRASSSINYMHWYQQKPGASPRPWIYETSKLASGVPDRFSGSASGTSYSLTINNMEAEDAATYYCQQWNYPSWTFGGGTKLELKLEDLKNVFPPEVAVFEPSEAEISHTQKATLVCLATGFYPDHVELSWWVNGKEVHSGVCTDPQPLKEQPALNDSRYCLSSRLRVSATFWQNPRNHFRCQVQFYGLSENDEWTQDRAKPVTQIVSAEAWGRADCDVKLVEKSFETDTNLNFQNLSVIGFRILLLKVAGFNLLMTLRLWSSRAKRSGSGATNFSLLKQAGDVEENPGPTSMDWIWRILFLVGAATGAHSFEEVQLVESGGGLVQPGRSLKLSCAASGFTFSDYNMAWVRQAPKKGLEWVATILYDGGRTYYRGSVKGRFTISRDNAKSTLYLRMDSLRSEDTATYYCATHSRGTDYFDYWGQGVMVTVSSTRIQNPDPAVYQLRDSKSSDKSVCLFTDFDSQTNVSQSKDSDVYITDKCVLDMRSMDFKSNSAVAWSNKSDFACANAFNNSIIPEDTFFPSPESSCGFTSESYQQGVLSATILYEILLGKATLYAVLVSALVLMAMVKRKDSRG

SEQ ID NO: 12758 - protein, 762 aa, synthetic construct
MALPVTALLLPLALLLHAARPEVQLVESGGGLVQPGGSLRLSCAASGFSFSDFWMSWVRQAPGKGLEWVATISQAGSEKDYVDSVKGRFTISRDNAKKSLYLQMNSLRAEDTAVYYCASGVYSFDYRGQGTLVTVSSGTGGGGSGGGGSGGGGSEFDIVMTQSPSSLAVSEGETVTINCKSSQSFLSSGDGKNYVAWYQYKPGQSPKLLIYWASTRQSGVPDRFIGSGSGTDFTLTISTVQAEDLAIYYCQQYYDTPLTFGSGTKLEIKLEDLKNVFPPEVAVFEPSEAEISHTQKATLVCLATGFYPDHVELSWWVNGKEVHSGVCTDPQPLKEQPALNDSRYCLSSRLRVSATFWQNPRNHFRCQVQFYGLSENDEWTQDRAKPVTQIVSAEAWGRADCDVKLVEKSFETDTNLNFQNLSVIGFRILLLKVAGFNLLMTLRLWSSRAKRSGSGATNFSLLKQAGDVEENPGPTSMDWIWRILFLVGAATGAHSFEEVKLQESGPSLVQSSQTLSLTCTVSGFSLTSYHIHWVRQTPGKGLEWMGVMWSDGDTSYNSALKSRLSISRDTSQSQVFLKMNSLQTEDTATYYCARGYYSSYLYLWFAYWGQGTLVTVSSTRIQNPDPAVYQLRDSKSSDKSVCLFTDFDSQTNVSQSKDSDVYITDKCVLDMRSMDFKSNSAVAWSNKSDFACANAFNNSIIPEDTFFPSPESSCGFTSESYQQGVLSATILYEILLGKATLYAVLVSALVLMAMVKRKDSRG

SEQ ID NO: 12759 - protein, 766 aa, synthetic construct
MALPVTALLLPLALLLHAARPEVQLVESGGGLVQPGGSLRLSCAASGFSFSDFWMSWVRQAPGKGLEWVATISQAGSEKDYVDSVKGRFTISRDNAKKSLYLQMNSLRAEDTAVYYCASGVYSFDYRGQGTLVTVSSGTGGGGSGGGGSGGGGSEFDVLMTQTPVSLPVSLGGQVSISCRSSQSLVHSDGDTYLHWYLQKPGQSPQLLIYRVSNRFSGVPDRFSGSGSGTDFTLKISRVEPEDLGLYYCLQTTHFPPWTFGGGTKLEMKLEDLKNVFPPEVAVFEPSEAEISHTQKATLVCLATGFYPDHVELSWWVNGKEVHSGVCTDPQPLKEQPALNDSRYCLSSRLRVSATFWQNPRNHFRCQVQFYGLSENDEWTQDRAKPVTQIVSAEAWGRADCDVKLVEKSFETDTNLNFQNLSVIGFRILLLKVAGFNLLMTLRLWSSRAKRSGSGATNFSLLKQAGDVEENPGPTSMDWIWRILFLVGAATGAHSFEQVQLQQSGPELRRPGSSVRLSCKASGYRIKDFLIHWIKNRPEHGLEWIGWIDPEDGETKYAQKFQTKATLTADTSSNTAYMQLSSLTSEDTATYFCARWGDVYYGLMRGHVMDAWGQGTSVTVSSTRIQNPDPAVYQLRDSKSSDKSVCLFTDFDSQTNVSQSKDSDVYITDKCVLDMRSMDFKSNSAVAWSNKSDFACANAFNNSIIPEDTFFPSPESSCGFTSESYQQGVLSATILYEILLGKATLYAVLVSALVLMAMVKRKDSRG

SEQ ID NO: 12760 - protein, 761 aa, synthetic construct
MALPVTALLLPLALLLHAARPEVQLVESGGGLVQPGGSLRLSCAASGFSFSDFWMSWVRQAPGKGLEWVATISQAGSEKDYVDSVKGRFTISRDNAKKSLYLQMNSLRAEDTAVYYCASGVYSFDYRGQGTLVTVSSGTGGGGSGGGGSGGGGSEFDIVMTQSPATLSLSPGERATLSCRSSKSLQNVNGNTYLYWFQQKPGQSPQLLIYRMSNLNSGVPDRFSGSGSGTEFTLTISSLEPEDFAVYYCMQHLEYPITFGAGTKLEIKLEDLKNVFPPEVAVFEPSEAEISHTQKATLVCLATGFYPDHVELSWWVNGKEVHSGVCTDPQPLKEQPALNDSRYCLSSRLRVSATFWQNPRNHFRCQVQFYGLSENDEWTQDRAKPVTQIVSAEAWGRADCDVKLVEKSFETDTNLNFQNLSVIGFRILLLKVAGFNLLMTLRLWSSRAKRSGSGATNFSLLKQAGDVEENPGPTSMDWIWRILFLVGAATGAHSFEEVQLVESGGGLVKPGGSLKLSCAASGYTFTSYVMHWVRQAPGKGLEWIGYINPYNDGTKYNEKFQGRVTISSDKSISTAYMELSSLRSEDTAMYYCARGTYYYGTRVFDYWGQGTLVTVSSTRIQNPDPAVYQLRDSKSSDKSVCLFTDFDSQTNVSQSKDSDVYITDKCVLDMRSMDFKSNSAVAWSNKSDFACANAFNNSIIPEDTFFPSPESSCGFTSESYQQGVLSATILYEILLGKATLYAVLVSALVLMAMVKRKDSRG

SEQ ID NO: 12761 - protein, 757 aa, synthetic construct
MALPVTALLLPLALLLHAARPEVQLVESGGGLVQPGGSLRLSCAASGFSFSDFWMSWVRQAPGKGLEWVATISQAGSEKDYVDSVKGRFTISRDNAKKSLYLQMNSLRAEDTAVYYCASGVYSFDYRGQGTLVTVSSGTGGGGSGGGGSGGGGSEFDIQMTQSPSSLSASVGDRVTITCKASDHINNWLAWYQQKPGQAPKLLIYGATTLETGVPSRFSGSGSGTDYTLTISSLQPEDFATYYCQQSWNTPWTFGQGTKLEIKRLEDLKNVFPPEVAVFEPSEAEISHTQKATLVCLATGFYPDHVELSWWVNGKEVHSGVCTDPQPLKEQPALNDSRYCLSSRLRVSATFWQNPRNHFRCQVQFYGLSENDEWTQDRAKPVTQIVSAEAWGRADCDVKLVEKSFETDTNLNFQNLSVIGFRILLLKVAGFNLLMTLRLWSSRAKRSGSGATNFSLLKQAGDVEENPGPTSMDWIWRILFLVGAATGAHSFEQVQLQQPGAELVKPGASVKMSCKASGYAFSSYWINWMKQKPGQGLEWIGQIYPGDGDTNYNGKFKGRATLTADTSSSTAYMQLSSLTSEDSAVYFCARSITTVVGCAMDYWGQGTSVTVSSTRIQNPDPAVYQLRDSKSSDKSVCLFTDFDSQTNVSQSKDSDVYITDKCVLDMRSMDFKSNSAVAWSNKSDFACANAFNNSIIPEDTFFPSPESSCGFTSESYQQGVLSATILYEILLGKATLYAVLVSALVLMAMVKRKDSRG

SEQ ID NO: 12762 - protein, 759 aa, synthetic construct
MALPVTALLLPLALLLHAARPEVQLVESGGGLVQPGGSLRLSCAASGFSFSDFWMSWVRQAPGKGLEWVATISQAGSEKDYVDSVKGRFTISRDNAKKSLYLQMNSLRAEDTAVYYCASGVYSFDYRGQGTLVTVSSGTGGGGSGGGGSGGGGSEFQIVLSQSPAILSASPGEKVTMTCRASSSVSYMHWYQQKPGSSPKPWIYATSNLASGVPARFSGSGSGTSYSFTISRVEAEDAATYYCQQWTFNPPTFGGGTRLEIKRTVAALEDLKNVFPPEVAVFEPSEAEISHTQKATLVCLATGFYPDHVELSWWVNGKEVHSGVCTDPQPLKEQPALNDSRYCLSSRLRVSATFWQNPRNHFRCQVQFYGLSENDEWTQDRAKPVTQIVSAEAWGRADCDVKLVEKSFETDTNLNFQNLSVIGFRILLLKVAGFNLLMTLRLWSSRAKRSGSGATNFSLLKQAGDVEENPGPTSMDWIWRILFLVGAATGAHSFEQAYLQQSGAELVRPGASVKMSCKASGYTFTSYNMHWVKQTPRQGLEWIGGIYPGNGDTSYNQKFKGKATLTVGKSSSTAYMQLSSLTSEDSAVYFCARYDYNYAMDYWGQGTSVTVSSASTRIQNPDPAVYQLRDSKSSDKSVCLFTDFDSQTNVSQSKDSDVYITDKCVLDMRSMDFKSNSAVAWSNKSDFACANAFNNSIIPEDTFFPSPESSCGFTSESYQQGVLSATILYEILLGKATLYAVLVSALVLMAMVKRKDSRG

SEQ ID NO: 12763 - protein, 757 aa, synthetic construct
MALPVTALLLPLALLLHAARPEVQLVESGGGLVQPGGSLRLSCAASGFSFSDFWMSWVRQAPGKGLEWVATISQAGSEKDYVDSVKGRFTISRDNAKKSLYLQMNSLRAEDTAVYYCASGVYSFDYRGQGTLVTVSSGTGGGGSGGGGSGGGGSEFEIVLTQSPATLSLSPGERATLSCRASQSVSSYLAWYQQKPGQAPRLLIYDASNRATGIPARFSGSGSGTDFTLTISSLEPEDFAVYYCQQRSNWPITFGQGTRLEIKLEDLKNVFPPEVAVFEPSEAEISHTQKATLVCLATGFYPDHVELSWWVNGKEVHSGVCTDPQPLKEQPALNDSRYCLSSRLRVSATFWQNPRNHFRCQVQFYGLSENDEWTQDRAKPVTQIVSAEAWGRADCDVKLVEKSFETDTNLNFQNLSVIGFRILLLKVAGFNLLMTLRLWSSRAKRSGSGATNFSLLKQAGDVEENPGPTSMDWIWRILFLVGAATGAHSFEEVQLVESGGGLVQPDRSLRLSCAASGFTFHDYAMHWVRQAPGKGLEWVSTISWNSGTIGYADSVKGRFTISRDNAKNSLYLQMNSLRAEDTALYYCAKDIQYGNYYYGMDVWGQGTTVTVSSTRIQNPDPAVYQLRDSKSSDKSVCLFTDFDSQTNVSQSKDSDVYITDKCVLDMRSMDFKSNSAVAWSNKSDFACANAFNNSIIPEDTFFPSPESSCGFTSESYQQGVLSATILYEILLGKATLYAVLVSALVLMAMVKRKDSRG

SEQ ID NO: 12764 - protein, 752 aa, synthetic construct
MALPVTALLLPLALLLHAARPEVQLVESGGGLVQPGGSLRLSCAASGFSFSDFWMSWVRQAPGKGLEWVATISQAGSEKDYVDSVKGRFTISRDNAKKSLYLQMNSLRAEDTAVYYCASGVYSFDYRGQGTLVTVSSGTGGGGSGGGGSGGGGSEFDIQMTQSPSSLSASVGDRVTINCKASQDINSYLSWFQQKPGKAPKTLIYRANRLVDGVPSRFSGSGSGQDYTLTISSLQPEDFATYYCLQYDEFPLTFGGGTKVEIKLEDLKNVFPPEVAVFEPSEAEISHTQKATLVCLATGFYPDHVELSWWVNGKEVHSGVCTDPQPLKEQPALNDSRYCLSSRLRVSATFWQNPRNHFRCQVQFYGLSENDEWTQDRAKPVTQIVSAEAWGRADCDVKLVEKSFETDTNLNFQNLSVIGFRILLLKVAGFNLLMTLRLWSSRAKRSGSGATNFSLLKQAGDVEENPGPTSMDWIWRILFLVGAATGAHSFEQVQLVQSGAEVKKPGASVKVSCKASGYTFTNYDINWVRQAPGQGLEWIGWIYPGDGSTKYNEKFKAKATLTADTSTSTAYMELRSLRSDDTAVYYCASGYEDAMDYWGQGTTVTVSSTRIQNPDPAVYQLRDSKSSDKSVCLFTDFDSQTNVSQSKDSDVYITDKCVLDMRSMDFKSNSAVAWSNKSDFACANAFNNSIIPEDTFFPSPESSCGFTSESYQQGVLSATILYEILLGKATLYAVLVSALVLMAMVKRKDSRG

SEQ ID NO: 12765 - protein, 754 aa, synthetic construct
MALPVTALLLPLALLLHAARPEVQLVESGGGLVQPGGSLRLSCAASGFSFSDFWMSWVRQAPGKGLEWVATISQAGSEKDYVDSVKGRFTISRDNAKKSLYLQMNSLRAEDTAVYYCASGVYSFDYRGQGTLVTVSSGTGGGGSGGGGSGGGGSEFDIVMTQTPLSLSVTPGQPASISCKSSQSLLDGDGKTYLNWLLQKPGQSPQRLIYLVSKLDSGVPDRFSGSGSGTDFTLKISRVEAEDVGVYYCWQGTHFPRTFGQGTKLEIKLEDLKNVFPPEVAVFEPSEAEISHTQKATLVCLATGFYPDHVELSWWVNGKEVHSGVCTDPQPLKEQPALNDSRYCLSSRLRVSATFWQNPRNHFRCQVQFYGLSENDEWTQDRAKPVTQIVSAEAWGRADCDVKLVEKSFETDTNLNFQNLSVIGFRILLLKVAGFNLLMTLRLWSSRAKRSGSGATNFSLLKQAGDVEENPGPTSMDWIWRILFLVGAATGAHSFEQVQLVQSGAEVKKPGASVKVSCKASGYTFKDTYIHWVRQAPGQGLEWMGRIDPANGNTKYDPKFQGRVTMTRDTSISTAYMELSRLRSDDTAVYYCARRGGVDWGQGTLVTVSSTRIQNPDPAVYQLRDSKSSDKSVCLFTDFDSQTNVSQSKDSDVYITDKCVLDMRSMDFKSNSAVAWSNKSDFACANAFNNSIIPEDTFFPSPESSCGFTSESYQQGVLSATILYEILLGKATLYAVLVSALVLMAMVKRKDSRG

SEQ ID NO: 12766 - protein, 755 aa, synthetic construct
MALPVTALLLPLALLLHAARPEVQLVESGGGLVQPGGSLRLSCAASGFSFSDFWMSWVRQAPGKGLEWVATISQAGSEKDYVDSVKGRFTISRDNAKKSLYLQMNSLRAEDTAVYYCASGVYSFDYRGQGTLVTVSSGTGGGGSGGGGSGGGGSEFDIQMTQSPSSLSASVGDRVTITCKASQDVSTAVAWFQQKPGKAPKLLIYSPSYRYTGVPSRFSGSGSGTDFTLTISSLQPEDFTYYCQQLYSTPYTFGQGTKVEIKLEDLKNVFPPEVAVFEPSEAEISHTQKATLVCLATGFYPDHVELSWWVNGKEVHSGVCTDPQPLKEQPALNDSRYCLSSRLRVSATFWQNPRNHFRCQVQFYGLSENDEWTQDRAKPVTQIVSAEAWGRADCDVKLVEKSFETDTNLNFQNLSVIGFRILLLKVAGFNLLMTLRLWSSRAKRSGSGATNFSLLKQAGDVEENPGPTSMDWIWRILFLVGAATGAHSFEEVQLVQSGAEVKKPGASVKVSCKASGYTFTDYYLDVVVRQAPGQGLEWIGRVNPYNGGTIYNQKFKGRVTLTRDTSTSTAYLELSSLRSEDTAVYYCARDHYRYDPLLDYWGQGTLVTVSSTRIQNPDPAVYQLRDSKSSDKSVCLFTDFDSQTNVSQSKDSDVYITDKCVLDMRSMDFKSNSAVAWSNKSDFACANAFNNSIIPEDTFFPSPESSCGFTSESYQQGVLSATILYEILLGKATLYAVLVSALVLMAMVKRKDSRG

SEQ ID NO: 12767 - protein, 761 aa, synthetic construct
MALPVTALLLPLALLLHAARPEVQLVESGGGLVQPGGSLRLSCAASGFSFSDFWMSWVRQAPGKGLEWVATISQAGSEKDYVDSVKGRFTISRDNAKKSLYLQMNSLRAEDTAVYYCASGVYSFDYRGQGTLVTVSSGTGGGGSGGGGSGGGGSEFDIQMTQSPSSLSASVGDRVTITCRASQSVSTSSYNYMHWYQQKPGKPPKLLIKYASNLESGVPSRFSGSGSGTDFTLTISSLQPEDFATYYCQHSWEIPLTFGQGTKVEIKLEDLKNVFPPEVAVFEPSEAEISHTQKATLVCLATGFYPDHVELSWWVNGKEVHSGVCTDPQPLKEQPALNDSRYCLSSRLRVSATFWQNPRNHFRCQVQFYGLSENDEWTQDRAKPVTQIVSAEAWGRADCDVKLVEKSFETDTNLNFQNLSVIGFRILLLKVAGFNLLMTLRLWSSRAKRSGSGATNFSLLKQAGDVEENPGPTSMDWIWRILFLVGAATGAHSFEEVQLVQSGAEVKKPGASVKVSCKASGYSFTDYYMHWVRQAPGQGLEWIGRINPYNGAAFYSQNFKDRVTLTVDTSTSTAYLELSSLRSEDTAVYYCAIERGADLEGYAMDYWGQGTLVTVSSTRIQNPDPAVYQLRDSKSSDKSVCLFTDFDSQTNVSQSKDSDVYITDKCVLDMRSMDFKSNSAVAWSNKSDFACANAFNNSIIPEDTFFPSPESSCGFTSESYQQGVLSATILYEILLGKATLYAVLVSALVLMAMVKRKDSRG

SEQ ID NO: 12768 - protein, 759 aa, synthetic construct
MALPVTALLLPLALLLHAARPEVQLVESGGGLVQPGGSLRLSCAASGFSFSDFWMSWVRQAPGKGLEWVATISQAGSEKDYVDSVKGRFTISRDNAKKSLYLQMNSLRAEDTAVYYCASGVYSFDYRGQGTLVTVSSGTGGGGSGGGGSGGGGSEFEIVLTQSPATLSASPGERVTLTCRASSNVISSYVHWYQQKPGSSPRLFLYSTSNLASGVPSRFSGSGSGTDFTFTISSLEAEDAATYYCQQYSGYPLTFGQGTRLEIKLEDLKNVFPPEVAVFEPSEAEISHTQKATLVCLATGFYPDHVELSWWVNGKEVHSGVCTDPQPLKEQPALNDSRYCLSSRLRVSATFWQNPRNHFRCQVQFYGLSENDEWTQDRAKPVTQIVSAEAWGRADCDVKLVEKSFETDTNLNFQNLSVIGFRILLLKVAGFNLLMTLRLWSSRAKRSGSGATNFSLLKQAGDVEENPGPTSMDWIWRILFLVGAATGAHSFEQVQLQESGPGLVKPSETLSLTCAVSGYSITSAYYWNWIRQPPGKGLEWIGYISYDGRNNYNPSLKNRITINPDTSKNQFSLQLNSVTPEDTAVYYCAREGDYDVGNYYAMDYWGQGTLVTVSSTRIQNPDPAVYQLRDSKSSDKSVCLFTDFDSQTNVSQSKDSDVYITDKCVLDMRSMDFKSNSAVAWSNKSDFACANAFNNSIIPEDTFFPSPESSCGFTSESYQQGVLSATILYEILLGKATLYAVLVSALVLMAMVKRKDSRG

SEQ ID NO: 12769 - protein, 759 aa, synthetic construct
MALPVTALLLPLALLLHAARPEVQLVESGGGLVQPGGSLRLSCAASGFSFSDFWMSWVRQAPGKGLEWVATISQAGSEKDYVDSVKGRFTISRDNAKKSLYLQMNSLRAEDTAVYYCASGVYSFDYRGQGTLVTVSSGTGGGGSGGGGSGGGGSEFEIVLTQSPATLSLSPGERATLSCRASSNVISSYVHWYQQKPGQAPRLLIYSTSNLASGIPARFSGSGSGTDFTLTISSLEPEDFAVYYCQQYSGYPLTFGQGTRLEIKLEDLKNVFPPEVAVFEPSEAEISHTQKATLVCLATGFYPDHVELSWWVNGKEVHSGVCTDPQPLKEQPALNDSRYCLSSRLRVSATFWQNPRNHFRCQVQFYGLSENDEWTQDRAKPVTQIVSAEAWGRADCDVKLVEKSFETDTNLNFQNLSVIGFRILLLKVAGFNLLMTLRLWSSRAKRSGSGATNFSLLKQAGDVEENPGPTSMDWIWRILFLVGAATGAHSFEEVQLVESGGGLVQPGRSLRLSCAASGYSITSAYYWNWVRQAPGKGLEWVSYISYDGRNNYNPSLKNRFTISRDNAKKSLYLQMNSLRAEDTALYYCAKEGDYDVGNYYAMDYWGQGTTVTVSSTRIQNPDPAVYQLRDSKSSDKSVCLFTDFDSQTNVSQSKDSDVYITDKCVLDMRSMDFKSNSAVAWSNKSDFACANAFNNSIIPEDTFFPSPESSCGFTSESYQQGVLSATILYEILLGKATLYAVLVSALVLMAMVKRKDSRG

SEQ ID NO: 12770 - protein, 758 aa, synthetic construct
MALPVTALLLPLALLLHAARPEVQLVESGGGLVQPGGSLRLSCAASGFSFSDFWMSWVRQAPGKGLEWVATISQAGSEKDYVDSVKGRFTISRDNAKKSLYLQMNSLRAEDTAVYYCASGVYSFDYRGQGTLVTVSSGTGGGGSGGGGSGGGGSEFDVVMTQTPLSLPVSLGDQASISCRSSQSLVHSNGNTYLRWYLQKPGQSPKVLIYKVSNRVSGVPDRFSGSGSGTDFTLKINRVEAEDLGVYFCSQSTHVPWTFGGGTKLEIKLEDLKNVFPPEVAVFEPSEAEISHTQKATLVCLATGFYPDHVELSWWVNGKEVHSGVCTDPQPLKEQPALNDSRYCLSSRLRVSATFWQNPRNHFRCQVQFYGLSENDEWTQDRAKPVTQIVSAEAWGRADCDVKLVEKSFETDTNLNFQNLSVIGFRILLLKVAGFNLLMTLRLWSSRAKRSGSGATNFSLLKQAGDVEENPGPTSMDWIWRILFLVGAATGAHSFEGVKLDETGGGLVQPGGAMKLSCVTSGFTFGHYWMNWVRQSPEKGLEWVAQFRNKPYNYETYYSDSVKGRFTISRDDSKSSVYLQMNNLRVEDTGIYYCTGASYGMEYLGQGTSVTVSTTRIQNPDPAVYQLRDSKSSDKSVCLFTDFDSQTNVSQSKDSDVYITDKCVLDMRSMDFKSNSAVAWSNKSDFACANAFNNSIIPEDTFFPSPESSCGFTSESYQQGVLSATILYEILLGKATLYAVLVSALVLMAMVKRKDSRG

SEQ ID NO: 12771 - protein, 764 aa, synthetic construct
MALPVTALLLPLALLLHAARPEVQLVESGGGLVQPGGSLRLSCAASGFSFSDFWMSWVRQAPGKGLEWVATISQAGSEKDYVDSVKGRFTISRDNAKKSLYLQMNSLRAEDTAVYYCASGVYSFDYRGQGTLVTVSSGTGGGGSGGGGSGGGGSEFQVQLVESGGNLVQPGGSLRLSCAASGFTFGSFSMSWVRQAPGGGLEWVAGLSARSSLTHYADSVKGRFTISRDNAKNSVYLQMNSLRVEDTAVYYCARRSYDSSGYWGHFYSYMDVWGQGTLVTVSLEDLKNVFPPEVAVFEPSEAEISHTQKATLVCLATGFYPDHVELSWWVNGKEVHSGVCTDPQPLKEQPALNDSRYCLSSRLRVSATFWQNPRNHFRCQVQFYGLSENDEWTQDRAKPVTQIVSAEAWGRADCDVKLVEKSFETDTNLNFQNLSVIGFRILLLKVAGFNLLMTLRLWSSRAKRSGSGATNFSLLKQAGDVEENPGPTSMDWIWRILFLVGAATGAHSFESVLTQPSSVSAAPGQKVTISCSGSTSNIGNNYVSWYQQHPGKAPKLMIYDVSKRPSGVPDRFSGSKSGNSASLDISGLQSEDEADYYCAAWDDSLSEFLFGTGTKLTVLGTRIQNPDPAVYQLRDSKSSDKSVCLFTDFDSQTNVSQSKDSDVYITDKCVLDMRSMDFKSNSAVAWSNKSDFACANAFNNSIIPEDTFFPSPESSCGFTSESYQQGVLSATILYEILLGKATLYAVLVSALVLMAMVKRKDSRG

SEQ ID NO: 12772 - protein, 759 aa, synthetic construct
MALPVTALLLPLALLLHAARPEVQLVESGGGLVQPGGSLRLSCAASGFSFSDFWMSWVRQAPGKGLEWVATISQAGSEKDYVDSVKGRFTISRDNAKKSLYLQMNSLRAEDTAVYYCASGVYSFDYRGQGTLVTVSSGTGGGGSGGGGSGGGGSEFDVVMTQSPSSLSASVGDRVTITCQSSLDISHYLNWYQQKPGKAPKLLIYDASNLETGVPSRFSGSGSGTHFTFTISSLQPEDFATYYCQQYDNLPLTFGGGTKLEIKRLEDLKNVFPPEVAVFEPSEAEISHTQKATLVCLATGFYPDHVELSWWVNGKEVHSGVCTDPQPLKEQPALNDSRYCLSSRLRVSATFWQNPRNHFRCQVQFYGLSENDEWTQDRAKPVTQIVSAEAWGRADCDVKLVEKSFETDTNLNFQNLSVIGFRILLLKVAGFNLLMTLRLWSSRAKRSGSGATNFSLLKQAGDVEENPGPTSMDWIWRILFLVGAATGAHSFEQVQLVQSGGGVVQPGGSLRVSCAASGVTLSDYGMHWVRQAPGKGLEWVAFIRNDGSDKYYADSVKGRFTISRDNSEKTVSLQMSSLRAEDTAVYYCAKNGESGPLDYWYLDLWGRGTLVTVSSTRIQNPDPAVYQLRDSKSSDKSVCLFTDFDSQTNVSQSKDSDVYITDKCVLDMRSMDFKSNSAVAWSNKSDFACANAFNNSIIPEDTFFPSPESSCGFTSESYQQGVLSATILYEILLGKATLYAVLVSALVLMAMVKRKDSRG

SEQ ID NO: 12773 - protein, 763 aa, synthetic construct
MALPVTALLLPLALLLHAARPEVQLVESGGGLVQPGGSLRLSCAASGFSFSDFWMSWVRQAPGKGLEWVATISQAGSEKDYVDSVKGRFTISRDNAKKSLYLQMNSLRAEDTAVYYCASGVYSFDYRGQGTLVTVSSGTGGGGSGGGGSGGGGSEFSYELTQPPSVSGTPGQRVAISCSGSSSNIGTRMVTWYQHVPGTAPKLLIFNNNQRPSGVPDRFSASKSGTSASLAIIGLQSDDEADYYCATWDDNVKSYVFGTGTKVTVLGSRLEDLKNVFPPEVAVFEPSEAEISHTQKATLVCLATGFYPDHVELSWWVNGKEVHSGVCTDPQPLKEQPALNDSRYCLSSRLRVSATFWQNPRNHFRCQVQFYGLSENDEWTQDRAKPVTQIVSAEAWGRADCDVKLVEKSFETDTNLNFQNLSVIGFRILLLKVAGFNLLMTLRLWSSRAKRSGSGATNFSLLKQAGDVEENPGPTSMDWIWRILFLVGAATGAHSFELEMAQVQLQQWGAGLLKPSETLSLTCAVYGGSFSGYYWSWIRQPPGKGLEWIGEINHSGSTNYNPSLKSRVTISVDTSKNQFSLKLSSVTAADTAVYYCARAPQSWYVGDVWGQGTLVTVSSTRIQNPDPAVYQLRDSKSSDKSVCLFTDFDSQTNVSQSKDSDVYITDKCVLDMRSMDFKSNSAVAWSNKSDFACANAFNNSIIPEDTFFPSPESSCGFTSESYQQGVLSATILYEILLGKATLYAVLVSALVLMAMVKRKDSRG

SEQ ID NO: 12774 - protein, 760 aa, synthetic construct
MALPVTALLLPLALLLHAARPEVQLVESGGGLVQPGGSLRLSCAASGFSFSDFWMSWVRQAPGKGLEWVATISQAGSEKDYVDSVKGRFTISRDNAKKSLYLQMNSLRAEDTAVYYCASGVYSFDYRGQGTLVTVSSGTGGGGSGGGGSGGGGSEFQSVLTQPPSLSVAPGKTASITCGGNNIGMKSVHWYQQRPGQAPVLVIYYDSDRPSGIPGRFSGSNSGNTATLTISRVEAGDEADYYCQVWDTTGDHPGYVFGTGTKVTVLLEDLKNVFPPEVAVFEPSEAEISHTQKATLVCLATGFYPDHVELSWWVNGKEVHSGVCTDPQPLKEQPALNDSRYCLSSRLRVSATFWQNPRNHFRCQVQFYGLSENDEWTQDRAKPVTQIVSAEAWGRADCDVKLVEKSFETDTNLNFQNLSVIGFRILLLKVAGFNLLMTLRLWSSRAKRSGSGATNFSLLKQAGDVEENPGPTSMDWIWRILFLVGAATGAHSFEQVQLVQSGAEVKKPGSSVKVSCKASGGTFSSYAISWVRQAPGQGLEWMGGIIPIFGTANYAQKFQGRVTITADESTSTAYMELSSLRSEDTAVYYCARGVYGYSGSAPYDEWGQGTLVTVSSTRIQNPDPAVYQLRDSKSSDKSVCLFTDFDSQTNVSQSKDSDVYITDKCVLDMRSMDFKSNSAVAWSNKSDFACANAFNNSIIPEDTFFPSPESSCGFTSESYQQGVLSATILYEILLGKATLYAVLVSALVLMAMVKRKDSRG

SEQ ID NO: 12775 - protein, 758 aa, synthetic construct
MALPVTALLLPLALLLHAARPEVQLVESGGGLVQPGGSLRLSCAASGFSFSDFWMSWVRQAPGKGLEWVATISQAGSEKDYVDSVKGRFTISRDNAKKSLYLQMNSLRAEDTAVYYCASGVYSFDYRGQGTLVTVSSGTGGGGSGGGGSGGGGSEFEVQLVESGGGLVQPGRSLRLSCAASGFTFDDYAMHWVRQAPGKGLEWVSGISWNSGSIGYADSVKGRFTISRDNAKNSLYLQMNSLRAEDTALYYCAKDKGGGYYDFWSGSDYWGQGTLVTVSSLEDLKNVFPPEVAVFEPSEAEISHTQKATLVCLATGFYPDHVELSWWVNGKEVHSGVCTDPQPLKEQPALNDSRYCLSSRLRVSATFWQNPRNHFRCQVQFYGLSENDEWTQDRAKPVTQIVSAEAWGRADCDVKLVEKSFETDTNLNFQNLSVIGFRILLLKVAGFNLLMTLRLWSSRAKRSGSGATNFSLLKQAGDVEENPGPTSMDWIWRILFLVGAATGAHSFESSELTQDPAVSVALGQTVRITCQGDSLRSYYASWYQQKPGQAPVLVIYGKNNRPSGIPDRFSGSSSGNTASLTITGAQAEDEADYYCNSRDSSGWVFGGGTKLTVLTRIQNPDPAVYQLRDSKSSDKSVCLFTDFDSQTNVSQSKDSDVYITDKCVLDMRSMDFKSNSAVAWSNKSDFACANAFNNSIIPEDTFFPSPESSCGFTSESYQQGVLSATILYEILLGKATLYAVLVSALVLMAMVKRKDSRG

SEQ ID NO: 12776 - protein, 767 aa, synthetic construct
MALPVTALLLPLALLLHAARPEVQLVESGGGLVQPGGSLRLSCAASGFSFSDFWMSWVRQAPGKGLEWVATISQAGSEKDYVDSVKGRFTISRDNAKKSLYLQMNSLRAEDTAVYYCASGVYSFDYRGQGTLVTVSSGTGGGGSGGGGSGGGGSEFEVQLQQSGPGLVKPSQTLSLTCAISGDSVLSNSDTWNWIRQSPSRGLEWLGRTYHRSTWYDDYASSVRGRVSINVDTSKNQYSLQLNAVTPEDTGVYYCARDRLQDGNSWSDAFDVWGQGTMVTVSSLEDLKNVFPPEVAVFEPSEAEISHTQKATLVCLATGFYPDHVELSWWVNGKEVHSGVCTDPQPLKEQPALNDSRYCLSSRLRVSATFWQNPRNHFRCQVQFYGLSENDEWTQDRAKPVTQIVSAEAWGRADCDVKLVEKSFETDTNLNFQNLSVIGFRILLLKVAGFNLLMTLRLWSSRAKRSGSGATNFSLLKQAGDVEENPGPTSMDWIWRILFLVGAATGAHSFEQSALTQPASVSGSPGQSITISCTGTSSDVGGYNYVSWYQQHPGKAPKLMIYDVSNRPSGVSNRFSGSKSGNTASLTISGLQAEDEADYYCSSYTSSSTLVYVFGTGTKVTVLTRIQNPDPAVYQLRDSKSSDKSVCLFTDFDSQTNVSQSKDSDVYITDKCVLDMRSMDFKSNSAVAWSNKSDFACANAFNNSIIPEDTFFPSPESSCGFTSESYQQGVLSATILYEILLGKATLYAVLVSALVLMAMVKRKDSRG

SEQ ID NO: 12777 - protein, 745 aa, synthetic construct
MALPVTALLLPLALLLHAARPEVQLVESGGGLVQPGGSLRLSCAASGFSFSDFWMSWVRQAPGKGLEWVATISQAGSEKDYVDSVKGRFTISRDNAKKSLYLQMNSLRAEDTAVYYCASGVYSFDYRGQGTLVTVSSGTGGGGSGGGGSGGGGSEFQVQLVQSGAEVKKPGASVKVSCKASGYTFTSYDINWVRQATGQGLEWMGWMNPNSGNTGYAQKFQGRVTMTRNTSISTAYMELSSLRSEDTAVYYCARGDSTKVEIKLEDLKNVFPPEVAVFEPSEAEISHTQKATLVCLATGFYPDHVELSWWVNGKEVHSGVCTDPQPLKEQPALNDSRYCLSSRLRVSATFWQNPRNHFRCQVQFYGLSENDEWTQDRAKPVTQIVSAEAWGRADCDVKLVEKSFETDTNLNFQNLSVIGFRILLLKVAGFNLLMTLRLWSSRAKRSGSGATNFSLLKQAGDVEENPGPTSMDWIWRILFLVGAATGAHSFEQSVLTQPRSVSGSPGQSVTISCTGTSSDVGGYNYVSWYQQHPGEAPKLIIYDADKRPSGISNRFSSGKSGNTASLTISGLQVEDEADYYCCSYAGGSTWVFGGGTKVTVLTRIQNPDPAVYQLRDSKSSDKSVCLFTDFDSQTNVSQSKDSDVYITDKCVLDMRSMDFKSNSAVAWSNKSDFACANAFNNSIIPEDTFFPSPESSCGFTSESYQQGVLSATILYEILLGKATLYAVLVSALVLMAMVKRKDSRG

SEQ ID NO: 12778 - protein, 767 aa, synthetic construct
MALPVTALLLPLALLLHAARPEVQLVESGGGLVQPGGSLRLSCAASGFSFSDFWMSWVRQAPGKGLEWVATISQAGSEKDYVDSVKGRFTISRDNAKKSLYLQMNSLRAEDTAVYYCASGVYSFDYRGQGTLVTVSSGTGGGGSGGGGSGGGGSEFEVQLQQSGPGLVKPSQTLSLTCAISGDSVSSNSAAWNWIRQSPSRGLEWLGRTYYRSKWYSDYAVSVKSRITINPDTSKNQFSLQLNSVTPEDTAVYYCARDPYDFWSGYPDAFDIWGQGTMVTVSSLEDLKNVFPPEVAVFEPSEAEISHTQKATLVCLATGFYPDHVELSWWVNGKEVHSGVCTDPQPLKEQPALNDSRYCLSSRLRVSATFWQNPRNHFRCQVQFYGLSENDEWTQDRAKPVTQIVSAEAWGRADCDVKLVEKSFETDTNLNFQNLSVIGFRILLLKVAGFNLLMTLRLWSSRAKRSGSGATNFSLLKQAGDVEENPGPTSMDWIWRILFLVGAATGAHSFEQSALTQPASVSGSPGQSITISCTGTSSDVGGYNYVSWYQQHPGKAPKVIISEVNNRPSGVSHRFSGSKSGNTASLTISGLQAEDEADYFCSSYTSGRTLYVFGTGSKVTVLGTRIQNPDPAVYQLRDSKSSDKSVCLFTDFDSQTNVSQSKDSDVYITDKCVLDMRSMDFKSNSAVAWSNKSDFACANAFNNSIIPEDTFFPSPESSCGFTSESYQQGVLSATILYEILLGKATLYAVLVSALVLMAMVKRKDSRG

SEQ ID NO: 12779 - protein, 766 aa, synthetic construct
MALPVTALLLPLALLLHAARPEVQLVESGGGLVQPGGSLRLSCAASGFSFSDFWMSWVRQAPGKGLEWVATISQAGSEKDYVDSVKGRFTISRDNAKKSLYLQMNSLRAEDTAVYYCASGVYSFDYRGQGTLVTVSSGTGGGGSGGGGSGGGGSEFQSALTQPASASGSPGQSVTISCTGTSSDVGGYNYVSWYQQHPGKAPKLMIYDVSNRPSGVSNRFSGSKSGNTASLTISGLQAEDEADYYCSSYTSSSTLYVFGTGTQLTVLLEDLKNVFPPEVAVFEPSEAEISHTQKATLVCLATGFYPDHVELSWWVNGKEVHSGVCTDPQPLKEQPALNDSRYCLSSRLRVSATFWQNPRNHFRCQVQFYGLSENDEWTQDRAKPVTQIVSAEAWGRADCDVKLVEKSFETDTNLNFQNLSVIGFRILLLKVAGFNLLMTLRLWSSRAKRSGSGATNFSLLKQAGDVEENPGPTSMDWIWRILFLVGAATGAHSFEEVQLQQSGPGLVKPSQTLSLTCAISGDSMLSNSDTWNWIRQSPSRGLEWLGRTYHRSTWYDDYASSVRGRVSINVDTSKNQYSLQLNAVTPEDTGVYYCARVRLQDGNSWSDAFDVWGQGTMVTVSSTRIQNPDPAVYQLRDSKSSDKSVCLFTDFDSQTNVSQSKDSDVYITDKCVLDMRSMDFKSNSAVAWSNKSDFACANAFNNSIIPEDTFFPSPESSCGFTSESYQQGVLSATILYEILLGKATLYAVLVSALVLMAMVKRKDSRG

SEQ ID NO: 12780 - protein, 766 aa, synthetic construct
MALPVTALLLPLALLLHAARPEVQLVESGGGLVQPGGSLRLSCAASGFSFSDFWMSWVRQAPGKGLEWVATISQAGSEKDYVDSVKGRFTISRDNAKKSLYLQMNSLRAEDTAVYYCASGVYSFDYRGQGTLVTVSSGTGGGGSGGGGSGGGGSEFDVMLTQTPLSLPVSLGDQASISCRSSQSILHSTGDTYLEWYLQKPGQSPKLLINKVSNRLSGVPDRFSGSGSGTDFTLKISRVEAEDLGVYYCFQGSHVPWTFGGGTKLEIKRADAAPTVSIFPLEDLKNVFPPEVAVFEPSEAEISHTQKATLVCLATGFYPDHVELSWWVNGKEVHSGVCTDPQPLKEQPALNDSRYCLSSRLRVSATFWQNPRNHFRCQVQFYGLSENDEWTQDRAKPVTQIVSAEAWGRADCDVKLVEKSFETDTNLNFQNLSVIGFRILLLKVAGFNLLMTLRLWSSRAKRSGSGATNFSLLKQAGDVEENPGPTSMDWIWRILFLVGAATGAHSFEQVKLQQSGPSLVKPGASVKMSCKASGYTFTDFYMKWVKQSHGKSLEWIGDINPNIGDTFYNQKFKGKATLTVDKSSSTAYMQLNSLTSEDSAVYFCSVGYFDVWGAGTTVTVSSTRIQNPDPAVYQLRDSKSSDKSVCLFTDFDSQTNVSQSKDSDVYITDKCVLDMRSMDFKSNSAVAWSNKSDFACANAFNNSIIPEDTFFPSPESSCGFTSESYQQGVLSATILYEILLGKATLYAVLVSALVLMAMVKRKDSRG

SEQ ID NO: 12781 - protein, 762 aa, synthetic construct
MALPVTALLLPLALLLHAARPEVQLVESGGGLVQPGGSLRLSCAASGFSFSDFWMSWVRQAPGKGLEWVATISQAGSEKDYVDSVKGRFTISRDNAKKSLYLQMNSLRAEDTAVYYCASGVYSFDYRGQGTLVTVSSGTGGGGSGGGGSGGGGSEFEIVLTQSPATLSLSPGERATLSCRASQSVSIYLAWYQQKPGQAPRLLIYDASNRATGIPARFSGSGSGTDFTLTISSLEPEDFAVYYCQQRSNWPPFTFGPGTKVDIKLEDLKNVFPPEVAVFEPSEAEISHTQKATLVCLATGFYPDHVELSWWVNGKEVHSGVCTDPQPLKEQPALNDSRYCLSSRLRVSATFWQNPRNHFRCQVQFYGLSENDEWTQDRAKPVTQIVSAEAWGRADCDVKLVEKSFETDTNLNFQNLSVIGFRILLLKVAGFNLLMTLRLWSSRAKRSGSGATNFSLLKQAGDVEENPGPTSMDWIWRILFLVGAATGAHSFEQVQLVESGGGVVQPGRSLRLSCAASGFTFSSYGMHWVRQAPGKGLEWVAVIWDDGSNKYYVDSVKGRFTISRDNSKNTLYLQMNSLRAEDTAVYYCARDDYYGSGSFNSYYGTDVWGQGTTVTVSSTRIQNPDPAVYQLRDSKSSDKSVCLFTDFDSQTNVSQSKDSDVYITDKCVLDMRSMDFKSNSAVAWSNKSDFACANAFNNSIIPEDTFFPSPESSCGFTSESYQQGVLSATILYEILLGKATLYAVLVSALVLMAMVKRKDSRG

SEQ ID NO: 12782 - protein, 747 aa, synthetic construct
MALPVTALLLPLALLLHAARPEVQLVESGGGLVQPGGSLRLSCAASGFSFSDFWMSWVRQAPGKGLEWVATISQAGSEKDYVDSVKGRFTISRDNAKKSLYLQMNSLRAEDTAVYYCASGVYSFDYRGQGTLVTVSSGTGGGGSGGGGSGGGGSEFDIQMTQSPSSLSASVGDRVTITCRASQGISSWLAWYQQKPEKAPKSLIYAASSLQSGVPSRFSGSGSGTDFTLTISSLQPEDFATYYCQQYNSYPYTFGQGTKLEIKLEDLKNVFPPEVAVFEPSEAEISHTQKATLVCLATGFYPDHVELSWWVNGKEVHSGVCTDPQPLKEQPALNDSRYCLSSRLRVSATFWQNPRNHFRCQVQFYGLSENDEWTQDRAKPVTQIVSAEAWGRADCDVKLVEKSFETDTNLNFQNLSVIGFRILLLKVAGFNLLMTLRLWSSRAKRSGSGATNFSLLKQAGDVEENPGPTSMDWIWRILFLVGAATGAHSFEEVQLVQSGGGLVHPGGSLRLSCAGSGFTFSTYLMYWVRQAPGKTLEWVSAIGSGGDTYYADSVKGRFTISRDNAKNSLYLQMNSLRAEDMAVYYCARGLGYWGQGTLVTVSSTRIQNPDPAVYQLRDSKSSDKSVCLFTDFDSQTNVSQSKDSDVYITDKCVLDMRSMDFKSNSAVAWSNKSDFACANAFNNSIIPEDTFFPSPESSCGFTSESYQQGVLSATILYEILLGKATLYAVLVSALVLMAMVKRKDSRG

SEQ ID NO: 12783 - protein, 766 aa, synthetic construct
MALPVTALLLPLALLLHAARPEVQLVESGGGLVQPGGSLRLSCAASGFSFSDFWMSWVRQAPGKGLEWVATISQAGSEKDYVDSVKGRFTISRDNAKKSLYLQMNSLRAEDTAVYYCASGVYSFDYRGQGTLVTVSSGTGGGGSGGGGSGGGGSEFLPVLTQPPSVSVAPGKTARITCGGNNIGSKSVHWYQQKPGQAPVLVVYDDSDRPSGIPERFSGSNSGNTATLTISRVEAGDEADYYCQVWDSSSDYVVFGGGTKLTVLLEDLKNVFPPEVAVFEPSEAEISHTQKATLVCLATGFYPDHVELSWWVNGKEVHSGVCTDPQPLKEQPALNDSRYCLSSRLRVSATFWQNPRNHFRCQVQFYGLSENDEWTQDRAKPVTQIVSAEAWGRADCDVKLVEKSFETDTNLNFQNLSVIGFRILLLKVAGFNLLMTLRLWSSRAKRSGSGATNFSLLKQAGDVEENPGPTSMDWIWRILFLVGAATGAHSFEEVQLVQSGAEVKKPGESLKISCKGSGYSFTSYWIGWVRQMPGKGLEWMGIIYPGDSDTRYSPSFQGQVTISADKSISTAYLQWSSLKASDTAMYYCARQVWGWQGGMYPRSNWWYNLDSWGQGTLVTVSSTRIQNPDPAVYQLRDSKSSDKSVCLFTDFDSQTNVSQSKDSDVYITDKCVLDMRSMDFKSNSAVAWSNKSDFACANAFNNSIIPEDTFFPSPESSCGFTSESYQQGVLSATILYEILLGKATLYAVLVSALVLMAMVKRKDSRG

SEQ ID NO: 12784 - protein, 759 aa, synthetic construct
MALPVTALLLPLALLLHAARPEVQLVESGGGLVQPGGSLRLSCAASGFSFSDFWMSWVRQAPGKGLEWVATISQAGSEKDYVDSVKGRFTISRDNAKKSLYLQMNSLRAEDTAVYYCASGVYSFDYRGQGTLVTVSSGTGGGGSGGGGSGGGGSEFELVMTQSPASLAVSLGQRATISCRASESVDSYGKSFMHWYQLKPGQPPKLLIYRASNLESGVPARFSGSGSRTDFTLTIDPVEADDAATYYCQQNNEDPWTFGGGTKLEIKLEDLKNVFPPEVAVFEPSEAEISHTQKATLVCLATGFYPDHVELSWWVNGKEVHSGVCTDPQPLKEQPALNDSRYCLSSRLRVSATFWQNPRNHFRCQVQFYGLSENDEWTQDRAKPVTQIVSAEAWGRADCDVKLVEKSFETDTNLNFQNLSVIGFRILLLKVAGFNLLMTLRLWSSRAKRSGSGATNFSLLKQAGDVEENPGPTSMDWIWRILFLVGAATGAHSFEEVQLEQSGPELVKPGASVKMSCKASGYTFTNYYMKWVKQSHGKSLEWIGDLNPNNGDTFYNQKFKGKATLTVDKSSNTAYMQLNSLTSEDSAVYYCARTGRYEENAMDYWGQGTSVTVSSTRIQNPDPAVYQLRDSKSSDKSVCLFTDFDSQTNVSQSKDSDVYITDKCVLDMRSMDFKSNSAVAWSNKSDFACANAFNNSIIPEDTFFPSPESSCGFTSESYQQGVLSATILYEILLGKATLYAVLVSALVLMAMVKRKDSRG

SEQ ID NO: 12785 - protein, 753 aa, synthetic construct
MALPVTALLLPLALLLHAARPEVQLVESGGGLVQPGGSLRLSCAASGFSFSDFWMSWVRQAPGKGLEWVATISQAGSEKDYVDSVKGRFTISRDNAKKSLYLQMNSLRAEDTAVYYCASGVYSFDYRGQGTLVTVSSGTGGGGSGGGGSGGGGSEFDVVMTQSPSSLSASVGDRVTITCMASEDIYIRLAWYQQKPGNAPKLLIYAATSLETGVPSRFSGSGSGTDFTLTISSLQPEDFATYYCQQYWSSPWTFGGGTKVEIKLEDLKNVFPPEVAVFEPSEAEISHTQKATLVCLATGFYPDHVELSWWVNGKEVHSGVCTDPQPLKEQPALNDSRYCLSSRLRVSATFWQNPRNHFRCQVQFYGLSENDEWTQDRAKPVTQIVSAEAWGRADCDVKLVEKSFETDTNLNFQNLSVIGFRILLLKVAGFNLLMTLRLWSSRAKRSGSGATNFSLLKQAGDVEENPGPTSMDWIWRILFLVGAATGAHSFEQVQLQESGPGLVKPSQTLSLTCTVSGYSITSDYTWNWIRQPPGNGLEWIGYITYSGSTSYNPSLKSRVLISVDTSKNQVSLKLSSVTAADTAVYYCARLGRRYTMDYWGQGTTVTVSSTRIQNPDPAVYQLRDSKSSDKSVCLFTDFDSQTNVSQSKDSDVYITDKCVLDMRSMDFKSNSAVAWSNKSDFACANAFNNSIIPEDTFFPSPESSCGFTSESYQQGVLSATILYEILLGKATLYAVLVSALVLMAMVKRKDSRG

SEQ ID NO: 12786 - protein, 757 aa, synthetic construct; identical to SEQ ID NO: 12649

SEQ ID NO: 12787 - protein, 757 aa, synthetic construct
MALPVTALLLPLALLLHAARPEVQLVESGGGLVQPGGSLRLSCAASGFSFSDFWMSWVRQAPGKGLEWVATISQAGSEKDYVDSVKGRFTISRDNAKKSLYLQMNSLRAEDTAVYYCASGVYSFDYRGQGTLVTVSSGTGGGGSGGGGSGGGGSEFDIVLTQSPATLSLSPGDRATLSCRASESVTILGSHLIYWYQQKPGQAPRLLIQLASNVQTGIPARFSGSGSRTDFTLTISSLEPEDFAVYYCLQSRTIPRTFGQGTKLEIKRLEDLKNVFPPEVAVFEPSEAEISHTQKATLVCLATGFYPDHVELSWWVNGKEVHSGVCTDPQPLKEQPALNDSRYCLSSRLRVSATFWQNPRNHFRCQVQFYGLSENDEWTQDRAKPVTQIVSAEAWGRADCDVKLVEKSFETDTNLNFQNLSVIGFRILLLKVAGFNLLMTLRLWSSRAKRSGSGATNFSLLKQAGDVEENPGPTSMDWIWRILFLVGAATGAHSFEQVQLVQSGSELKKPGESVKISCKASGYTFTHYSMNWVRQAPGQGLEWMGRINTETGEPLYADDFKGRFVFSLDTSASTAYLQISSLKAEDTAVYYCSNDYLYSLDYWGQGTLVTVSSTRIQNPDPAVYQLRDSKSSDKSVCLFTDFDSQTNVSQSKDSDVYITDKCVLDMRSMDFKSNSAVAWSNKSDFACANAFNNSIIPEDTFFPSPESSCGFTSESYQQGVLSATILYEILLGKATLYAVLVSALVLMAMVKRKDSRG

SEQ ID NO: 12788 - protein, 758 aa, synthetic construct
MALPVTALLLPLALLLHAARPEVQLVESGGGLVQPGGSLRLSCAASGFSFSDFWMSWVRQAPGKGLEWVATISQAGSEKDYVDSVKGRFTISRDNAKKSLYLQMNSLRAEDTAVYYCASGVYSFDYRGQGTLVTVSSGTGGGGSGGGGSGGGGSEFDIQLTQSPSFLSASVGDRVTITCRASQGISTDLNWYQQKPGKAPKLLIYAASNLESGVPSRFSGSGSGTEFTLTISSLQPEDFATYYCQQSYNWPYTFGGGTKVEIKRLEDLKNVFPPEVAVFEPSEAEISHTQKATLVCLATGFYPDHVELSWWVNGKEVHSGVCTDPQPLKEQPALNDSRYCLSSRLRVSATFWQNPRNHFRCQVQFYGLSENDEWTQDRAKPVTQIVSAEAWGRADCDVKLVEKSFETDTNLNFQNLSVIGFRILLLKVAGFNLLMTLRLWSSRAKRSGSGATNFSLLKQAGDVEENPGPTSMDWIWRILFLVGAATGAHSFEEVQLVESGGGLVKPGGSLRLSCAASGFTFSNFEMNWVRQAPGKGLEWVSGISSNGRYINYADSVKGRFTISRDNAKNSLYLQMNSLRAEDTAVYYCARVVDFDQDYNGFDYWGQGTLVTVSSTRIQNPDPAVYQLRDSKSSDKSVCLFTDFDSQTNVSQSKDSDVYITDKCVLDMRSMDFKSNSAVAWSNKSDFACANAFNNSIIPEDTFFPSPESSCGFTSESYQQGVLSATILYEILLGKATLYAVLVSALVLMAMVKRKDSRG

SEQ ID NO: 12789 - protein, 756 aa, synthetic construct
MALPVTALLLPLALLLHAARPEVQLVESGGGLVQPGGSLRLSCAASGFSFSDFWMSWVRQAPGKGLEWVATISQAGSEKDYVDSVKGRFTISRDNAKKSLYLQMNSLRAEDTAVYYCASGVYSFDYRGQGTLVTVSSGTGGGGSGGGGSGGGGSEFDIQLTQSPSFLSASVGDRVTITCSLSLGISTWRDWFPPRLGRGLEPLTYAASTLQSGVPSRFSGSGSGTEFTLTISSLQPEDFATYYCQQLNSYPLTFGGGTKVEIKRLEDLKNVFPPEVAVFEPSEAEISHTQKATLVCLATGFYPDHVELSWWVNGKEVHSGVCTDPQPLKEQPALNDSRYCLSSRLRVSATFWQNPRNHFRCQVQFYGLSENDEWTQDRAKPVTQIVSAEAWGRADCDVKLVEKSFETDTNLNFQNLSVIGFRILLLKVAGFNLLMTLRLWSSRAKRSGSGATNFSLLKQAGDVEENPGPTSMDWIWRILFLVGAATGAHSFEEVQLVESGGGLVKPGGSLRLSCAASGFTFSTYGMSWVRQAPGKGLEWVAYINNGSGYIYYADSVKGRFTISRDNAKNSLYLQMNSLRAEDTAVYYCARGQWWSGGDFDYWGQGTLVTVSSTRIQNPDPAVYQLRDSKSSDKSVCLFTDFDSQTNVSQSKDSDVYITDKCVLDMRSMDFKSNSAVAWSNKSDFACANAFNNSIIPEDTFFPSPESSCGFTSESYQQGVLSATILYEILLGKATLYAVLVSALVLMAMVKRKDSRG

SEQ ID NO: 12790 - protein, 757 aa, synthetic construct
MALPVTALLLPLALLLHAARPEVQLVESGGGLVQPGGSLRLSCAASGFSFSDFWMSWVRQAPGKGLEWVATISQAGSEKDYVDSVKGRFTISRDNAKKSLYLQMNSLRAEDTAVYYCASGVYSFDYRGQGTLVTVSSGTGGGGSGGGGSGGGGSEFEIVLTQSPATLSLSPGERATLSCSASSSVSYMYWYQQKPGQAPRLLIYRTSNLASGIPARFSGSGSGTDFTLTISSLEPEDFAVYYCQQYHSYPTTFGQGTKVEIKRTVLEDLKNVFPPEVAVFEPSEAEISHTQKATLVCLATGFYPDHVELSWWVNGKEVHSGVCTDPQPLKEQPALNDSRYCLSSRLRVSATFWQNPRNHFRCQVQFYGLSENDEWTQDRAKPVTQIVSAEAWGRADCDVKLVEKSFETDTNLNFQNLSVIGFRILLLKVAGFNLLMTLRLWSSRAKRSGSGATNFSLLKQAGDVEENPGPTSMDWIWRILFLVGAATGAHSFEEVQLVESGGGLVQPGGSLRLSCAASGFSFNTYAMNWVRQAPGKGLEWVSHIRSKSNNFATYYADSVKDRFTISRDNAKNSLYLQMNSLRAEDTAVYYCARQGGDFPMDYWGQGTLVTVSSTRIQNPDPAVYQLRDSKSSDKSVCLFTDFDSQTNVSQSKDSDVYITDKCVLDMRSMDFKSNSAVAWSNKSDFACANAFNNSIIPEDTFFPSPESSCGFTSESYQQGVLSATILYEILLGKATLYAVLVSALVLMAMVKRKDSRG

SEQ ID NO: 12791 - protein, 753 aa, synthetic construct
MALPVTALLLPLALLLHAARPEVQLVESGGGLVQPGGSLRLSCAASGFSFSDFWMSWVRQAPGKGLEWVATISQAGSEKDYVDSVKGRFTISRDNAKKSLYLQMNSLRAEDTAVYYCASGVYSFDYRGQGTLVTVSSGTGGGGSGGGGSGGGGSEFDVVMTQSPSSLSASVGDRVTITCKASEDIYIRLAWYQQKPGKAPKLLIYAATSLETGVPSRFSGSGSGTDFTLTISSLQPEDFATYYCQQYWTTPWTFGGGTKVEIKLEDLKNVFPPEVAVFEPSEAEISHTQKATLVCLATGFYPDHVELSWWVNGKEVHSGVCTDPQPLKEQPALNDSRYCLSSRLRVSATFWQNPRNHFRCQVQFYGLSENDEWTQDRAKPVTQIVSAEAWGRADCDVKLVEKSFETDTNLNFQNLSVIGFRILLLKVAGFNLLMTLRLWSSRAKRSGSGATNFSLLKQAGDVEENPGPTSMDWIWRILFLVGAATGAHSFEQVQLQESGPGLVKPSQTLSLTCTVSGYSITIDYTWNWIRQPPGKGLEWIGYITYSGSTDYNPSLKSRVLISVDTSKNQVSLKLSSVTAADTAVYYCARLGRRYALDYWGQGTTVTVSSTRIQNPDPAVYQLRDSKSSDKSVCLFTDFDSQTNVSQSKDSDVYITDKCVLDMRSMDFKSNSAVAWSNKSDFACANAFNNSIIPEDTFFPSPESSCGFTSESYQQGVLSATILYEILLGKATLYAVLVSALVLMAMVKRKDSRG

SEQ ID NO: 12792 - protein, 758 aa, synthetic construct
MALPVTALLLPLALLLHAARPEVQLVESGGGLVQPGGSLRLSCAASGFSFSDFWMSWVRQAPGKGLEWVATISQAGSEKDYVDSVKGRFTISRDNAKKSLYLQMNSLRAEDTAVYYCASGVYSFDYRGQGTLVTVSSGTGGGGSGGGGSGGGGSEFDIQMTQTTSSLSASLGDRVTISCRASQDISNYLNWYQQKPDGTVKLLIYYTSILHSGVPSRFSGSGSGTDYSLTISNLEQEDFATYFCQQGNTLPWTFGGGTKLEIKALEDLKNVFPPEVAVFEPSEAEISHTQKATLVCLATGFYPDHVELSWWVNGKEVHSGVCTDPQPLKEQPALNDSRYCLSSRLRVSATFWQNPRNHFRCQVQFYGLSENDEWTQDRAKPVTQIVSAEAWGRADCDVKLVEKSFETDTNLNFQNLSVIGFRILLLKVAGFNLLMTLRLWSSRAKRSGSGATNFSLLKQAGDVEENPGPTSMDWIWRILFLVGAATGAHSFEEVQLVESGGGLVKPGGSLKLSCAASGFAFSIYDMSWVRQTPEKRLEWVAYISSGGGTYYPDTVKGRFTISRDNAKNTLYLQMSSLKSEDTAMYYCARHSGYGTHWGVLFAYWGQGTLVTVSATRIQNPDPAVYQLRDSKSSDKSVCLFTDFDSQTNVSQSKDSDVYITDKCVLDMRSMDFKSNSAVAWSNKSDFACANAFNNSIIPEDTFFPSPESSCGFTSESYQQGVLSATILYEILLGKATLYAVLVSALVLMAMVKRKDSRG

SEQ ID NO: 12793 - protein, 768 aa, synthetic construct
MALPVTALLLPLALLLHAARPEVQLVESGGGLVQPGGSLRLSCAASGFSFSDFWMSWVRQAPGKGLEWVATISQAGSEKDYVDSVKGRFTISRDNAKKSLYLQMNSLRAEDTAVYYCASGVYSFDYRGQGTLVTVSSGTGGGGSGGGGSGGGGSEFDIVMTQSPDSLAVSLGERATINCKSSQSLLYRSNQKNYLAWYQQKPGQPPKLLIYWASTRESGVPDRFSGSGSGTDFTLTISSLQAEDVAVYYCQQYYNYPRTFGQGTKVEIKRTVLEDLKNVFPPEVAVFEPSEAEISHTQKATLVCLATGFYPDHVELSWWVNGKEVHSGVCTDPQPLKEQPALNDSRYCLSSRLRVSATFWQNPRNHFRCQVQFYGLSENDEWTQDRAKPVTQIVSAEAWGRADCDVKLVEKSFETDTNLNFQNLSVIGFRILLLKVAGFNLLMTLRLWSSRAKRSGSGATNFSLLKQAGDVEENPGPTSMDWIWRILFLVGAATGAHSFEEVQLLESGGGLVQPGGSLRLSCAASGYSITSDYAWNWVRQAPGKGLEWVSYISNSGSTSYNPSLKSRFTISRDNSKNTLYLQMNSLRAEDTAVYYCAKERNYDYDDYYYAMDYWGQGTLVTVSSTRIQNPDPAVYQLRDSKSSDKSVCLFTDFDSQTNVSQSKDSDVYITDKCVLDMRSMDFKSNSAVAWSNKSDFACANAFNNSIIPEDTFFPSPESSCGFTSESYQQGVLSATILYEILLGKATLYAVLVSALVLMAMVKRKDSRG

SEQ ID NO: 12794 - protein, 761 aa, synthetic construct
MALPVTALLLPLALLLHAARPEVQLVESGGGLVQPGGSLRLSCAASGFSFSDFWMSWVRQAPGKGLEWVATISQAGSEKDYVDSVKGRFTISRDNAKKSLYLQMNSLRAEDTAVYYCASGVYSFDYRGQGTLVTVSSGTGGGGSGGGGSGGGGSEFDVVMTQSPLSLPVTLGQPASISCRSSQSLLHSSGNTYLEWYQQRPGQSPRPLIYKISTRFSGVPDRFSGSGSGTDFTLKISRVEAEDVGVYYCFQGSHVPYTFGGGTKVEIKRLEDLKNVFPPEVAVFEPSEAEISHTQKATLVCLATGFYPDHVELSWWVNGKEVHSGVCTDPQPLKEQPALNDSRYCLSSRLRVSATFWQNPRNHFRCQVQFYGLSENDEWTQDRAKPVTQIVSAEAWGRADCDVKLVEKSFETDTNLNFQNLSVIGFRILLLKVAGFNLLMTLRLWSSRAKRSGSGATNFSLLKQAGDVEENPGPTSMDWIWRILFLVGAATGAHSFEQVQLVQSGAEVKKPGASVKVSCKASGLTIEDYYMHWVRQAPGQGLEWMGWIDPENGDTEYGPKFQGRVTMTRDTSINTAYMELSRLRSDDTAVYYCAVHNAHYGTWFAYWGQGTLVTVSSTRIQNPDPAVYQLRDSKSSDKSVCLFTDFDSQTNVSQSKDSDVYITDKCVLDMRSMDFKSNSAVAWSNKSDFACANAFNNSIIPEDTFFPSPESSCGFTSESYQQGVLSATILYEILLGKATLYAVLVSALVLMAMVKRKDSRG

SEQ ID NO: 12795 - protein, 753 aa, synthetic construct
MALPVTALLLPLALLLHAARPEVQLVESGGGLVQPGGSLRLSCAASGFSFSDFWMSWVRQAPGKGLEWVATISQAGSEKDYVDSVKGRFTISRDNAKKSLYLQMNSLRAEDTAVYYCASGVYSFDYRGQGTLVTVSSGTGGGGSGGGGSGGGGSEFDIQMTQSPSSLSASVGDRVTITCRASENIYSNLAWYQQKPGKAPKLLIYAATNLADGVPSRFSGSGSGTDFTLTISSLQPEDFATYYCQHFWGTPTFGQGTKVEIKRTVLEDLKNVFPPEVAVFEPSEAEISHTQKATLVCLATGFYPDHVELSWWVNGKEVHSGVCTDPQPLKEQPALNDSRYCLSSRLRVSATFWQNPRNHFRCQVQFYGLSENDEWTQDRAKPVTQIVSAEAWGRADCDVKLVEKSFETDTNLNFQNLSVIGFRILLLKVAGFNLLMTLRLWSSRAKRSGSGATNFSLLKQAGDVEENPGPTSMDWIWRILFLVGAATGAHSFEEVQLVESGGGLVQPGGSLRLSCAASGFSLTNYGVHWVRQAPGKGLEWVSVIWSGGSTDYNAAFISRFTISADTSKNTAYLQMNSLRAEDTAVYYCARELIHAMDNWGQGTLVTVSSTRIQNPDPAVYQLRDSKSSDKSVCLFTDFDSQTNVSQSKDSDVYITDKCVLDMRSMDFKSNSAVAWSNKSDFACANAFNNSIIPEDTFFPSPESSCGFTSESYQQGVLSATILYEILLGKATLYAVLVSALVLMAMVKRKDSRG

SEQ ID NO: 12796 - protein, 760 aa, synthetic construct
MALPVTALLLPLALLLHAARPEVQLVESGGGLVQPGGSLRLSCAASGFSFSDFWMSWVRQAPGKGLEWVATISQAGSEKDYVDSVKGRFTISRDNAKKSLYLQMNSLRAEDTAVYYCASGVYSFDYRGQGTLVTVSSGTGGGGSGGGGSGGGGSEFDFVMTQSPLSLPVTPGEPASISCRSSQSIVHSNGNTYLEWYLQKPGQSPQLLIYKVSNRFSGVPDRFSGSGSGTDFTLKISRVEAEDVGVYYCFQGSHVPLTFGQGTKLEIKRLEDLKNVFPPEVAVFEPSEAEISHTQKATLVCLATGFYPDHVELSWWVNGKEVHSGVCTDPQPLKEQPALNDSRYCLSSRLRVSATFWQNPRNHFRCQVQFYGLSENDEWTQDRAKPVTQIVSAEAWGRADCDVKLVEKSFETDTNLNFQNLSVIGFRILLLKVAGFNLLMTLRLWSSRAKRSGSGATNFSLLKQAGDVEENPGPTSMDWIWRILFLVGAATGAHSFEEVQLVESGAEVKKPGASVKVSCKASGYTFTSYWIHWVRQAPGQGLEWMGENDPSNGRTNYNEKFKNRVTLTVDTSISTAYMELSRLRSDDTAVYYCARGPNYFYSMDYWGQGTMVTVSSTRIQNPDPAVYQLRDSKSSDKSVCLFTDFDSQTNVSQSKDSDVYITDKCVLDMRSMDFKSNSAVAWSNKSDFACANAFNNSIIPEDTFFPSPESSCGFTSESYQQGVLSATILYEILLGKATLYAVLVSALVLMAMVKRKDSRG

SEQ ID NO: 12797 - protein, 753 aa, synthetic construct
MALPVTALLLPLALLLHAARPEVQLVESGGGLVQPGGSLRLSCAASGFSFSDFWMSWVRQAPGKGLEWVATISQAGSEKDYVDSVKGRFTISRDNAKKSLYLQMNSLRAEDTAVYYCASGVYSFDYRGQGTLVTVSSGTGGGGSGGGGSGGGGSEFDIQLTQSPSFLSASVGDRVTITCSARSSISFMYWYQQKPGKAPKLLIYDTSNLASGVPSRFSGSGSGTEFTLTISSLEAEDAATYYCQQWSSYPLTFGQGTKLEIKLEDLKNVFPPEVAVFEPSEAEISHTQKATLVCLATGFYPDHVELSWWVNGKEVHSGVCTDPQPLKEQPALNDSRYCLSSRLRVSATFWQNPRNHFRCQVQFYGLSENDEWTQDRAKPVTQIVSAEAWGRADCDVKLVEKSFETDTNLNFQNLSVIGFRILLLKVAGFNLLMTLRLWSSRAKRSGSGATNFSLLKQAGDVEENPGPTSMDWIWRILFLVGAATGAHSFEQVQLVQSGAEVKKPGASVKVSCKASGYTFTGSWMNWVRQAPGQGLEWIGRIYPGDGETNYNGKFKDRVTITADKSTSTAYMELSSLRSEDTAVYYCARIYGNNVYFDVWGQGTTVTVSSTRIQNPDPAVYQLRDSKSSDKSVCLFTDFDSQTNVSQSKDSDVYITDKCVLDMRSMDFKSNSAVAWSNKSDFACANAFNNSIIPEDTFFPSPESSCGFTSESYQQGVLSATILYEILLGKATLYAVLVSALVLMAMVKRKDSRG

SEQ ID NO: 12798 - protein, 761 aa, synthetic construct
MALPVTALLLPLALLLHAARPEVQLVESGGGLVQPGGSLRLSCAASGFSFSDFWMSWVRQAPGKGLEWVATISQAGSEKDYVDSVKGRFTISRDNAKKSLYLQMNSLRAEDTAVYYCASGVYSFDYRGQGTLVTVSSGTGGGGSGGGGSGGGGSEFQLVLTQSPSASASLGSSVKLTCTLSSGHKTDTIDWYQQQPGKAPRYLMKLEGSGSYNKGSGVPDRFSGSSSGADWYLTISSLQSEDEADYYCGTDYPGNYLFGGGTQLTVLGLEDLKNVFPPEVAVFEPSEAEISHTQKATLVCLATGFYPDHVELSWWVNGKEVHSGVCTDPQPLKEQPALNDSRYCLSSRLRVSATFWQNPRNHFRCQVQFYGLSENDEWTQDRAKPVTQIVSAEAWGRADCDVKLVEKSFETDTNLNFQNLSVIGFRILLLKVAGFNLLMTLRLWSSRAKRSGSGATNFSLLKQAGDVEENPGPTSMDWIWRILFLVGAATGAHSFEQEQLVESGGGLVQPGGSLRLSCAASGFTFSDYYMSWIRQAPGKGLEWVATIYPSSGKTYYADSAKGRLTISSDNAKDSLYLQMNSLRAEDTAVYYCTRDSYADDAALFDIWGQGTTVTVSSTRIQNPDPAVYQLRDSKSSDKSVCLFTDFDSQTNVSQSKDSDVYITDKCVLDMRSMDFKSNSAVAWSNKSDFACANAFNNSIIPEDTFFPSPESSCGFTSESYQQGVLSATILYEILLGKATLYAVLVSALVLMAMVKRKDSRG

SEQ ID NO: 12799 - protein, 753 aa, synthetic construct; identical to SEQ ID NO: 12795

SEQ ID NO: 12800 - protein, 760 aa, synthetic construct; identical to SEQ ID NO: 12796

SEQ ID NO: 12801 - protein, 753 aa, synthetic construct; identical to SEQ ID NO: 12797

SEQ ID NO: 12802 - protein, 761 aa, synthetic construct; identical to SEQ ID NO: 12798

SEQ ID NO: 12803 - protein, 760 aa, synthetic construct
MALPVTALLLPLALLLHAARPEVQLVESGGGLVQPGGSLRLSCAASGFSFSDFWMSWVRQAPGKGLEWVATISQAGSEKDYVDSVKGRFTISRDNAKKSLYLQMNSLRAEDTAVYYCASGVYSFDYRGQGTLVTVSSGTGGGGSGGGGSGGGGSEFDIQLTQSPSSLSASVGDRVSFTCQASQDINNFLNWYQQKPGKAPKLLIYDASNLETGVPSRFSGSGSGTDFTFTISSLQPEDIATYYCQQYGNLPFTFGGGTKVEIKRLEDLKNVFPPEVAVFEPSEAEISHTQKATLVCLATGFYPDHVELSWWVNGKEVHSGVCTDPQPLKEQPALNDSRYCLSSRLRVSATFWQNPRNHFRCQVQFYGLSENDEWTQDRAKPVTQIVSAEAWGRADCDVKLVEKSFETDTNLNFQNLSVIGFRILLLKVAGFNLLMTLRLWSSRAKRSGSGATNFSLLKQAGDVEENPGPTSMDWIWRILFLVGAATGAHSFEQVQLQESGPGLVKPSQTLSLTCTVSGGSISSGGFYWSWIRQHPGKGLEWIGYIHHSGSTHYNPSLKSRVTISIDTSKNLFSLRLSSVTAADTAVYYCASLVYCGGDCYSGFDYWGQGTLVTVSSTRIQNPDPAVYQLRDSKSSDKSVCLFTDFDSQTNVSQSKDSDVYITDKCVLDMRSMDFKSNSAVAWSNKSDFACANAFNNSIIPEDTFFPSPESSCGFTSESYQQGVLSATILYEILLGKATLYAVLVSALVLMAMVKRKDSRG

SEQ ID NO: 12804 - protein, 756 aa, synthetic construct
MALPVTALLLPLALLLHAARPEVQLVESGGGLVQPGGSLRLSCAASGFSFSDFWMSWVRQAPGKGLEWVATISQAGSEKDYVDSVKGRFTISRDNAKKSLYLQMNSLRAEDTAVYYCASGVYSFDYRGQGTLVTVSSGTGGGGSGGGGSGGGGSEFDIQMTQSPSSLSASVGDRVTITCKSSQSVLYSSNQKNYLAWFQQKPGKAPKLLIYWASTRESGVPSRFSGSGSGTDFTLTISSLQPEDFATYFCHQYLSSYTFGQGTKVEIKRLEDLKNVFPPEVAVFEPSEAEISHTQKATLVCLATGFYPDHVELSWWVNGKEVHSGVCTDPQPLKEQPALNDSRYCLSSRLRVSATFWQNPRNHFRCQVQFYGLSENDEWTQDRAKPVTQIVSAEAWGRADCDVKLVEKSFETDTNLNFQNLSVIGFRILLLKVAGFNLLMTLRLWSSRAKRSGSGATNFSLLKQAGDVEENPGPTSMDWIWRILFLVGAATGAHSFEEVQLVESGGGLVQPGGSLRLSCAASGYTFTTYWMHWVRQAPGKGLEWVGYIRPSTGYTEYNQKFKDRFTISADTSKNTAYLQMNSLRAEDTAVYYCARSRWLLDYWGQGTLVTVSTRIQNPDPAVYQLRDSKSSDKSVCLFTDFDSQTNVSQSKDSDVYITDKCVLDMRSMDFKSNSAVAWSNKSDFACANAFNNSIIPEDTFFPSPESSCGFTSESYQQGVLSATILYEILLGKATLYAVLVSALVLMAMVKRKDSRG

SEQ ID NO: 12805 - protein, 753 aa, synthetic construct
MALPVTALLLPLALLLHAARPEVQLVESGGGLVQPGGSLRLSCAASGFSFSDFWMSWVRQAPGKGLEWVATISQAGSEKDYVDSVKGRFTISRDNAKKSLYLQMNSLRAEDTAVYYCASGVYSFDYRGQGTLVTVSSGTGGGGSGGGGSGGGGSEFDIQMTQSPSSLSASVGDRVTITCRASQDISNYLNWYQQKPGKAPKLLIYYTSRLHSGVPSRFSGSGSGTDFTLTISSLQPEDFATYYCQQGNTLPYTFGQGTKVEIKRLEDLKNVFPPEVAVFEPSEAEISHTQKATLVCLATGFYPDHVELSWWVNGKEVHSGVCTDPQPLKEQPALNDSRYCLSSRLRVSATFWQNPRNHFRCQVQFYGLSENDEWTQDRAKPVTQIVSAEAWGRADCDVKLVEKSFETDTNLNFQNLSVIGFRILLLKVAGFNLLMTLRLWSSRAKRSGSGATNFSLLKQAGDVEENPGPTSMDWIWRILFLVGAATGAHSFEEVQLVESGGGLVQPGGSLRLSCAASGFTFSDYFMSWVRQAPGKGLEWVATISNGGTYTYYPDSVKGRFTISRDNSKNTLYLQMNSLRAEDTAVYYCARFDGYIFDYWGQGTLVTVSSTRIQNPDPAVYQLRDSKSSDKSVCLFTDFDSQTNVSQSKDSDVYITDKCVLDMRSMDFKSNSAVAWSNKSDFACANAFNNSIIPEDTFFPSPESSCGFTSESYQQGVLSATILYEILLGKATLYAVLVSALVLMAMVKRKDSRG

SEQ ID NO: 12806 - protein, 758 aa, synthetic construct
MALPVTALLLPLALLLHAARPEVQLVESGGGLVQPGGSLRLSCAASGFSFSDFWMSWVRQAPGKGLEWVATISQAGSEKDYVDSVKGRFTISRDNAKKSLYLQMNSLRAEDTAVYYCASGVYSFDYRGQGTLVTVSSGTGGGGSGGGGSGGGGSEFDIQMTQTTSSLSASLGDRVTISCRASQDISKYLNWYQQKPDGTVKLLIYHTSRLHSGVPSRFSGSGSGTDYSLTISNLEQEDIATYFCQQGNTLPYTFGGGTKLEITLEIQNPDPAVYQLRDSKSSDKSVCLFTDFDSQTNVSQSKDSDVYITDKCVLDMRSMDFKSNSAVAWSNKSDFACANAFNNSIIPEDTFFPSPESSCGFTSESYQQGVLSATILYEILLGKATLYAVLVSALVLMAMVKRKDSRGRAKRSGSGVKQTLNFDLLKLAGDVESNPGPTSMDWIWRILFLVGAATGAHSFEVKLQESGPGLVAPSQSLSVTCTVSGVSLPDYGVSWIRQPPRKGLEWLGVIWGSETTYYNSALKSRLTIIKDNSKSQVFLKMNSLQTDDTAIYYCAKHYYYGGSYAMDYWGQGTSVTVSSTREDLKNVFPPEVAVFEPSEAEISHTQKATLVCLATGFYPDHVELSWWVNGKEVHSGVCTDPQPLKEQPALNDSRYCLSSRLRVSATFWQNPRNHFRCQVQFYGLSENDEWTQDRAKPVTQIVSAEAWGRADCDVKLVEKSFETDTNLNFQNLSVIGFRILLLKVAGFNLLMTLRLWSS

SEQ ID NO: 12807 - protein, 759 aa, synthetic construct
MALPVTALLLPLALLLHAARPEVQLVESGGGLVQPGGSLRLSCAASGFSFSDFWMSWVRQAPGKGLEWVATISQAGSEKDYVDSVKGRFTISRDNAKKSLYLQMNSLRAEDTAVYYCASGVYSFDYRGQGTLVTVSSGTGGGGSGGGGSGGGGSEFEIVMTQSPATLSLSPGERATLSCRASQDISKYLNWYQQKPGQAPRLLIYHTSRLHSGIPARFSGSGSGTDYTLTISSLQPEDFAVYFCQQGNTLPYTFGQGTKLEIKLEIQNPDPAVYQLRDSKSSDKSVCLFTDFDSQTNVSQSKDSDVYITDKCVLDMRSMDFKSNSAVAWSNKSDFACANAFNNSIIPEDTFFPSPESSCGFTSESYQQGVLSATILYEILLGKATLYAVLVSALVLMAMVKRKDSRGRAKRSGSGVKQTLNFDLLKLAGDVESNPGPTSMDWIWRILFLVGAATGAHSFEQVQLQESGPGLVKPSETLSLTCTVSGVSLPDYGVSWIRQPPGKGLEWIGVIWGSETTYYNSSLKSRVTISKDNSKNQVSLKLSSVTAADTAVYYCAKHYYYGGSYAMDYWGQGTLVTVSSTREDLKNVFPPEVAVFEPSEAEISHTQKATLVCLATGFYPDHVELSWWVNGKEVHSGVCTDPQPLKEQPALNDSRYCLSSRLRVSATFWQNPRNHFRCQVQFYGLSENDEWTQDRAKPVTQIVSAEAWGRADCDVKLVEKSFETDTNLNFQNLSVIGFRILLLKVAGFNLLMTLRLWSS

SEQ ID NO: 12808 - protein, 760 aa, synthetic construct
MALPVTALLLPLALLLHAARPEVQLVESGGGLVQPGGSLRLSCAASGFSFSDFWMSWVRQAPGKGLEWVATISQAGSEKDYVDSVKGRFTISRDNAKKSLYLQMNSLRAEDTAVYYCASGVYSFDYRGQGTLVTVSSGTGGGGSGGGGSGGGGSEFDEIVLTQSPATLSLSPGERATLSCSASSSVSYMHWYQQKPGQAPRLLIYDTSKLASGIPARFSGSGSGTDFTLTISSLEPEDVAVYYCFQGSVYPFTFGQGTKLEIKRLEIQNPDPAVYQLRDSKSSDKSVCLFTDFDSQTNVSQSKDSDVYITDKCVLDMRSMDFKSNSAVAWSNKSDFACANAFNNSIIPEDTFFPSPESSCGFTSESYQQGVLSATILYEILLGKATLYAVLVSALVLMAMVKRKDSRGRAKRSGSGVKQTLNFDLLKLAGDVESNPGPTSMDWIWRILFLVGAATGAHSFEQVQLQESGPGLVKPSQTLSLTCTVSGGSISTSGMGVGWIRQHPGKGLEWIGHIWWDDDKRYNPALKSRVTISVDTSKNQFSLKLSSVTAADTAVYYCARMELWSYYFDYWGQGTLVTVSSTREDLKNVFPPEVAVFEPSEAEISHTQKATLVCLATGFYPDHVELSWWVNGKEVHSGVCTDPQPLKEQPALNDSRYCLSSRLRVSATFWQNPRNHFRCQVQFYGLSENDEWTQDRAKPVTQIVSAEAWGRADCDVKLVEKSFETDTNLNFQNLSVIGFRILLLKVAGFNLLMTLRLWSS

SEQ ID NO: 12809 - protein, 758 aa, synthetic construct
MALPVTALLLPLALLLHAARPEVQLVESGGGLVQPGGSLRLSCAASGFSFSDFWMSWVRQAPGKGLEWVATISQAGSEKDYVDSVKGRFTISRDNAKKSLYLQMNSLRAEDTAVYYCASGVYSFDYRGQGTLVTVSSGTGGGGSGGGGSGGGGSEFDYIHVTQSPSSLSVSIGDRVTINCQTSQGVGSDLHWYQHKPGRAPKLLIHHASSVEDGVPSRFSGTGFHTSFNLTINDLQADDIGTYYCQVLQSFGRGSRLDTKLEIQNPDPAVYQLRDSKSSDKSVCLFTDFDSQTNVSQSKDSDVYITDKCVLDMRSMDFKSNSAVAWSNKSDFACANAFNNSIIPEDTFFPSPESSCGFTSESYQQGVLSATILYEILLGKATLYAVLVSALVLMAMVKRKDSRGRAKRSGSGVKQTLNFDLLKLAGDVESNPGPTSMDWIWRILFLVGAATGAHSFERAHLVQSGTAMKKPGASVRVSCQTSGYTFTAHILFWFRQAPGRGLEWVGWIKPQYGAVNFGGGFRDRVTLTRDVYREIAYMDIRGLKPDDTAVYYCARDRSYGDSSWALDAWGQGTTVVVSATREDLKNVFPPEVAVFEPSEAEISHTQKATLVCLATGFYPDHVELSWWVNGKEVHSGVCTDPQPLKEQPALNDSRYCLSSRLRVSATFWQNPRNHFRCQVQFYGLSENDEWTQDRAKPVTQIVSAEAWGRADCDVKLVEKSFETDTNLNFQNLSVIGFRILLLKVAGFNLLMTLRLWSS

SEQ ID NO: 12810 - protein, 768 aa, synthetic construct
MALPVTALLLPLALLLHAARPEVQLVESGGGLVQPGGSLRLSCAASGFSFSDFWMSWVRQAPGKGLEWVATISQAGSEKDYVDSVKGRFTISRDNAKKSLYLQMNSLRAEDTAVYYCASGVYSFDYRGQGTLVTVSSGTGGGGSGGGGSGGGGSEFDVQMIQTPDSLAVSLGQRATISCRASESVDNYGISFMHWYQQKPGQSPKLLIYRASNLESGIPARFSGSGSRTDFTLTINPVETDDVATYYCQQNNKDPPTFGGGTKLEIKLEIQNPDPAVYQLRDSKSSDKSVCLFTDFDSQTNVSQSKDSDVYITDKCVLDMRSMDFKSNSAVAWSNKSDFACANAFNNSIIPEDTFFPSPESSCGFTSESYQQGVLSATILYEILLGKATLYAVLVSALVLMAMVKRKDSRGRAKRSGSGVKQTLNFDLLKLAGDVESNPGPTSMDWIWRILFLVGAATGAHSFEGGGGSQVQLQQSGAELVKPGASVKISCKASGYAFSSYWMNWVKQRPGKGLEWIGQIYPGDGDTTYNGKFKGKATLTADKSSSTVYMQLNSLTSEDSAVYFCVRYYYGSSGYFDYWGQGTTLTVSSTREDLKNVFPPEVAVFEPSEAEISHTQKATLVCLATGFYPDHVELSWWVNGKEVHSGVCTDPQPLKEQPALNDSRYCLSSRLRVSATFWQNPRNHFRCQVQFYGLSENDEWTQDRAKPVTQIVSAEAWGRADCDVKLVEKSFETDTNLNFQNLSVIGFRILLLKVAGFNLLMTLRLWSS

SEQ ID NO: 12811 - protein, 759 aa, synthetic construct
MALPVTALLLPLALLLHAARPEVQLVESGGGLVQPGGSLRLSCAASGFSFSDFWMSWVRQAPGKGLEWVATISQAGSEKDYVDSVKGRFTISRDNAKKSLYLQMNSLRAEDTAVYYCASGVYSFDYRGQGTLVTVSSGTGGGGSGGGGSGGGGSEFDVQMIQTPSSLSASLGDRVTISCRASQDIGNYLNWYQQKPDGTVKLLIYYTSRLHSGVPSRFSGSGSGTEYSLTISNLEQEDIATYFCQQGSALPPTFGGGTKLEINLEIQNPDPAVYQLRDSKSSDKSVCLFTDFDSQTNVSQSKDSDVYITDKCVLDMRSMDFKSNSAVAWSNKSDFACANAFNNSIIPEDTFFPSPESSCGFTSESYQQGVLSATILYEILLGKATLYAVLVSALVLMAMVKRKDSRGRAKRSGSGVKQTLNFDLLKLAGDVESNPGPTSMDWIWRILFLVGAATGAHSFEALQLQQSGAELVRPGASVTLSCKASGYTFTDYEMHWVKQTPVHGLEWIGAIDPETGGTAYNQKFEGKAILTADKSSSTAYMELRSLTSEDSPVYYCARRRYYGSSSFDYWGQGTTLTVSSTREDLKNVFPPEVAVFEPSEAEISHTQKATLVCLATGFYPDHVELSWWVNGKEVHSGVCTDPQPLKEQPALNDSRYCLSSRLRVSATFWQNPRNHFRCQVQFYGLSENDEWTQDRAKPVTQIVSAEAWGRADCDVKLVEKSFETDTNLNFQNLSVIGFRILLLKVAGFNLLMTLRLWSS

SEQ ID NO: 12812 - protein, 763 aa, synthetic construct
MALPVTALLLPLALLLHAARPEVQLVESGGGLVQPGGSLRLSCAASGFSFSDFWMSWVRQAPGKGLEWVATISQAGSEKDYVDSVKGRFTISRDNAKKSLYLQMNSLRAEDTAVYYCASGVYSFDYRGQGTLVTVSSGTGGGGSGGGGSGGGGSEFDIVLTQSPASLAVSLGQRATISCRASKSVSTSGYSYLHWYQQKPGQPPKLLIYLASNLESGVPARFSGSGSGTDFTLNIHPVEEEDAATYYCQHSRELPFTFGSGTKLEIKLEIQNPDPAVYQLRDSKSSDKSVCLFTDFDSQTNVSQSKDSDVYITDKCVLDMRSMDFKSNSAVAWSNKSDFACANAFNNSIIPEDTFFPSPESSCGFTSESYQQGVLSATILYEILLGKATLYAVLVSALVLMAMVKRKDSRGRAKRSGSGVKQTLNFDLLKLAGDVESNPGPTSMDWIWRILFLVGAATGAHSFEQVQLVESGGGLVQPGGSLKLSCAASGFDFSRYWMSWVRQAPGKGLEWIGEINPTSSTINFTPSLKDKVFISRDNAKNTLYLQMSKVRSEDTALYYCARGNYYRYGDAMDYWGQGTSVTVSTREDLKNVFPPEVAVFEPSEAEISHTQKATLVCLATGFYPDHVELSWWVNGKEVHSGVCTDPQPLKEQPALNDSRYCLSSRLRVSATFWQNPRNHFRCQVQFYGLSENDEWTQDRAKPVTQIVSAEAWGRADCDVKLVEKSFETDTNLNFQNLSVIGFRILLLKVAGFNLLMTLRLWSS

SEQ ID NO: 12813 - protein, 761 aa, synthetic construct
MALPVTALLLPLALLLHAARPEVQLVESGGGLVQPGGSLRLSCAASGFSFSDFWMSWVRQAPGKGLEWVATISQAGSEKDYVDSVKGRFTISRDNAKKSLYLQMNSLRAEDTAVYYCASGVYSFDYRGQGTLVTVSSGTGGGGSGGGGSGGGGSEFDIQMTQSPSSLSASVGDRVTITCSASQDISNYLNWYQQKPGKAPKLLIYYTSNLHSGVPSRFSGSGSGTDFTLTISSLQPEDFATYYCQQYRKLPWTFGQGTKLEIKRLEIQNPDPAVYQLRDSKSSDKSVCLFTDFDSQTNVSQSKDSDVYITDKCVLDMRSMDFKSNSAVAWSNKSDFACANAFNNSIIPEDTFFPSPESSCGFTSESYQQGVLSATILYEILLGKATLYAVLVSALVLMAMVKRKDSRGRAKRSGSGVKQTLNFDLLKLAGDVESNPGPTSMDWIWRILFLVGAATGAHSFEQVQLVQSGAEVKKPGSSVKVSCKASGGTFSNYWMHWVRQAPGQGLEWMGATYRGHSDTYYNQKFKGRVTITADKSTSTAYMELSSLRSEDTAVYYCARGAIYDGYDVLDNWGQGTLVTVSSTREDLKNVFPPEVAVFEPSEAEISHTQKATLVCLATGFYPDHVELSWWVNGKEVHSGVCTDPQPLKEQPALNDSRYCLSSRLRVSATFWQNPRNHFRCQVQFYGLSENDEWTQDRAKPVTQIVSAEAWGRADCDVKLVEKSFETDTNLNFQNLSVIGFRILLLKVAGFNLLMTLRLWSS

SEQ ID NO: 12814 - protein, 761 aa, synthetic construct
MALPVTALLLPLALLLHAARPEVQLVESGGGLVQPGGSLRLSCAASGFSFSDFWMSWVRQAPGKGLEWVATISQAGSEKDYVDSVKGRFTISRDNAKKSLYLQMNSLRAEDTAVYYCASGVYSFDYRGQGTLVTVSSGTGGGGSGGGGSGGGGSEFDIVLTQSPATLSLSPGDRATISCRASESVTILGSHLIYWYQQKPGQPPRLLIQLASNVQTGVPARFSGSGSRTDFTLTISSVEPEDFAVYYCLQSRTIPRTFGQGTKLEIKRLEIQNPDPAVYQLRDSKSSDKSVCLFTDFDSQTNVSQSKDSDVYITDKCVLDMRSMDFKSNSAVAWSNKSDFACANAFNNSIIPEDTFFPSPESSCGFTSESYQQGVLSATILYEILLGKATLYAVLVSALVLMAMVKRKDSRGRAKRSGSGVKQTLNFDLLKLAGDVESNPGPTSMDWIWRILFLVGAATGAHSFEQVQLVQSGPEVKKPGESVKISCKASGYTFRHYSMNWVKQAPGQGLKWMGRINTESGVPIYADDFKGRFSFTVDTSASTAYLEISSLTSEDTAVYFCSNDYLYSLDFWGQGTTLTVSSTREDLKNVFPPEVAVFEPSEAEISHTQKATLVCLATGFYPDHVELSWWVNGKEVHSGVCTDPQPLKEQPALNDSRYCLSSRLRVSATFWQNPRNHFRCQVQFYGLSENDEWTQDRAKPVTQIVSAEAWGRADCDVKLVEKSFETDTNLNFQNLSVIGFRILLLKVAGFNLLMTLRLWSS

SEQ ID NO: 12815 - protein, 762 aa, synthetic construct
MALPVTALLLPLALLLHAARPEVQLVESGGGLVQPGGSLRLSCAASGFSFSDFWMSWVRQAPGKGLEWVATISQAGSEKDYVDSVKGRFTISRDNAKKSLYLQMNSLRAEDTAVYYCASGVYSFDYRGQGTLVTVSSGTGGGGSGGGGSGGGGSEFQSVLTQPPSVSGAPGQRVTISCTGSSSNIGAGFDVHWYQQLPGTAPKLLIYGNSNRPSGVPDRFSGSKSGTSASLAITGLQAEDEADYYCQSYDSSLSGYVFGTGTKVTVLGLEIQNPDPAVYQLRDSKSSDKSVCLFTDFDSQTNVSQSKDSDVYITDKCVLDMRSMDFKSNSAVAWSNKSDFACANAFNNSIIPEDTFFPSPESSCGFTSESYQQGVLSATILYEILLGKATLYAVLVSALVLMAMVKRKDSRGRAKRSGSGVKQTLNFDLLKLAGDVESNPGPTSMDWIWRILFLVGAATGAHSFEQVQLVQSGAEVKKPGASVKVSCKASGYTFTDYYMHWVRQAPGQRLEWMGWINPNSGGTNYAQKFQDRITVTRDTSSNTGYMELTRLRSDDTAVYYCARSPYSGVLDKWGQGTLVTVSSTREDLKNVFPPEVAVFEPSEAEISHTQKATLVCLATGFYPDHVELSWWVNGKEVHSGVCTDPQPLKEQPALNDSRYCLSSRLRVSATFWQNPRNHFRCQVQFYGLSENDEWTQDRAKPVTQIVSAEAWGRADCDVKLVEKSFETDTNLNFQNLSVIGFRILLLKVAGFNLLMTLRLWSS

SEQ ID NO: 12816 - protein, 759 aa, synthetic construct
MALPVTALLLPLALLLHAARPEVQLVESGGGLVQPGGSLRLSCAASGFSFSDFWMSWVRQAPGKGLEWVATISQAGSEKDYVDSVKGRFTISRDNAKKSLYLQMNSLRAEDTAVYYCASGVYSFDYRGQGTLVTVSSGTGGGGSGGGGSGGGGSEFQAVLTQPPSASGTPGQRVTISCSGSSSNIGSYTVSWYQQLPGTAPKFLIYSNNQRPSGVPDRFSGSKSGTSASLAISGLQSEDEADYYCAAWDDSLNGYVFGTGTKVTVLGLEIQNPDPAVYQLRDSKSSDKSVCLFTDFDSQTNVSQSKDSDVYITDKCVLDMRSMDFKSNSAVAWSNKSDFACANAFNNSIIPEDTFFPSPESSCGFTSESYQQGVLSATILYEILLGKATLYAVLVSALVLMAMVKRKDSRGRAKRSGSGVKQTLNFDLLKLAGDVESNPGPTSMDWIWRILFLVGAATGAHSFEVQLVQSGAEVKKPGESLKISCKGSGYDFTTYWIGWVRQMPGKGLEWMGIIYPGDSDTRYSPSVRGRVTISADKSINTAYLQWSSLEASDTAMYYCARMWTFSQDGWGQGTLVTVSSTREDLKNVFPPEVAVFEPSEAEISHTQKATLVCLATGFYPDHVELSWWVNGKEVHSGVCTDPQPLKEQPALNDSRYCLSSRLRVSATFWQNPRNHFRCQVQFYGLSENDEWTQDRAKPVTQIVSAEAWGRADCDVKLVEKSFETDTNLNFQNLSVIGFRILLLKVAGFNLLMTLRLWSS

SEQ ID NO: 12817 - protein, 762 aa, synthetic construct
MALPVTALLLPLALLLHAARPEVQLVESGGGLVQPGGSLRLSCAASGFSFSDFWMSWVRQAPGKGLEWVATISQAGSEKDYVDSVKGRFTISRDNAKKSLYLQMNSLRAEDTAVYYCASGVYSFDYRGQGTLVTVSSGTGGGGSGGGGSGGGGSEFDIVMTQSPDSLAVSLGERATINCKSSQSILYSSNQKNYLAWYQQKPGQSPKLLIYWASTRESGVPDRFSGSGSGTDFTLTISSLQAEDVAVYYCHQYISSYTFGQGTKLEIKLEIQNPDPAVYQLRDSKSSDKSVCLFTDFDSQTNVSQSKDSDVYITDKCVLDMRSMDFKSNSAVAWSNKSDFACANAFNNSIIPEDTFFPSPESSCGFTSESYQQGVLSATILYEILLGKATLYAVLVSALVLMAMVKRKDSRGRAKRSGSGVKQTLNFDLLKLAGDVESNPGPTSMDWIWRILFLVGAATGAHSFEQVQLVQSGAEVKKPGASVKVSCKASGYTFASQWMHWMRQAPGQGLEWIGWINPGNVNTKYNEKFKGRATLTVDTSTNTAYMELSSLRSEDTAVYYCARSTWYRPLDYWGQGTLVTVSSTREDLKNVFPPEVAVFEPSEAEISHTQKATLVCLATGFYPDHVELSWWVNGKEVHSGVCTDPQPLKEQPALNDSRYCLSSRLRVSATFWQNPRNHFRCQVQFYGLSENDEWTQDRAKPVTQIVSAEAWGRADCDVKLVEKSFETDTNLNFQNLSVIGFRILLLKVAGFNLLMTLRLWSS

SEQ ID NO: 12818 - protein, 762 aa, synthetic construct
MALPVTALLLPLALLLHAARPEVQLVESGGGLVQPGGSLRLSCAASGFSFSDFWMSWVRQAPGKGLEWVATISQAGSEKDYVDSVKGRFTISRDNAKKSLYLQMNSLRAEDTAVYYCASGVYSFDYRGQGTLVTVSSGTGGGGSGGGGSGGGGSEFDHIVLTQSPSSLSASLGDRVTISCRASQDISTYLNWYQQKPDGTVKLLIFYTSRLHAGVPSRFSGSGSGTHHSLTISNLEQEDIATYFCQQGNSLPFTFGSGTKLEIKRLEIQNPDPAVYQLRDSKSSDKSVCLFTDFDSQTNVSQSKDSDVYITDKCVLDMRSMDFKSNSAVAWSNKSDFACANAFNNSIIPEDTFFPSPESSCGFTSESYQQGVLSATILYEILLGKATLYAVLVSALVLMAMVKRKDSRGRAKRSGSGVKQTLNFDLLKLAGDVESNPGPTSMDWIWRILFLVGAATGAHSFEQVQLKESGPELEKPGASVKISCKASGYSFTAYSMNWVKQNNGMSLEWIGSIDPYYGDTKYAQKFKGKATLTVDKASSTAYLQLKSLTSEDSAVYYCARRMITTGDWYFDVWGAGTTVTVSSTREDLKNVFPPEVAVFEPSEAEISHTQKATLVCLATGFYPDHVELSWWVNGKEVHSGVCTDPQPLKEQPALNDSRYCLSSRLRVSATFWQNPRNHFRCQVQFYGLSENDEWTQDRAKPVTQIVSAEAWGRADCDVKLVEKSFETDTNLNFQNLSVIGFRILLLKVAGFNLLMTLRLWSS

SEQ ID NO: 12819 - protein, 762 aa, synthetic construct; identical to SEQ ID NO: 12818

SEQ ID NO: 12820 - protein, 762 aa, synthetic construct
MALPVTALLLPLALLLHAARPEVQLVESGGGLVQPGGSLRLSCAASGFSFSDFWMSWVRQAPGKGLEWVATISQAGSEKDYVDSVKGRFTISRDNAKKSLYLQMNSLRAEDTAVYYCASGVYSFDYRGQGTLVTVSSGTGGGGSGGGGSGGGGSEFDEIVLTQSPATLSLSPGERATLSCRASQSVSSYLAWYQQKPGQAPRLLIYDASNRATGIPARFSGSGSGTDFTLTISSLEPEDFAVYYCQQRSNWPITFGQGTRLEIKLEIQNPDPAVYQLRDSKSSDKSVCLFTDFDSQTNVSQSKDSDVYITDKCVLDMRSMDFKSNSAVAWSNKSDFACANAFNNSIIPEDTFFPSPESSCGFTSESYQQGVLSATILYEILLGKATLYAVLVSALVLMAMVKRKDSRGRAKRSGSGVKQTLNFDLLKLAGDVESNPGPTSMDWIWRILFLVGAATGAHSFEEVQLVESGGGLVQPGRSLRLSCAASGFTFNDYAMHWVRQAPGKGLEWVSTISWNSGSIGYADSVKGRFTISRDNAKKSLYLQMNSLRAEDTALYYCAKDIQYGNYYYGMDVWGQGTTVTVSSTREDLKNVFPPEVAVFEPSEAEISHTQKATLVCLATGFYPDHVELSWWVNGKEVHSGVCTDPQPLKEQPALNDSRYCLSSRLRVSATFWQNPRNHFRCQVQFYGLSENDEWTQDRAKPVTQIVSAEAWGRADCDVKLVEKSFETDTNLNFQNLSVIGFRILLLKVAGFNLLMTLRLWSS

SEQ ID NO: 12821 - protein, 764 aa, synthetic construct
MALPVTALLLPLALLLHAARPEVQLVESGGGLVQPGGSLRLSCAASGFSFSDFWMSWVRQAPGKGLEWVATISQAGSEKDYVDSVKGRFTISRDNAKKSLYLQMNSLRAEDTAVYYCASGVYSFDYRGQGTLVTVSSGTGGGGSGGGGSGGGGSEFDIVMTQTPLSLPVTPGEPASISCRSSKSLLHSNGITYLYWYLQKPGQSPQLLIYQMSNLVSGVPDRFSGSGSGTDFTLKISRVEAEDVGVYYCAQNLELPYTFGGGTKVEIKRLEIQNPDPAVYQLRDSKSSDKSVCLFTDFDSQTNVSQSKDSDVYITDKCVLDMRSMDFKSNSAVAWSNKSDFACANAFNNSIIPEDTFFPSPESSCGFTSESYQQGVLSATILYEILLGKATLYAVLVSALVLMAMVKRKDSRGRAKRSGSGVKQTLNFDLLKLAGDVESNPGPTSMDWIWRILFLVGAATGAHSFEQVQLVQSGAEVKKPGSSVKVSCKASGYAFSYSWINWVRQAPGQGLEWMGRIFPGDGDTDYNGKFKGRVTITADKSTSTAYMELSSLRSEDTAVYYCARNVFDGYWLVYWGQGTLVTVSSTREDLKNVFPPEVAVFEPSEAEISHTQKATLVCLATGFYPDHVELSWWVNGKEVHSGVCTDPQPLKEQPALNDSRYCLSSRLRVSATFWQNPRNHFRCQVQFYGLSENDEWTQDRAKPVTQIVSAEAWGRADCDVKLVEKSFETDTNLNFQNLSVIGFRILLLKVAGFNLLMTLRLWSS

SEQ ID NO: 12822 - protein, 765 aa, synthetic construct
MALPVTALLLPLALLLHAARPEVQLVESGGGLVQPGGSLRLSCAASGFSFSDFWMSWVRQAPGKGLEWVATISQAGSEKDYVDSVKGRFTISRDNAKKSLYLQMNSLRAEDTAVYYCASGVYSFDYRGQGTLVTVSSGTGGGGSGGGGSGGGGSEFDIQMTQSPSSLSASVGDRVTITCRSSQSIVHSVGNTFLEWYQQKPGKAPKLLIYKVSNRFSGVPSRFSGSGSGTDFTLTISSLQPEDFATYYCFQGSQFPYTFGQGTKVEIKRLEIQNPDPAVYQLRDSKSSDKSVCLFTDFDSQTNVSQSKDSDVYITDKCVLDMRSMDFKSNSAVAWSNKSDFACANAFNNSIIPEDTFFPSPESSCGFTSESYQQGVLSATILYEILLGKATLYAVLVSALVLMAMVKRKDSRGRAKRSGSGVKQTLNFDLLKLAGDVESNPGPTSMDWIWRILFLVGAATGAHSFEEVQLVESGGGLVQPGGSLRLSCAASGYEFSRSWMNWVRQAPGKGLEWVGRIYPGDGDTNYSGKFKGRFTISADTSKNTAYLQMNSLRAEDTAVYYCARDGSSWDWYFDVWGQGTLVTVSSTREDLKNVFPPEVAVFEPSEAEISHTQKATLVCLATGFYPDHVELSWWVNGKEVHSGVCTDPQPLKEQPALNDSRYCLSSRLRVSATFWQNPRNHFRCQVQFYGLSENDEWTQDRAKPVTQIVSAEAWGRADCDVKLVEKSFETDTNLNFQNLSVIGFRILLLKVAGFNLLMTLRLWSS

SEQ ID NO: 12823 - protein, 763 aa, synthetic construct
MALPVTALLLPLALLLHAARPEVQLVESGGGLVQPGGSLRLSCAASGFSFSDFWMSWVRQAPGKGLEWVATISQAGSEKDYVDSVKGRFTISRDNAKKSLYLQMNSLRAEDTAVYYCASGVYSFDYRGQGTLVTVSSGTGGGGSGGGGSGGGGSEFDIQMTQSPSSLSASVGDRVTITCRASQTIWSYLNWYQQRPGKAPNLLIYAASSLQSGVPSRFSGRGSGTDFTLTISSLQAEDFATYYCQQSYSIPQIFGQGTKLEIKLEIQNPDPAVYQLRDSKSSDKSVCLFTDFDSQTNVSQSKDSDVYITDKCVLDMRSMDFKSNSAVAWSNKSDFACANAFNNSIIPEDTFFPSPESSCGFTSESYQQGVLSATILYEILLGKATLYAVLVSALVLMAMVKRKDSRGRAKRSGSGVKQTLNFDLLKLAGDVESNPGPTSMDWIWRILFLVGAATGAHSFEQVQLQQSGPGLVKPSQTLSLTCAISGDSVSSNSAAWNWIRQSPSRGLEWLGRTYYRSKWYNDYAVSVKSRITINPDTSKNQFSLQLNSVTPEDTAVYYCAREVTGDLEDAFDIWGQGTMVTVSSTREDLKNVFPPEVAVFEPSEAEISHTQKATLVCLATGFYPDHVELSWWVNGKEVHSGVCTDPQPLKEQPALNDSRYCLSSRLRVSATFWQNPRNHFRCQVQFYGLSENDEWTQDRAKPVTQIVSAEAWGRADCDVKLVEKSFETDTNLNFQNLSVIGFRILLLKVAGFNLLMTLRLWSS

SEQ ID NO: 12824 - protein, 756 aa, synthetic construct
MALPVTALLLPLALLLHAARPEVQLVESGGGLVQPGGSLRLSCAASGFSFSDFWMSWVRQAPGKGLEWVATISQAGSEKDYVDSVKGRFTISRDNAKKSLYLQMNSLRAEDTAVYYCASGVYSFDYRGQGTLVTVSSGTGGGGSGGGGSGGGGSEFDIQMTQSPATIENTSLSASVGDRVTITCRASQGISSWLTWYQQKPEKAPKSLIYAASSLQSGVPSRFSGSGSGTDFTLTISSLQPEDFATYYCQQYDSYPITFGQGTRLEIKLEIQNPDPAVYQLRDSKSSDKSVCLFTDFDSQTNVSQSKDSDVYITDKCVLDMRSMDFKSNSAVAWSNKSDFACANAFNNSIIPEDTFFPSPESSCGFTSESYQQGVLSATILYEILLGKATLYAVLVSALVLMAMVKRKDSRGRAKRSGSGVKQTLNFDLLKLAGDVESNPGPTSMDWIWRILFLVGAATGAHSFEQVQLQQWGAGLLKPSETLSLTCAVYGGSFSAYYWSWIRQPPGKGLEWIGDINHGGGTNYNPSLKSRVTISVDTSKNQFSLKLNSVTAADTAVYYCASLTAYWGQGSLVTVSSTREDLKNVFPPEVAVFEPSEAEISHTQKATLVCLATGFYPDHVELSWWVNGKEVHSGVCTDPQPLKEQPALNDSRYCLSSRLRVSATFWQNPRNHFRCQVQFYGLSENDEWTQDRAKPVTQIVSAEAWGRADCDVKLVEKSFETDTNLNFQNLSVIGFRILLLKVAGFNLLMTLRLWSS

SEQ ID NO: 12825 - protein, 761 aa, synthetic construct
MALPVTALLLPLALLLHAARPEVQLVESGGGLVQPGGSLRLSCAASGFSFSDFWMSWVRQAPGKGLEWVATISQAGSEKDYVDSVKGRFTISRDNAKKSLYLQMNSLRAEDTAVYYCASGVYSFDYRGQGTLVTVSSGTGGGGSGGGGSGGGGSEFDEIVLTQSPDSLAVSLGERATINCKASQSVDFDGDSYLNWYQQKPGQPPKVLIYAASTLQSGVPSRFSGSGSGTDFTLTINSLEAEDAATYYCQQSNEDPWTFGGGTKVEIKLEIQNPDPAVYQLRDSKSSDKSVCLFTDFDSQTNVSQSKDSDVYITDKCVLDMRSMDFKSNSAVAWSNKSDFACANAFNNSIIPEDTFFPSPESSCGFTSESYQQGVLSATILYEILLGKATLYAVLVSALVLMAMVKRKDSRGRAKRSGSGVKQTLNFDLLKLAGDVESNPGPTSMDWIWRILFLVGAATGAHSFEQVQLVQSGAEVKKPGASVKVSCKVSGYTFTDYYITWVRQAPGQALEWMGWIYPGSGNTKYSQKFQGRFVFSVDTSASTAYLQLSSLKAEDTAVYYCANYGNYWFAYWGQGTLVTVSSTREDLKNVFPPEVAVFEPSEAEISHTQKATLVCLATGFYPDHVELSWWVNGKEVHSGVCTDPQPLKEQPALNDSRYCLSSRLRVSATFWQNPRNHFRCQVQFYGLSENDEWTQDRAKPVTQIVSAEAWGRADCDVKLVEKSFETDTNLNFQNLSVIGFRILLLKVAGFNLLMTLRLWSS

SEQ ID NO: 12826 - protein, 758 aa, synthetic construct
MALPVTALLLPLALLLHAARPEVQLVESGGGLVQPGGSLRLSCAASGFSFSDFWMSWVRQAPGKGLEWVATISQAGSEKDYVDSVKGRFTISRDNAKKSLYLQMNSLRAEDTAVYYCASGVYSFDYRGQGTLVTVSSGTGGGGSGGGGSGGGGSEFDIQMTQSPSSLSASVGDRVTITCRASQGISSWLAWYQQKPEKAPKSLIYAASSLQSGVPSRFSGSGSGTDFTLTISSLQPEDFATYYCQQYNSYPPTFGGGTKVEIKLEIQNPDPAVYQLRDSKSSDKSVCLFTDFDSQTNVSQSKDSDVYITDKCVLDMRSMDFKSNSAVAWSNKSDFACANAFNNSIIPEDTFFPSPESSCGFTSESYQQGVLSATILYEILLGKATLYAVLVSALVLMAMVKRKDSRGRAKRSGSGVKQTLNFDLLKLAGDVESNPGPTSMDWIWRILFLVGAATGAHSFEEVQLVQSGGGLVHPGGSLRLSCAGSGFAFSSSTMHWIRQAPGKGLEWISLIGSGGGIYYGDSVKGRFTISRDNAKNSLYLQMNSLRAEDMAVYYCVRGYFDWVDYFDYWGQGTLVTVSSTREDLKNVFPPEVAVFEPSEAEISHTQKATLVCLATGFYPDHVELSWWVNGKEVHSGVCTDPQPLKEQPALNDSRYCLSSRLRVSATFWQNPRNHFRCQVQFYGLSENDEWTQDRAKPVTQIVSAEAWGRADCDVKLVEKSFETDTNLNFQNLSVIGFRILLLKVAGFNLLMTLRLWSS

SEQ ID NO: 12827 - protein, 768 aa, synthetic construct
MALPVTALLLPLALLLHAARPEVQLVESGGGLVQPGGSLRLSCAASGFSFSDFWMSWVRQAPGKGLEWVATISQAGSEKDYVDSVKGRFTISRDNAKKSLYLQMNSLRAEDTAVYYCASGVYSFDYRGQGTLVTVSSGTGGGGSGGGGSGGGGSEFDDIVMTQSPDSLTVSLGERTTINCKSSQSVLDSSKNKNSLAWYQQKPGQPPKLLLSWASTRESGIPDRFSGSGSGTDFTLTIDSLQPEDSATYYCQQSAHFPITFGQGTRLEIKLEIQNPDPAVYQLRDSKSSDKSVCLFTDFDSQTNVSQSKDSDVYITDKCVLDMRSMDFKSNSAVAWSNKSDFACANAFNNSIIPEDTFFPSPESSCGFTSESYQQGVLSATILYEILLGKATLYAVLVSALVLMAMVKRKDSRGRAKRSGSGVKQTLNFDLLKLAGDVESNPGPTSMDWIWRILFLVGAATGAHSFEQVQLVQSGAEVKKPGASVKVSCKASGYTFTNYGMNWVKQAPGQGLKWMGWINTYTGEPTYADDFKGRVTMTSDTSTSTAYLELHNLRSDDTAVYYCARWSWSDGYYVYFDYWGQGTTVTVSSTREDLKNVFPPEVAVFEPSEAEISHTQKATLVCLATGFYPDHVELSWWVNGKEVHSGVCTDPQPLKEQPALNDSRYCLSSRLRVSATFWQNPRNHFRCQVQFYGLSENDEWTQDRAKPVTQIVSAEAWGRADCDVKLVEKSFETDTNLNFQNLSVIGFRILLLKVAGFNLLMTLRLWSS

SEQ ID NO: 12828 - protein, 764 aa, synthetic construct
MALPVTALLLPLALLLHAARPEVQLVESGGGLVQPGGSLRLSCAASGFSFSDFWMSWVRQAPGKGLEWVATISQAGSEKDYVDSVKGRFTISRDNAKKSLYLQMNSLRAEDTAVYYCASGVYSFDYRGQGTLVTVSSGTGGGGSGGGGSGGGGSEFDEIVLTQSPGSLAVSPGERVTMSCKSSQSVFFSSSQKNYLAWYQQIPGQSPRLLIYWASTRESGVPDRFTGSGSGTDFTLTISSVQPEDLAIYYCHQYLSSRTFGQGTKLEIKRLEIQNPDPAVYQLRDSKSSDKSVCLFTDFDSQTNVSQSKDSDVYITDKCVLDMRSMDFKSNSAVAWSNKSDFACANAFNNSIIPEDTFFPSPESSCGFTSESYQQGVLSATILYEILLGKATLYAVLVSALVLMAMVKRKDSRGRAKRSGSGVKQTLNFDLLKLAGDVESNPGPTSMDWIWRILFLVGAATGAHSFEQVQLQQPGAEVVKPGASVKMSCKASGYTFTSYYIHWIKQTPGQGLEWVGVIYPGNDDISYNQKFQGKATLTADKSSTTAYMQLSSLTSEDSAVYYCAREVRLRYFDVWGQGTTVTVSSTREDLKNVFPPEVAVFEPSEAEISHTQKATLVCLATGFYPDHVELSWWVNGKEVHSGVCTDPQPLKEQPALNDSRYCLSSRLRVSATFWQNPRNHFRCQVQFYGLSENDEWTQDRAKPVTQIVSAEAWGRADCDVKLVEKSFETDTNLNFQNLSVIGFRILLLKVAGFNLLMTLRLWSS

SEQ ID NO: 12829 - protein, 768 aa, synthetic construct
MALPVTALLLPLALLLHAARPEVQLVESGGGLVQPGGSLRLSCAASGFSFSDFWMSWVRQAPGKGLEWVATISQAGSEKDYVDSVKGRFTISRDNAKKSLYLQMNSLRAEDTAVYYCASGVYSFDYRGQGTLVTVSSGTGGGGSGGGGSGGGGSEFDVLLTQSPLSLPVTLGQPASISCRSSQTIVHSNGNTYLEWFQQRPGQSPRLLIYQVSNRFSGVPDRFSGSGSGTDFTLKISRVEAEDVGVYYCFQGSHVPRTFGGGTKVEIKRALEIQNPDPAVYQLRDSKSSDKSVCLFTDFDSQTNVSQSKDSDVYITDKCVLDMRSMDFKSNSAVAWSNKSDFACANAFNNSIIPEDTFFPSPESSCGFTSESYQQGVLSATILYEILLGKATLYAVLVSALVLMAMVKRKDSRGRAKRSGSGVKQTLNFDLLKLAGDVESNPGPTSMDWIWRILFLVGAATGAHSFEQIQLVQSGSELKKPGASVKVSCKASGYTFTNYGMNWVRQAPGQGLKWMGWINTNTGEPKYAEEFKGRFALSLDTSVSTAYLQINSLKAEDTAVYFCARGYGNYARGAWLAYWGQGTLVTVSSTREDLKNVFPPEVAVFEPSEAEISHTQKATLVCLATGFYPDHVELSWWVNGKEVHSGVCTDPQPLKEQPALNDSRYCLSSRLRVSATFWQNPRNHFRCQVQFYGLSENDEWTQDRAKPVTQIVSAEAWGRADCDVKLVEKSFETDTNLNFQNLSVIGFRILLLKVAGFNLLMTLRLWSS

SEQ ID NO: 12830 - protein, 753 aa, synthetic construct
MALPVTALLLPLALLLHAARPEVQLVESGGGLVQPGGSLRLSCAASGFSFSDFWMSWVRQAPGKGLEWVATISQAGSEKDYVDSVKGRFTISRDNAKKSLYLQMNSLRAEDTAVYYCASGVYSFDYRGQGTLVTVSSGTGGGGSGGGGSGGGGSEFDEIVLTQSPATLSLSPGERATLSCSASSSINYIYWLQQKPGQAPRILIYLTSNLASGVPARFSGSGSGTDFTLTISSLEPEDFAVYYCLQWSSNPLTFGGGTKVEIKLEIQNPDPAVYQLRDSKSSDKSVCLFTDFDSQTNVSQSKDSDVYITDKCVLDMRSMDFKSNSAVAWSNKSDFACANAFNNSIIPEDTFFPSPESSCGFTSESYQQGVLSATILYEILLGKATLYAVLVSALVLMAMVKRKDSRGRAKRSGSGVKQTLNFDLLKLAGDVESNPGPTSMDWIWRILFLVGAATGAHSFEEVQLVESGGGLVKPGGSLRLSCAASGFTFSSYDMSWVRQAPGKGLEWVSTISSGGSYTYYLDSIKGRFTISRDNAKNSLYLQMNSLRAEDTAVYYCARQGLDYWGRGTLVTVSSTREDLKNVFPPEVAVFEPSEAEISHTQKATLVCLATGFYPDHVELSWWVNGKEVHSGVCTDPQPLKEQPALNDSRYCLSSRLRVSATFWQNPRNHFRCQVQFYGLSENDEWTQDRAKPVTQIVSAEAWGRADCDVKLVEKSFETDTNLNFQNLSVIGFRILLLKVAGFNLLMTLRLWSS

SEQ ID NO: 12831 - protein, 762 aa, synthetic construct
MALPVTALLLPLALLLHAARPEVQLVESGGGLVQPGGSLRLSCAASGFSFSDFWMSWVRQAPGKGLEWVATISQAGSEKDYVDSVKGRFTISRDNAKKSLYLQMNSLRAEDTAVYYCASGVYSFDYRGQGTLVTVSSGTGGGGSGGGGSGGGGSEFDIVMTQSPDSLAVSLGERATINCRASKSVSTSGYSFMHWYQQKPGQPPKLLIYLASNLESGVPDRFSGSGSGTDFTLTISSLQAEDVAVYYCQHSREVPWTFGQGTKVEIKRLEIQNPDPAVYQLRDSKSSDKSVCLFTDFDSQTNVSQSKDSDVYITDKCVLDMRSMDFKSNSAVAWSNKSDFACANAFNNSIIPEDTFFPSPESSCGFTSESYQQGVLSATILYEILLGKATLYAVLVSALVLMAMVKRKDSRGRAKRSGSGVKQTLNFDLLKLAGDVESNPGPTSMDWIWRILFLVGAATGAHSFEQVQLVQSGAEVKKPGASVKVSCKASGYTFTNYGMNWVRQAPGQGLEWMGWINTYTGEPTYADAFKGRFAFSLDTSTSTAYLQINSLRSDDTAVYYCARDYGDYGMDYWGQGTTVTVSSTREDLKNVFPPEVAVFEPSEAEISHTQKATLVCLATGFYPDHVELSWWVNGKEVHSGVCTDPQPLKEQPALNDSRYCLSSRLRVSATFWQNPRNHFRCQVQFYGLSENDEWTQDRAKPVTQIVSAEAWGRADCDVKLVEKSFETDTNLNFQNLSVIGFRILLLKVAGFNLLMTLRLWSS

SEQ ID NO: 12832 - protein, 758 aa, synthetic construct
MALPVTALLLPLALLLHAARPEVQLVESGGGLVQPGGSLRLSCAASGFSFSDFWMSWVRQAPGKGLEWVATISQAGSEKDYVDSVKGRFTISRDNAKKSLYLQMNSLRAEDTAVYYCASGVYSFDYRGQGTLVTVSSGTGGGGSGGGGSGGGGSEFDIVMTQTPLTLSVTIGQPASISCKSSQSLLDSDGKTYLNWLLQRPGQSPERLIYLVSKLDSGVPDRFTGSGSGTDFTLKISRVEAEDLGVYCCWQGTHFPYTFGGGTKVEIKGLEIQNPDPAVYQLRDSKSSDKSVCLFTDFDSQTNVSQSKDSDVYITDKCVLDMRSMDFKSNSAVAWSNKSDFACANAFNNSIIPEDTFFPSPESSCGFTSESYQQGVLSATILYEILLGKATLYAVLVSALVLMAMVKRKDSRGRAKRSGSGVKQTLNFDLLKLAGDVESNPGPTSMDWIWRILFLVGAATGAHSFEQVQLQQPGAELVRPGASVKLSCKASGYTFTSYWMNWVKQRPGQGLEWIGMIDPSDSETHYNHIFKDKATLTVDKSSSTAYLQLSSLTSEDSAVYYCARNLYLWGQGTSVTVSSTREDLKNVFPPEVAVFEPSEAEISHTQKATLVCLATGFYPDHVELSWWVNGKEVHSGVCTDPQPLKEQPALNDSRYCLSSRLRVSATFWQNPRNHFRCQVQFYGLSENDEWTQDRAKPVTQIVSAEAWGRADCDVKLVEKSFETDTNLNFQNLSVIGFRILLLKVAGFNLLMTLRLWSS

SEQ ID NO: 12833 - protein, 766 aa, synthetic construct
MALPVTALLLPLALLLHAARPEVQLVESGGGLVQPGGSLRLSCAASGFSFSDFWMSWVRQAPGKGLEWVATISQAGSEKDYVDSVKGRFTISRDNAKKSLYLQMNSLRAEDTAVYYCASGVYSFDYRGQGTLVTVSSGTGGGGSGGGGSGGGGSEFDIVMTQSPDSLAVSLGERATINCESSQSLLNSGNQKNYLTWYQQKPGQPPKPLIYWASTRESGVPDRFSGSGSGTDFTLTISSLQAEDVAVYYCQNDYSYPYTFGQGTKLEIKRLEIQNPDPAVYQLRDSKSSDKSVCLFTDFDSQTNVSQSKDSDVYITDKCVLDMRSMDFKSNSAVAWSNKSDFACANAFNNSIIPEDTFFPSPESSCGFTSESYQQGVLSATILYEILLGKATLYAVLVSALVLMAMVKRKDSRGRAKRSGSGVKQTLNFDLLKLAGDVESNPGPTSMDWIWRILFLVGAATGAHSFEEVQLVQSGAEVKKPGESLKISCKGSGYSFTDYYMKWARQMPGKGLEWMGDIIPSNGATFYNQKFKGQVTISADKSISTTYLQWSSLKASDTAMYYCARSHLLRASWFAYWGQGTMVTVSSTREDLKNVFPPEVAVFEPSEAEISHTQKATLVCLATGFYPDHVELSWWVNGKEVHSGVCTDPQPLKEQPALNDSRYCLSSRLRVSATFWQNPRNHFRCQVQFYGLSENDEWTQDRAKPVTQIVSAEAWGRADCDVKLVEKSFETDTNLNFQNLSVIGFRILLLKVAGFNLLMTLRLWSS

SEQ ID NO: 12834 - protein, 761 aa, synthetic construct
MALPVTALLLPLALLLHAARPEVQLVESGGGLVQPGGSLRLSCAASGFSFSDFWMSWVRQAPGKGLEWVATISQAGSEKDYVDSVKGRFTISRDNAKKSLYLQMNSLRAEDTAVYYCASGVYSFDYRGQGTLVTVSSGTGGGGSGGGGSGGGGSEFDIQMTQSTSSLSASLGDRVTISCSASQGINNYLNWYQQKPDGTVELLIYYTSTLQSGVPSRFSGSGSGTDYSLTISNLEPEDIGTYYCQQYSKLPRTFGGGTKLEIKLEIQNPDPAVYQLRDSKSSDKSVCLFTDFDSQTNVSQSKDSDVYITDKCVLDMRSMDFKSNSAVAWSNKSDFACANAFNNSIIPEDTFFPSPESSCGFTSESYQQGVLSATILYEILLGKATLYAVLVSALVLMAMVKRKDSRGRAKRSGSGVKQTLNFDLLKLAGDVESNPGPTSMDWIWRILFLVGAATGAHSFEQVQLQQSGSELMMPGASVKISCKATGYTFSNYWIEWVKQRPGHGLEWIGEILPGTGRTIYNEKFKGKATFTADISSNTVQMQLSSLTSEDSAVYYCARRDYYGNFYYAMDYWGQGTSVTVSSTREDLKNVFPPEVAVFEPSEAEISHTQKATLVCLATGFYPDHVELSWWVNGKEVHSGVCTDPQPLKEQPALNDSRYCLSSRLRVSATFWQNPRNHFRCQVQFYGLSENDEWTQDRAKPVTQIVSAEAWGRADCDVKLVEKSFETDTNLNFQNLSVIGFRILLLKVAGFNLLMTLRLWSS

SEQ ID NO: 12835 - protein, 756 aa, synthetic construct
MALPVTALLLPLALLLHAARPEVQLVESGGGLVQPGGSLRLSCAASGFSFSDFWMSWVRQAPGKGLEWVATISQAGSEKDYVDSVKGRFTISRDNAKKSLYLQMNSLRAEDTAVYYCASGVYSFDYRGQGTLVTVSSGTGGGGSGGGGSGGGGSEFDIQMTQSPASLSVSVGETVTITCRASENIYSNLAWYQQKQGKSPQLLVYAATNLADGVPSRFSGSGSGTQYSLKINSLQSEDFGSYYCQHFWGTWTFGGGTTLEIKLEIQNPDPAVYQLRDSKSSDKSVCLFTDFDSQTNVSQSKDSDVYITDKCVLDMRSMDFKSNSAVAWSNKSDFACANAFNNSIIPEDTFFPSPESSCGFTSESYQQGVLSATILYEILLGKATLYAVLVSALVLMAMVKRKDSRGRAKRSGSGVKQTLNFDLLKLAGDVESNPGPTSMDWIWRILFLVGAATGAHSFEEVQLQQSGPELVKPGASVKMSCKASGYTFTDYYMKWMKQSHGKSLEWIGDINPNNGGTTYNQKFKGKATLTVDKSSSTAYMQLNSLTSEDSAVYYCARDYGYGYFDYWGQGTTLTVSSTREDLKNVFPPEVAVFEPSEAEISHTQKATLVCLATGFYPDHVELSWWVNGKEVHSGVCTDPQPLKEQPALNDSRYCLSSRLRVSATFWQNPRNHFRCQVQFYGLSENDEWTQDRAKPVTQIVSAEAWGRADCDVKLVEKSFETDTNLNFQNLSVIGFRILLLKVAGFNLLMTLRLWSS

SEQ ID NO: 12836 - protein, 759 aa, synthetic construct
MALPVTALLLPLALLLHAARPEVQLVESGGGLVQPGGSLRLSCAASGFSFSDFWMSWVRQAPGKGLEWVATISQAGSEKDYVDSVKGRFTISRDNAKKSLYLQMNSLRAEDTAVYYCASGVYSFDYRGQGTLVTVSSGTGGGGSGGGGSGGGGSEFEIVLTQSPGTLSLSPGERATLSCRASQSVGGYLAWYQQKPGQAPRLLIYDASNRATGIPARFSGSGSGTDFTLTISSLEPEDFAVYYCQQRNNWPPMYTFGQGTKLEIKRLEIQNPDPAVYQLRDSKSSDKSVCLFTDFDSQTNVSQSKDSDVYITDKCVLDMRSMDFKSNSAVAWSNKSDFACANAFNNSIIPEDTFFPSPESSCGFTSESYQQGVLSATILYEILLGKATLYAVLVSALVLMAMVKRKDSRGRAKRSGSGVKQTLNFDLLKLAGDVESNPGPTSMDWIWRILFLVGAATGAHSFEQVQLVQSGAEVKKPGSSVKVSCKASGGTFSSYAISWVRQAPGQGLEWMGGIIPILGTANYAQKFQGRVTITADESTSTAYMELSSLRSEDTAVYYCARWGGGAFDIWGQGTMVTVSSTREDLKNVFPPEVAVFEPSEAEISHTQKATLVCLATGFYPDHVELSWWVNGKEVHSGVCTDPQPLKEQPALNDSRYCLSSRLRVSATFWQNPRNHFRCQVQFYGLSENDEWTQDRAKPVTQIVSAEAWGRADCDVKLVEKSFETDTNLNFQNLSVIGFRILLLKVAGFNLLMTLRLWSS

SEQ ID NO: 12837 - protein, 754 aa, synthetic construct
MALPVTALLLPLALLLHAARPEVQLVESGGGLVQPGGSLRLSCAASGFSFSDFWMSWVRQAPGKGLEWVATISQAGSEKDYVDSVKGRFTISRDNAKKSLYLQMNSLRAEDTAVYYCASGVYSFDYRGQGTLVTVSSGTGGGGSGGGGSGGGGSEFQIVLTQSPALMSASPGEKVTMTCSASSSVRYMYWYQQKPRSSPKPWIHLTSNLASGVPARFSGSGSGTSYSLTISSMEAEDAATYYCQQWSSHPFTFGSGTKLEIKLEIQNPDPAVYQLRDSKSSDKSVCLFTDFDSQTNVSQSKDSDVYITDKCVLDMRSMDFKSNSAVAWSNKSDFACANAFNNSIIPEDTFFPSPESSCGFTSESYQQGVLSATILYEILLGKATLYAVLVSALVLMAMVKRKDSRGRAKRSGSGVKQTLNFDLLKLAGDVESNPGPTSMDWIWRILFLVGAATGAHSFEDVQLQESGPGLVKPSQSLSLTCTVTGFSITSDYSWNWIRQFPGNKLEWMGYISYSGHTSYNPSLESRISITRDTSKNQFFLQLNSVTTEDTATYYCTRGNWDVVYWGQGTLVTVSATREDLKNVFPPEVAVFEPSEAEISHTQKATLVCLATGFYPDHVELSWWVNGKEVHSGVCTDPQPLKEQPALNDSRYCLSSRLRVSATFWQNPRNHFRCQVQFYGLSENDEWTQDRAKPVTQIVSAEAWGRADCDVKLVEKSFETDTNLNFQNLSVIGFRILLLKVAGFNLLMTLRLWSS

SEQ ID NO: 12838 - protein, 764 aa, synthetic construct
MALPVTALLLPLALLLHAARPEVQLVESGGGLVQPGGSLRLSCAASGFSFSDFWMSWVRQAPGKGLEWVATISQAGSEKDYVDSVKGRFTISRDNAKKSLYLQMNSLRAEDTAVYYCASGVYSFDYRGQGTLVTVSSGTGGGGSGGGGSGGGGSEFDVVMTQSPLSLPVTLGQPASISCRSSQSIVHSDGNTYLEWYQQRPGQSPRRLIYKVSNRFSGVPDRFSGSGSGTDFTLKISRVEAEDVGVYYCFQGSHAPWTFGGGTKVEIKLEIQNPDPAVYQLRDSKSSDKSVCLFTDFDSQTNVSQSKDSDVYITDKCVLDMRSMDFKSNSAVAWSNKSDFACANAFNNSIIPEDTFFPSPESSCGFTSESYQQGVLSATILYEILLGKATLYAVLVSALVLMAMVKRKDSRGRAKRSGSGVKQTLNFDLLKLAGDVESNPGPTSMDWIWRILFLVGAATGAHSFEEVQLVESGGGLVQPGGSLRLSCAASGFTFSSYGMHWVRQAPGKGLEWVAYITTRSSTIYYADSVKGRFTISRDNAKNSLYLQMNSLRAEDTAVYYCTREPLTGYYAMDYWGQGTSVTVSSTREDLKNVFPPEVAVFEPSEAEISHTQKATLVCLATGFYPDHVELSWWVNGKEVHSGVCTDPQPLKEQPALNDSRYCLSSRLRVSATFWQNPRNHFRCQVQFYGLSENDEWTQDRAKPVTQIVSAEAWGRADCDVKLVEKSFETDTNLNFQNLSVIGFRILLLKVAGFNLLMTLRLWSS

SEQ ID NO: 12839 - protein, 756 aa, synthetic construct
MALPVTALLLPLALLLHAARPEVQLVESGGGLVQPGGSLRLSCAASGFSFSDFWMSWVRQAPGKGLEWVATISQAGSEKDYVDSVKGRFTISRDNAKKSLYLQMNSLRAEDTAVYYCASGVYSFDYRGQGTLVTVSSGTGGGGSGGGGSGGGGSEFDIQMTQSPSSLSASVGDRVTITCRASQSISLWLNWYQQKPGKAPKLLIYAASTLQSGVPSRFSGSGSGTDFTLTISSLQPEDFATYYCQQYYTSPYTFGQGTKVEIKRLEIQNPDPAVYQLRDSKSSDKSVCLFTDFDSQTNVSQSKDSDVYITDKCVLDMRSMDFKSNSAVAWSNKSDFACANAFNNSIIPEDTFFPSPESSCGFTSESYQQGVLSATILYEILLGKATLYAVLVSALVLMAMVKRKDSRGRAKRSGSGVKQTLNFDLLKLAGDVESNPGPTSMDWIWRILFLVGAATGAHSFEQVQLLESGGGLVQPGGSLRLSCAASGFTFSSYAMSWVRQAPGKGLEWVSVIRSSGSSTYYADSVKGRFTISRDNSKNTLYLQMNSLRAEDTAVYYCARGGGYFDYWGQGTLVTVSSTREDLKNVFPPEVAVFEPSEAEISHTQKATLVCLATGFYPDHVELSWWVNGKEVHSGVCTDPQPLKEQPALNDSRYCLSSRLRVSATFWQNPRNHFRCQVQFYGLSENDEWTQDRAKPVTQIVSAEAWGRADCDVKLVEKSFETDTNLNFQNLSVIGFRILLLKVAGFNLLMTLRLWSS

SEQ ID NO: 12840 - protein, 759 aa, synthetic construct
MALPVTALLLPLALLLHAARPEVQLVESGGGLVQPGGSLRLSCAASGFSFSDFWMSWVRQAPGKGLEWVATISQAGSEKDYVDSVKGRFTISRDNAKKSLYLQMNSLRAEDTAVYYCASGVYSFDYRGQGTLVTVSSGTGGGGSGGGGSGGGGSEFDIQMTQSPSSLSASVGDRVTITCRASQSISSYLNWYQQKPGKAPKLLIYAVSTLQSGVPSRFSGSGSGTDFTLTISSLQPEDFATYYCQQSGTFPPTTFGQGTKVEIKRLEIQNPDPAVYQLRDSKSSDKSVCLFTDFDSQTNVSQSKDSDVYITDKCVLDMRSMDFKSNSAVAWSNKSDFACANAFNNSIIPEDTFFPSPESSCGFTSESYQQGVLSATILYEILLGKATLYAVLVSALVLMAMVKRKDSRGRAKRSGSGVKQTLNFDLLKLAGDVESNPGPTSMDWIWRILFLVGAATGAHSFEQVQLLESGGGLVQPGGSLRLSCAASGFTFSSHGMHWVRQAPGKGLEWVSVISGSGSNTGYADSVKGRFTISRDNSKNTLYLQMNSLRAEDTAVYYCARQWGSYAFDSWGQGTLVTVSSTREDLKNVFPPEVAVFEPSEAEISHTQKATLVCLATGFYPDHVELSWWVNGKEVHSGVCTDPQPLKEQPALNDSRYCLSSRLRVSATFWQNPRNHFRCQVQFYGLSENDEWTQDRAKPVTQIVSAEAWGRADCDVKLVEKSFETDTNLNFQNLSVIGFRILLLKVAGFNLLMTLRLWSS

SEQ ID NO: 12841 - protein, 769 aa, synthetic construct
MALPVTALLLPLALLLHAARPEVQLVESGGGLVQPGGSLRLSCAASGFSFSDFWMSWVRQAPGKGLEWVATISQAGSEKDYVDSVKGRFTISRDNAKKSLYLQMNSLRAEDTAVYYCASGVYSFDYRGQGTLVTVSSGTGGGGSGGGGSGGGGSEFDIVMSQSPSSLAVSVGEKVTMSCKSSQSLLHSSNQKNYLAWYQQKPGQSPKVLIYWASTRESGVPDRFTGSGSGTDFTLTITSVKSEDLAVYYCQQYYSYPWTFGGGTRLEIKRLEIQNPDPAVYQLRDSKSSDKSVCLFTDFDSQTNVSQSKDSDVYITDKCVLDMRSMDFKSNSAVAWSNKSDFACANAFNNSIIPEDTFFPSPESSCGFTSESYQQGVLSATILYEILLGKATLYAVLVSALVLMAMVKRKDSRGRAKRSGSGVKQTLNFDLLKLAGDVESNPGPTSMDWIWRILFLVGAATGAHSFEEVQLQQSVAELVKPGASVKMSCKVSGYTLTDHTIHWMKQRPEQGLEWIGYIYPRDGITGYNEKFKGKATLTADTSSSTAYMQLNSLTSEDSAVYFCARWGYSYRNYAYYYDYWGQGTTLTVSSTREDLKNVFPPEVAVFEPSEAEISHTQKATLVCLATGFYPDHVELSWWVNGKEVHSGVCTDPQPLKEQPALNDSRYCLSSRLRVSATFWQNPRNHFRCQVQFYGLSENDEWTQDRAKPVTQIVSAEAWGRADCDVKLVEKSFETDTNLNFQNLSVIGFRILLLKVAGFNLLMTLRLWSS

SEQ ID NO: 12842 - protein, 766 aa, synthetic construct
MALPVTALLLPLALLLHAARPEVQLVESGGGLVQPGGSLRLSCAASGFSFSDFWMSWVRQAPGKGLEWVATISQAGSEKDYVDSVKGRFTISRDNAKKSLYLQMNSLRAEDTAVYYCASGVYSFDYRGQGTLVTVSSGTGGGGSGGGGSGGGGSEFEIVLTQSPGTLSLSPGERATLSCRASQSVSSSYLAWYQQKPGQAPRLLIYGTSSRATGIPDRFSGSGSGTDFTLTISRLEPEDFAVYYCQQYGSSPFTFGGGTKVEIKRLEIQNPDPAVYQLRDSKSSDKSVCLFTDFDSQTNVSQSKDSDVYITDKCVLDMRSMDFKSNSAVAWSNKSDFACANAFNNSIIPEDTFFPSPESSCGFTSESYQQGVLSATILYEILLGKATLYAVLVSALVLMAMVKRKDSRGRAKRSGSGVKQTLNFDLLKLAGDVESNPGPTSMDWIWRILFLVGAATGAHSFEQVQLQESGPGLAKPSETLSLTCTVSGDSITSYYWSWIRQPPGKGLEWIGYIYYSGSTNYNPSLKSRVTISVDTSKNQFSLKLSSVTAADTAVYYCARDQRRIAAAGTHFYGMDVWGQGTTVTVSSTREDLKNVFPPEVAVFEPSEAEISHTQKATLVCLATGFYPDHVELSWWVNGKEVHSGVCTDPQPLKEQPALNDSRYCLSSRLRVSATFWQNPRNHFRCQVQFYGLSENDEWTQDRAKPVTQIVSAEAWGRADCDVKLVEKSFETDTNLNFQNLSVIGFRILLLKVAGFNLLMTLRLWSS

SEQ ID NO: 12843 - protein, 758 aa, synthetic construct
MALPVTALLLPLALLLHAARPEVQLVESGGGLVQPGGSLRLSCAASGFSFSDFWMSWVRQAPGKGLEWVATISQAGSEKDYVDSVKGRFTISRDNAKKSLYLQMNSLRAEDTAVYYCASGVYSFDYRGQGTLVTVSSGTGGGGSGGGGSGGGGSEFDILLTQSPVILSVSPGERVSFSCRASQSIGTNIHWYQQRTNGSPRLLIKYASESISGIPSRFSGSGSGTDFTLSINSVESEDIADYYCQQNNNWPTTFGAGTKLELKLEIQNPDPAVYQLRDSKSSDKSVCLFTDFDSQTNVSQSKDSDVYITDKCVLDMRSMDFKSNSAVAWSNKSDFACANAFNNSIIPEDTFFPSPESSCGFTSESYQQGVLSATILYEILLGKATLYAVLVSALVLMAMVKRKDSRGRAKRSGSGVKQTLNFDLLKLAGDVESNPGPTSMDWIWRILFLVGAATGAHSFEQVQLKQSGPGLVQPSQSLSITCTVSGFSLTNYGVHWVRQSPGKGLEWLGVIWSGGNTDYNTPFTSRLSINKDNSKSQVFFKMNSLQSNDTAIYYCARALTYYDYEFAYWGQGTLVTVSATREDLKNVFPPEVAVFEPSEAEISHTQKATLVCLATGFYPDHVELSWWVNGKEVHSGVCTDPQPLKEQPALNDSRYCLSSRLRVSATFWQNPRNHFRCQVQFYGLSENDEWTQDRAKPVTQIVSAEAWGRADCDVKLVEKSFETDTNLNFQNLSVIGFRILLLKVAGFNLLMTLRLWSS

SEQ ID NO: 12844 - protein, 751 aa, synthetic construct
MALPVTALLLPLALLLHAARPEVQLVESGGGLVQPGGSLRLSCAASGFSFSDFWMSWVRQAPGKGLEWVATISQAGSEKDYVDSVKGRFTISRDNAKKSLYLQMNSLRAEDTAVYYCASGVYSFDYRGQGTLVTVSSGTGGGGSGGGGSGGGGSEFMTQSPKFLLVSAGDRVTLTCKASQSVNNDVYWYQQEPGQSPKLLIYWASTRESGVPDRFTGSGSGTDFTLTISSVQAEDLAVYYCKQSYNLYTFGGGTKLEIKRLEIQNPDPAVYQLRDSKSSDKSVCLFTDFDSQTNVSQSKDSDVYITDKCVLDMRSMDFKSNSAVAWSNKSDFACANAFNNSIIPEDTFFPSPESSCGFTSESYQQGVLSATILYEILLGKATLYAVLVSALVLMAMVKRKDSRGRAKRSGSGVKQTLNFDLLKLAGDVESNPGPTSMDWIWRILFLVGAATGAHSFEESGRGLVQPGGSRKLSCAASGFTFSTSGMHWVRQAPEKGLEWVAYISSGSTTIYHADTVKGRFTISRDNPKNTLFLQMTSLRSEDTAMYYCCARSGQFGNYFDYWGQGTTLTVSSTREDLKNVFPPEVAVFEPSEAEISHTQKATLVCLATGFYPDHVELSWWVNGKEVHSGVCTDPQPLKEQPALNDSRYCLSSRLRVSATFWQNPRNHFRCQVQFYGLSENDEWTQDRAKPVTQIVSAEAWGRADCDVKLVEKSFETDTNLNFQNLSVIGFRILLLKVAGFNLLMTLRLWSS

SEQ ID NO: 12845 - protein, 756 aa, synthetic construct
MALPVTALLLPLALLLHAARPEVQLVESGGGLVQPGGSLRLSCAASGFSFSDFWMSWVRQAPGKGLEWVATISQAGSEKDYVDSVKGRFTISRDNAKKSLYLQMNSLRAEDTAVYYCASGVYSFDYRGQGTLVTVSSGTGGGGSGGGGSGGGGSEFQSPSSLAVSAGEKVTMSCKSSQSLLNSRTRKNYLAWYQQKPGQSPKLLIYWASTRESGVPDRFTGSGSGTDFTLTISSVQAEDLAVYYCKQSNLYTFGGGTKLEIKLEIQNPDPAVYQLRDSKSSDKSVCLFTDFDSQTNVSQSKDSDVYITDKCVLDMRSMDFKSNSAVAWSNKSDFACANAFNNSIIPEDTFFPSPESSCGFTSESYQQGVLSATILYEILLGKATLYAVLVSALVLMAMVKRKDSRGRAKRSGSGVKQTLNFDLLKLAGDVESNPGPTSMDWIWRILFLVGAATGAHSFEQVQLEESGPELVKPGASVKLSCKASGYTFTEYIIHWVKQRSGQGLEWIGWFYPGSGSIKYNEKFKDKATLTADKSSSTVYMELSGLTSEDSAVYFCARHDGYSYFDYWGQGTTLTVSSTREDLKNVFPPEVAVFEPSEAEISHTQKATLVCLATGFYPDHVELSWWVNGKEVHSGVCTDPQPLKEQPALNDSRYCLSSRLRVSATFWQNPRNHFRCQVQFYGLSENDEWTQDRAKPVTQIVSAEAWGRADCDVKLVEKSFETDTNLNFQNLSVIGFRILLLKVAGFNLLMTLRLWSS

SEQ ID NO: 12846 - protein, 759 aa, synthetic construct
MALPVTALLLPLALLLHAARPEVQLVESGGGLVQPGGSLRLSCAASGFSFSDFWMSWVRQAPGKGLEWVATISQAGSEKDYVDSVKGRFTISRDNAKKSLYLQMNSLRAEDTAVYYCASGVYSFDYRGQGTLVTVSSGTGGGGSGGGGSGGGGSEFDIQMTQSPSSLSASLGERVSLTCRATQELSGYLSWLQQKPDGTIKRLIYAASTLDSGVPKRFSGNRSGSDYSLTISSLESEDFADYYCLQYAIYPYTFGGGTKLEIKLEIQNPDPAVYQLRDSKSSDKSVCLFTDFDSQTNVSQSKDSDVYITDKCVLDMRSMDFKSNSAVAWSNKSDFACANAFNNSIIPEDTFFPSPESSCGFTSESYQQGVLSATILYEILLGKATLYAVLVSALVLMAMVKRKDSRGRAKRSGSGVKQTLNFDLLKLAGDVESNPGPTSMDWIWRILFLVGAATGAHSFEEVQLQQSGPELVKPGASVKMSCKASGYTFTSYFIHWVKQKPGQGLEWIGFINPYNDGSKYNEKFKGKATLTSDKSSSTAYMELSSLTSEDSAVYYCTRDDGYYGYAMDYWGQGTSVTVSSTREDLKNVFPPEVAVFEPSEAEISHTQKATLVCLATGFYPDHVELSWWVNGKEVHSGVCTDPQPLKEQPALNDSRYCLSSRLRVSATFWQNPRNHFRCQVQFYGLSENDEWTQDRAKPVTQIVSAEAWGRADCDVKLVEKSFETDTNLNFQNLSVIGFRILLLKVAGFNLLMTLRLWSS

SEQ ID NO: 12847 - protein, 764 aa, synthetic construct
MALPVTALLLPLALLLHAARPEVQLVESGGGLVQPGGSLRLSCAASGFSFSDFWMSWVRQAPGKGLEWVATISQAGSEKDYVDSVKGRFTISRDNAKKSLYLQMNSLRAEDTAVYYCASGVYSFDYRGQGTLVTVSSGTGGGGSGGGGSGGGGSEFDTIVLTQSPASLAVSLGQRATISCRASESVDSYGNSFMHWYQQKPGQPPKLLIYLASNLESGVPARFSGSGSRTDFTLTIDPVEADDAATYYCQQNNYDPWTFGGGTKLEIKLEIQNPDPAVYQLRDSKSSDKSVCLFTDFDSQTNVSQSKDSDVYITDKCVLDMRSMDFKSNSAVAWSNKSDFACANAFNNSIIPEDTFFPSPESSCGFTSESYQQGVLSATILYEILLGKATLYAVLVSALVLMAMVKRKDSRGRAKRSGSGVKQTLNFDLLKLAGDVESNPGPTSMDWIWRILFLVGAATGAHSFEEVQLQQSGPELVKPGASVKMSCKASGYTFTSYVMHWVKQKPGQGLEWIGYINPYNDGTKYNEKFKGKATLTSDTSSSTAYMELNSLTSEDSAVYFCARPIYFDNDYFDYWGQGTTLKVSSTREDLKNVFPPEVAVFEPSEAEISHTQKATLVCLATGFYPDHVELSWWVNGKEVHSGVCTDPQPLKEQPALNDSRYCLSSRLRVSATFWQNPRNHFRCQVQFYGLSENDEWTQDRAKPVTQIVSAEAWGRADCDVKLVEKSFETDTNLNFQNLSVIGFRILLLKVAGFNLLMTLRLWSS

SEQ ID NO: 12848 - protein, 759 aa, synthetic construct
MALPVTALLLPLALLLHAARPEVQLVESGGGLVQPGGSLRLSCAASGFSFSDFWMSWVRQAPGKGLEWVATISQAGSEKDYVDSVKGRFTISRDNAKKSLYLQMNSLRAEDTAVYYCASGVYSFDYRGQGTLVTVSSGTGGGGSGGGGSGGGGSEFDIQMTQSPSSLSASVGDRVTITCKASQDVGIAVAWYQQKPGKVPKLLIYWASTRHTGVPDRFSGSGSGTDFTLTISSLQPEDVATYYCQQYSSYPYTFGQGTKVEIKRLEIQNPDPAVYQLRDSKSSDKSVCLFTDFDSQTNVSQSKDSDVYITDKCVLDMRSMDFKSNSAVAWSNKSDFACANAFNNSIIPEDTFFPSPESSCGFTSESYQQGVLSATILYEILLGKATLYAVLVSALVLMAMVKRKDSRGRAKRSGSGVKQTLNFDLLKLAGDVESNPGPTSMDWIWRILFLVGAATGAHSFEEVQLVESGGGLVQPGGSLRLSCAASGFDFSRYWMSWVRQAPGKGLEWIGEINPDSSTINYAPSLKDKFIISRDNAKNSLYLQMNSLRAEDTAVYYCARPDGNYWYFDVWGQGTLVTVSSTREDLKNVFPPEVAVFEPSEAEISHTQKATLVCLATGFYPDHVELSWWVNGKEVHSGVCTDPQPLKEQPALNDSRYCLSSRLRVSATFWQNPRNHFRCQVQFYGLSENDEWTQDRAKPVTQIVSAEAWGRADCDVKLVEKSFETDTNLNFQNLSVIGFRILLLKVAGFNLLMTLRLWSS

SEQ ID NO: 12849 - protein, 759 aa, synthetic construct
MALPVTALLLPLALLLHAARPEVQLVESGGGLVQPGGSLRLSCAASGFSFSDFWMSWVRQAPGKGLEWVATISQAGSEKDYVDSVKGRFTISRDNAKKSLYLQMNSLRAEDTAVYYCASGVYSFDYRGQGTLVTVSSGTGGGGSGGGGSGGGGSEFDIVMTQSQKSMSTSVGDRVSITCKASQDVITGVAWYQQKPGQSPKLLIYSASYRYTGVPDRFTGSGSGTDFTFTISNVQAEDLAVYYCQQHYSTPLTFGAGTKLELKLEIQNPDPAVYQLRDSKSSDKSVCLFTDFDSQTNVSQSKDSDVYITDKCVLDMRSMDFKSNSAVAWSNKSDFACANAFNNSIIPEDTFFPSPESSCGFTSESYQQGVLSATILYEILLGKATLYAVLVSALVLMAMVKRKDSRGRAKRSGSGVKQTLNFDLLKLAGDVESNPGPTSMDWIWRILFLVGAATGAHSFEQVQLQQPGAELVRPGASVKLSCKASGYSFTTYWMNWVKQRPGQGLEWIGMIHPSDSETRLNQKFKDKATLTVDKSSSTAYMQLSSPTSEDSAVYYCARSTMIATRAMDYWGQGTSVTVSSTREDLKNVFPPEVAVFEPSEAEISHTQKATLVCLATGFYPDHVELSWWVNGKEVHSGVCTDPQPLKEQPALNDSRYCLSSRLRVSATFWQNPRNHFRCQVQFYGLSENDEWTQDRAKPVTQIVSAEAWGRADCDVKLVEKSFETDTNLNFQNLSVIGFRILLLKVAGFNLLMTLRLWSS

SEQ ID NO: 12850 - protein, 765 aa, synthetic construct
MALPVTALLLPLALLLHAARPEVQLVESGGGLVQPGGSLRLSCAASGFSFSDFWMSWVRQAPGKGLEWVATISQAGSEKDYVDSVKGRFTISRDNAKKSLYLQMNSLRAEDTAVYYCASGVYSFDYRGQGTLVTVSSGTGGGGSGGGGSGGGGSEFQSVLTQPPSVSGAPGQRVTISCTGSGSNIGAPYDVSWYQQLPGTAPKLLIYHNNKRPSGVPDRFSGSKSGTSASLAITGLQAEDEADYYCATVEAGLSGSVFGGGTKLTVLGALEIQNPDPAVYQLRDSKSSDKSVCLFTDFDSQTNVSQSKDSDVYITDKCVLDMRSMDFKSNSAVAWSNKSDFACANAFNNSIIPEDTFFPSPESSCGFTSESYQQGVLSATILYEILLGKATLYAVLVSALVLMAMVKRKDSRGRAKRSGSGVKQTLNFDLLKLAGDVESNPGPTSMDWIWRILFLVGAATGAHSFEQVQLVQSGAEVKKPGASVKVSCKVSGYTLTELSIHWVRQAPGKGLEWMGGFDPEENEIVYAQRFQGRVTMTEDTSTDTAYMELSSLRSEDTAVYYCAIVGSFSPLTLGLWGQGTMVTVSSTREDLKNVFPPEVAVFEPSEAEISHTQKATLVCLATGFYPDHVELSWWVNGKEVHSGVCTDPQPLKEQPALNDSRYCLSSRLRVSATFWQNPRNHFRCQVQFYGLSENDEWTQDRAKPVTQIVSAEAWGRADCDVKLVEKSFETDTNLNFQNLSVIGFRILLLKVAGFNLLMTLRLWSS

SEQ ID NO: 12851 - protein, 765 aa, synthetic construct
MALPVTALLLPLALLLHAARPEVQLVESGGGLVQPGGSLRLSCAASGFSFSDFWMSWVRQAPGKGLEWVATISQAGSEKDYVDSVKGRFTISRDNAKKSLYLQMNSLRAEDTAVYYCASGVYSFDYRGQGTLVTVSSGTGGGGSGGGGSGGGGSEFQSVLTQPPSVSGAPGQRVTISCTGSGSNIGAPYDVSWYQQLPGTAPKLLIYHNNKRPSGVPDRFSGSKSGTSASLAITGLQAEDEADYYCQSYDSSSISTIFGGGTKLTVLGALEIQNPDPAVYQLRDSKSSDKSVCLFTDFDSQTNVSQSKDSDVYITDKCVLDMRSMDFKSNSAVAWSNKSDFACANAFNNSIIPEDTFFPSPESSCGFTSESYQQGVLSATILYEILLGKATLYAVLVSALVLMAMVKRKDSRGRAKRSGSGVKQTLNFDLLKLAGDVESNPGPTSMDWIWRILFLVGAATGAHSFEQVQLVQSGAEVKKPGASVKVSCKVSGYTLTELSIHWVRQAPGKGLEWMGGFDPEENEIVYAQRFQGRVTMTEDTSTDTAYMELSSLRSEDTAVYYCAIVGSFSGIAYRPWGQGTMVTVSSTREDLKNVFPPEVAVFEPSEAEISHTQKATLVCLATGFYPDHVELSWWVNGKEVHSGVCTDPQPLKEQPALNDSRYCLSSRLRVSATFWQNPRNHFRCQVQFYGLSENDEWTQDRAKPVTQIVSAEAWGRADCDVKLVEKSFETDTNLNFQNLSVIGFRILLLKVAGFNLLMTLRLWSS

SEQ ID NO: 12852 - protein, 753 aa, synthetic construct
MALPVTALLLPLALLLHAARPEVQLVESGGGLVQPGGSLRLSCAASGFSFSDFWMSWVRQAPGKGLEWVATISQAGSEKDYVDSVKGRFTISRDNAKKSLYLQMNSLRAEDTAVYYCASGVYSFDYRGQGTLVTVSSGTGGGGSGGGGSGGGGSEFDIQMTQSPSSLSASVGDRVTITCRASQGIRNNLAWYQQKPGKAPKRLIYAASNLQSGVPSRFTGSGSGTEFTLIVSSLQPEDFATYYCLQHHSYPLTSGGGTKVELEIQNPDPAVYQLRDSKSSDKSVCLFTDFDSQTNVSQSKDSDVYITDKCVLDMRSMDFKSNSAVAWSNKSDFACANAFNNSIIPEDTFFPSPESSCGFTSESYQQGVLSATILYEILLGKATLYAVLVSALVLMAMVKRKDSRGRAKRSGSGVKQTLNFDLLKLAGDVESNPGPTSMDWIWRILFLVGAATGAHSFEEVQVLESGGGLVQPGGSLRLSCAASGFTFSSYAMSWVRQAPGKGLEWVSAISGSGGSTNYADSVKGRFTISRDNSKNTLYLQMNSLRAEDTAVYYCAGSSGWSEYWGQGTLVTVSSTREDLKNVFPPEVAVFEPSEAEISHTQKATLVCLATGFYPDHVELSWWVNGKEVHSGVCTDPQPLKEQPALNDSRYCLSSRLRVSATFWQNPRNHFRCQVQFYGLSENDEWTQDRAKPVTQIVSAEAWGRADCDVKLVEKSFETDTNLNFQNLSVIGFRILLLKVAGFNLLMTLRLWSS

SEQ ID NO: 12853 - protein, 759 aa, synthetic construct
MALPVTALLLPLALLLHAARPEVQLVESGGGLVQPGGSLRLSCAASGFSFSDFWMSWVRQAPGKGLEWVATISQAGSEKDYVDSVKGRFTISRDNAKKSLYLQMNSLRAEDTAVYYCASGVYSFDYRGQGTLVTVSSGTGGGGSGGGGSGGGGSEFDEIQLVQSGAEVKKPGESLRISCKGSGFNIEDYYIHWVRQMPGKGLEWMGRIDPENDETKYGPIFQGHVTISADTSINTVYLQWSSLKASDTAMYYCAFRGGVYWGQGTTVTVSSLEIQNPDPAVYQLRDSKSSDKSVCLFTDFDSQTNVSQSKDSDVYITDKCVLDMRSMDFKSNSAVAWSNKSDFACANAFNNSIIPEDTFFPSPESSCGFTSESYQQGVLSATILYEILLGKATLYAVLVSALVLMAMVKRKDSRGRAKRSGSGVKQTLNFDLLKLAGDVESNPGPTSMDWIWRILFLVGAATGAHSFEDVVMTQSPDSLAVSLGERATINCKSSQSLLDSDGKTYLNWLQQKPGQPPKRLISLVSKLDSGVPDRFSGSGSGTDFTLTISSLQAEDVAVYYCWQGTHFPGTFGGGTKVEIKTREDLKNVFPPEVAVFEPSEAEISHTQKATLVCLATGFYPDHVELSWWVNGKEVHSGVCTDPQPLKEQPALNDSRYCLSSRLRVSATFWQNPRNHFRCQVQFYGLSENDEWTQDRAKPVTQIVSAEAWGRADCDVKLVEKSFETDTNLNFQNLSVIGFRILLLKVAGFNLLMTLRLWSS

SEQ ID NO: 12854 - protein, 766 aa, synthetic construct
MALPVTALLLPLALLLHAARPEVQLVESGGGLVQPGGSLRLSCAASGFSFSDFWMSWVRQAPGKGLEWVATISQAGSEKDYVDSVKGRFTISRDNAKKSLYLQMNSLRAEDTAVYYCASGVYSFDYRGQGTLVTVSSGTGGGGSGGGGSGGGGSEFDELVMTQSPSSLTVTAGEKVTMSCKSSQSLLNSGNQKNYLTWYQQKPGQPPKLLIYWASTRESGVPDRFTGSGSGTDFTLTISSVQAEDLAVYYCQNDYSYPLTFGAGTKLEIKLEIQNPDPAVYQLRDSKSSDKSVCLFTDFDSQTNVSQSKDSDVYITDKCVLDMRSMDFKSNSAVAWSNKSDFACANAFNNSIIPEDTFFPSPESSCGFTSESYQQGVLSATILYEILLGKATLYAVLVSALVLMAMVKRKDSRGRAKRSGSGVKQTLNFDLLKLAGDVESNPGPTSMDWIWRILFLVGAATGAHSFEEVQLLEQSGAELVRPGTSVKISCKASGYAFTNYWLGWVKQRPGHGLEWIGDIFPGSGNIHYNEKFKGKATLTADKSSSTAYMQLSSLTFEDSAVYFCARLRNWDEPMDYWGQGTTVTVSSTREDLKNVFPPEVAVFEPSEAEISHTQKATLVCLATGFYPDHVELSWWVNGKEVHSGVCTDPQPLKEQPALNDSRYCLSSRLRVSATFWQNPRNHFRCQVQFYGLSENDEWTQDRAKPVTQIVSAEAWGRADCDVKLVEKSFETDTNLNFQNLSVIGFRILLLKVAGFNLLMTLRLWSS

SEQ ID NO: 12855 - protein, 767 aa, synthetic construct
MALPVTALLLPLALLLHAARPEVQLVESGGGLVQPGGSLRLSCAASGFSFSDFWMSWVRQAPGKGLEWVATISQAGSEKDYVDSVKGRFTISRDNAKKSLYLQMNSLRAEDTAVYYCASGVYSFDYRGQGTLVTVSSGTGGGGSGGGGSGGGGSEFDELQMTQSPSSLSASVGDRVTITCRASQSISSYLNWYQQKPGQPPKLLIYWASTRESGVPDRFSGSESGTNYTLTISSLQPEDFATYFCQQSDSLPITFGQGTRLDIQLEIQNPDPAVYQLRDSKSSDKSVCLFTDFDSQTNVSQSKDSDVYITDKCVLDMRSMDFKSNSAVAWSNKSDFACANAFNNSIIPEDTFFPSPESSCGFTSESYQQGVLSATILYEILLGKATLYAVLVSALVLMAMVKRKDSRGRAKRSGSGVKQTLNFDLLKLAGDVESNPGPTSMDWIWRILFLVGAATGAHSFEEVQLLESGGGVVQPGRSLRLSCAASGFTFSSYGMHWVRQAPGKGLEWVAVISYDGSNKYYADSVKGRFTISRDNSKNTLYLQMNSLRAEDTAVYYCAKDMGWGSGWRPYYYYGMDVWGQGTTVTVSSTREDLKNVFPPEVAVFEPSEAEISHTQKATLVCLATGFYPDHVELSWWVNGKEVHSGVCTDPQPLKEQPALNDSRYCLSSRLRVSATFWQNPRNHFRCQVQFYGLSENDEWTQDRAKPVTQIVSAEAWGRADCDVKLVEKSFETDTNLNFQNLSVIGFRILLLKVAGFNLLMTLRLWSS

SEQ ID NO: 12856 - protein, 764 aa, synthetic construct
MALPVTALLLPLALLLHAARPEVQLVESGGGLVQPGGSLRLSCAASGFSFSDFWMSWVRQAPGKGLEWVATISQAGSEKDYVDSVKGRFTISRDNAKKSLYLQMNSLRAEDTAVYYCASGVYSFDYRGQGTLVTVSSGTGGGGSGGGGSGGGGSEFDDIQMTQSPSSLSASVGDRVTITCRASQSISSYLNWYQQKPGKAPKLLIYAASSLQSGVPSRFSGSGSGTDFTLTISSLQPEDLATYYCQQSYSTPFTFGPGTKVDIKLEIQNPDPAVYQLRDSKSSDKSVCLFTDFDSQTNVSQSKDSDVYITDKCVLDMRSMDFKSNSAVAWSNKSDFACANAFNNSIIPEDTFFPSPESSCGFTSESYQQGVLSATILYEILLGKATLYAVLVSALVLMAMVKRKDSRGRAKRSGSGVKQTLNFDLLKLAGDVESNPGPTSMDWIWRILFLVGAATGAHSFEVHEVQLVQSGAEVKKPGSSVKVSCKASGGTFSSYAISWVRQAPGQGLEWMGGIIPIFGTANYAQKFQGRVTITADKSTSTAYMELSSLRSEDTAVYYCATFALFGFREQAFDIWGQGTTVTVSSTREDLKNVFPPEVAVFEPSEAEISHTQKATLVCLATGFYPDHVELSWWVNGKEVHSGVCTDPQPLKEQPALNDSRYCLSSRLRVSATFWQNPRNHFRCQVQFYGLSENDEWTQDRAKPVTQIVSAEAWGRADCDVKLVEKSFETDTNLNFQNLSVIGFRILLLKVAGFNLLMTLRLWSS

SEQ ID NO: 12857 - protein, 762 aa, synthetic construct
MALPVTALLLPLALLLHAARPEVQLVESGGGLVQPGGSLRLSCAASGFSFSDFWMSWVRQAPGKGLEWVATISQAGSEKDYVDSVKGRFTISRDNAKKSLYLQMNSLRAEDTAVYYCASGVYSFDYRGQGTLVTVSSGTGGGGSGGGGSGGGGSEFDIVLTQSPLSLAVSLGQPAIISCKASQSVSFAGTSLMHWYHQKPGQQPRLLIYRASNLEAGVPDRFSGSGSKTDFTLTISPVEAEDAATYYCQQSREYPYTFGGGTKLEIKRLEIQNPDPAVYQLRDSKSSDKSVCLFTDFDSQTNVSQSKDSDVYITDKCVLDMRSMDFKSNSAVAWSNKSDFACANAFNNSIIPEDTFFPSPESSCGFTSESYQQGVLSATILYEILLGKATLYAVLVSALVLMAMVKRKDSRGRAKRSGSGVKQTLNFDLLKLAGDVESNPGPTSMDWIWRILFLVGAATGAHSFEQVQLVQSGAEVVKPGASVKISCKASGYTFTGYFMNWVKQSPGQSLEWIGRIHPYDGDTFYNQKFQGKATLTVDKSSNTAHMELLSLTSEDFAVYYCTRYDGSRAMDYWGQGTTVTVSSTREDLKNVFPPEVAVFEPSEAEISHTQKATLVCLATGFYPDHVELSWWVNGKEVHSGVCTDPQPLKEQPALNDSRYCLSSRLRVSATFWQNPRNHFRCQVQFYGLSENDEWTQDRAKPVTQIVSAEAWGRADCDVKLVEKSFETDTNLNFQNLSVIGFRILLLKVAGFNLLMTLRLWSS

SEQ ID NO: 12858 - protein, 759 aa, synthetic construct
MALPVTALLLPLALLLHAARPEVQLVESGGGLVQPGGSLRLSCAASGFSFSDFWMSWVRQAPGKGLEWVATISQAGSEKDYVDSVKGRFTISRDNAKKSLYLQMNSLRAEDTAVYYCASGVYSFDYRGQGTLVTVSSGTGGGGSGGGGSGGGGSEFDDVVMTQTPLSLPVTPGEPASISCRSSQSLVHRNGNTYLHWYLQKPGQSPKLLIHKVSNRFSGVPDRFSGSGSGTDFTLKISRVEAEDLGVYFCSQSTHVPPLTFGAGTKLELKLEIQNPDPAVYQLRDSKSSDKSVCLFTDFDSQTNVSQSKDSDVYITDKCVLDMRSMDFKSNSAVAWSNKSDFACANAFNNSIIPEDTFFPSPESSCGFTSESYQQGVLSATILYEILLGKATLYAVLVSALVLMAMVKRKDSRGRAKRSGSGVKQTLNFDLLKLAGDVESNPGPTSMDWIWRILFLVGAATGAHSFEEVQLVQSGAEVEKPGASVKISCKASGSSFTGYNMNWVRQNIGKSLEWIGAIDPYYGGTSYNQKFKGRATLTVDKSTSTAYMHLKSLRSEDTAVYYCVSGMEYWGQGTSVTVSSTREDLKNVFPPEVAVFEPSEAEISHTQKATLVCLATGFYPDHVELSWWVNGKEVHSGVCTDPQPLKEQPALNDSRYCLSSRLRVSATFWQNPRNHFRCQVQFYGLSENDEWTQDRAKPVTQIVSAEAWGRADCDVKLVEKSFETDTNLNFQNLSVIGFRILLLKVAGFNLLMTLRLWSS

SEQ ID NO: 12859 - protein, 757 aa, synthetic construct
MALPVTALLLPLALLLHAARPEVQLVESGGGLVQPGGSLRLSCAASGFSFSDFWMSWVRQAPGKGLEWVATISQAGSEKDYVDSVKGRFTISRDNAKKSLYLQMNSLRAEDTAVYYCASGVYSFDYRGQGTLVTVSSGTGGGGSGGGGSGGGGSEFDEIVMTQTPATLSVSAGERVTITCKASQSVSNDVTWYQQKPGQAPRLLIYSASNRYSGVPARFSGSGYGTEFTFTISSVQSEDFAVYFCQQDYSSFGQGTKLEIKRLEIQNPDPAVYQLRDSKSSDKSVCLFTDFDSQTNVSQSKDSDVYITDKCVLDMRSMDFKSNSAVAWSNKSDFACANAFNNSIIPEDTFFPSPESSCGFTSESYQQGVLSATILYEILLGKATLYAVLVSALVLMAMVKRKDSRGRAKRSGSGVKQTLNFDLLKLAGDVESNPGPTSMDWIWRILFLVGAATGAHSFEQVQLVESGPGVVQPGRSLRISCAVSGFSVTNYGVHWVRQPPGKGLEWLGVIWAGGITNYNSAFMSRLTISKDNSKNTVYLQMNSLRAEDTAMYYCASRGGHYGYALDYWGQGTLVTVSSTREDLKNVFPPEVAVFEPSEAEISHTQKATLVCLATGFYPDHVELSWWVNGKEVHSGVCTDPQPLKEQPALNDSRYCLSSRLRVSATFWQNPRNHFRCQVQFYGLSENDEWTQDRAKPVTQIVSAEAWGRADCDVKLVEKSFETDTNLNFQNLSVIGFRILLLKVAGFNLLMTLRLWSS

SEQ ID NO: 12860 - protein, 759 aa, synthetic construct
MALPVTALLLPLALLLHAARPEVQLVESGGGLVQPGGSLRLSCAASGFSFSDFWMSWVRQAPGKGLEWVATISQAGSEKDYVDSVKGRFTISRDNAKKSLYLQMNSLRAEDTAVYYCASGVYSFDYRGQGTLVTVSSGTGGGGSGGGGSGGGGSEFDIQMTQTASSLPASLGDRVTISCSASQDISNYLNWYQQKPDGTVKLLIFYSSNLHSGVPSRFSGGGSGTDYSLTISNLEPEDIATYFCHQYSKLPWTFGGGTKLEIKRLEIQNPDPAVYQLRDSKSSDKSVCLFTDFDSQTNVSQSKDSDVYITDKCVLDMRSMDFKSNSAVAWSNKSDFACANAFNNSIIPEDTFFPSPESSCGFTSESYQQGVLSATILYEILLGKATLYAVLVSALVLMAMVKRKDSRGRAKRSGSGVKQTLNFDLLKLAGDVESNPGPTSMDWIWRILFLVGAATGAHSFEEVTLVESGGDFVKPGGSLKVSCAASGFAFSHYAMSWVRQTPAKRLEWVAYISSGGSGTYYSDSVKGRFTISRDNAKNTLYLQMRSLRSEDSAMYFCTRVKLGTYYFDSWGQGTTLTVSSTREDLKNVFPPEVAVFEPSEAEISHTQKATLVCLATGFYPDHVELSWWVNGKEVHSGVCTDPQPLKEQPALNDSRYCLSSRLRVSATFWQNPRNHFRCQVQFYGLSENDEWTQDRAKPVTQIVSAEAWGRADCDVKLVEKSFETDTNLNFQNLSVIGFRILLLKVAGFNLLMTLRLWSS

SEQ ID NO: 12861 - protein, 761 aa, synthetic construct
MALPVTALLLPLALLLHAARPEVQLVESGGGLVQPGGSLRLSCAASGFSFSDFWMSWVRQAPGKGLEWVATISQAGSEKDYVDSVKGRFTISRDNAKKSLYLQMNSLRAEDTAVYYCASGVYSFDYRGQGTLVTVSSGTGGGGSGGGGSGGGGSEFQFVLTQSPSASAALGASAKLTCTLSSAHKTYTIDWYQQQKGKAPRYLIQVKSDGTYTKATGVPDRFSGSSSGADRYLIIPSVQADDEADYYCGTDYTGGYVFGGGTQLTVTLEIQNPDPAVYQLRDSKSSDKSVCLFTDFDSQTNVSQSKDSDVYITDKCVLDMRSMDFKSNSAVAWSNKSDFACANAFNNSIIPEDTFFPSPESSCGFTSESYQQGVLSATILYEILLGKATLYAVLVSALVLMAMVKRKDSRGRAKRSGSGVKQTLNFDLLKLAGDVESNPGPTSMDWIWRILFLVGAATGAHSFEEQLKESGGGLFKPTDTLTLTCTVSGFSLSYYGVNWVRQAPGNGLEWIGTIGGSGDTYYASWAKSRSTIIRNTNENTVTLKMTSLTAADTATYFCVRYANIGYEYFNVWGPGTLVTVSSTREDLKNVFPPEVAVFEPSEAEISHTQKATLVCLATGFYPDHVELSWWVNGKEVHSGVCTDPQPLKEQPALNDSRYCLSSRLRVSATFWQNPRNHFRCQVQFYGLSENDEWTQDRAKPVTQIVSAEAWGRADCDVKLVEKSFETDTNLNFQNLSVIGFRILLLKVAGFNLLMTLRLWSS

SEQ ID NO: 12862 - protein, 766 aa, synthetic construct
MALPVTALLLPLALLLHAARPEVQLVESGGGLVQPGGSLRLSCAASGFSFSDFWMSWVRQAPGKGLEWVATISQAGSEKDYVDSVKGRFTISRDNAKKSLYLQMNSLRAEDTAVYYCASGVYSFDYRGQGTLVTVSSGTGGGGSGGGGSGGGGSEFQFVLTQSPSVSAALGASAKLTCTLSSAHKTYTIDWYQQQQGEAPRYLMQVKSDGSYTKGTGVPDRFSGSSSGADRYLIIPSVQADDEAGYVCGADDNGGYVFGGGTQLTVTLEIQNPDPAVYQLRDSKSSDKSVCLFTDFDSQTNVSQSKDSDVYITDKCVLDMRSMDFKSNSAVAWSNKSDFACANAFNNSIIPEDTFFPSPESSCGFTSESYQQGVLSATILYEILLGKATLYAVLVSALVLMAMVKRKDSRGRAKRSGSGVKQTLNFDLLKLAGDVESNPGPTSMDWIWRILFLVGAATGAHSFEQSVKESEGGLFKPTDTLTLTCTVSGFSLSRHALTWVRQAPGNGLEWIGAIDNAGTTYYASWAKSRSTITRNTDLHTVTLKMTSLTASDTATYFCARVFYDINSGYYLDGMDLWGPGTLVTVSSTREDLKNVFPPEVAVFEPSEAEISHTQKATLVCLATGFYPDHVELSWWVNGKEVHSGVCTDPQPLKEQPALNDSRYCLSSRLRVSATFWQNPRNHFRCQVQFYGLSENDEWTQDRAKPVTQIVSAEAWGRADCDVKLVEKSFETDTNLNFQNLSVIGFRILLLKVAGFNLLMTLRLWSS

SEQ ID NO: 12863 - protein, 760 aa, synthetic construct
MALPVTALLLPLALLLHAARPEVQLVESGGGLVQPGGSLRLSCAASGFSFSDFWMSWVRQAPGKGLEWVATISQAGSEKDYVDSVKGRFTISRDNAKKSLYLQMNSLRAEDTAVYYCASGVYSFDYRGQGTLVTVSSGTGGGGSGGGGSGGGGSEFDIQMTQSPSSLSASVGDRVTITCRASQGISSWLAWYQQKPEKAPKSLIYAASSLQSGVPSRFSGSGSGTDFTLTISSLQPEDFATYYCQQYNSYPPTFGGGTKVEIKLEIQNPDPAVYQLRDSKSSDKSVCLFTDFDSQTNVSQSKDSDVYITDKCVLDMRSMDFKSNSAVAWSNKSDFACANAFNNSIIPEDTFFPSPESSCGFTSESYQQGVLSATILYEILLGKATLYAVLVSALVLMAMVKRKDSRGRAKRSGSGVKQTLNFDLLKLAGDVESNPGPTSMDWIWRILFLVGAATGAHSFEEVQLVESGGGLVQPGESLRLSCVASGFTFSRYKMNWVRQAPGKGLEWVSYISRSGRDIYYADSVKGRFTISRDNAKNSLYLQMNSLRDEDTAVYYCAGTVTTYYYFGMDVWGHGTTVTVSSTREDLKNVFPPEVAVFEPSEAEISHTQKATLVCLATGFYPDHVELSWWVNGKEVHSGVCTDPQPLKEQPALNDSRYCLSSRLRVSATFWQNPRNHFRCQVQFYGLSENDEWTQDRAKPVTQIVSAEAWGRADCDVKLVEKSFETDTNLNFQNLSVIGFRILLLKVAGFNLLMTLRLWSS

SEQ ID NO: 12864 - protein, 761 aa, synthetic construct
MALPVTALLLPLALLLHAARPEVQLVESGGGLVQPGGSLRLSCAASGFSFSDFWMSWVRQAPGKGLEWVATISQAGSEKDYVDSVKGRFTISRDNAKKSLYLQMNSLRAEDTAVYYCASGVYSFDYRGQGTLVTVSSGTGGGGSGGGGSGGGGSEFDIQMTQSPSSLSASVGDRVTITCRASQGISSWLAWYQQKPEKAPKSLIYAASSLQSGVPSRFSGSGSGTDFTLTISSLQPEDFATYYCQQYNSYPPTFGGGTKVEIKLEIQNPDPAVYQLRDSKSSDKSVCLFTDFDSQTNVSQSKDSDVYITDKCVLDMRSMDFKSNSAVAWSNKSDFACANAFNNSIIPEDTFFPSPESSCGFTSESYQQGVLSATILYEILLGKATLYAVLVSALVLMAMVKRKDSRGRAKRSGSGVKQTLNFDLLKLAGDVESNPGPTSMDWIWRILFLVGAATGAHSFEEVQLVESGGGSVQPGESLRLSCVASGFTFSRYKMNWVRQAPGKGLEWVSYISRSGRDIYYADSVKGRFTISRDNAKNSLYLQMNSLRDEDTAVYYCAGTVTTYYYDFGMDVWGQGTTVTVSSTREDLKNVFPPEVAVFEPSEAEISHTQKATLVCLATGFYPDHVELSWWVNGKEVHSGVCTDPQPLKEQPALNDSRYCLSSRLRVSATFWQNPRNHFRCQVQFYGLSENDEWTQDRAKPVTQIVSAEAWGRADCDVKLVEKSFETDTNLNFQNLSVIGFRILLLKVAGFNLLMTLRLWSS

SEQ ID NO: 12865 - protein, 759 aa, synthetic construct
MALPVTALLLPLALLLHAARPEVQLVESGGGLVQPGGSLRLSCAASGFSFSDFWMSWVRQAPGKGLEWVATISQAGSEKDYVDSVKGRFTISRDNAKKSLYLQMNSLRAEDTAVYYCASGVYSFDYRGQGTLVTVSSGTGGGGSGGGGSGGGGSEFQSVLTQPPSASGTPGQRVTISCSGSRSNVGGNYVFWYQQVPGATPKLLIYRSNQRPSGVPDRFAGSKSGSSASLAISGLRSEDEADYYCATWDDSLSGFVFGTGTKVTVLGLEIQNPDPAVYQLRDSKSSDKSVCLFTDFDSQTNVSQSKDSDVYITDKCVLDMRSMDFKSNSAVAWSNKSDFACANAFNNSIIPEDTFFPSPESSCGFTSESYQQGVLSATILYEILLGKATLYAVLVSALVLMAMVKRKDSRGRAKRSGSGVKQTLNFDLLKLAGDVESNPGPTSMDWIWRILFLVGAATGAHSFEVQLVESGGGLVKPGGSLRLSCAASGFTFSDYYMSWIRQAPGKGLEWVSYISSSGSTIYYADSVKGRFTISRDNAKNSLYLQMNSLRAEDTAVYYCARGYGKAYDQWGQGTLVTVSSTREDLKNVFPPEVAVFEPSEAEISHTQKATLVCLATGFYPDHVELSWWVNGKEVHSGVCTDPQPLKEQPALNDSRYCLSSRLRVSATFWQNPRNHFRCQVQFYGLSENDEWTQDRAKPVTQIVSAEAWGRADCDVKLVEKSFETDTNLNFQNLSVIGFRILLLKVAGFNLLMTLRLWSS

SEQ ID NO: 12866 - protein, 758 aa, synthetic construct
MALPVTALLLPLALLLHAARPEVQLVESGGGLVQPGGSLRLSCAASGFSFSDFWMSWVRQAPGKGLEWVATISQAGSEKDYVDSVKGRFTISRDNAKKSLYLQMNSLRAEDTAVYYCASGVYSFDYRGQGTLVTVSSGTGGGGSGGGGSGGGGSEFQSVVTQPPSMSAAPGQQVTISCSGGNSNIERNYVSWYLQLPGTAPKLVIFDNDRRPSGIPDRFSGSKSGTSATLGITGLQTGDEADYYCGTWDSSLRGWVFGGGTKLTVLGLEIQNPDPAVYQLRDSKSSDKSVCLFTDFDSQTNVSQSKDSDVYITDKCVLDMRSMDFKSNSAVAWSNKSDFACANAFNNSIIPEDTFFPSPESSCGFTSESYQQGVLSATILYEILLGKATLYAVLVSALVLMAMVKRKDSRGRAKRSGSGVKQTLNFDLLKLAGDVESNPGPTSMDWIWRILFLVGAATGAHSFEVQLVESGGGLIQPGGSLRLSCAASGFTFSNYAMNWVRQAPGKGLEWVSTINGRGSSTIYADSVKGRFTISRDNSKNTLYLQMNSLRAEDTATYYCARYISRGLGDSWGQGTLVTVTREDLKNVFPPEVAVFEPSEAEISHTQKATLVCLATGFYPDHVELSWWVNGKEVHSGVCTDPQPLKEQPALNDSRYCLSSRLRVSATFWQNPRNHFRCQVQFYGLSENDEWTQDRAKPVTQIVSAEAWGRADCDVKLVEKSFETDTNLNFQNLSVIGFRILLLKVAGFNLLMTLRLWSS

SEQ ID NO: 12867 - protein, 759 aa, synthetic construct
MALPVTALLLPLALLLHAARPEVQLVESGGGLVQPGGSLRLSCAASGFSFSDFWMSWVRQAPGKGLEWVATISQAGSEKDYVDSVKGRFTISRDNAKKSLYLQMNSLRAEDTAVYYCASGVYSFDYRGQGTLVTVSSGTGGGGSGGGGSGGGGSEFDVVMTQTPLSLPVSLGDQASISCRSSQSLVHSNGNTYLHWYLQKPGQSPKLLIYKVSNRFSGVPDRFSGSGSGTDFTLKISRVEAEDLGVYFCSQNTPVPPKFGSGTKLEIKLEIQNPDPAVYQLRDSKSSDKSVCLFTDFDSQTNVSQSKDSDVYITDKCVLDMRSMDFKSNSAVAWSNKSDFACANAFNNSIIPEDTFFPSPESSCGFTSESYQQGVLSATILYEILLGKATLYAVLVSALVLMAMVKRKDSRGRAKRSGSGVKQTLNFDLLKLAGDVESNPGPTSMDWIWRILFLVGAATGAHSFEQVQLQQSGAELVRPGASVKLSCKASGYTFNDYEMHWVKQTPVHGLKWIGALEPKTGDTAYSQKFKGKATLTADKSSSTAYMELRSLTSEDSAVYYCTSCYYYTYSGQGTLVTVSATREDLKNVFPPEVAVFEPSEAEISHTQKATLVCLATGFYPDHVELSWWVNGKEVHSGVCTDPQPLKEQPALNDSRYCLSSRLRVSATFWQNPRNHFRCQVQFYGLSENDEWTQDRAKPVTQIVSAEAWGRADCDVKLVEKSFETDTNLNFQNLSVIGFRILLLKVAGFNLLMTLRLWSS

SEQ ID NO: 12868 - protein, 758 aa, synthetic construct
MALPVTALLLPLALLLHAARPEVQLVESGGGLVQPGGSLRLSCAASGFSFSDFWMSWVRQAPGKGLEWVATISQAGSEKDYVDSVKGRFTISRDNAKKSLYLQMNSLRAEDTAVYYCASGVYSFDYRGQGTLVTVSSGTGGGGSGGGGSGGGGSEFDIQLTQSPSSLSASVGDRVTITCRASQGIRNDLGWYQQKPGKAPKRLIYAASSLQNGVPSRFSGSGSGTEFTLTISSLQPEDFATYYCLQHNTYPAFGQGTKVEIKRLEIQNPDPAVYQLRDSKSSDKSVCLFTDFDSQTNVSQSKDSDVYITDKCVLDMRSMDFKSNSAVAWSNKSDFACANAFNNSIIPEDTFFPSPESSCGFTSESYQQGVLSATILYEILLGKATLYAVLVSALVLMAMVKRKDSRGRAKRSGSGVKQTLNFDLLKLAGDVESNPGPTSMDWIWRILFLVGAATGAHSFEQVQLQESGPGLVKPSQTLSLTCTVSGGSISSFNYYWSWIRHHPGKGLEWIGYIYYSGSTYSNPSLKSRVTISVDTSKNQFSLTLSSVTAADTAVYYCARGYNWNYFDYWGQGTLVTVSSTREDLKNVFPPEVAVFEPSEAEISHTQKATLVCLATGFYPDHVELSWWVNGKEVHSGVCTDPQPLKEQPALNDSRYCLSSRLRVSATFWQNPRNHFRCQVQFYGLSENDEWTQDRAKPVTQIVSAEAWGRADCDVKLVEKSFETDTNLNFQNLSVIGFRILLLKVAGFNLLMTLRLWSS

SEQ ID NO: 12869 - protein, 760 aa, synthetic construct
MALPVTALLLPLALLLHAARPEVQLVESGGGLVQPGGSLRLSCAASGFSFSDFWMSWVRQAPGKGLEWVATISQAGSEKDYVDSVKGRFTISRDNAKKSLYLQMNSLRAEDTAVYYCASGVYSFDYRGQGTLVTVSSGTGGGGSGGGGSGGGGSEFDDIVLTQSPASLAVSLGQSVTISCRASESVEYYGTSLMQWYQQKPGQPPKLLIYATSNVESGVPARFSGSGSGTDFSLNIHPVEEDDIAMYFCQQSRKLPSTFGGGTKLEIKLEIQNPDPAVYQLRDSKSSDKSVCLFTDFDSQTNVSQSKDSDVYITDKCVLDMRSMDFKSNSAVAWSNKSDFACANAFNNSIIPEDTFFPSPESSCGFTSESYQQGVLSATILYEILLGKATLYAVLVSALVLMAMVKRKDSRGRAKRSGSGVKQTLNFDLLKLAGDVESNPGPTSMDWIWRILFLVGAATGAHSFEDVRLQESGPGQVKPSQTVSLTCSVTGYSITNGNHWWNWIRQVSGSKLEWIGYISSSGSTDSNPSLKSRISITRDTSKNQLFLQLNSVTTEDIATYYCARGYYFDYWGQGTTLTVSSTREDLKNVFPPEVAVFEPSEAEISHTQKATLVCLATGFYPDHVELSWWVNGKEVHSGVCTDPQPLKEQPALNDSRYCLSSRLRVSATFWQNPRNHFRCQVQFYGLSENDEWTQDRAKPVTQIVSAEAWGRADCDVKLVEKSFETDTNLNFQNLSVIGFRILLLKVAGFNLLMTLRLWSS

SEQ ID NO: 12870 - protein, 759 aa, synthetic construct
MALPVTALLLPLALLLHAARPEVQLVESGGGLVQPGGSLRLSCAASGFSFSDFWMSWVRQAPGKGLEWVATISQAGSEKDYVDSVKGRFTISRDNAKKSLYLQMNSLRAEDTAVYYCASGVYSFDYRGQGTLVTVSSGTGGGGSGGGGSGGGGSEFDIQMTQSPSSLSASVGDRVTITCRASQDVNTAVAWYQQKPGKAPKLLIYSASFLESGVPSRFSGSRSGTDFTLTISSLQPEDFATYYCQQHYTTPPTFGQTKVEIKRLEIQNPDPAVYQLRDSKSSDKSVCLFTDFDSQTNVSQSKDSDVYITDKCVLDMRSMDFKSNSAVAWSNKSDFACANAFNNSIIPEDTFFPSPESSCGFTSESYQQGVLSATILYEILLGKATLYAVLVSALVLMAMVKRKDSRGRAKRSGSGVKQTLNFDLLKLAGDVESNPGPTSMDWIWRILFLVGAATGAHSFEEVQLVESGGGLVQPGGSLRLSCAASGFNIKDTYIHWVRQAPGKGLEWVARIYPTNGYTRYADSVKGRFTISADTSKNTAYLQMNSLRAEDTAVYYCSRWGGDGFYAMDVWGQGTLVTVSSTREDLKNVFPPEVAVFEPSEAEISHTQKATLVCLATGFYPDHVELSWWVNGKEVHSGVCTDPQPLKEQPALNDSRYCLSSRLRVSATFWQNPRNHFRCQVQFYGLSENDEWTQDRAKPVTQIVSAEAWGRADCDVKLVEKSFETDTNLNFQNLSVIGFRILLLKVAGFNLLMTLRLWSS

SEQ ID NO: 12871 - protein, 758 aa, synthetic construct
MALPVTALLLPLALLLHAARPEVQLVESGGGLVQPGGSLRLSCAASGFSFSDFWMSWVRQAPGKGLEWVATISQAGSEKDYVDSVKGRFTISRDNAKKSLYLQMNSLRAEDTAVYYCASGVYSFDYRGQGTLVTVSSGTGGGGSGGGGSGGGGSEFDQSVLTQPPSVSVAPGKTARIPCEGNYIGSSNVHWYQQKPGQAPVLVIHFDSDRPSGIPDRFSGSNSGNMATLTISRVEAGDEADYYCQVWENHGWVFGGGTKLTVLSLEIQNPDPAVYQLRDSKSSDKSVCLFTDFDSQTNVSQSKDSDVYITDKCVLDMRSMDFKSNSAVAWSNKSDFACANAFNNSIIPEDTFFPSPESSCGFTSESYQQGVLSATILYEILLGKATLYAVLVSALVLMAMVKRKDSRGRAKRSGSGVKQTLNFDLLKLAGDVESNPGPTSMDWIWRILFLVGAATGAHSFEEVQLVETGGGLVQPGESLRLSCAASGFTFSDYEMNWVRQAPGKGLEWVSYISSSGSTIYYADSVKGRFTIYRDNAKNSLYLQMNSLRAEDTALYYCARAWGVGPPDYWGQGTLVTVSSTREDLKNVFPPEVAVFEPSEAEISHTQKATLVCLATGFYPDHVELSWWVNGKEVHSGVCTDPQPLKEQPALNDSRYCLSSRLRVSATFWQNPRNHFRCQVQFYGLSENDEWTQDRAKPVTQIVSAEAWGRADCDVKLVEKSFETDTNLNFQNLSVIGFRILLLKVAGFNLLMTLRLWSS

SEQ ID NO: 12872 - protein, 766 aa, synthetic construct
MALPVTALLLPLALLLHAARPEVQLVESGGGLVQPGGSLRLSCAASGFSFSDFWMSWVRQAPGKGLEWVATISQAGSEKDYVDSVKGRFTISRDNAKKSLYLQMNSLRAEDTAVYYCASGVYSFDYRGQGTLVTVSSGTGGGGSGGGGSGGGGSEFDIQMTQSPSSLSASVGDTVTITCQANGYLNWYQQRRGKAPKLLIYDGSKLERGVPSRFSGRRWGQEYNLTINNLQPEDIATYFCQVYEFVVPGTRLDLKRTVAAPLEIQNPDPAVYQLRDSKSSDKSVCLFTDFDSQTNVSQSKDSDVYITDKCVLDMRSMDFKSNSAVAWSNKSDFACANAFNNSIIPEDTFFPSPESSCGFTSESYQQGVLSATILYEILLGKATLYAVLVSALVLMAMVKRKDSRGRAKRSGSGVKQTLNFDLLKLAGDVESNPGPTSMDWIWRILFLVGAATGAHSFEQVQLLQSGAAVTKPGASVRVSCEASGYNIRDYFIHWWRQAPGQGLQWVGWINPKTGQPNNPRQFQGRVSLTRHASWDFDTFSFYMDLKALRSDDTAVYFCARQRSDYWDFDVWGSGTQVTVSSASTKGPTREDLKNVFPPEVAVFEPSEAEISHTQKATLVCLATGFYPDHVELSWWVNGKEVHSGVCTDPQPLKEQPALNDSRYCLSSRLRVSATFWQNPRNHFRCQVQFYGLSENDEWTQDRAKPVTQIVSAEAWGRADCDVKLVEKSFETDTNLNFQNLSVIGFRILLLKVAGFNLLMTLRLWSS

SEQ ID NO: 12873 - protein, 772 aa, synthetic construct
MALPVTALLLPLALLLHAARPEVQLVESGGGLVQPGGSLRLSCAASGFSFSDFWMSWVRQAPGKGLEWVATISQAGSEKDYVDSVKGRFTISRDNAKKSLYLQMNSLRAEDTAVYYCASGVYSFDYRGQGTLVTVSSGTGGGGSGGGGSGGGGSEFQSALTQPPSASGSPGQSITISCTGTSNNFVSWYQQHAGKAPKLVIYDVNKRPSGVPDRFSGSKSGNTASLTVSGLQTDDEAVYYCGSLVGNWDVIFGGGTKLTVLLEIQNPDPAVYQLRDSKSSDKSVCLFTDFDSQTNVSQSKDSDVYITDKCVLDMRSMDFKSNSAVAWSNKSDFACANAFNNSIIPEDTFFPSPESSCGFTSESYQQGVLSATILYEILLGKATLYAVLVSALVLMAMVKRKDSRGRAKRSGSGVKQTLNFDLLKLAGDVESNPGPTSMDWIWRILFLVGAATGAHSFEQPQLQESGPTLVEASETLSLTCAVSGDSTAACNSFWGWVRQPPGKGLEWVGSLSHCASYWNRGWTYHNPSLKSRLTLALDTPKNLVFLKLNSVTAADTATYYCARFGGEVLRYTDWPKPAWVDLWGRGTLVTVSSTREDLKNVFPPEVAVFEPSEAEISHTQKATLVCLATGFYPDHVELSWWVNGKEVHSGVCTDPQPLKEQPALNDSRYCLSSRLRVSATFWQNPRNHFRCQVQFYGLSENDEWTQDRAKPVTQIVSAEAWGRADCDVKLVEKSFETDTNLNFQNLSVIGFRILLLKVAGFNLLMTLRLWSS

SEQ ID NO: 12874 - protein, 757 aa, synthetic construct
MALPVTALLLPLALLLHAARPEVQLVESGGGLVQPGGSLRLSCAASGFSFSDFWMSWVRQAPGKGLEWVATISQAGSEKDYVDSVKGRFTISRDNAKKSLYLQMNSLRAEDTAVYYCASGVYSFDYRGQGTLVTVSSGTGGGGSGGGGSGGGGSEFEIVLTQSPGTLSLSPGETAIISCRTSQYGSLAWYQQRPGQAPRLVIYSGSTRAAGIPDRFSGSRWGPDYNLTISNLESGDFGVYYCQQYEFFGQGTKVQVDIKRLEIQNPDPAVYQLRDSKSSDKSVCLFTDFDSQTNVSQSKDSDVYITDKCVLDMRSMDFKSNSAVAWSNKSDFACANAFNNSIIPEDTFFPSPESSCGFTSESYQQGVLSATILYEILLGKATLYAVLVSALVLMAMVKRKDSRGRAKRSGSGVKQTLNFDLLKLAGDVESNPGPTSMDWIWRILFLVGAATGAHSFEQVQLVQSGGQMKKPGESMRISCRASGYEFIDCTLNWIRLAPGKRPEWMGWLKPRGGAVNYARPLQGRVTMTRDVYSDTAFLELRSLTVDDTAVYFCTRGKNCDYNWDFEHWGRGTPVIVSSTREDLKNVFPPEVAVFEPSEAEISHTQKATLVCLATGFYPDHVELSWWVNGKEVHSGVCTDPQPLKEQPALNDSRYCLSSRLRVSATFWQNPRNHFRCQVQFYGLSENDEWTQDRAKPVTQIVSAEAWGRADCDVKLVEKSFETDTNLNFQNLSVIGFRILLLKVAGFNLLMTLRLWSS

SEQ ID NO: 12875 - protein, 767 aa, synthetic construct
MALPVTALLLPLALLLHAARPEVQLVESGGGLVQPGGSLRLSCAASGFSFSDFWMSWVRQAPGKGLEWVATISQAGSEKDYVDSVKGRFTISRDNAKKSLYLQMNSLRAEDTAVYYCASGVYSFDYRGQGTLVTVSSGTGGGGSGGGGSGGGGSEFELVLTQSPGTLSLSAGERATLSCRASQSVSSGSLAWYQQKPGQAPRLLIYGASTRATGIPDRFSGSGSGTDFTLTIGRLEPEDLAVYYCQQYGTSPYTFGQGTKLEILEIQNPDPAVYQLRDSKSSDKSVCLFTDFDSQTNVSQSKDSDVYITDKCVLDMRSMDFKSNSAVAWSNKSDFACANAFNNSIIPEDTFFPSPESSCGFTSESYQQGVLSATILYEILLGKATLYAVLVSALVLMAMVKRKDSRGRAKRSGSGVKQTLNFDLLKLAGDVESNPGPTSMDWIWRILFLVGAATGAHSFELEQSGAEVKKPGSSVQVSCKASGGTFSMYGFNWVRQAPGHGLEWMGGIIPIFGTSNYAQKFRGRVTFTADQATSTAYMELTNLRSDDTAVYYCARDFGPDWEDGDSYDGSGRGFFDFWGQGTLVTVSSTREDLKNVFPPEVAVFEPSEAEISHTQKATLVCLATGFYPDHVELSWWVNGKEVHSGVCTDPQPLKEQPALNDSRYCLSSRLRVSATFWQNPRNHFRCQVQFYGLSENDEWTQDRAKPVTQIVSAEAWGRADCDVKLVEKSFETDTNLNFQNLSVIGFRILLLKVAGFNLLMTLRLWSS

SEQ ID NO: 12876 - protein, 747 aa, synthetic construct
MALPVTALLLPLALLLHAARPEVQLVESGGGLVQPGGSLRLSCAASGFSFSDFWMSWVRQAPGKGLEWVATISQAGSEKDYVDSVKGRFTISRDNAKKSLYLQMNSLRAEDTAVYYCASGVYSFDYRGQGTLVTVSSGTGGGGSGGGGSGGGGSEFDIQMTQSPSSLSASVGDRVTITCQASQDINNYLNWYQQKPGKAPKLLIYDASNLQTGVPSRFSGSGSGTDFTFTIEDIATYYCQQYTFGPGTKVDIKLEIQNPDPAVYQLRDSKSSDKSVCLFTDFDSQTNVSQSKDSDVYITDKCVLDMRSMDFKSNSAVAWSNKSDFACANAFNNSIIPEDTFFPSPESSCGFTSESYQQGVLSATILYEILLGKATLYAVLVSALVLMAMVKRKDSRGRAKRSGSGVKQTLNFDLLKLAGDVESNPGPTSMDWIWRILFLVGAATGAHSFEEVQLLESGGGLVQPGGSLRLSCAASGFTFSWYSMTWVRQAPGKGLEWVSSIVPWGDFTQYADSVKGRFTISRDNSKNTLYLQMNSLRAEDTAVYYCAKGPGWGSFDLWGRGTLVTVSSTREDLKNVFPPEVAVFEPSEAEISHTQKATLVCLATGFYPDHVELSWWVNGKEVHSGVCTDPQPLKEQPALNDSRYCLSSRLRVSATFWQNPRNHFRCQVQFYGLSENDEWTQDRAKPVTQIVSAEAWGRADCDVKLVEKSFETDTNLNFQNLSVIGFRILLLKVAGFNLLMTLRLWSS

SEQ ID NO: 12877 - protein, 757 aa, synthetic construct
MALPVTALLLPLALLLHAARPEVQLVESGGGLVQPGGSLRLSCAASGFSFSDFWMSWVRQAPGKGLEWVATISQAGSEKDYVDSVKGRFTISRDNAKKSLYLQMNSLRAEDTAVYYCASGVYSFDYRGQGTLVTVSSGTGGGGSGGGGSGGGGSEFDIQMTQSPSSLSASVGDRVTITCTASLSVSSTYLHWYQQKPGSSPKLWIYSTSNLASGVPSRFSGSGSGTSYTLTISSLQPEDFATYYCHQYHRSPLTFGGGTKVEIKRLEIQNPDPAVYQLRDSKSSDKSVCLFTDFDSQTNVSQSKDSDVYITDKCVLDMRSMDFKSNSAVAWSNKSDFACANAFNNSIIPEDTFFPSPESSCGFTSESYQQGVLSATILYEILLGKATLYAVLVSALVLMAMVKRKDSRGRAKRSGSGVKQTLNFDLLKLAGDVESNPGPTSMDWIWRILFLVGAATGAHSFEEVQLVESGGGLVQPGGSLRLSCAASGFSLTKYGVHWVRQAPGKGLEWVGVKWAGGSTDYNSALMSRFTISKDNAKNSLYLQMNSLRAEDTAVYYCARDHRDAMDYWGQGTLVTVSSTREDLKNVFPPEVAVFEPSEAEISHTQKATLVCLATGFYPDHVELSWWVNGKEVHSGVCTDPQPLKEQPALNDSRYCLSSRLRVSATFWQNPRNHFRCQVQFYGLSENDEWTQDRAKPVTQIVSAEAWGRADCDVKLVEKSFETDTNLNFQNLSVIGFRILLLKVAGFNLLMTLRLWSS

SEQ ID NO: 12878 - protein, 761 aa, synthetic construct
MALPVTALLLPLALLLHAARPEVQLVESGGGLVQPGGSLRLSCAASGFSFSDFWMSWVRQAPGKGLEWVATISQAGSEKDYVDSVKGRFTISRDNAKKSLYLQMNSLRAEDTAVYYCASGVYSFDYRGQGTLVTVSSGTGGGGSGGGGSGGGGSEFDIQMTQSPSSLSASVGDRVTITCKASQDVGTAVAWYQQKPGKAPKLLIYSASYRSTGVPSRFSGSGSGTDFTLTISSLQPEDFATYYCQHHYSAPWTFGGGTKVEIKLEIQNPDPAVYQLRDSKSSDKSVCLFTDFDSQTNVSQSKDSDVYITDKCVLDMRSMDFKSNSAVAWSNKSDFACANAFNNSIIPEDTFFPSPESSCGFTSESYQQGVLSATILYEILLGKATLYAVLVSALVLMAMVKRKDSRGRAKRSGSGVKQTLNFDLLKLAGDVESNPGPTSMDWIWRILFLVGAATGAHSFEEVQLVESGGGLVQPGGSLRLSCAASGFTFSRNGMSWVRQAPGKGLEWVATVSSGGSYIYYADSVKGRFTISRDNAKNSLYLQMNSLRAEDTAVYYCARQGTTALATRFFDVWGQGTLVTVSSTREDLKNVFPPEVAVFEPSEAEISHTQKATLVCLATGFYPDHVELSWWVNGKEVHSGVCTDPQPLKEQPALNDSRYCLSSRLRVSATFWQNPRNHFRCQVQFYGLSENDEWTQDRAKPVTQIVSAEAWGRADCDVKLVEKSFETDTNLNFQNLSVIGFRILLLKVAGFNLLMTLRLWSS

SEQ ID NO: 12879 - protein, 757 aa, synthetic construct
MALPVTALLLPLALLLHAARPEVQLVESGGGLVQPGGSLRLSCAASGFSFSDFWMSWVRQAPGKGLEWVATISQAGSEKDYVDSVKGRFTISRDNAKKSLYLQMNSLRAEDTAVYYCASGVYSFDYRGQGTLVTVSSGTGGGGSGGGGSGGGGSEFDIQMTQSPPSLSASVGGKVTITCKASQDIDRYMAWYQDKPGKGPKLLIHDTSTLQPGIPSRFSGSGSGRDYSFSISNLEPEDIATYYCLQYDNLWTFGGGTKLEIKRLEIQNPDPAVYQLRDSKSSDKSVCLFTDFDSQTNVSQSKDSDVYITDKCVLDMRSMDFKSNSAVAWSNKSDFACANAFNNSIIPEDTFFPSPESSCGFTSESYQQGVLSATILYEILLGKATLYAVLVSALVLMAMVKRKDSRGRAKRSGSGVKQTLNFDLLKLAGDVESNPGPTSMDWIWRILFLVGAATGAHSFEQVQLVQSGAELVKPGASVKMSCKASGYIFTNYNIHWVKKSPGQGLEWIGAIYPGNGDAPYSQKFQDRATLTADTSSSTTYMELSSLTSEDSAVYYCVRANWDVAFAYWGQGTLVSVSSTREDLKNVFPPEVAVFEPSEAEISHTQKATLVCLATGFYPDHVELSWWVNGKEVHSGVCTDPQPLKEQPALNDSRYCLSSRLRVSATFWQNPRNHFRCQVQFYGLSENDEWTQDRAKPVTQIVSAEAWGRADCDVKLVEKSFETDTNLNFQNLSVIGFRILLLKVAGFNLLMTLRLWSS

SEQ ID NO: 12880 - protein, 758 aa, synthetic construct
MALPVTALLLPLALLLHAARPEVQLVESGGGLVQPGGSLRLSCAASGFSFSDFWMSWVRQAPGKGLEWVATISQAGSEKDYVDSVKGRFTISRDNAKKSLYLQMNSLRAEDTAVYYCASGVYSFDYRGQGTLVTVSSGTGGGGSGGGGSGGGGSEFDIQMTQSPASLSASVGETVTITCRVSGNIHNYLAWYQQKQGKSPQLLVYNAKTLADGVPSRFSGSGSGTQYSLKINSLQPEDFGSYYCQHFWSNPYTFGGGTKLEIKLEIQNPDPAVYQLRDSKSSDKSVCLFTDFDSQTNVSQSKDSDVYITDKCVLDMRSMDFKSNSAVAWSNKSDFACANAFNNSIIPEDTFFPSPESSCGFTSESYQQGVLSATILYEILLGKATLYAVLVSALVLMAMVKRKDSRGRAKRSGSGVKQTLNFDLLKLAGDVESNPGPTSMDWIWRILFLVGAATGAHSFEQVQLQQSGASVKVSCKASELVRPGTGYAFTNYLIEWVKQRPGQGLEWIGVINPGSGGTNYNEKFKGKATLTADKSSSTAYMQLSSLTSDDSAVYFCARYRSYDWYFDVWGAGTTVTVSSTREDLKNVFPPEVAVFEPSEAEISHTQKATLVCLATGFYPDHVELSWWVNGKEVHSGVCTDPQPLKEQPALNDSRYCLSSRLRVSATFWQNPRNHFRCQVQFYGLSENDEWTQDRAKPVTQIVSAEAWGRADCDVKLVEKSFETDTNLNFQNLSVIGFRILLLKVAGFNLLMTLRLWSS

SEQ ID NO: 12881 - protein, 757 aa, synthetic construct
MALPVTALLLPLALLLHAARPEVQLVESGGGLVQPGGSLRLSCAASGFSFSDFWMSWVRQAPGKGLEWVATISQAGSEKDYVDSVKGRFTISRDNAKKSLYLQMNSLRAEDTAVYYCASGVYSFDYRGQGTLVTVSSGTGGGGSGGGGSGGGGSEFDIQMTQSFSSLSASVGDRVTITCRASQDISNYLNWYQQKPGKAPKLLIYYTSRLHSGVPSRFSGSGSGTDYTLTISSLQPEDFATYFCQQGNTLPWTFGGGTKLEIKRLEIQNPDPAVYQLRDSKSSDKSVCLFTDFDSQTNVSQSKDSDVYITDKCVLDMRSMDFKSNSAVAWSNKSDFACANAFNNSIIPEDTFFPSPESSCGFTSESYQQGVLSATILYEILLGKATLYAVLVSALVLMAMVKRKDSRGRAKRSGSGVKQTLNFDLLKLAGDVESNPGPTSMDWIWRILFLVGAATGAHSFEEVQLVQSGGGLVQSGGSLRLSCRASGYTFTRYWMLWVRQRPGKGLEWVAEINPRNDRTNYNEKFKTRFTISVDRSKNTLYLQMDSLRAEDTAVYFCALGGGYAMDYWGQGTLVTVSSTREDLKNVFPPEVAVFEPSEAEISHTQKATLVCLATGFYPDHVELSWWVNGKEVHSGVCTDPQPLKEQPALNDSRYCLSSRLRVSATFWQNPRNHFRCQVQFYGLSENDEWTQDRAKPVTQIVSAEAWGRADCDVKLVEKSFETDTNLNFQNLSVIGFRILLLKVAGFNLLMTLRLWSS

SEQ ID NO: 12882 - protein, 758 aa, synthetic construct
MALPVTALLLPLALLLHAARPEVQLVESGGGLVQPGGSLRLSCAASGFSFSDFWMSWVRQAPGKGLEWVATISQAGSEKDYVDSVKGRFTISRDNAKKSLYLQMNSLRAEDTAVYYCASGVYSFDYRGQGTLVTVSSGTGGGGSGGGGSGGGGSEFDIQMTQSPASLSASVGETVTIICRASVNIYSYLAWYQQKQGKSPQLLVYNAKILAEGVPSRFSGSGSGTQFSLKINSLQPEDFGSYYCQHHYGTFTFGSGTKLEIKRLEIQNPDPAVYQLRDSKSSDKSVCLFTDFDSQTNVSQSKDSDVYITDKCVLDMRSMDFKSNSAVAWSNKSDFACANAFNNSIIPEDTFFPSPESSCGFTSESYQQGVLSATILYEILLGKATLYAVLVSALVLMAMVKRKDSRGRAKRSGSGVKQTLNFDLLKLAGDVESNPGPTSMDWIWRILFLVGAATGAHSFEQVQLKESGPGLVAPSQSLSITCTISGFSLTSYGVHWVRQPPGKGLEWLVVIWSDGSTTYNSALKSRLSISKDNSKSQVFLKMNSLQTDDTAIYYCASHYGSTLAFASWGHGTLVTVSAATREDLKNVFPPEVAVFEPSEAEISHTQKATLVCLATGFYPDHVELSWWVNGKEVHSGVCTDPQPLKEQPALNDSRYCLSSRLRVSATFWQNPRNHFRCQVQFYGLSENDEWTQDRAKPVTQIVSAEAWGRADCDVKLVEKSFETDTNLNFQNLSVIGFRILLLKVAGFNLLMTLRLWSS

SEQ ID NO: 12883 - protein, 766 aa, synthetic construct
MALPVTALLLPLALLLHAARPEVQLVESGGGLVQPGGSLRLSCAASGFSFSDFWMSWVRQAPGKGLEWVATISQAGSEKDYVDSVKGRFTISRDNAKKSLYLQMNSLRAEDTAVYYCASGVYSFDYRGQGTLVTVSSGTGGGGSGGGGSGGGGSEFDIVMTQSHKFMSTSVGDRVSVTCKASQNVGNNVAWYQQKPGQSPKVLIYSASYRYSGVPDRFTGSGSGTDFTLTISNVQSEDLAEYFCQQYNTYPFTFGSGTKLEIKLEIQNPDPAVYQLRDSKSSDKSVCLFTDFDSQTNVSQSKDSDVYITDKCVLDMRSMDFKSNSAVAWSNKSDFACANAFNNSIIPEDTFFPSPESSCGFTSESYQQGVLSATILYEILLGKATLYAVLVSALVLMAMVKRKDSRGRAKRSGSGVKQTLNFDLLKLAGDVESNPGPTSMDWIWRILFLVGAATGAHSFEEVQLEESGGGLVQPGGSMKLSCVASGFTFSNYWMNWVRQSPEKGLEWVAEIRFKSHNYATHFAESVKGRFTISRDDSKSSVYLQMNNLRAEDTGIYYCTRRIGNSDYDWWYFDVWGAGTSVTVSSASTREDLKNVFPPEVAVFEPSEAEISHTQKATLVCLATGFYPDHVELSWWVNGKEVHSGVCTDPQPLKEQPALNDSRYCLSSRLRVSATFWQNPRNHFRCQVQFYGLSENDEWTQDRAKPVTQIVSAEAWGRADCDVKLVEKSFETDTNLNFQNLSVIGFRILLLKVAGFNLLMTLRLWSS

SEQ ID NO: 12884 - protein, 759 aa, synthetic construct
MALPVTALLLPLALLLHAARPEVQLVESGGGLVQPGGSLRLSCAASGFSFSDFWMSWVRQAPGKGLEWVATISQAGSEKDYVDSVKGRFTISRDNAKKSLYLQMNSLRAEDTAVYYCASGVYSFDYRGQGTLVTVSSGTGGGGSGGGGSGGGGSEFDQIVLTQSPAIMSASPGEKVTISCSASSSVSYMYWYQQKPGSSPKPWIYRTSNLASGVPARFSGSGSGTSYSLTISNMEAEDAAAYYCQQYHSYPTTFGGGTKLEVKLEIQNPDPAVYQLRDSKSSDKSVCLFTDFDSQTNVSQSKDSDVYITDKCVLDMRSMDFKSNSAVAWSNKSDFACANAFNNSIIPEDTFFPSPESSCGFTSESYQQGVLSATILYEILLGKATLYAVLVSALVLMAMVKRKDSRGRAKRSGSGVKQTLNFDLLKLAGDVESNPGPTSMDWIWRILFLVGAATGAHSFEEVQLVESGGGLVQPKGSLKLSCAASGFSFNTYAMNWVRQAPGKGLEWIAHIRSKSNNFATYYADSVKDRFSISRDASENILFLQMNNLKTEDTAMYYCVRQGGDFPMDYWGQGTSVTVSSTREDLKNVFPPEVAVFEPSEAEISHTQKATLVCLATGFYPDHVELSWWVNGKEVHSGVCTDPQPLKEQPALNDSRYCLSSRLRVSATFWQNPRNHFRCQVQFYGLSENDEWTQDRAKPVTQIVSAEAWGRADCDVKLVEKSFETDTNLNFQNLSVIGFRILLLKVAGFNLLMTLRLWSS

SEQ ID NO: 12885 - protein, 758 aa, synthetic construct
MALPVTALLLPLALLLHAARPEVQLVESGGGLVQPGGSLRLSCAASGFSFSDFWMSWVRQAPGKGLEWVATISQAGSEKDYVDSVKGRFTISRDNAKKSLYLQMNSLRAEDTAVYYCASGVYSFDYRGQGTLVTVSSGTGGGGSGGGGSGGGGSEFDDIQMTQSSSSFSVSLGDRVTITCMASEDIYIRLAWYQQKPGNAPRLLISAATSLETGVPSRFSGSGSGKDYTLSITSLQTEDVGTYYCQQYWSSPWTFGGGTKLEINLEIQNPDPAVYQLRDSKSSDKSVCLFTDFDSQTNVSQSKDSDVYITDKCVLDMRSMDFKSNSAVAWSNKSDFACANAFNNSIIPEDTFFPSPESSCGFTSESYQQGVLSATILYEILLGKATLYAVLVSALVLMAMVKRKDSRGRAKRSGSGVKQTLNFDLLKLAGDVESNPGPTSMDWIWRILFLVGAATGAHSFEDVQLQESGPGLVKPSQSLSLTCTVTGYSITSDYTWNWIRQFPGNKLEWMGYITYSGSTSYNPSLKSRNSITRDTSKNQFFLQLNSVTTEDTATYYCARLGRRYTMDYWGQGTSVTVSSTREDLKNVFPPEVAVFEPSEAEISHTQKATLVCLATGFYPDHVELSWWVNGKEVHSGVCTDPQPLKEQPALNDSRYCLSSRLRVSATFWQNPRNHFRCQVQFYGLSENDEWTQDRAKPVTQIVSAEAWGRADCDVKLVEKSFETDTNLNFQNLSVIGFRILLLKVAGFNLLMTLRLWSS

SEQ ID NO: 12886 - protein, 761 aa, synthetic construct
MALPVTALLLPLALLLHAARPEVQLVESGGGLVQPGGSLRLSCAASGFSFSDFWMSWVRQAPGKGLEWVATISQAGSEKDYVDSVKGRFTISRDNAKKSLYLQMNSLRAEDTAVYYCASGVYSFDYRGQGTLVTVSSGTGGGGSGGGGSGGGGSEFDDIQMTQSPSSLSASVGDRVTITCRASQSISSYLNWYQQKPGKAPKLLIYDASNLETGVPSRFSGSGSGTDFTFTISSLQPEDIATYYCQQYDNLPLTFGGGTKVDIKRLEIQNPDPAVYQLRDSKSSDKSVCLFTDFDSQTNVSQSKDSDVYITDKCVLDMRSMDFKSNSAVAWSNKSDFACANAFNNSIIPEDTFFPSPESSCGFTSESYQQGVLSATILYEILLGKATLYAVLVSALVLMAMVKRKDSRGRAKRSGSGVKQTLNFDLLKLAGDVESNPGPTSMDWIWRILFLVGAATGAHSFEQVQLVESGGGVVQPGRSLRLSCAASGFTFSSYAMHWVRQAPGKGLEWVAVISYDGSNKYYADSVKGRFTISRDNSKNTLYLQMNSLRAEDTAVYYCARAHNSSSWSFDYWGQGTLVTVSSTREDLKNVFPPEVAVFEPSEAEISHTQKATLVCLATGFYPDHVELSWWVNGKEVHSGVCTDPQPLKEQPALNDSRYCLSSRLRVSATFWQNPRNHFRCQVQFYGLSENDEWTQDRAKPVTQIVSAEAWGRADCDVKLVEKSFETDTNLNFQNLSVIGFRILLLKVAGFNLLMTLRLWSS

SEQ ID NO: 12887 - protein, 770 aa, synthetic construct
MALPVTALLLPLALLLHAARPEVQLVESGGGLVQPGGSLRLSCAASGFSFSDFWMSWVRQAPGKGLEWVATISQAGSEKDYVDSVKGRFTISRDNAKKSLYLQMNSLRAEDTAVYYCASGVYSFDYRGQGTLVTVSSGTGGGGSGGGGSGGGGSEFDDVVMTQSPLSLPVSLGDQASISCRSSQRLVHSNGNTYLHWYLQKPGQSPKLLIYRVSNRFPGVPDRFSGSGSGTDFTLKISRVEAEDLGIYFCSQSTHVPYTFGGGTKLEIKRLEIQNPDPAVYQLRDSKSSDKSVCLFTDFDSQTNVSQSKDSDVYITDKCVLDMRSMDFKSNSAVAWSNKSDFACANAFNNSIIPEDTFFPSPESSCGFTSESYQQGVLSATILYEILLGKATLYAVLVSALVLMAMVKRKDSRGRAKRSGSGVKQTLNFDLLKLAGDVESNPGPTSMDWIWRILFLVGAATGAHSFEEVRLQQSGPDLIKPGASVKMSCKASGYTFTGYVMHWVKQRPGQGLEWIGFINPYNDDIQSNERFRGKATLTSDKSSTTAYMELSSLTSEDSAVYYCARGAGYNFDGAYRFFDFWGQGTTLTVSSTREDLKNVFPPEVAVFEPSEAEISHTQKATLVCLATGFYPDHVELSWWVNGKEVHSGVCTDPQPLKEQPALNDSRYCLSSRLRVSATFWQNPRNHFRCQVQFYGLSENDEWTQDRAKPVTQIVSAEAWGRADCDVKLVEKSFETDTNLNFQNLSVIGFRILLLKVAGFNLLMTLRLWSS

SEQ ID NO: 12888 - protein, 761 aa, synthetic construct
MALPVTALLLPLALLLHAARPEVQLVESGGGLVQPGGSLRLSCAASGFSFSDFWMSWVRQAPGKGLEWVATISQAGSEKDYVDSVKGRFTISRDNAKKSLYLQMNSLRAEDTAVYYCASGVYSFDYRGQGTLVTVSSGTGGGGSGGGGSGGGGSEFDSYELTQPPSVSVSPGQTATISCSGDQLGGKYGHWYQKKPGQSPVLVLYQDRKRPAGIPERFSGSSSGNTITLTISGTQAVDEADYYCQAWDTNLGGVFGGGTKVTVLGQLEIQNPDPAVYQLRDSKSSDKSVCLFTDFDSQTNVSQSKDSDVYITDKCVLDMRSMDFKSNSAVAWSNKSDFACANAFNNSIIPEDTFFPSPESSCGFTSESYQQGVLSATILYEILLGKATLYAVLVSALVLMAMVKRKDSRGRAKRSGSGVKQTLNFDLLKLAGDVESNPGPTSMDWIWRILFLVGAATGAHSFEQVQLVESGAEVKKPGASVKVSCKASGYTFTGYYMHWVRQAPGQGLEWMGRINPNSGGTNYAQKFQGRVTMTRDTSISTAYMELSRLRSDDTAVYYCASPRGRGSAFDIWGQGTLVTVSSTREDLKNVFPPEVAVFEPSEAEISHTQKATLVCLATGFYPDHVELSWWVNGKEVHSGVCTDPQPLKEQPALNDSRYCLSSRLRVSATFWQNPRNHFRCQVQFYGLSENDEWTQDRAKPVTQIVSAEAWGRADCDVKLVEKSFETDTNLNFQNLSVIGFRILLLKVAGFNLLMTLRLWSS

SEQ ID NO: 12889 - protein, 764 aa, synthetic construct
MALPVTALLLPLALLLHAARPEVQLVESGGGLVQPGGSLRLSCAASGFSFSDFWMSWVRQAPGKGLEWVATISQAGSEKDYVDSVKGRFTISRDNAKKSLYLQMNSLRAEDTAVYYCASGVYSFDYRGQGTLVTVSSGTGGGGSGGGGSGGGGSEFDNFMLTQPHSVSESPGKTVTISCTRSSGSIASKYVQWYQQRPGSSPTTVIYEDNQRPSGVPDRFSGSIDTSSNSASLTISGLRTEDEADYYCHSYDSNNHSVFGGGTKVTVLGQLEIQNPDPAVYQLRDSKSSDKSVCLFTDFDSQTNVSQSKDSDVYITDKCVLDMRSMDFKSNSAVAWSNKSDFACANAFNNSIIPEDTFFPSPESSCGFTSESYQQGVLSATILYEILLGKATLYAVLVSALVLMAMVKRKDSRGRAKRSGSGVKQTLNFDLLKLAGDVESNPGPTSMDWIWRILFLVGAATGAHSFEEVQLVESGGGVVQPGGSLRLSCAASGFTFSSYAMSWVRQAPGKGLEWVSAISGSGGSTYYADSVKGRFSISRDNSKNTLYLQMNSLRAEDTAVYYCARTRSSGAFDIWGQGTLVTVSSTREDLKNVFPPEVAVFEPSEAEISHTQKATLVCLATGFYPDHVELSWWVNGKEVHSGVCTDPQPLKEQPALNDSRYCLSSRLRVSATFWQNPRNHFRCQVQFYGLSENDEWTQDRAKPVTQIVSAEAWGRADCDVKLVEKSFETDTNLNFQNLSVIGFRILLLKVAGFNLLMTLRLWSS

SEQ ID NO: 12890 - protein, 759 aa, synthetic construct
MALPVTALLLPLALLLHAARPEVQLVESGGGLVQPGGSLRLSCAASGFSFSDFWMSWVRQAPGKGLEWVATISQAGSEKDYVDSVKGRFTISRDNAKKSLYLQMNSLRAEDTAVYYCASGVYSFDYRGQGTLVTVSSGTGGGGSGGGGSGGGGSEFDIQMNQSPSSLSASLGDTITITCHASQNINVWLSWYQQKPGNIPKLLIYKASNLHTGVPSRFSGSGSGTGFTITISSLQPEDIATYYCQQGQSYPWTFGGGTKLEIKRLEIQNPDPAVYQLRDSKSSDKSVCLFTDFDSQTNVSQSKDSDVYITDKCVLDMRSMDFKSNSAVAWSNKSDFACANAFNNSIIPEDTFFPSPESSCGFTSESYQQGVLSATILYEILLGKATLYAVLVSALVLMAMVKRKDSRGRAKRSGSGVKQTLNFDLLKLAGDVESNPGPTSMDWIWRILFLVGAATGAHSFEEVQLQQSGPELVKPGASVKISCKASGYSFTGYFMNWVKQSHGKSLEYIGRFNPYNGETLYNQKFKGKATLTVDKSSSTVHMELLSVTSEDSAVYYCGRSGNDDAMDYWGQGTSVTVSSATREDLKNVFPPEVAVFEPSEAEISHTQKATLVCLATGFYPDHVELSWWVNGKEVHSGVCTDPQPLKEQPALNDSRYCLSSRLRVSATFWQNPRNHFRCQVQFYGLSENDEWTQDRAKPVTQIVSAEAWGRADCDVKLVEKSFETDTNLNFQNLSVIGFRILLLKVAGFNLLMTLRLWSS

SEQ ID NO: 12891 - protein, 760 aa, synthetic construct
MALPVTALLLPLALLLHAARPEVQLVESGGGLVQPGGSLRLSCAASGFSFSDFWMSWVRQAPGKGLEWVATISQAGSEKDYVDSVKGRFTISRDNAKKSLYLQMNSLRAEDTAVYYCASGVYSFDYRGQGTLVTVSSGTGGGGSGGGGSGGGGSEFEIVLTQSPATLSLSPGERATLSCRASQSVRSYLAWYQQKPGQAPRLLIYDASNRATGIPARFSGSGSGTDFTLTISSLEPEDFAVYYCQQRSNWPPTFGQGTKVEIKLEIQNPDPAVYQLRDSKSSDKSVCLFTDFDSQTNVSQSKDSDVYITDKCVLDMRSMDFKSNSAVAWSNKSDFACANAFNNSIIPEDTFFPSPESSCGFTSESYQQGVLSATILYEILLGKATLYAVLVSALVLMAMVKRKDSRGRAKRSGSGVKQTLNFDLLKLAGDVESNPGPTSMDWIWRILFLVGAATGAHSFEQLQVQESGPGLVKPSETLSLTCTVSGGSISNSYFSWGWIRQPPGKGLEWIGSFYYGEKTYYNPSLKSRATISIDTSKSQFSLKLSSVTAADTAVYYCPRGPTMIRGVIDSWGQGTLVTVSSTREDLKNVFPPEVAVFEPSEAEISHTQKATLVCLATGFYPDHVELSWWVNGKEVHSGVCTDPQPLKEQPALNDSRYCLSSRLRVSATFWQNPRNHFRCQVQFYGLSENDEWTQDRAKPVTQIVSAEAWGRADCDVKLVEKSFETDTNLNFQNLSVIGFRILLLKVAGFNLLMTLRLWSS

SEQ ID NO: 12892 - protein, 769 aa, synthetic construct
MALPVTALLLPLALLLHAARPEVQLVESGGGLVQPGGSLRLSCAASGFSFSDFWMSWVRQAPGKGLEWVATISQAGSEKDYVDSVKGRFTISRDNAKKSLYLQMNSLRAEDTAVYYCASGVYSFDYRGQGTLVTVSSGTGGGGSGGGGSGGGGSEFDIVMTQTPLSLPVTPGEPASISCRSSRSLLDSDDGNTYLDWYLQKPGQSPQLLIYTLSYRASGVPDRFSGSGSGTDFTLKISRVEAEDVGVYYCMQRVEFPITFGQGTRLEIKRLEIQNPDPAVYQLRDSKSSDKSVCLFTDFDSQTNVSQSKDSDVYITDKCVLDMRSMDFKSNSAVAWSNKSDFACANAFNNSIIPEDTFFPSPESSCGFTSESYQQGVLSATILYEILLGKATLYAVLVSALVLMAMVKRKDSRGRAKRSGSGVKQTLNFDLLKLAGDVESNPGPTSMDWIWRILFLVGAATGAHSFEQVQLVESGGGVVQPGRSLRLSCAASGFIFSRYGMHWVRQAPGKGLKWVAVIWYDGSNKLYADSVKGRFTISRDNSKNTLYLQMNSLRAEDTAVYYCARDYYDNSRHHWGFDYWGQGTLVTVSSTREDLKNVFPPEVAVFEPSEAEISHTQKATLVCLATGFYPDHVELSWWVNGKEVHSGVCTDPQPLKEQPALNDSRYCLSSRLRVSATFWQNPRNHFRCQVQFYGLSENDEWTQDRAKPVTQIVSAEAWGRADCDVKLVEKSFETDTNLNFQNLSVIGFRILLLKVAGFNLLMTLRLWSS

SEQ ID NO: 12893 - protein, 759 aa, synthetic construct
MALPVTALLLPLALLLHAARPEVQLVESGGGLVQPGGSLRLSCAASGFSFSDFWMSWVRQAPGKGLEWVATISQAGSEKDYVDSVKGRFTISRDNAKKSLYLQMNSLRAEDTAVYYCASGVYSFDYRGQGTLVTVSSGTGGGGSGGGGSGGGGSEFEIQMTQSPSSMSASLGDTITITCQATQDIFKNLNWYQQKPGKPPSLLIYYATELAEGVPSRFSGSGSGSDYSLTISNLESEDFAAYYCLQFFEFPFTFGSGTKLEMKLEIQNPDPAVYQLRDSKSSDKSVCLFTDFDSQTNVSQSKDSDVYITDKCVLDMRSMDFKSNSAVAWSNKSDFACANAFNNSIIPEDTFFPSPESSCGFTSESYQQGVLSATILYEILLGKATLYAVLVSALVLMAMVKRKDSRGRAKRSGSGVKQTLNFDLLKLAGDVESNPGPTSMDWIWRILFLVGAATGAHSFEQVQLQQSGAELVRPGTSVKVSCKASGYVFTNYWIEWIKQRPGQGLEWIGVMNPGSGETTYNEKFKGKATLTADKSSSTAYMQLSSLTSVDSAVYFCARDHDRDYYAMDYWGQGTSVTVSSTREDLKNVFPPEVAVFEPSEAEISHTQKATLVCLATGFYPDHVELSWWVNGKEVHSGVCTDPQPLKEQPALNDSRYCLSSRLRVSATFWQNPRNHFRCQVQFYGLSENDEWTQDRAKPVTQIVSAEAWGRADCDVKLVEKSFETDTNLNFQNLSVIGFRILLLKVAGFNLLMTLRLWSS

SEQ ID NO: 12894 - protein, 756 aa, synthetic construct
MALPVTALLLPLALLLHAARPEVQLVESGGGLVQPGGSLRLSCAASGFSFSDFWMSWVRQAPGKGLEWVATISQAGSEKDYVDSVKGRFTISRDNAKKSLYLQMNSLRAEDTAVYYCASGVYSFDYRGQGTLVTVSSGTGGGGSGGGGSGGGGSEFDILLTQSPAILSVSPGERVSFSCRASQNIGTSIHWYQQRTNGSPRLLIKYASESVSGIPSRFSGSGSGTDFTLSINSVESEDIADYYCQHTNSWPTTFGGGTKLEIKRLEIQNPDPAVYQLRDSKSSDKSVCLFTDFDSQTNVSQSKDSDVYITDKCVLDMRSMDFKSNSAVAWSNKSDFACANAFNNSIIPEDTFFPSPESSCGFTSESYQQGVLSATILYEILLGKATLYAVLVSALVLMAMVKRKDSRGRAKRSGSGVKQTLNFDLLKLAGDVESNPGPTSMDWIWRILFLVGAATGAHSFEQVQLQQSDAELVKPGASVKISCKASGYTFTDHAIHWVKQKPEQGLEWIGYFSPGNGDIKYNEKFKGKATLTADKSSSTAYMQLNSLTSEDSAVYFCKRSYGNYDYWGQGTTLTVSSTREDLKNVFPPEVAVFEPSEAEISHTQKATLVCLATGFYPDHVELSWWVNGKEVHSGVCTDPQPLKEQPALNDSRYCLSSRLRVSATFWQNPRNHFRCQVQFYGLSENDEWTQDRAKPVTQIVSAEAWGRADCDVKLVEKSFETDTNLNFQNLSVIGFRILLLKVAGFNLLMTLRLWSS

SEQ ID NO: 12895 - protein, 761 aa, synthetic construct
MALPVTALLLPLALLLHAARPEVQLVESGGGLVQPGGSLRLSCAASGFSFSDFWMSWVRQAPGKGLEWVATISQAGSEKDYVDSVKGRFTISRDNAKKSLYLQMNSLRAEDTAVYYCASGVYSFDYRGQGTLVTVSSGTGGGGSGGGGSGGGGSEFDIVMTQSPDSLAVSLGERATINCKSSQSLLNSGDQKNYLTWYQQKPGQPPKLLIYWASTRESGVPDRFSGSGSGTDFTLTISSLQAEDVAVYYCQNDYSYPLTFGQGTKVEIKLEIQNPDPAVYQLRDSKSSDKSVCLFTDFDSQTNVSQSKDSDVYITDKCVLDMRSMDFKSNSAVAWSNKSDFACANAFNNSIIPEDTFFPSPESSCGFTSESYQQGVLSATILYEILLGKATLYAVLVSALVLMAMVKRKDSRGRAKRSGSGVKQTLNFDLLKLAGDVESNPGPTSMDWIWRILFLVGAATGAHSFEQVQLVQSGAEVKKTGSSVKVSCKASGYTFTDHAIHVWRQAPGQALEWMGHFSPGNTDIKYNDKFKGRVTLTVDRSMSTAYMELSSLRSEDTAMYYCKTSTFFFDYWGQGTMVTVSSTREDLKNVFPPEVAVFEPSEAEISHTQKATLVCLATGFYPDHVELSWWVNGKEVHSGVCTDPQPLKEQPALNDSRYCLSSRLRVSATFWQNPRNHFRCQVQFYGLSENDEWTQDRAKPVTQIVSAEAWGRADCDVKLVEKSFETDTNLNFQNLSVIGFRILLLKVAGFNLLMTLRLWSS

SEQ ID NO: 12896 - protein, 760 aa, synthetic construct
MALPVTALLLPLALLLHAARPEVQLVESGGGLVQPGGSLRLSCAASGFSFSDFWMSWVRQAPGKGLEWVATISQAGSEKDYVDSVKGRFTISRDNAKKSLYLQMNSLRAEDTAVYYCASGVYSFDYRGQGTLVTVSSGTGGGGSGGGGSGGGGSEFDIQMTQSPSSLSASVGDRVTITCKASQDVSIAVAWYQQKPGKAPKVLIYSASYRYTGVPDRFSGSGSGTDFTFTISSLQPEDIAVYYCQQHYITPLTFGGGTKVEIKLEIQNPDPAVYQLRDSKSSDKSVCLFTDFDSQTNVSQSKDSDVYITDKCVLDMRSMDFKSNSAVAWSNKSDFACANAFNNSIIPEDTFFPSPESSCGFTSESYQQGVLSATILYEILLGKATLYAVLVSALVLMAMVKRKDSRGRAKRSGSGVKQTLNFDLLKLAGDVESNPGPTSMDWIWRILFLVGAATGAHSFEQIQLVQSGHEVKKPGASVKVSCKASGYTFTNYGMNWVRQAPGQGLEWMGWINTKTGEPTYAEEFKGRFVFSLETSASTAYLQISSLKAEDTAMYFCGRGGYGSSYWYFDVWGQGTTVTVSSTREDLKNVFPPEVAVFEPSEAEISHTQKATLVCLATGFYPDHVELSWWVNGKEVHSGVCTDPQPLKEQPALNDSRYCLSSRLRVSATFWQNPRNHFRCQVQFYGLSENDEWTQDRAKPVTQIVSAEAWGRADCDVKLVEKSFETDTNLNFQNLSVIGFRILLLKVAGFNLLMTLRLWSS

SEQ ID NO: 12897 - protein, 762 aa, synthetic construct
MALPVTALLLPLALLLHAARPEVQLVESGGGLVQPGGSLRLSCAASGFSFSDFWMSWVRQAPGKGLEWVATISQAGSEKDYVDSVKGRFTISRDNAKKSLYLQMNSLRAEDTAVYYCASGVYSFDYRGQGTLVTVSSGTGGGGSGGGGSGGGGSEFDIVMTQSPDSLAVSLGERATINCRASKSVSTSGYSYMHWYQQKPGQPPKLLIYLASNLESGVPDRFSGSGSGTDFTLTISSLQAEDVAVYYCQHSRELPYTFGQGTKLEIKLEIQNPDPAVYQLRDSKSSDKSVCLFTDFDSQTNVSQSKDSDVYITDKCVLDMRSMDFKSNSAVAWSNKSDFACANAFNNSIIPEDTFFPSPESSCGFTSESYQQGVLSATILYEILLGKATLYAVLVSALVLMAMVKRKDSRGRAKRSGSGVKQTLNFDLLKLAGDVESNPGPTSMDWIWRILFLVGAATGAHSFEQVQLQESGPGLVKPSETLSLTCTVSGGSISSYGVHWIRQPPGKGLEWIGVIWTSGVTDYNSALMGRVTISVDTSKNQFSLKLSSVTAADTAVYYCARDGDYDRYTMDYWGQGTLVTVSSTREDLKNVFPPEVAVFEPSEAEISHTQKATLVCLATGFYPDHVELSWWVNGKEVHSGVCTDPQPLKEQPALNDSRYCLSSRLRVSATFWQNPRNHFRCQVQFYGLSENDEWTQDRAKPVTQIVSAEAWGRADCDVKLVEKSFETDTNLNFQNLSVIGFRILLLKVAGFNLLMTLRLWSS

SEQ ID NO: 12898 - protein, 762 aa, synthetic construct
MALPVTALLLPLALLLHAARPEVQLVESGGGLVQPGGSLRLSCAASGFSFSDFWMSWVRQAPGKGLEWVATISQAGSEKDYVDSVKGRFTISRDNAKKSLYLQMNSLRAEDTAVYYCASGVYSFDYRGQGTLVTVSSGTGGGGSGGGGSGGGGSEFDIQMTQSPSSLSASVGDRVTITCRASQSIGTSLHWYQQKPGKAPKLLIKFASRLQSGVPSRFSGSGSGTDFTLTISSLQPEDFATYYCQQSPGFPPTFGQGTKLEIKRLEIQNPDPAVYQLRDSKSSDKSVCLFTDFDSQTNVSQSKDSDVYITDKCVLDMRSMDFKSNSAVAWSNKSDFACANAFNNSIIPEDTFFPSPESSCGFTSESYQQGVLSATILYEILLGKATLYAVLVSALVLMAMVKRKDSRGRAKRSGSGVKQTLNFDLLKLAGDVESNPGPTSMDWIWRILFLVGAATGAHSFEQVQLVESGGGLVKPGGSLRLSCAASGFSITTSGYYWTWIRQFPGKGLEWMGYIGYNSKTYYNPALKSRITISRDNAKNSLYLQMNSLRAEDTAVYYCARSLYGGYKDAFDSWGQGTLVTVSSTREDLKNVFPPEVAVFEPSEAEISHTQKATLVCLATGFYPDHVELSWWVNGKEVHSGVCTDPQPLKEQPALNDSRYCLSSRLRVSATFWQNPRNHFRCQVQFYGLSENDEWTQDRAKPVTQIVSAEAWGRADCDVKLVEKSFETDTNLNFQNLSVIGFRILLLKVAGFNLLMTLRLWSS

SEQ ID NO: 12899 - protein, 767 aa, synthetic construct
MALPVTALLLPLALLLHAARPEVQLVESGGGLVQPGGSLRLSCAASGFSFSDFWMSWVRQAPGKGLEWVATISQAGSEKDYVDSVKGRFTISRDNAKKSLYLQMNSLRAEDTAVYYCASGVYSFDYRGQGTLVTVSSGTGGGGSGGGGSGGGGSEFDEIVLTQSPLSLPVTPGEPASISCRSSQSLLHSIGYNYLDWYLQKPGQSPQLLIYLGSNRASGVPDRFSGSGSGTDFTLKISRVEAEDVGVYYCMQALQTPLTFGGGTKVEIKRLEIQNPDPAVYQLRDSKSSDKSVCLFTDFDSQTNVSQSKDSDVYITDKCVLDMRSMDFKSNSAVAWSNKSDFACANAFNNSIIPEDTFFPSPESSCGFTSESYQQGVLSATILYEILLGKATLYAVLVSALVLMAMVKRKDSRGRAKRSGSGVKQTLNFDLLKLAGDVESNPGPTSMDWIWRILFLVGAATGAHSFEEVQLVESGGGVVQPGRSLRLSCAASGFTFRSYGMHWVRQAPGKGLEWVAVISYDGSNKYYTDSVNGRFTISRDNSKNTLYLQMNSLRAEDTAVYYCARGGGYYETSGPDYWGQGTLVTVSSTREDLKNVFPPEVAVFEPSEAEISHTQKATLVCLATGFYPDHVELSWWVNGKEVHSGVCTDPQPLKEQPALNDSRYCLSSRLRVSATFWQNPRNHFRCQVQFYGLSENDEWTQDRAKPVTQIVSAEAWGRADCDVKLVEKSFETDTNLNFQNLSVIGFRILLLKVAGFNLLMTLRLWSS

SEQ ID NO: 12900 - protein, 765 aa, synthetic construct
MALPVTALLLPLALLLHAARPEVQLVESGGGLVQPGGSLRLSCAASGFSFSDFWMSWVRQAPGKGLEWVATISQAGSEKDYVDSVKGRFTISRDNAKKSLYLQMNSLRAEDTAVYYCASGVYSFDYRGQGTLVTVSSGTGGGGSGGGGSGGGGSEFDDVVMTQSPLSLPVTPGEPASISCRSSQSLLHSIGYNYLHWFLQKPGQSPQLLIYLGSNRASGVPDRFSGSGSGTDFTLKISRVEAEDVGVYYCMQALQTPPTFGQGTRLEIKRLEIQNPDPAVYQLRDSKSSDKSVCLFTDFDSQTNVSQSKDSDVYITDKCVLDMRSMDFKSNSAVAWSNKSDFACANAFNNSIIPEDTFFPSPESSCGFTSESYQQGVLSATILYEILLGKATLYAVLVSALVLMAMVKRKDSRGRAKRSGSGVKQTLNFDLLKLAGDVESNPGPTSMDWIWRILFLVGAATGAHSFEQLQLQESGPGLVKPSGTLSLTCAVSGGSISSSNWWSWVRQPPGKGLEWIGEIYHSGSTNYNPSLKSRVTISVDKSKNQFSLKLSSVTAADTAVYYCVGSPYGDYVLDYWGQGTLVTVSSTREDLKNVFPPEVAVFEPSEAEISHTQKATLVCLATGFYPDHVELSWWVNGKEVHSGVCTDPQPLKEQPALNDSRYCLSSRLRVSATFWQNPRNHFRCQVQFYGLSENDEWTQDRAKPVTQIVSAEAWGRADCDVKLVEKSFETDTNLNFQNLSVIGFRILLLKVAGFNLLMTLRLWSS

SEQ ID NO: 12901 - protein, 763 aa, synthetic construct
MALPVTALLLPLALLLHAARPEVQLVESGGGLVQPGGSLRLSCAASGFSFSDFWMSWVRQAPGKGLEWVATISQAGSEKDYVDSVKGRFTISRDNAKKSLYLQMNSLRAEDTAVYYCASGVYSFDYRGQGTLVTVSSGTGGGGSGGGGSGGGGSEFDEIVLTQSPGTLSLSLGERATLSCRASQSISSSFLAWYQQKPGQAPKLLIYAASTRATGIPDRFSGSGSGTDFTLTISRLEPEDFAVYYCQQYGRSLSFGGGTKVEVKLEIQNPDPAVYQLRDSKSSDKSVCLFTDFDSQTNVSQSKDSDVYITDKCVLDMRSMDFKSNSAVAWSNKSDFACANAFNNSIIPEDTFFPSPESSCGFTSESYQQGVLSATILYEILLGKATLYAVLVSALVLMAMVKRKDSRGRAKRSGSGVKQTLNFDLLKLAGDVESNPGPTSMDWIWRILFLVGAATGAHSFEQVQLQQSGPGLVKPSQTLSLTCAISGDSVSGNSATWNWIRQSPSRGLEWLGRTYYRSKWNHDYAESVKSRITINPDTSKNQFSLQLNSVTPEDTAVYYCARGDSSSWYAFDYWGQGTLVTVSSTREDLKNVFPPEVAVFEPSEAEISHTQKATLVCLATGFYPDHVELSWWVNGKEVHSGVCTDPQPLKEQPALNDSRYCLSSRLRVSATFWQNPRNHFRCQVQFYGLSENDEWTQDRAKPVTQIVSAEAWGRADCDVKLVEKSFETDTNLNFQNLSVIGFRILLLKVAGFNLLMTLRLWSS

SEQ ID NO: 12902 - protein, 762 aa, synthetic construct
MALPVTALLLPLALLLHAARPEVQLVESGGGLVQPGGSLRLSCAASGFSFSDFWMSWVRQAPGKGLEWVATISQAGSEKDYVDSVKGRFTISRDNAKKSLYLQMNSLRAEDTAVYYCASGVYSFDYRGQGTLVTVSSGTGGGGSGGGGSGGGGSEFDQSVVTQPPSVSVAPGKTARITCGRNNIGSKSVHWYQQKPGQAPVLVVYDDSDRPSGIPERFSGSNSGNTATLTISRVEAGDEADYYCQVWDSSSDHVVFGGGTKLTVLGLEIQNPDPAVYQLRDSKSSDKSVCLFTDFDSQTNVSQSKDSDVYITDKCVLDMRSMDFKSNSAVAWSNKSDFACANAFNNSIIPEDTFFPSPESSCGFTSESYQQGVLSATILYEILLGKATLYAVLVSALVLMAMVKRKDSRGRAKRSGSGVKQTLNFDLLKLAGDVESNPGPTSMDWIWRILFLVGAATGAHSFEVQLVQSGGGVMRPGGSLRLSCAASGFTFDDYGMSWVRQAPGKGLEWVSGINWNGGSTGYADSVRGRFTISRDNAKNSLYLQMNSLRAEDTALYYCARERGYGYHDPHDYWGQGTLVTVSSTREDLKNVFPPEVAVFEPSEAEISHTQKATLVCLATGFYPDHVELSWWVNGKEVHSGVCTDPQPLKEQPALNDSRYCLSSRLRVSATFWQNPRNHFRCQVQFYGLSENDEWTQDRAKPVTQIVSAEAWGRADCDVKLVEKSFETDTNLNFQNLSVIGFRILLLKVAGFNLLMTLRLWSS

SEQ ID NO: 12903 - protein, 775 aa, synthetic construct
MALPVTALLLPLALLLHAARPEVQLVESGGGLVQPGGSLRLSCAASGFSFSDFWMSWVRQAPGKGLEWVATISQAGSEKDYVDSVKGRFTISRDNAKKSLYLQMNSLRAEDTAVYYCASGVYSFDYRGQGTLVTVSSGTGGGGSGGGGSGGGGSEFEQKLISEEDLEFQAVVTQPPSASGTPGQRVTISCSGSSSNIGSNTVNWYQQVPGTAPKLLIYSNNQRPSGVPDRFSGSKSGTSASLAISGLQSEDEADYYCAAWDDSLNGWVFGGGTKLTVLLEIQNPDPAVYQLRDSKSSDKSVCLFTDFDSQTNVSQSKDSDVYITDKCVLDMRSMDFKSNSAVAWSNKSDFACANAFNNSIIPEDTFFPSPESSCGFTSESYQQGVLSATILYEILLGKATLYAVLVSALVLMAMVKRKDSRGRAKRSGSGVKQTLNFDLLKLAGDVESNPGPTSMDWIWRILFLVGAATGAHSFEQMQLVQSGAEVKEPGESLRISCKGSGYSFTNFWISWVRQMPGKGLEWMGRVDPGYSYSTYSPSFQGHVTISADKSTSTAYLQWNSLKASDTAMYYCARVQYSGYYDWFDPWGQGTLVTVSSTREDLKNVFPPEVAVFEPSEAEISHTQKATLVCLATGFYPDHVELSWWVNGKEVHSGVCTDPQPLKEQPALNDSRYCLSSRLRVSATFWQNPRNHFRCQVQFYGLSENDEWTQDRAKPVTQIVSAEAWGRADCDVKLVEKSFETDTNLNFQNLSVIGFRILLLKVAGFNLLMTLRLWSS

SEQ ID NO: 12904 - protein, 769 aa, synthetic construct
MALPVTALLLPLALLLHAARPEVQLVESGGGLVQPGGSLRLSCAASGFSFSDFWMSWVRQAPGKGLEWVATISQAGSEKDYVDSVKGRFTISRDNAKKSLYLQMNSLRAEDTAVYYCASGVYSFDYRGQGTLVTVSSGTGGGGSGGGGSGGGGSEFEQKLISEEDLEFDIQMTQSPSTLSASVGDRVTITCRASQNINKWLAWYQQRPGKAPQLLIYKASSLESGVPSRFSGSGSGTEYTLTISSLQPDDFATYYCQQYNSYATFGQGTKVEIKRLEIQNPDPAVYQLRDSKSSDKSVCLFTDFDSQTNVSQSKDSDVYITDKCVLDMRSMDFKSNSAVAWSNKSDFACANAFNNSIIPEDTFFPSPESSCGFTSESYQQGVLSATILYEILLGKATLYAVLVSALVLMAMVKRKDSRGRAKRSGSGVKQTLNFDLLKLAGDVESNPGPTSMDWIWRILFLVGAATGAHSFEQVQLVQSGAEVKKPGESLKISCKGSGYNFSNKWIGWVRQLPGRGLEWIAIIYPGYSDITYSPSFQGRVTISADTSINTAYLHWHSLKASDTAMYYCVRHTALAGFDYWGLGTLVTVSSTREDLKNVFPPEVAVFEPSEAEISHTQKATLVCLATGFYPDHVELSWWVNGKEVHSGVCTDPQPLKEQPALNDSRYCLSSRLRVSATFWQNPRNHFRCQVQFYGLSENDEWTQDRAKPVTQIVSAEAWGRADCDVKLVEKSFETDTNLNFQNLSVIGFRILLLKVAGFNLLMTLRLWSS

SEQ ID NO: 12905 - protein, 761 aa, synthetic construct
MALPVTALLLPLALLLHAARPEVQLVESGGGLVQPGGSLRLSCAASGFSFSDFWMSWVRQAPGKGLEWVATISQAGSEKDYVDSVKGRFTISRDNAKKSLYLQMNSLRAEDTAVYYCASGVYSFDYRGQGTLVTVSSGTGGGGSGGGGSGGGGSEFDIVLTQSPASLAVSLGQRATISCRASESVDNYGNTFMHWYQQKPGQPPKLLIYRASNLESGIPARFSGSGSRTDFTLTINPVEADDVATYYCQQSNEDPPTFGAGTKLELKLEIQNPDPAVYQLRDSKSSDKSVCLFTDFDSQTNVSQSKDSDVYITDKCVLDMRSMDFKSNSAVAWSNKSDFACANAFNNSIIPEDTFFPSPESSCGFTSESYQQGVLSATILYEILLGKATLYAVLVSALVLMAMVKRKDSRGRAKRSGSGVKQTLNFDLLKLAGDVESNPGPTSMDWIWRILFLVGAATGAHSFEQIQLVQSGPELKKPGETVKISCKASGYIFTNYGMNWVKQAPGKSFKWMGWINTYTGESTYSADFKGRFAFSLETSASTAYLHINDLKNEDTATYFCARSGGYDPMDYWGQGTSVTVSSTREDLKNVFPPEVAVFEPSEAEISHTQKATLVCLATGFYPDHVELSWWVNGKEVHSGVCTDPQPLKEQPALNDSRYCLSSRLRVSATFWQNPRNHFRCQVQFYGLSENDEWTQDRAKPVTQIVSAEAWGRADCDVKLVEKSFETDTNLNFQNLSVIGFRILLLKVAGFNLLMTLRLWSS

SEQ ID NO: 12906 - protein, 760 aa, synthetic construct
MALPVTALLLPLALLLHAARPEVQLVESGGGLVQPGGSLRLSCAASGFSFSDFWMSWVRQAPGKGLEWVATISQAGSEKDYVDSVKGRFTISRDNAKKSLYLQMNSLRAEDTAVYYCASGVYSFDYRGQGTLVTVSSGTGGGGSGGGGSGGGGSEFDEIVLTQSPGTLSLSPGERATLSCRASQSVSNTYLAWYHQRPGQAPRLLIYGASSRATGIPDRFSGSGSGTDFALTISSLEPEDFAVYYCQQYSNSWTFGQGTKVEIKRLEIQNPDPAVYQLRDSKSSDKSVCLFTDFDSQTNVSQSKDSDVYITDKCVLDMRSMDFKSNSAVAWSNKSDFACANAFNNSIIPEDTFFPSPESSCGFTSESYQQGVLSATILYEILLGKATLYAVLVSALVLMAMVKRKDSRGRAKRSGSGVKQTLNFDLLKLAGDVESNPGPTSMDWIWRILFLVGAATGAHSFEQVQLVESGGGVVQPGRSLRLSCAASGFTFSSYDMHWVRQAPGKGLEWVAVISYDGTNEYYADSVKGRFTISRDTSKNTLYLQMNSLRAEDTAVYYCARERYFDWSFDYWGQGTLVSVSSTREDLKNVFPPEVAVFEPSEAEISHTQKATLVCLATGFYPDHVELSWWVNGKEVHSGVCTDPQPLKEQPALNDSRYCLSSRLRVSATFWQNPRNHFRCQVQFYGLSENDEWTQDRAKPVTQIVSAEAWGRADCDVKLVEKSFETDTNLNFQNLSVIGFRILLLKVAGFNLLMTLRLWSS

SEQ ID NO: 12907 - protein, 759 aa, synthetic construct
MALPVTALLLPLALLLHAARPEVQLVESGGGLVQPGGSLRLSCAASGFSFSDFWMSWVRQAPGKGLEWVATISQAGSEKDYVDSVKGRFTISRDNAKKSLYLQMNSLRAEDTAVYYCASGVYSFDYRGQGTLVTVSSGTGGGGSGGGGSGGGGSEFDELTQDPAVSVALGQTVRITCQGDSLRSNYANWYQQKPGQAPVLVIYGQNNRPSGIPDRFSGSSSGNTASLTITGAQAADEADYYCDSRVSTGNHVVFGGGTKLTVLGQLEIQNPDPAVYQLRDSKSSDKSVCLFTDFDSQTNVSQSKDSDVYITDKCVLDMRSMDFKSNSAVAWSNKSDFACANAFNNSIIPEDTFFPSPESSCGFTSESYQQGVLSATILYEILLGKATLYAVLVSALVLMAMVKRKDSRGRAKRSGSGVKQTLNFDLLKLAGDVESNPGPTSMDWIWRILFLVGAATGAHSFEEVQLVQSGAEVKKPGASVKVSCKASGYTFTSYAMHWVRQAPGQRLEWMGWINAGNGNTKYSQKFQGRVTITRDTSASTAYMELSSLRSEDTAVYYCARDISYGSFDYWGQGTLVTVSSTREDLKNVFPPEVAVFEPSEAEISHTQKATLVCLATGFYPDHVELSWWVNGKEVHSGVCTDPQPLKEQPALNDSRYCLSSRLRVSATFWQNPRNHFRCQVQFYGLSENDEWTQDRAKPVTQIVSAEAWGRADCDVKLVEKSFETDTNLNFQNLSVIGFRILLLKVAGFNLLMTLRLWSS

SEQ ID NO: 12908 - protein, 761 aa, synthetic construct
MALPVTALLLPLALLLHAARPEVQLVESGGGLVQPGGSLRLSCAASGFSFSDFWMSWVRQAPGKGLEWVATISQAGSEKDYVDSVKGRFTISRDNAKKSLYLQMNSLRAEDTAVYYCASGVYSFDYRGQGTLVTVSSGTGGGGSGGGGSGGGGSEFDDIVLTQTPATLSVTPGDSVSLSCRASQSISNNLHWYQQKSHESPRLLIKNASQSISGIPSKFSGSGSGTDFTLRINSVETEDFGMYFCQQSNSWPYTFGSGTKLEIKLEIQNPDPAVYQLRDSKSSDKSVCLFTDFDSQTNVSQSKDSDVYITDKCVLDMRSMDFKSNSAVAWSNKSDFACANAFNNSIIPEDTFFPSPESSCGFTSESYQQGVLSATILYEILLGKATLYAVLVSALVLMAMVKRKDSRGRAKRSGSGVKQTLNFDLLKLAGDVESNPGPTSMDWIWRILFLVGAATGAHSFEQVKLQQSGPELVKPGASVKISCKASGYSFTGYYMHWVKQSHGNILDWIGYIYPYNGVSSYNQKFKGKATLTVDKSSSTAYMELRSLTSEDSAVYYCARERGLYQLRAMDYWGQGTSVTVSSTREDLKNVFPPEVAVFEPSEAEISHTQKATLVCLATGFYPDHVELSWWVNGKEVHSGVCTDPQPLKEQPALNDSRYCLSSRLRVSATFWQNPRNHFRCQVQFYGLSENDEWTQDRAKPVTQIVSAEAWGRADCDVKLVEKSFETDTNLNFQNLSVIGFRILLLKVAGFNLLMTLRLWSS

SEQ ID NO: 12909 - protein, 752 aa, synthetic construct
MALPVTALLLPLALLLHAARPEVQLVESGGGLVQPGGSLRLSCAASGFSFSDFWMSWVRQAPGKGLEWVATISQAGSEKDYVDSVKGRFTISRDNAKKSLYLQMNSLRAEDTAVYYCASGVYSFDYRGQGTLVTVSSGTGGGGSGGGGSGGGGSEFDDIVMTQTPAIMSASPGQKVTITCSASSSVNYMHWYQQKLGSSPKLWIYDTSKLAPGVPARFSGSGSGTSYSLTISSMEAEDAASYFCHQWSSYPYTFGSGTKLEIKLEIQNPDPAVYQLRDSKSSDKSVCLFTDFDSQTNVSQSKDSDVYITDKCVLDMRSMDFKSNSAVAWSNKSDFACANAFNNSIIPEDTFFPSPESSCGFTSESYQQGVLSATILYEILLGKATLYAVLVSALVLMAMVKRKDSRGRAKRSGSGVKQTLNFDLLKLAGDVESNPGPTSMDWIWRILFLVGAATGAHSFEEVQLQESGPDLVKPSQSLSLTCTVTGYSITSGYGWHWIRQFPGNKLEWMGYIHYSGSTTYNPSLKSRISISRDTSKNQFFLQLNSVTTEDTATYYCARSLRYWGQGTTLTVSSTREDLKNVFPPEVAVFEPSEAEISHTQKATLVCLATGFYPDHVELSWWVNGKEVHSGVCTDPQPLKEQPALNDSRYCLSSRLRVSATFWQNPRNHFRCQVQFYGLSENDEWTQDRAKPVTQIVSAEAWGRADCDVKLVEKSFETDTNLNFQNLSVIGFRILLLKVAGFNLLMTLRLWSS

SEQ ID NO: 12910 - protein, 755 aa, synthetic construct
MALPVTALLLPLALLLHAARPEVQLVESGGGLVQPGGSLRLSCAASGFSFSDFWMSWVRQAPGKGLEWVATISQAGSEKDYVDSVKGRFTISRDNAKKSLYLQMNSLRAEDTAVYYCASGVYSFDYRGQGTLVTVSSGTGGGGSGGGGSGGGGSEFDDIQMTQSPSSLSASVGDRVTITCSATSSISYMHWYQQKPGKAPKGWIYDTSKLAHGVPSRFSGSGSGTDFTLTISSLQPEDFATYYCHQRRSYPFTFGQGTKVEIKLEIQNPDPAVYQLRDSKSSDKSVCLFTDFDSQTNVSQSKDSDVYITDKCVLDMRSMDFKSNSAVAWSNKSDFACANAFNNSIIPEDTFFPSPESSCGFTSESYQQGVLSATILYEILLGKATLYAVLVSALVLMAMVKRKDSRGRAKRSGSGVKQTLNFDLLKLAGDVESNPGPTSMDWIWRILFLVGAATGAHSFEEVQLVQSGAEVKKPGASVKVSCKASGYTFTNFWIHWVRQAPGQGLEWIGEIDPSDSYTNYNQKFKGRVTITRDTSTSTAYLELSSLRSEDTAVYYCAREITTVDYWGQGTLVTVSSTREDLKNVFPPEVAVFEPSEAEISHTQKATLVCLATGFYPDHVELSWWVNGKEVHSGVCTDPQPLKEQPALNDSRYCLSSRLRVSATFWQNPRNHFRCQVQFYGLSENDEWTQDRAKPVTQIVSAEAWGRADCDVKLVEKSFETDTNLNFQNLSVIGFRILLLKVAGFNLLMTLRLWSS

SEQ ID NO: 12911 - protein, 762 aa, synthetic construct
MALPVTALLLPLALLLHAARPEVQLVESGGGLVQPGGSLRLSCAASGFSFSDFWMSWVRQAPGKGLEWVATISQAGSEKDYVDSVKGRFTISRDNAKKSLYLQMNSLRAEDTAVYYCASGVYSFDYRGQGTLVTVSSGTGGGGSGGGGSGGGGSEFDDIQMTQSPSSLSASVGDRVTITCKASQGFNKYVAWYQQKPGKAPKLLIYYTSTLQPGVPSRFSGSGSGRDYTLTISSLQPEDFATYYCLQYGNLLYAFGQGTKVEIKRLEIQNPDPAVYQLRDSKSSDKSVCLFTDFDSQTNVSQSKDSDVYITDKCVLDMRSMDFKSNSAVAWSNKSDFACANAFNNSIIPEDTFFPSPESSCGFTSESYQQGVLSATILYEILLGKATLYAVLVSALVLMAMVKRKDSRGRAKRSGSGVKQTLNFDLLKLAGDVESNPGPTSMDWIWRILFLVGAATGAHSFEEVQLVQSGAEVKKPGASVKVSCKASGYTFTSYWIGWVRQAPGQGLEWIGDIYPGGGYTNYNEKFKGRVTITRDTSTSTAYLELSSLRSEDTAVYYCARLDGSSYRGAMDSWGQGTLVTVSSTREDLKNVFPPEVAVFEPSEAEISHTQKATLVCLATGFYPDHVELSWWVNGKEVHSGVCTDPQPLKEQPALNDSRYCLSSRLRVSATFWQNPRNHFRCQVQFYGLSENDEWTQDRAKPVTQIVSAEAWGRADCDVKLVEKSFETDTNLNFQNLSVIGFRILLLKVAGFNLLMTLRLWSS

SEQ ID NO: 12912 - protein, 758 aa, synthetic construct
MALPVTALLLPLALLLHAARPEVQLVESGGGLVQPGGSLRLSCAASGFSFSDFWMSWVRQAPGKGLEWVATISQAGSEKDYVDSVKGRFTISRDNAKKSLYLQMNSLRAEDTAVYYCASGVYSFDYRGQGTLVTVSSGTGGGGSGGGGSGGGGSEFDDIQMTQSPSSLSASVGDRVTITCRASQDIRYYLNWYQQKPGKAPKLLIYVASSLQSGVPSRFSGSGSGTEFTLTVSSLQPEDFATYYCLQVYSTPRTFGQGTKVEIKLEIQNPDPAVYQLRDSKSSDKSVCLFTDFDSQTNVSQSKDSDVYITDKCVLDMRSMDFKSNSAVAWSNKSDFACANAFNNSIIPEDTFFPSPESSCGFTSESYQQGVLSATILYEILLGKATLYAVLVSALVLMAMVKRKDSRGRAKRSGSGVKQTLNFDLLKLAGDVESNPGPTSMDWIWRILFLVGAATGAHSFEEVQLVESGGGLAKPGGSLRLSCAASGFRFTFNNYYMDWVRQAPGQGLEWVSRISSSGDPTWYADSVKGRFTISRENAKNTLFLQMNSLRAEDTAVYYCASLTTGSDSWGQGVLVTVSSTREDLKNVFPPEVAVFEPSEAEISHTQKATLVCLATGFYPDHVELSWWVNGKEVHSGVCTDPQPLKEQPALNDSRYCLSSRLRVSATFWQNPRNHFRCQVQFYGLSENDEWTQDRAKPVTQIVSAEAWGRADCDVKLVEKSFETDTNLNFQNLSVIGFRILLLKVAGFNLLMTLRLWSS

SEQ ID NO: 12913 - protein, 758 aa, synthetic construct
MALPVTALLLPLALLLHAARPEVQLVESGGGLVQPGGSLRLSCAASGFSFSDFWMSWVRQAPGKGLEWVATISQAGSEKDYVDSVKGRFTISRDNAKKSLYLQMNSLRAEDTAVYYCASGVYSFDYRGQGTLVTVSSGTGGGGSGGGGSGGGGSEFEIVMTQSPATLSVSPGERATLSCRASQSVSRNLAWYQQKPGQAPRLLIYGASTRATGIPARFSGSGSGTEFTLTIGSLQSEDFAVYYCQQYKTWPRTFGQGTNVEIKLEIQNPDPAVYQLRDSKSSDKSVCLFTDFDSQTNVSQSKDSDVYITDKCVLDMRSMDFKSNSAVAWSNKSDFACANAFNNSIIPEDTFFPSPESSCGFTSESYQQGVLSATILYEILLGKATLYAVLVSALVLMAMVKRKDSRGRAKRSGSGVKQTLNFDLLKLAGDVESNPGPTSMDWIWRILFLVGAATGAHSFEQVQLQQWGAGLLKPSETLSLTCAVFGGSFSGYYWSWIRQPPGKGLEWIGEINHRGNTNDNPSLKSRVTISVDTSKNQFALKLSSVTAADTAVYYCARERGYTYGNFDHWGQGTLVTVSSTREDLKNVFPPEVAVFEPSEAEISHTQKATLVCLATGFYPDHVELSWWVNGKEVHSGVCTDPQPLKEQPALNDSRYCLSSRLRVSATFWQNPRNHFRCQVQFYGLSENDEWTQDRAKPVTQIVSAEAWGRADCDVKLVEKSFETDTNLNFQNLSVIGFRILLLKVAGFNLLMTLRLWSS

SEQ ID NO: 12914 - protein, 759 aa, synthetic construct
MALPVTALLLPLALLLHAARPEVQLVESGGGLVQPGGSLRLSCAASGFSFSDFWMSWVRQAPGKGLEWVATISQAGSEKDYVDSVKGRFTISRDNAKKSLYLQMNSLRAEDTAVYYCASGVYSFDYRGQGTLVTVSSGTGGGGSGGGGSGGGGSEFEIVMTPSSATLSVSPGERATLSCRASQSVSRNLAWYQQKPGQAPRLLIYGASTRATGIPARFSGSGSGTEFTLTISSLQSEDFAVYYCHQYSNWMCSFGQGTKLEIKLEIQNPDPAVYQLRDSKSSDKSVCLFTDFDSQTNVSQSKDSDVYITDKCVLDMRSMDFKSNSAVAWSNKSDFACANAFNNSIIPEDTFFPSPESSCGFTSESYQQGVLSATILYEILLGKATLYAVLVSALVLMAMVKRKDSRGRAKRSGSGVKQTLNFDLLKLAGDVESNPGPTSMDWIWRILFLVGAATGAHSFEEVQLLESGGGLVQPGGSLRLSCAASGFTFSRYAMNWVRQAPGKGLEWVSGISGSGGRTYYADSVKGRFTISRDNSKNTLYLQMNSLRAEDTAVYYCAKDRDFWSGPFDYWGQGTLVTVSSTREDLKNVFPPEVAVFEPSEAEISHTQKATLVCLATGFYPDHVELSWWVNGKEVHSGVCTDPQPLKEQPALNDSRYCLSSRLRVSATFWQNPRNHFRCQVQFYGLSENDEWTQDRAKPVTQIVSAEAWGRADCDVKLVEKSFETDTNLNFQNLSVIGFRILLLKVAGFNLLMTLRLWSS

SEQ ID NO: 12915 - protein, 764 aa, synthetic construct
MALPVTALLLPLALLLHAARPEVQLVESGGGLVQPGGSLRLSCAASGFSFSDFWMSWVRQAPGKGLEWVATISQAGSEKDYVDSVKGRFTISRDNAKKSLYLQMNSLRAEDTAVYYCASGVYSFDYRGQGTLVTVSSGTGGGGSGGGGSGGGGSEFDIQMTQSPSSLSASVGDRVTITCKASKNIRSYLAWYQQKPGKAPKLLIYSGSTLHSGVPSRFSGSGSGTDFTLTISSLQPEDFATYYCQQHHEYPLTFGQGTKVEIKRLEIQNPDPAVYQLRDSKSSDKSVCLFTDFDSQTNVSQSKDSDVYITDKCVLDMRSMDFKSNSAVAWSNKSDFACANAFNNSIIPEDTFFPSPESSCGFTSESYQQGVLSATILYEILLGKATLYAVLVSALVLMAMVKRKDSRGRAKRSGSGVKQTLNFDLLKLAGDVESNPGPTSMDWIWRILFLVGAATGAHSFEQVQLQESGPGLVKPSETLSLTCTVSGYTITSGYDWSWIRQPPGKGLEWIGYINYGGSTNYKPSLGSRVTISVDTSKNQFSLKLSSVTAADTAVYYCARYNEYKSYIYDWYFDFWGQGTLVTVSSTREDLKNVFPPEVAVFEPSEAEISHTQKATLVCLATGFYPDHVELSWWVNGKEVHSGVCTDPQPLKEQPALNDSRYCLSSRLRVSATFWQNPRNHFRCQVQFYGLSENDEWTQDRAKPVTQIVSAEAWGRADCDVKLVEKSFETDTNLNFQNLSVIGFRILLLKVAGFNLLMTLRLWSS

SEQ ID NO: 12916 - protein, 766 aa, synthetic construct
MALPVTALLLPLALLLHAARPEVQLVESGGGLVQPGGSLRLSCAASGFSFSDFWMSWVRQAPGKGLEWVATISQAGSEKDYVDSVKGRFTISRDNAKKSLYLQMNSLRAEDTAVYYCASGVYSFDYRGQGTLVTVSSGTGGGGSGGGGSGGGGSEFQSVVTQPPSVSAAPGQKVTISCSGSSSNIGNNYVSWYQQLPGTAPKLLIYDNNKRPSGIPDRFSGSKSGTSATLGITGLQTGDEADYYCGTWDGSLYTMLFGGGTKLTVLLEIQNPDPAVYQLRDSKSSDKSVCLFTDFDSQTNVSQSKDSDVYITDKCVLDMRSMDFKSNSAVAWSNKSDFACANAFNNSIIPEDTFFPSPESSCGFTSESYQQGVLSATILYEILLGKATLYAVLVSALVLMAMVKRKDSRGRAKRSGSGVKQTLNFDLLKLAGDVESNPGPTSMDWIWRILFLVGAATGAHSFEEVQLVESGGGLVKPGGSLRLSCAASGFTFSNAWMSWVRQAPGKGLEWVGFIRSKAYGGTTEYAASVKGRFTISRDDSKSIAYLQMNNLKTEDTAVYYCARDGLYSSSWYDSDYWGQGTLVTVSSTREDLKNVFPPEVAVFEPSEAEISHTQKATLVCLATGFYPDHVELSWWVNGKEVHSGVCTDPQPLKEQPALNDSRYCLSSRLRVSATFWQNPRNHFRCQVQFYGLSENDEWTQDRAKPVTQIVSAEAWGRADCDVKLVEKSFETDTNLNFQNLSVIGFRILLLKVAGFNLLMTLRLWSS

SEQ ID NO: 12917 - protein, 771 aa, synthetic construct
MALPVTALLLPLALLLHAARPEVQLVESGGGLVQPGGSLRLSCAASGFSFSDFWMSWVRQAPGKGLEWVATISQAGSEKDYVDSVKGRFTISRDNAKKSLYLQMNSLRAEDTAVYYCASGVYSFDYRGQGTLVTVSSGTGGGGSGGGGSGGGGSEFQSVLTQPPSVSGAPGQRVTISCTGSSSNIGAGYDVHWYQQLPGTAPKLLIFGNSNRPSGVPDRFSGFKSGTSASLAITGLQAEDEADYFCQSYDSSLSGSGVFGTGTKVTVLGLEIQNPDPAVYQLRDSKSSDKSVCLFTDFDSQTNVSQSKDSDVYITDKCVLDMRSMDFKSNSAVAWSNKSDFACANAFNNSIIPEDTFFPSPESSCGFTSESYQQGVLSATILYEILLGKATLYAVLVSALVLMAMVKRKDSRGRAKRSGSGVKQTLNFDLLKLAGDVESNPGPTSMDWIWRILFLVGAATGAHSFEQMQLVQSGGGLVQPGRSLRLSCAASGFTFDDYAMHWVRQAPGKGLEWVSGISWNSGSIGYADSVKGRFTISRDNAKNSLYLQMNSLRAEDTALYYCAKDIHSGSYYGLLYYAMDVWGQGTTVTVSSTREDLKNVFPPEVAVFEPSEAEISHTQKATLVCLATGFYPDHVELSWWVNGKEVHSGVCTDPQPLKEQPALNDSRYCLSSRLRVSATFWQNPRNHFRCQVQFYGLSENDEWTQDRAKPVTQIVSAEAWGRADCDVKLVEKSFETDTNLNFQNLSVIGFRILLLKVAGFNLLMTLRLWSS

SEQ ID NO: 12918 - protein, 771 aa, synthetic construct
MALPVTALLLPLALLLHAARPEVQLVESGGGLVQPGGSLRLSCAASGFSFSDFWMSWVRQAPGKGLEWVATISQAGSEKDYVDSVKGRFTISRDNAKKSLYLQMNSLRAEDTAVYYCASGVYSFDYRGQGTLVTVSSGTGGGGSGGGGSGGGGSEFLPVLTQPPSASGTPGQRVTISCSGRSSNIGSNSVNWYRQLPGAAPKLLIYSNNQRPPGVPVRFSGSKSGTSASLAISGLQSEDEATYYCATWDDNLNVHYVFGTGTKVTVLGSRLEIQNPDPAVYQLRDSKSSDKSVCLFTDFDSQTNVSQSKDSDVYITDKCVLDMRSMDFKSNSAVAWSNKSDFACANAFNNSIIPEDTFFPSPESSCGFTSESYQQGVLSATILYEILLGKATLYAVLVSALVLMAMVKRKDSRGRAKRSGSGVKQTLNFDLLKLAGDVESNPGPTSMDWIWRILFLVGAATGAHSFELEMAQVQLVQSGAEVKKPGSSVKVSCKASGGTFSSYAISWVRQAPGQGLEWMGRIIPILGIANYAQKFQGRVTITADKSTSTAYMELSSLRSEDTAVYYCARGGYYSHDMWSEDWGQGTLVTVSSTREDLKNVFPPEVAVFEPSEAEISHTQKATLVCLATGFYPDHVELSWWVNGKEVHSGVCTDPQPLKEQPALNDSRYCLSSRLRVSATFWQNPRNHFRCQVQFYGLSENDEWTQDRAKPVTQIVSAEAWGRADCDVKLVEKSFETDTNLNFQNLSVIGFRILLLKVAGFNLLMTLRLWSS

SEQ ID NO: 12919 - protein, 765 aa, synthetic construct
MALPVTALLLPLALLLHAARPEVQLVESGGGLVQPGGSLRLSCAASGFSFSDFWMSWVRQAPGKGLEWVATISQAGSEKDYVDSVKGRFTISRDNAKKSLYLQMNSLRAEDTAVYYCASGVYSFDYRGQGTLVTVSSGTGGGGSGGGGSGGGGSEFDFVMTQSPDSLAVSLGERVTMSCKSSQSLLNSGNQKNYLTWYQQKPGQPPKLLIYWASTRESGVPDRFSGSGSGTDFTLTISSLQAEDVAVYYCQNDYSYPYTFGQGTKLEIKLEIQNPDPAVYQLRDSKSSDKSVCLFTDFDSQTNVSQSKDSDVYITDKCVLDMRSMDFKSNSAVAWSNKSDFACANAFNNSIIPEDTFFPSPESSCGFTSESYQQGVLSATILYEILLGKATLYAVLVSALVLMAMVKRKDSRGRAKRSGSGVKQTLNFDLLKLAGDVESNPGPTSMDWIWRILFLVGAATGAHSFEEVQLVQSGAELKKPGASVKVSCKASGYTFTDYYMKWVRQAPGQGLEWIGDIIPSNGATFYNQKFKGRVTITVDKSTSTAYMELSSLRSEDTAVYYCARSHLLRASWFAYWGQGTLVTVSSTREDLKNVFPPEVAVFEPSEAEISHTQKATLVCLATGFYPDHVELSWWVNGKEVHSGVCTDPQPLKEQPALNDSRYCLSSRLRVSATFWQNPRNHFRCQVQFYGLSENDEWTQDRAKPVTQIVSAEAWGRADCDVKLVEKSFETDTNLNFQNLSVIGFRILLLKVAGFNLLMTLRLWSS

SEQ ID NO: 12920 - protein, 765 aa, synthetic construct
MALPVTALLLPLALLLHAARPEVQLVESGGGLVQPGGSLRLSCAASGFSFSDFWMSWVRQAPGKGLEWVATISQAGSEKDYVDSVKGRFTISRDNAKKSLYLQMNSLRAEDTAVYYCASGVYSFDYRGQGTLVTVSSGTGGGGSGGGGSGGGGSEFDFVMTQSPDSLAVSLGERVTMSCKSSQSLLNSGNQKNYLTWYQQKPGQPPKLLIYWASTRESGVPDRFSGSGSGTDFTLTISSLQAEDVAVYYCQNDYSYPYTFGQGTKLEIKLEIQNPDPAVYQLRDSKSSDKSVCLFTDFDSQTNVSQSKDSDVYITDKCVLDMRSMDFKSNSAVAWSNKSDFACANAFNNSIIPEDTFFPSPESSCGFTSESYQQGVLSATILYEILLGKATLYAVLVSALVLMAMVKRKDSRGRAKRSGSGVKQTLNFDLLKLAGDVESNPGPTSMDWIWRILFLVGAATGAHSFEQVQLVQSGAELKKPGASVKVSCKASGYTFTDYYMKWVRQAPGQGLEWIGDIIPSNGATFYNQKFKGRVTITVDKSTSTAYMELSSLRSEDTAVYYCARSHLLRASWFAYWGQGTLVTVSSTREDLKNVFPPEVAVFEPSEAEISHTQKATLVCLATGFYPDHVELSWWVNGKEVHSGVCTDPQPLKEQPALNDSRYCLSSRLRVSATFWQNPRNHFRCQVQFYGLSENDEWTQDRAKPVTQIVSAEAWGRADCDVKLVEKSFETDTNLNFQNLSVIGFRILLLKVAGFNLLMTLRLWSS

SEQ ID NO: 12921 - protein, 755 aa, synthetic construct
MALPVTALLLPLALLLHAARPEVQLVESGGGLVQPGGSLRLSCAASGFSFSDFWMSWVRQAPGKGLEWVATISQAGSEKDYVDSVKGRFTISRDNAKKSLYLQMNSLRAEDTAVYYCASGVYSFDYRGQGTLVTVSSGTGGGGSGGGGSGGGGSEFDVQITQSPSYLAASPGETITINCRASKSISKDLAWYQEKPGKTNKLLIYSGSTLQSGIPSRFSGSGSGTDFTLTISSLEPEDFAMYYCQQHNKYPYTFGGGTKLEIKRLEIQNPDPAVYQLRDSKSSDKSVCLFTDFDSQTNVSQSKDSDVYITDKCVLDMRSMDFKSNSAVAWSNKSDFACANAFNNSIIPEDTFFPSPESSCGFTSESYQQGVLSATILYEILLGKATLYAVLVSALVLMAMVKRKDSRGRAKRSGSGVKQTLNFDLLKLAGDVESNPGPTSMDWIWRILFLVGAATGAHSFEQVQLQQPGAELVRPGASVKLSCKASGYTFTSYWMNWVKQRPDQGLEWIGRIDPYDSETHYNQKFKDKAILTVDKSSSTAYMQLSSLTSEDSAVYYCARGNWDDYWGQGTTLTVSSTREDLKNVFPPEVAVFEPSEAEISHTQKATLVCLATGFYPDHVELSWWVNGKEVHSGVCTDPQPLKEQPALNDSRYCLSSRLRVSATFWQNPRNHFRCQVQFYGLSENDEWTQDRAKPVTQIVSAEAWGRADCDVKLVEKSFETDTNLNFQNLSVIGFRILLLKVAGFNLLMTLRLWSS

SEQ ID NO: 12922 - protein, 757 aa, synthetic construct
MALPVTALLLPLALLLHAARPEVQLVESGGGLVQPGGSLRLSCAASGFSFSDFWMSWVRQAPGKGLEWVATISQAGSEKDYVDSVKGRFTISRDNAKKSLYLQMNSLRAEDTAVYYCASGVYSFDYRGQGTLVTVSSGTGGGGSGGGGSGGGGSEFEIVLTQSPTSMTASPGEQVTITCRASSSINYMHWYQQKPGASPRPWIYETSKLASGVPDRFSGSASGTSYSLTINNMEAEDAATYYCQQWNYPSWTFGGGTKLELKLEIQNPDPAVYQLRDSKSSDKSVCLFTDFDSQTNVSQSKDSDVYITDKCVLDMRSMDFKSNSAVAWSNKSDFACANAFNNSIIPEDTFFPSPESSCGFTSESYQQGVLSATILYEILLGKATLYAVLVSALVLMAMVKRKDSRGRAKRSGSGVKQTLNFDLLKLAGDVESNPGPTSMDWIWRILFLVGAATGAHSFEEVQLVESGGGLVQPGRSLKLSCAASGFTFSDYNMAWVRQAPKKGLEWVATILYDGGRTYYRGSVKGRFTISRDNAKSTLYLRMDSLRSEDTATYYCATHSRGTDYFDYWGQGVMVTVSSTREDLKNVFPPEVAVFEPSEAEISHTQKATLVCLATGFYPDHVELSWWVNGKEVHSGVCTDPQPLKEQPALNDSRYCLSSRLRVSATFWQNPRNHFRCQVQFYGLSENDEWTQDRAKPVTQIVSAEAWGRADCDVKLVEKSFETDTNLNFQNLSVIGFRILLLKVAGFNLLMTLRLWSS

SEQ ID NO: 12923 - protein, 766 aa, synthetic construct
MALPVTALLLPLALLLHAARPEVQLVESGGGLVQPGGSLRLSCAASGFSFSDFWMSWVRQAPGKGLEWVATISQAGSEKDYVDSVKGRFTISRDNAKKSLYLQMNSLRAEDTAVYYCASGVYSFDYRGQGTLVTVSSGTGGGGSGGGGSGGGGSEFDIVMTQSPSSLAVSEGETVTINCKSSQSFLSSGDGKNYVAWYQYKPGQSPKLLIYWASTRQSGVPDRFIGSGSGTDFTLTISTVQAEDLAIYYCQQYYDTPLTFGSGTKLEIKLEIQNPDPAVYQLRDSKSSDKSVCLFTDFDSQTNVSQSKDSDVYITDKCVLDMRSMDFKSNSAVAWSNKSDFACANAFNNSIIPEDTFFPSPESSCGFTSESYQQGVLSATILYEILLGKATLYAVLVSALVLMAMVKRKDSRGRAKRSGSGVKQTLNFDLLKLAGDVESNPGPTSMDWIWRILFLVGAATGAHSFEEVKLQESGPSLVQSSQTLSLTCTVSGFSLTSYHIHWVRQTPGKGLEWMGVMWSDGDTSYNSALKSRLSISRDTSQSQVFLKMNSLQTEDTATYYCARGYYSSYLYLWFAYWGQGTLVTVSSTREDLKNVFPPEVAVFEPSEAEISHTQKATLVCLATGFYPDHVELSWWVNGKEVHSGVCTDPQPLKEQPALNDSRYCLSSRLRVSATFWQNPRNHFRCQVQFYGLSENDEWTQDRAKPVTQIVSAEAWGRADCDVKLVEKSFETDTNLNFQNLSVIGFRILLLKVAGFNLLMTLRLWSS

SEQ ID NO: 12924 - protein, 770 aa, synthetic construct
MALPVTALLLPLALLLHAARPEVQLVESGGGLVQPGGSLRLSCAASGFSFSDFWMSWVRQAPGKGLEWVATISQAGSEKDYVDSVKGRFTISRDNAKKSLYLQMNSLRAEDTAVYYCASGVYSFDYRGQGTLVTVSSGTGGGGSGGGGSGGGGSEFDVLMTQTPVSLPVSLGGQVSISCRSSQSLVHSDGDTYLHWYLQKPGQSPQLLIYRVSNRFSGVPDRFSGSGSGTDFTLKISRVEPEDLGLYYCLQTTHFPPWTFGGGTKLEMKLEIQNPDPAVYQLRDSKSSDKSVCLFTDFDSQTNVSQSKDSDVYITDKCVLDMRSMDFKSNSAVAWSNKSDFACANAFNNSIIPEDTFFPSPESSCGFTSESYQQGVLSATILYEILLGKATLYAVLVSALVLMAMVKRKDSRGRAKRSGSGVKQTLNFDLLKLAGDVESNPGPTSMDWIWRILFLVGAATGAHSFEQVQLQQSGPELRRPGSSVRLSCKASGYRIKDFLIHWIKNRPEHGLEWIGWIDPEDGETKYAQKFQTKATLTADTSSNTAYMQLSSLTSEDTATYFCARWGDVYYGLMRGHVMDAWGQGTSVTVSSTREDLKNVFPPEVAVFEPSEAEISHTQKATLVCLATGFYPDHVELSWWVNGKEVHSGVCTDPQPLKEQPALNDSRYCLSSRLRVSATFWQNPRNHFRCQVQFYGLSENDEWTQDRAKPVTQIVSAEAWGRADCDVKLVEKSFETDTNLNFQNLSVIGFRILLLKVAGFNLLMTLRLWSS

SEQ ID NO: 12925 - protein, 765 aa, synthetic construct
MALPVTALLLPLALLLHAARPEVQLVESGGGLVQPGGSLRLSCAASGFSFSDFWMSWVRQAPGKGLEWVATISQAGSEKDYVDSVKGRFTISRDNAKKSLYLQMNSLRAEDTAVYYCASGVYSFDYRGQGTLVTVSSGTGGGGSGGGGSGGGGSEFDIVMTQSPATLSLSPGERATLSCRSSKSLQNVNGNTYLYWFQQKPGQSPQLLIYRMSNLNSGVPDRFSGSGSGTEFTLTISSLEPEDFAVYYCMQHLEYPITFGAGTKLEIKLEIQNPDPAVYQLRDSKSSDKSVCLFTDFDSQTNVSQSKDSDVYITDKCVLDMRSMDFKSNSAVAWSNKSDFACANAFNNSIIPEDTFFPSPESSCGFTSESYQQGVLSATILYEILLGKATLYAVLVSALVLMAMVKRKDSRGRAKRSGSGVKQTLNFDLLKLAGDVESNPGPTSMDWIWRILFLVGAATGAHSFEEVQLVESGGGLVKPGGSLKLSCAASGYTFTSYVMHWVRQAPGKGLEWIGYINPYNDGTKYNEKFQGRVTISSDKSISTAYMELSSLRSEDTAMYYCARGTYYYGTRVFDYWGQGTLVTVSSTREDLKNVFPPEVAVFEPSEAEISHTQKATLVCLATGFYPDHVELSWWVNGKEVHSGVCTDPQPLKEQPALNDSRYCLSSRLRVSATFWQNPRNHFRCQVQFYGLSENDEWTQDRAKPVTQIVSAEAWGRADCDVKLVEKSFETDTNLNFQNLSVIGFRILLLKVAGFNLLMTLRLWSS

SEQ ID NO: 12926 - protein, 761 aa, synthetic construct
MALPVTALLLPLALLLHAARPEVQLVESGGGLVQPGGSLRLSCAASGFSFSDFWMSWVRQAPGKGLEWVATISQAGSEKDYVDSVKGRFTISRDNAKKSLYLQMNSLRAEDTAVYYCASGVYSFDYRGQGTLVTVSSGTGGGGSGGGGSGGGGSEFDIQMTQSPSSLSASVGDRVTITCKASDHINNWLAWYQQKPGQAPKLLIYGATTLETGVPSRFSGSGSGTDYTLTISSLQPEDFATYYCQQSWNTPWTFGQGTKLEIKRLEIQNPDPAVYQLRDSKSSDKSVCLFTDFDSQTNVSQSKDSDVYITDKCVLDMRSMDFKSNSAVAWSNKSDFACANAFNNSIIPEDTFFPSPESSCGFTSESYQQGVLSATILYEILLGKATLYAVLVSALVLMAMVKRKDSRGRAKRSGSGVKQTLNFDLLKLAGDVESNPGPTSMDWIWRILFLVGAATGAHSFEQVQLQQPGAELVKPGASVKMSCKASGYAFSSYWINWMKQKPGQGLEWIGQIYPGDGDTNYNGKFKGRATLTADTSSSTAYMQLSSLTSEDSAVYFCARSITTVVGCAMDYWGQGTSVTVSSTREDLKNVFPPEVAVFEPSEAEISHTQKATLVCLATGFYPDHVELSWWVNGKEVHSGVCTDPQPLKEQPALNDSRYCLSSRLRVSATFWQNPRNHFRCQVQFYGLSENDEWTQDRAKPVTQIVSAEAWGRADCDVKLVEKSFETDTNLNFQNLSVIGFRILLLKVAGFNLLMTLRLWSS

SEQ ID NO: 12927 - protein, 763 aa, synthetic construct
MALPVTALLLPLALLLHAARPEVQLVESGGGLVQPGGSLRLSCAASGFSFSDFWMSWVRQAPGKGLEWVATISQAGSEKDYVDSVKGRFTISRDNAKKSLYLQMNSLRAEDTAVYYCASGVYSFDYRGQGTLVTVSSGTGGGGSGGGGSGGGGSEFQIVLSQSPAILSASPGEKVTMTCRASSSVSYMHWYQQKPGSSPKPWIYATSNLASGVPARFSGSGSGTSYSFTISRVEAEDAATYYCQQWTFNPPTFGGGTRLEIKRTVAALEIQNPDPAVYQLRDSKSSDKSVCLFTDFDSQTNVSQSKDSDVYITDKCVLDMRSMDFKSNSAVAWSNKSDFACANAFNNSIIPEDTFFPSPESSCGFTSESYQQGVLSATILYEILLGKATLYAVLVSALVLMAMVKRKDSRGRAKRSGSGVKQTLNFDLLKLAGDVESNPGPTSMDWIWRILFLVGAATGAHSFEQAYLQQSGAELVRPGASVKMSCKASGYTFTSYNMHWVKQTPRQGLEWIGGIYPGNGDTSYNQKFKGKATLTVGKSSSTAYMQLSSLTSEDSAVYFCARYDYNYAMDYWGQGTSVTVSSASTREDLKNVFPPEVAVFEPSEAEISHTQKATLVCLATGFYPDHVELSWWVNGKEVHSGVCTDPQPLKEQPALNDSRYCLSSRLRVSATFWQNPRNHFRCQVQFYGLSENDEWTQDRAKPVTQIVSAEAWGRADCDVKLVEKSFETDTNLNFQNLSVIGFRILLLKVAGFNLLMTLRLWSS

SEQ ID NO: 12928 - protein, 761 aa, synthetic construct
MALPVTALLLPLALLLHAARPEVQLVESGGGLVQPGGSLRLSCAASGFSFSDFWMSWVRQAPGKGLEWVATISQAGSEKDYVDSVKGRFTISRDNAKKSLYLQMNSLRAEDTAVYYCASGVYSFDYRGQGTLVTVSSGTGGGGSGGGGSGGGGSEFEIVLTQSPATLSLSPGERATLSCRASQSVSSYLAWYQQKPGQAPRLLIYDASNRATGIPARFSGSGSGTDFTLTISSLEPEDFAVYYCQQRSNWPITFGQGTRLEIKLEIQNPDPAVYQLRDSKSSDKSVCLFTDFDSQTNVSQSKDSDVYITDKCVLDMRSMDFKSNSAVAWSNKSDFACANAFNNSIIPEDTFFPSPESSCGFTSESYQQGVLSATILYEILLGKATLYAVLVSALVLMAMVKRKDSRGRAKRSGSGVKQTLNFDLLKLAGDVESNPGPTSMDWIWRILFLVGAATGAHSFEEVQLVESGGGLVQPDRSLRLSCAASGFTFHDYAMHWVRQAPGKGLEWVSTISWNSGTIGYADSVKGRFTISRDNAKNSLYLQMNSLRAEDTALYYCAKDIQYGNYYYGMDVWGQGTTVTVSSTREDLKNVFPPEVAVFEPSEAEISHTQKATLVCLATGFYPDHVELSWWVNGKEVHSGVCTDPQPLKEQPALNDSRYCLSSRLRVSATFWQNPRNHFRCQVQFYGLSENDEWTQDRAKPVTQIVSAEAWGRADCDVKLVEKSFETDTNLNFQNLSVIGFRILLLKVAGFNLLMTLRLWSS

SEQ ID NO: 12929 - protein, 756 aa, synthetic construct
MALPVTALLLPLALLLHAARPEVQLVESGGGLVQPGGSLRLSCAASGFSFSDFWMSWVRQAPGKGLEWVATISQAGSEKDYVDSVKGRFTISRDNAKKSLYLQMNSLRAEDTAVYYCASGVYSFDYRGQGTLVTVSSGTGGGGSGGGGSGGGGSEFDIQMTQSPSSLSASVGDRVTINCKASQDINSYLSWFQQKPGKAPKTLIYRANRLVDGVPSRFSGSGSGQDYTLTISSLQPEDFATYYCLQYDEFPLTFGGGTKVEIKLEIQNPDPAVYQLRDSKSSDKSVCLFTDFDSQTNVSQSKDSDVYITDKCVLDMRSMDFKSNSAVAWSNKSDFACANAFNNSIIPEDTFFPSPESSCGFTSESYQQGVLSATILYEILLGKATLYAVLVSALVLMAMVKRKDSRGRAKRSGSGVKQTLNFDLLKLAGDVESNPGPTSMDWIWRILFLVGAATGAHSFEQVQLVQSGAEVKKPGASVKVSCKASGYTFTNYDINWVRQAPGQGLEWIGWIYPGDGSTKYNEKFKAKATLTADTSTSTAYMELRSLRSDDTAVYYCASGYEDAMDYWGQGTTVTVSSTREDLKNVFPPEVAVFEPSEAEISHTQKATLVCLATGFYPDHVELSWWVNGKEVHSGVCTDPQPLKEQPALNDSRYCLSSRLRVSATFWQNPRNHFRCQVQFYGLSENDEWTQDRAKPVTQIVSAEAWGRADCDVKLVEKSFETDTNLNFQNLSVIGFRILLLKVAGFNLLMTLRLWSS

SEQ ID NO: 12930 - protein, 758 aa, synthetic construct
MALPVTALLLPLALLLHAARPEVQLVESGGGLVQPGGSLRLSCAASGFSFSDFWMSWVRQAPGKGLEWVATISQAGSEKDYVDSVKGRFTISRDNAKKSLYLQMNSLRAEDTAVYYCASGVYSFDYRGQGTLVTVSSGTGGGGSGGGGSGGGGSEFDIVMTQTPLSLSVTPGQPASISCKSSQSLLDGDGKTYLNWLLQKPGQSPQRLIYLVSKLDSGVPDRFSGSGSGTDFTLKISRVEAEDVGVYYCWQGTHFPRTFGQGTKLEIKLEIQNPDPAVYQLRDSKSSDKSVCLFTDFDSQTNVSQSKDSDVYITDKCVLDMRSMDFKSNSAVAWSNKSDFACANAFNNSIIPEDTFFPSPESSCGFTSESYQQGVLSATILYEILLGKATLYAVLVSALVLMAMVKRKDSRGRAKRSGSGVKQTLNFDLLKLAGDVESNPGPTSMDWIWRILFLVGAATGAHSFEQVQLVQSGAEVKKPGASVKVSCKASGYTFKDTYIHWVRQAPGQGLEWMGRIDPANGNTKYDPKFQGRVTMTRDTSISTAYMELSRLRSDDTAVYYCARRGGVDWGQGTLVTVSSTREDLKNVFPPEVAVFEPSEAEISHTQKATLVCLATGFYPDHVELSWWVNGKEVHSGVCTDPQPLKEQPALNDSRYCLSSRLRVSATFWQNPRNHFRCQVQFYGLSENDEWTQDRAKPVTQIVSAEAWGRADCDVKLVEKSFETDTNLNFQNLSVIGFRILLLKVAGFNLLMTLRLWSS

SEQ ID NO: 12931 - protein, 759 aa, synthetic construct
MALPVTALLLPLALLLHAARPEVQLVESGGGLVQPGGSLRLSCAASGFSFSDFWMSWVRQAPGKGLEWVATISQAGSEKDYVDSVKGRFTISRDNAKKSLYLQMNSLRAEDTAVYYCASGVYSFDYRGQGTLVTVSSGTGGGGSGGGGSGGGGSEFDIQMTQSPSSLSASVGDRVTITCKASQDVSTAVAWFQQKPGKAPKLLIYSPSYRYTGVPSRFSGSGSGTDFTLTISSLQPEDFTYYCQQLYSTPYTFGQGTKVEIKLEIQNPDPAVYQLRDSKSSDKSVCLFTDFDSQTNVSQSKDSDVYITDKCVLDMRSMDFKSNSAVAWSNKSDFACANAFNNSIIPEDTFFPSPESSCGFTSESYQQGVLSATILYEILLGKATLYAVLVSALVLMAMVKRKDSRGRAKRSGSGVKQTLNFDLLKLAGDVESNPGPTSMDWIWRILFLVGAATGAHSFEEVQLVQSGAEVKKPGASVKVSCKASGYTFTDYYLDVVVRQAPGQGLEWIGRVNPYNGGTIYNQKFKGRVTLTRDTSTSTAYLELSSLRSEDTAVYYCARDHYRYDPLLDYWGQGTLVTVSSTREDLKNVFPPEVAVFEPSEAEISHTQKATLVCLATGFYPDHVELSWWVNGKEVHSGVCTDPQPLKEQPALNDSRYCLSSRLRVSATFWQNPRNHFRCQVQFYGLSENDEWTQDRAKPVTQIVSAEAWGRADCDVKLVEKSFETDTNLNFQNLSVIGFRILLLKVAGFNLLMTLRLWSS

SEQ ID NO: 12932 - protein, 765 aa, synthetic construct
MALPVTALLLPLALLLHAARPEVQLVESGGGLVQPGGSLRLSCAASGFSFSDFWMSWVRQAPGKGLEWVATISQAGSEKDYVDSVKGRFTISRDNAKKSLYLQMNSLRAEDTAVYYCASGVYSFDYRGQGTLVTVSSGTGGGGSGGGGSGGGGSEFDIQMTQSPSSLSASVGDRVTITCRASQSVSTSSYNYMHWYQQKPGKPPKLLIKYASNLESGVPSRFSGSGSGTDFTLTISSLQPEDFATYYCQHSWEIPLTFGQGTKVEIKLEIQNPDPAVYQLRDSKSSDKSVCLFTDFDSQTNVSQSKDSDVYITDKCVLDMRSMDFKSNSAVAWSNKSDFACANAFNNSIIPEDTFFPSPESSCGFTSESYQQGVLSATILYEILLGKATLYAVLVSALVLMAMVKRKDSRGRAKRSGSGVKQTLNFDLLKLAGDVESNPGPTSMDWIWRILFLVGAATGAHSFEEVQLVQSGAEVKKPGASVKVSCKASGYSFTDYYMHWVRQAPGQGLEWIGRINPYNGAAFYSQNFKDRVTLTVDTSTSTAYLELSSLRSEDTAVYYCAIERGADLEGYAMDYWGQGTLVTVSSTREDLKNVFPPEVAVFEPSEAEISHTQKATLVCLATGFYPDHVELSWWVNGKEVHSGVCTDPQPLKEQPALNDSRYCLSSRLRVSATFWQNPRNHFRCQVQFYGLSENDEWTQDRAKPVTQIVSAEAWGRADCDVKLVEKSFETDTNLNFQNLSVIGFRILLLKVAGFNLLMTLRLWSS

SEQ ID NO: 12933 - protein, 763 aa, synthetic construct
MALPVTALLLPLALLLHAARPEVQLVESGGGLVQPGGSLRLSCAASGFSFSDFWMSWVRQAPGKGLEWVATISQAGSEKDYVDSVKGRFTISRDNAKKSLYLQMNSLRAEDTAVYYCASGVYSFDYRGQGTLVTVSSGTGGGGSGGGGSGGGGSEFEIVLTQSPATLSASPGERVTLTCRASSNVISSYVHWYQQKPGSSPRLFLYSTSNLASGVPSRFSGSGSGTDFTFTISSLEAEDAATYYCQQYSGYPLTFGQGTRLEIKLEIQNPDPAVYQLRDSKSSDKSVCLFTDFDSQTNVSQSKDSDVYITDKCVLDMRSMDFKSNSAVAWSNKSDFACANAFNNSIIPEDTFFPSPESSCGFTSESYQQGVLSATILYEILLGKATLYAVLVSALVLMAMVKRKDSRGRAKRSGSGVKQTLNFDLLKLAGDVESNPGPTSMDWIWRILFLVGAATGAHSFEQVQLQESGPGLVKPSETLSLTCAVSGYSITSAYYWNWIRQPPGKGLEWIGYISYDGRNNYNPSLKNRITINPDTSKNQFSLQLNSVTPEDTAVYYCAREGDYDVGNYYAMDYWGQGTLVTVSSTREDLKNVFPPEVAVFEPSEAEISHTQKATLVCLATGFYPDHVELSWWVNGKEVHSGVCTDPQPLKEQPALNDSRYCLSSRLRVSATFWQNPRNHFRCQVQFYGLSENDEWTQDRAKPVTQIVSAEAWGRADCDVKLVEKSFETDTNLNFQNLSVIGFRILLLKVAGFNLLMTLRLWSS

SEQ ID NO: 12934 - protein, 763 aa, synthetic construct
MALPVTALLLPLALLLHAARPEVQLVESGGGLVQPGGSLRLSCAASGFSFSDFWMSWVRQAPGKGLEWVATISQAGSEKDYVDSVKGRFTISRDNAKKSLYLQMNSLRAEDTAVYYCASGVYSFDYRGQGTLVTVSSGTGGGGSGGGGSGGGGSEFEIVLTQSPATLSLSPGERATLSCRASSNVISSYVHWYQQKPGQAPRLLIYSTSNLASGIPARFSGSGSGTDFTLTISSLEPEDFAVYYCQQYSGYPLTFGQGTRLEIKLEIQNPDPAVYQLRDSKSSDKSVCLFTDFDSQTNVSQSKDSDVYITDKCVLDMRSMDFKSNSAVAWSNKSDFACANAFNNSIIPEDTFFPSPESSCGFTSESYQQGVLSATILYEILLGKATLYAVLVSALVLMAMVKRKDSRGRAKRSGSGVKQTLNFDLLKLAGDVESNPGPTSMDWIWRILFLVGAATGAHSFEEVQLVESGGGLVQPGRSLRLSCAASGYSITSAYYWNWVRQAPGKGLEWVSYISYDGRNNYNPSLKNRFTISRDNAKKSLYLQMNSLRAEDTALYYCAKEGDYDVGNYYAMDYWGQGTTVTVSSTREDLKNVFPPEVAVFEPSEAEISHTQKATLVCLATGFYPDHVELSWWVNGKEVHSGVCTDPQPLKEQPALNDSRYCLSSRLRVSATFWQNPRNHFRCQVQFYGLSENDEWTQDRAKPVTQIVSAEAWGRADCDVKLVEKSFETDTNLNFQNLSVIGFRILLLKVAGFNLLMTLRLWSS

SEQ ID NO: 12935 - protein, 762 aa, synthetic construct
MALPVTALLLPLALLLHAARPEVQLVESGGGLVQPGGSLRLSCAASGFSFSDFWMSWVRQAPGKGLEWVATISQAGSEKDYVDSVKGRFTISRDNAKKSLYLQMNSLRAEDTAVYYCASGVYSFDYRGQGTLVTVSSGTGGGGSGGGGSGGGGSEFDVVMTQTPLSLPVSLGDQASISCRSSQSLVHSNGNTYLRWYLQKPGQSPKVLIYKVSNRVSGVPDRFSGSGSGTDFTLKINRVEAEDLGVYFCSQSTHVPWTFGGGTKLEIKLEIQNPDPAVYQLRDSKSSDKSVCLFTDFDSQTNVSQSKDSDVYITDKCVLDMRSMDFKSNSAVAWSNKSDFACANAFNNSIIPEDTFFPSPESSCGFTSESYQQGVLSATILYEILLGKATLYAVLVSALVLMAMVKRKDSRGRAKRSGSGVKQTLNFDLLKLAGDVESNPGPTSMDWIWRILFLVGAATGAHSFEGVKLDETGGGLVQPGGAMKLSCVTSGFTFGHYWMNWVRQSPEKGLEWVAQFRNKPYNYETYYSDSVKGRFTISRDDSKSSVYLQMNNLRVEDTGIYYCTGASYGMEYLGQGTSVTVSTTREDLKNVFPPEVAVFEPSEAEISHTQKATLVCLATGFYPDHVELSWWVNGKEVHSGVCTDPQPLKEQPALNDSRYCLSSRLRVSATFWQNPRNHFRCQVQFYGLSENDEWTQDRAKPVTQIVSAEAWGRADCDVKLVEKSFETDTNLNFQNLSVIGFRILLLKVAGFNLLMTLRLWSS

SEQ ID NO: 12936 - protein, 768 aa, synthetic construct
MALPVTALLLPLALLLHAARPEVQLVESGGGLVQPGGSLRLSCAASGFSFSDFWMSWVRQAPGKGLEWVATISQAGSEKDYVDSVKGRFTISRDNAKKSLYLQMNSLRAEDTAVYYCASGVYSFDYRGQGTLVTVSSGTGGGGSGGGGSGGGGSEFQVQLVESGGNLVQPGGSLRLSCAASGFTFGSFSMSWVRQAPGGGLEWVAGLSARSSLTHYADSVKGRFTISRDNAKNSVYLQMNSLRVEDTAVYYCARRSYDSSGYWGHFYSYMDVWGQGTLVTVSLEIQNPDPAVYQLRDSKSSDKSVCLFTDFDSQTNVSQSKDSDVYITDKCVLDMRSMDFKSNSAVAWSNKSDFACANAFNNSIIPEDTFFPSPESSCGFTSESYQQGVLSATILYEILLGKATLYAVLVSALVLMAMVKRKDSRGRAKRSGSGVKQTLNFDLLKLAGDVESNPGPTSMDWIWRILFLVGAATGAHSFESVLTQPSSVSAAPGQKVTISCSGSTSNIGNNYVSWYQQHPGKAPKLMIYDVSKRPSGVPDRFSGSKSGNSASLDISGLQSEDEADYYCAAWDDSLSEFLFGTGTKLTVLGTREDLKNVFPPEVAVFEPSEAEISHTQKATLVCLATGFYPDHVELSWWVNGKEVHSGVCTDPQPLKEQPALNDSRYCLSSRLRVSATFWQNPRNHFRCQVQFYGLSENDEWTQDRAKPVTQIVSAEAWGRADCDVKLVEKSFETDTNLNFQNLSVIGFRILLLKVAGFNLLMTLRLWSS

SEQ ID NO: 12937 - protein, 763 aa, synthetic construct
MALPVTALLLPLALLLHAARPEVQLVESGGGLVQPGGSLRLSCAASGFSFSDFWMSWVRQAPGKGLEWVATISQAGSEKDYVDSVKGRFTISRDNAKKSLYLQMNSLRAEDTAVYYCASGVYSFDYRGQGTLVTVSSGTGGGGSGGGGSGGGGSEFDVVMTQSPSSLSASVGDRVTITCQSSLDISHYLNWYQQKPGKAPKLLIYDASNLETGVPSRFSGSGSGTHFTFTISSLQPEDFATYYCQQYDNLPLTFGGGTKLEIKRLEIQNPDPAVYQLRDSKSSDKSVCLFTDFDSQTNVSQSKDSDVYITDKCVLDMRSMDFKSNSAVAWSNKSDFACANAFNNSIIPEDTFFPSPESSCGFTSESYQQGVLSATILYEILLGKATLYAVLVSALVLMAMVKRKDSRGRAKRSGSGVKQTLNFDLLKLAGDVESNPGPTSMDWIWRILFLVGAATGAHSFEQVQLVQSGGGVVQPGGSLRVSCAASGVTLSDYGMHWVRQAPGKGLEWVAFIRNDGSDKYYADSVKGRFTISRDNSEKTVSLQMSSLRAEDTAVYYCAKNGESGPLDYWYLDLWGRGTLVTVSSTREDLKNVFPPEVAVFEPSEAEISHTQKATLVCLATGFYPDHVELSWWVNGKEVHSGVCTDPQPLKEQPALNDSRYCLSSRLRVSATFWQNPRNHFRCQVQFYGLSENDEWTQDRAKPVTQIVSAEAWGRADCDVKLVEKSFETDTNLNFQNLSVIGFRILLLKVAGFNLLMTLRLWSS

SEQ ID NO: 12938 - protein, 767 aa, synthetic construct
MALPVTALLLPLALLLHAARPEVQLVESGGGLVQPGGSLRLSCAASGFSFSDFWMSWVRQAPGKGLEWVATISQAGSEKDYVDSVKGRFTISRDNAKKSLYLQMNSLRAEDTAVYYCASGVYSFDYRGQGTLVTVSSGTGGGGSGGGGSGGGGSEFSYELTQPPSVSGTPGQRVAISCSGSSSNIGTRMVTWYQHVPGTAPKLLIFNNNQRPSGVPDRFSASKSGTSASLAIIGLQSDDEADYYCATWDDNVKSYVFGTGTKVTVLGSRLEIQNPDPAVYQLRDSKSSDKSVCLFTDFDSQTNVSQSKDSDVYITDKCVLDMRSMDFKSNSAVAWSNKSDFACANAFNNSIIPEDTFFPSPESSCGFTSESYQQGVLSATILYEILLGKATLYAVLVSALVLMAMVKRKDSRGRAKRSGSGVKQTLNFDLLKLAGDVESNPGPTSMDWIWRILFLVGAATGAHSFELEMAQVQLQQWGAGLLKPSETLSLTCAVYGGSFSGYYWSWIRQPPGKGLEWIGEINHSGSTNYNPSLKSRVTISVDTSKNQFSLKLSSVTAADTAVYYCARAPQSWYVGDVWGQGTLVTVSSTREDLKNVFPPEVAVFEPSEAEISHTQKATLVCLATGFYPDHVELSWWVNGKEVHSGVCTDPQPLKEQPALNDSRYCLSSRLRVSATFWQNPRNHFRCQVQFYGLSENDEWTQDRAKPVTQIVSAEAWGRADCDVKLVEKSFETDTNLNFQNLSVIGFRILLLKVAGFNLLMTLRLWSS

SEQ ID NO: 12939 - protein, 764 aa, synthetic construct
MALPVTALLLPLALLLHAARPEVQLVESGGGLVQPGGSLRLSCAASGFSFSDFWMSWVRQAPGKGLEWVATISQAGSEKDYVDSVKGRFTISRDNAKKSLYLQMNSLRAEDTAVYYCASGVYSFDYRGQGTLVTVSSGTGGGGSGGGGSGGGGSEFQSVLTQPPSLSVAPGKTASITCGGNNIGMKSVHWYQQRPGQAPVLVIYYDSDRPSGIPGRFSGSNSGNTATLTISRVEAGDEADYYCQVWDTTGDHPGYVFGTGTKVTVLLEIQNPDPAVYQLRDSKSSDKSVCLFTDFDSQTNVSQSKDSDVYITDKCVLDMRSMDFKSNSAVAWSNKSDFACANAFNNSIIPEDTFFPSPESSCGFTSESYQQGVLSATILYEILLGKATLYAVLVSALVLMAMVKRKDSRGRAKRSGSGVKQTLNFDLLKLAGDVESNPGPTSMDWIWRILFLVGAATGAHSFEQVQLVQSGAEVKKPGSSVKVSCKASGGTFSSYAISWVRQAPGQGLEWMGGIIPIFGTANYAQKFQGRVTITADESTSTAYMELSSLRSEDTAVYYCARGVYGYSGSAPYDEWGQGTLVTVSSTREDLKNVFPPEVAVFEPSEAEISHTQKATLVCLATGFYPDHVELSWWVNGKEVHSGVCTDPQPLKEQPALNDSRYCLSSRLRVSATFWQNPRNHFRCQVQFYGLSENDEWTQDRAKPVTQIVSAEAWGRADCDVKLVEKSFETDTNLNFQNLSVIGFRILLLKVAGFNLLMTLRLWSS

SEQ ID NO: 12940 - protein, 762 aa, synthetic construct
MALPVTALLLPLALLLHAARPEVQLVESGGGLVQPGGSLRLSCAASGFSFSDFWMSWVRQAPGKGLEWVATISQAGSEKDYVDSVKGRFTISRDNAKKSLYLQMNSLRAEDTAVYYCASGVYSFDYRGQGTLVTVSSGTGGGGSGGGGSGGGGSEFEVQLVESGGGLVQPGRSLRLSCAASGFTFDDYAMHWVRQAPGKGLEWVSGISWNSGSIGYADSVKGRFTISRDNAKNSLYLQMNSLRAEDTALYYCAKDKGGGYYDFWSGSDYWGQGTLVTVSSLEIQNPDPAVYQLRDSKSSDKSVCLFTDFDSQTNVSQSKDSDVYITDKCVLDMRSMDFKSNSAVAWSNKSDFACANAFNNSIIPEDTFFPSPESSCGFTSESYQQGVLSATILYEILLGKATLYAVLVSALVLMAMVKRKDSRGRAKRSGSGVKQTLNFDLLKLAGDVESNPGPTSMDWIWRILFLVGAATGAHSFESSELTQDPAVSVALGQTVRITCQGDSLRSYYASWYQQKPGQAPVLVIYGKNNRPSGIPDRFSGSSSGNTASLTITGAQAEDEADYYCNSRDSSGWVFGGGTKLTVLTREDLKNVFPPEVAVFEPSEAEISHTQKATLVCLATGFYPDHVELSWWVNGKEVHSGVCTDPQPLKEQPALNDSRYCLSSRLRVSATFWQNPRNHFRCQVQFYGLSENDEWTQDRAKPVTQIVSAEAWGRADCDVKLVEKSFETDTNLNFQNLSVIGFRILLLKVAGFNLLMTLRLWSS

SEQ ID NO: 12941 - protein, 771 aa, synthetic construct
MALPVTALLLPLALLLHAARPEVQLVESGGGLVQPGGSLRLSCAASGFSFSDFWMSWVRQAPGKGLEWVATISQAGSEKDYVDSVKGRFTISRDNAKKSLYLQMNSLRAEDTAVYYCASGVYSFDYRGQGTLVTVSSGTGGGGSGGGGSGGGGSEFEVQLQQSGPGLVKPSQTLSLTCAISGDSVLSNSDTWNWIRQSPSRGLEWLGRTYHRSTWYDDYASSVRGRVSINVDTSKNQYSLQLNAVTPEDTGVYYCARDRLQDGNSWSDAFDVWGQGTMVTVSSLEIQNPDPAVYQLRDSKSSDKSVCLFTDFDSQTNVSQSKDSDVYITDKCVLDMRSMDFKSNSAVAWSNKSDFACANAFNNSIIPEDTFFPSPESSCGFTSESYQQGVLSATILYEILLGKATLYAVLVSALVLMAMVKRKDSRGRAKRSGSGVKQTLNFDLLKLAGDVESNPGPTSMDWIWRILFLVGAATGAHSFEQSALTQPASVSGSPGQSITISCTGTSSDVGGYNYVSWYQQHPGKAPKLMIYDVSNRPSGVSNRFSGSKSGNTASLTISGLQAEDEADYYCSSYTSSSTLVYVFGTGTKVTVLTREDLKNVFPPEVAVFEPSEAEISHTQKATLVCLATGFYPDHVELSWWVNGKEVHSGVCTDPQPLKEQPALNDSRYCLSSRLRVSATFWQNPRNHFRCQVQFYGLSENDEWTQDRAKPVTQIVSAEAWGRADCDVKLVEKSFETDTNLNFQNLSVIGFRILLLKVAGFNLLMTLRLWSS

SEQ ID NO: 12942 - protein, 749 aa, synthetic construct
MALPVTALLLPLALLLHAARPEVQLVESGGGLVQPGGSLRLSCAASGFSFSDFWMSWVRQAPGKGLEWVATISQAGSEKDYVDSVKGRFTISRDNAKKSLYLQMNSLRAEDTAVYYCASGVYSFDYRGQGTLVTVSSGTGGGGSGGGGSGGGGSEFQVQLVQSGAEVKKPGASVKVSCKASGYTFTSYDINWVRQATGQGLEWMGWMNPNSGNTGYAQKFQGRVTMTRNTSISTAYMELSSLRSEDTAVYYCARGDSTKVEIKLEIQNPDPAVYQLRDSKSSDKSVCLFTDFDSQTNVSQSKDSDVYITDKCVLDMRSMDFKSNSAVAWSNKSDFACANAFNNSIIPEDTFFPSPESSCGFTSESYQQGVLSATILYEILLGKATLYAVLVSALVLMAMVKRKDSRGRAKRSGSGVKQTLNFDLLKLAGDVESNPGPTSMDWIWRILFLVGAATGAHSFEQSVLTQPRSVSGSPGQSVTISCTGTSSDVGGYNYVSWYQQHPGEAPKLIIYDADKRPSGISNRFSSGKSGNTASLTISGLQVEDEADYYCCSYAGGSTWVFGGGTKVTVLTREDLKNVFPPEVAVFEPSEAEISHTQKATLVCLATGFYPDHVELSWWVNGKEVHSGVCTDPQPLKEQPALNDSRYCLSSRLRVSATFWQNPRNHFRCQVQFYGLSENDEWTQDRAKPVTQIVSAEAWGRADCDVKLVEKSFETDTNLNFQNLSVIGFRILLLKVAGFNLLMTLRLWSS

SEQ ID NO: 12943 - protein, 771 aa, synthetic construct
MALPVTALLLPLALLLHAARPEVQLVESGGGLVQPGGSLRLSCAASGFSFSDFWMSWVRQAPGKGLEWVATISQAGSEKDYVDSVKGRFTISRDNAKKSLYLQMNSLRAEDTAVYYCASGVYSFDYRGQGTLVTVSSGTGGGGSGGGGSGGGGSEFEVQLQQSGPGLVKPSQTLSLTCAISGDSVSSNSAAWNWIRQSPSRGLEWLGRTYYRSKWYSDYAVSVKSRITINPDTSKNQFSLQLNSVTPEDTAVYYCARDPYDFWSGYPDAFDIWGQGTMVTVSSLEIQNPDPAVYQLRDSKSSDKSVCLFTDFDSQTNVSQSKDSDVYITDKCVLDMRSMDFKSNSAVAWSNKSDFACANAFNNSIIPEDTFFPSPESSCGFTSESYQQGVLSATILYEILLGKATLYAVLVSALVLMAMVKRKDSRGRAKRSGSGVKQTLNFDLLKLAGDVESNPGPTSMDWIWRILFLVGAATGAHSFEQSALTQPASVSGSPGQSITISCTGTSSDVGGYNYVSWYQQHPGKAPKVIISEVNNRPSGVSHRFSGSKSGNTASLTISGLQAEDEADYFCSSYTSGRTLYVFGTGSKVTVLGTREDLKNVFPPEVAVFEPSEAEISHTQKATLVCLATGFYPDHVELSWWVNGKEVHSGVCTDPQPLKEQPALNDSRYCLSSRLRVSATFWQNPRNHFRCQVQFYGLSENDEWTQDRAKPVTQIVSAEAWGRADCDVKLVEKSFETDTNLNFQNLSVIGFRILLLKVAGFNLLMTLRLWSS

SEQ ID NO: 12944 - protein, 770 aa, synthetic construct
MALPVTALLLPLALLLHAARPEVQLVESGGGLVQPGGSLRLSCAASGFSFSDFWMSWVRQAPGKGLEWVATISQAGSEKDYVDSVKGRFTISRDNAKKSLYLQMNSLRAEDTAVYYCASGVYSFDYRGQGTLVTVSSGTGGGGSGGGGSGGGGSEFQSALTQPASASGSPGQSVTISCTGTSSDVGGYNYVSWYQQHPGKAPKLMIYDVSNRPSGVSNRFSGSKSGNTASLTISGLQAEDEADYYCSSYTSSSTLYVFGTGTQLTVLLEIQNPDPAVYQLRDSKSSDKSVCLFTDFDSQTNVSQSKDSDVYITDKCVLDMRSMDFKSNSAVAWSNKSDFACANAFNNSIIPEDTFFPSPESSCGFTSESYQQGVLSATILYEILLGKATLYAVLVSALVLMAMVKRKDSRGRAKRSGSGVKQTLNFDLLKLAGDVESNPGPTSMDWIWRILFLVGAATGAHSFEEVQLQQSGPGLVKPSQTLSLTCAISGDSMLSNSDTWNWIRQSPSRGLEWLGRTYHRSTWYDDYASSVRGRVSINVDTSKNQYSLQLNAVTPEDTGVYYCARVRLQDGNSWSDAFDVWGQGTMVTVSSTREDLKNVFPPEVAVFEPSEAEISHTQKATLVCLATGFYPDHVELSWWVNGKEVHSGVCTDPQPLKEQPALNDSRYCLSSRLRVSATFWQNPRNHFRCQVQFYGLSENDEWTQDRAKPVTQIVSAEAWGRADCDVKLVEKSFETDTNLNFQNLSVIGFRILLLKVAGFNLLMTLRLWSS

SEQ ID NO: 12945 - protein, 770 aa, synthetic construct
MALPVTALLLPLALLLHAARPEVQLVESGGGLVQPGGSLRLSCAASGFSFSDFWMSWVRQAPGKGLEWVATISQAGSEKDYVDSVKGRFTISRDNAKKSLYLQMNSLRAEDTAVYYCASGVYSFDYRGQGTLVTVSSGTGGGGSGGGGSGGGGSEFDVMLTQTPLSLPVSLGDQASISCRSSQSILHSTGDTYLEWYLQKPGQSPKLLINKVSNRLSGVPDRFSGSGSGTDFTLKISRVEAEDLGVYYCFQGSHVPWTFGGGTKLEIKRADAAPTVSIFPLEIQNPDPAVYQLRDSKSSDKSVCLFTDFDSQTNVSQSKDSDVYITDKCVLDMRSMDFKSNSAVAWSNKSDFACANAFNNSIIPEDTFFPSPESSCGFTSESYQQGVLSATILYEILLGKATLYAVLVSALVLMAMVKRKDSRGRAKRSGSGVKQTLNFDLLKLAGDVESNPGPTSMDWIWRILFLVGAATGAHSFEQVKLQQSGPSLVKPGASVKMSCKASGYTFTDFYMKWVKQSHGKSLEWIGDINPNIGDTFYNQKFKGKATLTVDKSSSTAYMQLNSLTSEDSAVYFCSVGYFDVWGAGTTVTVSSTREDLKNVFPPEVAVFEPSEAEISHTQKATLVCLATGFYPDHVELSWWVNGKEVHSGVCTDPQPLKEQPALNDSRYCLSSRLRVSATFWQNPRNHFRCQVQFYGLSENDEWTQDRAKPVTQIVSAEAWGRADCDVKLVEKSFETDTNLNFQNLSVIGFRILLLKVAGFNLLMTLRLWSS

SEQ ID NO: 12946 - protein, 766 aa, synthetic construct
MALPVTALLLPLALLLHAARPEVQLVESGGGLVQPGGSLRLSCAASGFSFSDFWMSWVRQAPGKGLEWVATISQAGSEKDYVDSVKGRFTISRDNAKKSLYLQMNSLRAEDTAVYYCASGVYSFDYRGQGTLVTVSSGTGGGGSGGGGSGGGGSEFEIVLTQSPATLSLSPGERATLSCRASQSVSIYLAWYQQKPGQAPRLLIYDASNRATGIPARFSGSGSGTDFTLTISSLEPEDFAVYYCQQRSNWPPFTFGPGTKVDIKLEIQNPDPAVYQLRDSKSSDKSVCLFTDFDSQTNVSQSKDSDVYITDKCVLDMRSMDFKSNSAVAWSNKSDFACANAFNNSIIPEDTFFPSPESSCGFTSESYQQGVLSATILYEILLGKATLYAVLVSALVLMAMVKRKDSRGRAKRSGSGVKQTLNFDLLKLAGDVESNPGPTSMDWIWRILFLVGAATGAHSFEQVQLVESGGGVVQPGRSLRLSCAASGFTFSSYGMHWVRQAPGKGLEWVAVIWDDGSNKYYVDSVKGRFTISRDNSKNTLYLQMNSLRAEDTAVYYCARDDYYGSGSFNSYYGTDVWGQGTTVTVSSTREDLKNVFPPEVAVFEPSEAEISHTQKATLVCLATGFYPDHVELSWWVNGKEVHSGVCTDPQPLKEQPALNDSRYCLSSRLRVSATFWQNPRNHFRCQVQFYGLSENDEWTQDRAKPVTQIVSAEAWGRADCDVKLVEKSFETDTNLNFQNLSVIGFRILLLKVAGFNLLMTLRLWSS

SEQ ID NO: 12947 - protein, 751 aa, synthetic construct
MALPVTALLLPLALLLHAARPEVQLVESGGGLVQPGGSLRLSCAASGFSFSDFWMSWVRQAPGKGLEWVATISQAGSEKDYVDSVKGRFTISRDNAKKSLYLQMNSLRAEDTAVYYCASGVYSFDYRGQGTLVTVSSGTGGGGSGGGGSGGGGSEFDIQMTQSPSSLSASVGDRVTITCRASQGISSWLAWYQQKPEKAPKSLIYAASSLQSGVPSRFSGSGSGTDFTLTISSLQPEDFATYYCQQYNSYPYTFGQGTKLEIKLEIQNPDPAVYQLRDSKSSDKSVCLFTDFDSQTNVSQSKDSDVYITDKCVLDMRSMDFKSNSAVAWSNKSDFACANAFNNSIIPEDTFFPSPESSCGFTSESYQQGVLSATILYEILLGKATLYAVLVSALVLMAMVKRKDSRGRAKRSGSGVKQTLNFDLLKLAGDVESNPGPTSMDWIWRILFLVGAATGAHSFEEVQLVQSGGGLVHPGGSLRLSCAGSGFTFSTYLMYWVRQAPGKTLEWVSAIGSGGDTYYADSVKGRFTISRDNAKNSLYLQMNSLRAEDMAVYYCARGLGYWGQGTLVTVSSTREDLKNVFPPEVAVFEPSEAEISHTQKATLVCLATGFYPDHVELSWWVNGKEVHSGVCTDPQPLKEQPALNDSRYCLSSRLRVSATFWQNPRNHFRCQVQFYGLSENDEWTQDRAKPVTQIVSAEAWGRADCDVKLVEKSFETDTNLNFQNLSVIGFRILLLKVAGFNLLMTLRLWSS

SEQ ID NO: 12948 - protein, 770 aa, synthetic construct
MALPVTALLLPLALLLHAARPEVQLVESGGGLVQPGGSLRLSCAASGFSFSDFWMSWVRQAPGKGLEWVATISQAGSEKDYVDSVKGRFTISRDNAKKSLYLQMNSLRAEDTAVYYCASGVYSFDYRGQGTLVTVSSGTGGGGSGGGGSGGGGSEFLPVLTQPPSVSVAPGKTARITCGGNNIGSKSVHWYQQKPGQAPVLVVYDDSDRPSGIPERFSGSNSGNTATLTISRVEAGDEADYYCQVWDSSSDYVVFGGGTKLTVLLEIQNPDPAVYQLRDSKSSDKSVCLFTDFDSQTNVSQSKDSDVYITDKCVLDMRSMDFKSNSAVAWSNKSDFACANAFNNSIIPEDTFFPSPESSCGFTSESYQQGVLSATILYEILLGKATLYAVLVSALVLMAMVKRKDSRGRAKRSGSGVKQTLNFDLLKLAGDVESNPGPTSMDWIWRILFLVGAATGAHSFEEVQLVQSGAEVKKPGESLKISCKGSGYSFTSYWIGWVRQMPGKGLEWMGIIYPGDSDTRYSPSFQGQVTISADKSISTAYLQWSSLKASDTAMYYCARQVWGWQGGMYPRSNWWYNLDSWGQGTLVTVSSTREDLKNVFPPEVAVFEPSEAEISHTQKATLVCLATGFYPDHVELSWWVNGKEVHSGVCTDPQPLKEQPALNDSRYCLSSRLRVSATFWQNPRNHFRCQVQFYGLSENDEWTQDRAKPVTQIVSAEAWGRADCDVKLVEKSFETDTNLNFQNLSVIGFRILLLKVAGFNLLMTLRLWSS

SEQ ID NO: 12949 - protein, 763 aa, synthetic construct
MALPVTALLLPLALLLHAARPEVQLVESGGGLVQPGGSLRLSCAASGFSFSDFWMSWVRQAPGKGLEWVATISQAGSEKDYVDSVKGRFTISRDNAKKSLYLQMNSLRAEDTAVYYCASGVYSFDYRGQGTLVTVSSGTGGGGSGGGGSGGGGSEFELVMTQSPASLAVSLGQRATISCRASESVDSYGKSFMHWYQLKPGQPPKLLIYRASNLESGVPARFSGSGSRTDFTLTIDPVEADDAATYYCQQNNEDPWTFGGGTKLEIKLEIQNPDPAVYQLRDSKSSDKSVCLFTDFDSQTNVSQSKDSDVYITDKCVLDMRSMDFKSNSAVAWSNKSDFACANAFNNSIIPEDTFFPSPESSCGFTSESYQQGVLSATILYEILLGKATLYAVLVSALVLMAMVKRKDSRGRAKRSGSGVKQTLNFDLLKLAGDVESNPGPTSMDWIWRILFLVGAATGAHSFEEVQLEQSGPELVKPGASVKMSCKASGYTFTNYYMKWVKQSHGKSLEWIGDLNPNNGDTFYNQKFKGKATLTVDKSSNTAYMQLNSLTSEDSAVYYCARTGRYEENAMDYWGQGTSVTVSSTREDLKNVFPPEVAVFEPSEAEISHTQKATLVCLATGFYPDHVELSWWVNGKEVHSGVCTDPQPLKEQPALNDSRYCLSSRLRVSATFWQNPRNHFRCQVQFYGLSENDEWTQDRAKPVTQIVSAEAWGRADCDVKLVEKSFETDTNLNFQNLSVIGFRILLLKVAGFNLLMTLRLWSS

SEQ ID NO: 12950 - protein, 757 aa, synthetic construct
MALPVTALLLPLALLLHAARPEVQLVESGGGLVQPGGSLRLSCAASGFSFSDFWMSWVRQAPGKGLEWVATISQAGSEKDYVDSVKGRFTISRDNAKKSLYLQMNSLRAEDTAVYYCASGVYSFDYRGQGTLVTVSSGTGGGGSGGGGSGGGGSEFDVVMTQSPSSLSASVGDRVTITCMASEDIYIRLAWYQQKPGNAPKLLIYAATSLETGVPSRFSGSGSGTDFTLTISSLQPEDFATYYCQQYWSSPWTFGGGTKVEIKLEIQNPDPAVYQLRDSKSSDKSVCLFTDFDSQTNVSQSKDSDVYITDKCVLDMRSMDFKSNSAVAWSNKSDFACANAFNNSIIPEDTFFPSPESSCGFTSESYQQGVLSATILYEILLGKATLYAVLVSALVLMAMVKRKDSRGRAKRSGSGVKQTLNFDLLKLAGDVESNPGPTSMDWIWRILFLVGAATGAHSFEQVQLQESGPGLVKPSQTLSLTCTVSGYSITSDYTWNWIRQPPGNGLEWIGYITYSGSTSYNPSLKSRVLISVDTSKNQVSLKLSSVTAADTAVYYCARLGRRYTMDYWGQGTTVTVSSTREDLKNVFPPEVAVFEPSEAEISHTQKATLVCLATGFYPDHVELSWWVNGKEVHSGVCTDPQPLKEQPALNDSRYCLSSRLRVSATFWQNPRNHFRCQVQFYGLSENDEWTQDRAKPVTQIVSAEAWGRADCDVKLVEKSFETDTNLNFQNLSVIGFRILLLKVAGFNLLMTLRLWSS

SEQ ID NO: 12951 - protein, 761 aa, synthetic construct; identical to SEQ ID NO: 12814

SEQ ID NO: 12952 - protein, 761 aa, synthetic construct
MALPVTALLLPLALLLHAARPEVQLVESGGGLVQPGGSLRLSCAASGFSFSDFWMSWVRQAPGKGLEWVATISQAGSEKDYVDSVKGRFTISRDNAKKSLYLQMNSLRAEDTAVYYCASGVYSFDYRGQGTLVTVSSGTGGGGSGGGGSGGGGSEFDIVLTQSPATLSLSPGDRATLSCRASESVTILGSHLIYWYQQKPGQAPRLLIQLASNVQTGIPARFSGSGSRTDFTLTISSLEPEDFAVYYCLQSRTIPRTFGQGTKLEIKRLEIQNPDPAVYQLRDSKSSDKSVCLFTDFDSQTNVSQSKDSDVYITDKCVLDMRSMDFKSNSAVAWSNKSDFACANAFNNSIIPEDTFFPSPESSCGFTSESYQQGVLSATILYEILLGKATLYAVLVSALVLMAMVKRKDSRGRAKRSGSGVKQTLNFDLLKLAGDVESNPGPTSMDWIWRILFLVGAATGAHSFEQVQLVQSGSELKKPGESVKISCKASGYTFTHYSMNWVRQAPGQGLEWMGRINTETGEPLYADDFKGRFVFSLDTSASTAYLQISSLKAEDTAVYYCSNDYLYSLDYWGQGTLVTVSSTREDLKNVFPPEVAVFEPSEAEISHTQKATLVCLATGFYPDHVELSWWVNGKEVHSGVCTDPQPLKEQPALNDSRYCLSSRLRVSATFWQNPRNHFRCQVQFYGLSENDEWTQDRAKPVTQIVSAEAWGRADCDVKLVEKSFETDTNLNFQNLSVIGFRILLLKVAGFNLLMTLRLWSS

SEQ ID NO: 12953 - protein, 762 aa, synthetic construct
MALPVTALLLPLALLLHAARPEVQLVESGGGLVQPGGSLRLSCAASGFSFSDFWMSWVRQAPGKGLEWVATISQAGSEKDYVDSVKGRFTISRDNAKKSLYLQMNSLRAEDTAVYYCASGVYSFDYRGQGTLVTVSSGTGGGGSGGGGSGGGGSEFDIQLTQSPSFLSASVGDRVTITCRASQGISTDLNWYQQKPGKAPKLLIYAASNLESGVPSRFSGSGSGTEFTLTISSLQPEDFATYYCQQSYNWPYTFGGGTKVEIKRLEIQNPDPAVYQLRDSKSSDKSVCLFTDFDSQTNVSQSKDSDVYITDKCVLDMRSMDFKSNSAVAWSNKSDFACANAFNNSIIPEDTFFPSPESSCGFTSESYQQGVLSATILYEILLGKATLYAVLVSALVLMAMVKRKDSRGRAKRSGSGVKQTLNFDLLKLAGDVESNPGPTSMDWIWRILFLVGAATGAHSFEEVQLVESGGGLVKPGGSLRLSCAASGFTFSNFEMNWVRQAPGKGLEWVSGISSNGRYINYADSVKGRFTISRDNAKNSLYLQMNSLRAEDTAVYYCARVVDFDQDYNGFDYWGQGTLVTVSSTREDLKNVFPPEVAVFEPSEAEISHTQKATLVCLATGFYPDHVELSWWVNGKEVHSGVCTDPQPLKEQPALNDSRYCLSSRLRVSATFWQNPRNHFRCQVQFYGLSENDEWTQDRAKPVTQIVSAEAWGRADCDVKLVEKSFETDTNLNFQNLSVIGFRILLLKVAGFNLLMTLRLWSS

SEQ ID NO: 12954 - protein, 760 aa, synthetic construct
MALPVTALLLPLALLLHAARPEVQLVESGGGLVQPGGSLRLSCAASGFSFSDFWMSWVRQAPGKGLEWVATISQAGSEKDYVDSVKGRFTISRDNAKKSLYLQMNSLRAEDTAVYYCASGVYSFDYRGQGTLVTVSSGTGGGGSGGGGSGGGGSEFDIQLTQSPSFLSASVGDRVTITCSLSLGISTWRDWFPPRLGRGLEPLTYAASTLQSGVPSRFSGSGSGTEFTLTISSLQPEDFATYYCQQLNSYPLTFGGGTKVEIKRLEIQNPDPAVYQLRDSKSSDKSVCLFTDFDSQTNVSQSKDSDVYITDKCVLDMRSMDFKSNSAVAWSNKSDFACANAFNNSIIPEDTFFPSPESSCGFTSESYQQGVLSATILYEILLGKATLYAVLVSALVLMAMVKRKDSRGRAKRSGSGVKQTLNFDLLKLAGDVESNPGPTSMDWIWRILFLVGAATGAHSFEEVQLVESGGGLVKPGGSLRLSCAASGFTFSTYGMSWVRQAPGKGLEWVAYINNGSGYIYYADSVKGRFTISRDNAKNSLYLQMNSLRAEDTAVYYCARGQWWSGGDFDYWGQGTLVTVSSTREDLKNVFPPEVAVFEPSEAEISHTQKATLVCLATGFYPDHVELSWWVNGKEVHSGVCTDPQPLKEQPALNDSRYCLSSRLRVSATFWQNPRNHFRCQVQFYGLSENDEWTQDRAKPVTQIVSAEAWGRADCDVKLVEKSFETDTNLNFQNLSVIGFRILLLKVAGFNLLMTLRLWSS

SEQ ID NO: 12955 - protein, 761 aa, synthetic construct
MALPVTALLLPLALLLHAARPEVQLVESGGGLVQPGGSLRLSCAASGFSFSDFWMSWVRQAPGKGLEWVATISQAGSEKDYVDSVKGRFTISRDNAKKSLYLQMNSLRAEDTAVYYCASGVYSFDYRGQGTLVTVSSGTGGGGSGGGGSGGGGSEFEIVLTQSPATLSLSPGERATLSCSASSSVSYMYWYQQKPGQAPRLLIYRTSNLASGIPARFSGSGSGTDFTLTISSLEPEDFAVYYCQQYHSYPTTFGQGTKVEIKRTVLEIQNPDPAVYQLRDSKSSDKSVCLFTDFDSQTNVSQSKDSDVYITDKCVLDMRSMDFKSNSAVAWSNKSDFACANAFNNSIIPEDTFFPSPESSCGFTSESYQQGVLSATILYEILLGKATLYAVLVSALVLMAMVKRKDSRGRAKRSGSGVKQTLNFDLLKLAGDVESNPGPTSMDWIWRILFLVGAATGAHSFEEVQLVESGGGLVQPGGSLRLSCAASGFSFNTYAMNWVRQAPGKGLEWVSHIRSKSNNFATYYADSVKDRFTISRDNAKNSLYLQMNSLRAEDTAVYYCARQGGDFPMDYWGQGTLVTVSSTREDLKNVFPPEVAVFEPSEAEISHTQKATLVCLATGFYPDHVELSWWVNGKEVHSGVCTDPQPLKEQPALNDSRYCLSSRLRVSATFWQNPRNHFRCQVQFYGLSENDEWTQDRAKPVTQIVSAEAWGRADCDVKLVEKSFETDTNLNFQNLSVIGFRILLLKVAGFNLLMTLRLWSS

SEQ ID NO: 12956 - protein, 757 aa, synthetic construct
MALPVTALLLPLALLLHAARPEVQLVESGGGLVQPGGSLRLSCAASGFSFSDFWMSWVRQAPGKGLEWVATISQAGSEKDYVDSVKGRFTISRDNAKKSLYLQMNSLRAEDTAVYYCASGVYSFDYRGQGTLVTVSSGTGGGGSGGGGSGGGGSEFDVVMTQSPSSLSASVGDRVTITCKASEDIYIRLAWYQQKPGKAPKLLIYAATSLETGVPSRFSGSGSGTDFTLTISSLQPEDFATYYCQQYWTTPWTFGGGTKVEIKLEIQNPDPAVYQLRDSKSSDKSVCLFTDFDSQTNVSQSKDSDVYITDKCVLDMRSMDFKSNSAVAWSNKSDFACANAFNNSIIPEDTFFPSPESSCGFTSESYQQGVLSATILYEILLGKATLYAVLVSALVLMAMVKRKDSRGRAKRSGSGVKQTLNFDLLKLAGDVESNPGPTSMDWIWRILFLVGAATGAHSFEQVQLQESGPGLVKPSQTLSLTCTVSGYSITIDYTWNWIRQPPGKGLEWIGYITYSGSTDYNPSLKSRVLISVDTSKNQVSLKLSSVTAADTAVYYCARLGRRYALDYWGQGTTVTVSSTREDLKNVFPPEVAVFEPSEAEISHTQKATLVCLATGFYPDHVELSWWVNGKEVHSGVCTDPQPLKEQPALNDSRYCLSSRLRVSATFWQNPRNHFRCQVQFYGLSENDEWTQDRAKPVTQIVSAEAWGRADCDVKLVEKSFETDTNLNFQNLSVIGFRILLLKVAGFNLLMTLRLWSS

SEQ ID NO: 12957 - protein, 761 aa, synthetic construct
MALPVTALLLPLALLLHAARPEVQLVESGGGLVQPGGSLRLSCAASGFSFSDFWMSWVRQAPGKGLEWVATISQAGSEKDYVDSVKGRFTISRDNAKKSLYLQMNSLRAEDTAVYYCASGVYSFDYRGQGTLVTVSSGTGGGGSGGGGSGGGGSEFDIQMTQTTSSLSASLGDRVTISCRASQDISNYLNWYQQKPDGTVKLLIYYTSILHSGVPSRFSGSGSGTDYSLTISNLEQEDFATYFCQQGNTLPWTFGGGTKLEIKALEIQNPDPAVYQLRDSKSSDKSVCLFTDFDSQTNVSQSKDSDVYITDKCVLDMRSMDFKSNSAVAWSNKSDFACANAFNNSIIPEDTFFPSPESSCGFTSESYQQGVLSATILYEILLGKATLYAVLVSALVLMAMVKRKDSRGRAKRSGSGVKQTLNFDLLKLAGDVESNPGPTSMDWIWRILFLVGAATGAHSFEVQLVESGGGLVKPGGSLKLSCAASGFAFSIYDMSWVRQTPEKRLEWVAYISSGGGTYYPDTVKGRFTISRDNAKNTLYLQMSSLKSEDTAMYYCARHSGYGTHWGVLFAYWGQGTLVTVSATREDLKNVFPPEVAVFEPSEAEISHTQKATLVCLATGFYPDHVELSWWVNGKEVHSGVCTDPQPLKEQPALNDSRYCLSSRLRVSATFWQNPRNHFRCQVQFYGLSENDEWTQDRAKPVTQIVSAEAWGRADCDVKLVEKSFETDTNLNFQNLSVIGFRILLLKVAGFNLLMTLRLWSS

SEQ ID NO: 12958 - protein, 772 aa, synthetic construct
MALPVTALLLPLALLLHAARPEVQLVESGGGLVQPGGSLRLSCAASGFSFSDFWMSWVRQAPGKGLEWVATISQAGSEKDYVDSVKGRFTISRDNAKKSLYLQMNSLRAEDTAVYYCASGVYSFDYRGQGTLVTVSSGTGGGGSGGGGSGGGGSEFDIVMTQSPDSLAVSLGERATINCKSSQSLLYRSNQKNYLAWYQQKPGQPPKLLIYWASTRESGVPDRFSGSGSGTDFTLTISSLQAEDVAVYYCQQYYNYPRTFGQGTKVEIKRTVLEIQNPDPAVYQLRDSKSSDKSVCLFTDFDSQTNVSQSKDSDVYITDKCVLDMRSMDFKSNSAVAWSNKSDFACANAFNNSIIPEDTFFPSPESSCGFTSESYQQGVLSATILYEILLGKATLYAVLVSALVLMAMVKRKDSRGRAKRSGSGVKQTLNFDLLKLAGDVESNPGPTSMDWIWRILFLVGAATGAHSFEEVQLLESGGGLVQPGGSLRLSCAASGYSITSDYAWNWVRQAPGKGLEWVSYISNSGSTSYNPSLKSRFTISRDNSKNTLYLQMNSLRAEDTAVYYCAKERNYDYDDYYYAMDYWGQGTLVTVSSTREDLKNVFPPEVAVFEPSEAEISHTQKATLVCLATGFYPDHVELSWWVNGKEVHSGVCTDPQPLKEQPALNDSRYCLSSRLRVSATFWQNPRNHFRCQVQFYGLSENDEWTQDRAKPVTQIVSAEAWGRADCDVKLVEKSFETDTNLNFQNLSVIGFRILLLKVAGFNLLMTLRLWSS

SEQ ID NO: 12959 - protein, 765 aa, synthetic construct
MALPVTALLLPLALLLHAARPEVQLVESGGGLVQPGGSLRLSCAASGFSFSDFWMSWVRQAPGKGLEWVATISQAGSEKDYVDSVKGRFTISRDNAKKSLYLQMNSLRAEDTAVYYCASGVYSFDYRGQGTLVTVSSGTGGGGSGGGGSGGGGSEFDVVMTQSPLSLPVTLGQPASISCRSSQSLLHSSGNTYLEWYQQRPGQSPRPLIYKISTRFSGVPDRFSGSGSGTDFTLKISRVEAEDVGVYYCFQGSHVPYTFGGGTKVEIKRLEIQNPDPAVYQLRDSKSSDKSVCLFTDFDSQTNVSQSKDSDVYITDKCVLDMRSMDFKSNSAVAWSNKSDFACANAFNNSIIPEDTFFPSPESSCGFTSESYQQGVLSATILYEILLGKATLYAVLVSALVLMAMVKRKDSRGRAKRSGSGVKQTLNFDLLKLAGDVESNPGPTSMDWIWRILFLVGAATGAHSFEQVQLVQSGAEVKKPGASVKVSCKASGLTIEDYYMHWVRQAPGQGLEWMGWIDPENGDTEYGPKFQGRVTMTRDTSINTAYMELSRLRSDDTAVYYCAVHNAHYGTWFAYWGQGTLVTVSSTREDLKNVFPPEVAVFEPSEAEISHTQKATLVCLATGFYPDHVELSWWVNGKEVHSGVCTDPQPLKEQPALNDSRYCLSSRLRVSATFWQNPRNHFRCQVQFYGLSENDEWTQDRAKPVTQIVSAEAWGRADCDVKLVEKSFETDTNLNFQNLSVIGFRILLLKVAGFNLLMTLRLWSS

SEQ ID NO: 12960 - protein, 757 aa, synthetic construct
MALPVTALLLPLALLLHAARPEVQLVESGGGLVQPGGSLRLSCAASGFSFSDFWMSWVRQAPGKGLEWVATISQAGSEKDYVDSVKGRFTISRDNAKKSLYLQMNSLRAEDTAVYYCASGVYSFDYRGQGTLVTVSSGTGGGGSGGGGSGGGGSEFDIQMTQSPSSLSASVGDRVTITCRASENIYSNLAWYQQKPGKAPKLLIYAATNLADGVPSRFSGSGSGTDFTLTISSLQPEDFATYYCQHFWGTPTFGQGTKVEIKRTVLEIQNPDPAVYQLRDSKSSDKSVCLFTDFDSQTNVSQSKDSDVYITDKCVLDMRSMDFKSNSAVAWSNKSDFACANAFNNSIIPEDTFFPSPESSCGFTSESYQQGVLSATILYEILLGKATLYAVLVSALVLMAMVKRKDSRGRAKRSGSGVKQTLNFDLLKLAGDVESNPGPTSMDWIWRILFLVGAATGAHSFEEVQLVESGGGLVQPGGSLRLSCAASGFSLTNYGVHWVRQAPGKGLEWVSVIWSGGSTDYNAAFISRFTISADTSKNTAYLQMNSLRAEDTAVYYCARELIHAMDNWGQGTLVTVSSTREDLKNVFPPEVAVFEPSEAEISHTQKATLVCLATGFYPDHVELSWWVNGKEVHSGVCTDPQPLKEQPALNDSRYCLSSRLRVSATFWQNPRNHFRCQVQFYGLSENDEWTQDRAKPVTQIVSAEAWGRADCDVKLVEKSFETDTNLNFQNLSVIGFRILLLKVAGFNLLMTLRLWSS

SEQ ID NO: 12961 - protein, 764 aa, synthetic construct
MALPVTALLLPLALLLHAARPEVQLVESGGGLVQPGGSLRLSCAASGFSFSDFWMSWVRQAPGKGLEWVATISQAGSEKDYVDSVKGRFTISRDNAKKSLYLQMNSLRAEDTAVYYCASGVYSFDYRGQGTLVTVSSGTGGGGSGGGGSGGGGSEFDFVMTQSPLSLPVTPGEPASISCRSSQSIVHSNGNTYLEWYLQKPGQSPQLLIYKVSNRFSGVPDRFSGSGSGTDFTLKISRVEAEDVGVYYCFQGSHVPLTFGQGTKLEIKRLEIQNPDPAVYQLRDSKSSDKSVCLFTDFDSQTNVSQSKDSDVYITDKCVLDMRSMDFKSNSAVAWSNKSDFACANAFNNSIIPEDTFFPSPESSCGFTSESYQQGVLSATILYEILLGKATLYAVLVSALVLMAMVKRKDSRGRAKRSGSGVKQTLNFDLLKLAGDVESNPGPTSMDWIWRILFLVGAATGAHSFEEVQLVESGAEVKKPGASVKVSCKASGYTFTSYWIHWVRQAPGQGLEWMGENDPSNGRTNYNEKFKNRVTLTVDTSISTAYMELSRLRSDDTAVYYCARGPNYFYSMDYWGQGTMVTVSSTREDLKNVFPPEVAVFEPSEAEISHTQKATLVCLATGFYPDHVELSWWVNGKEVHSGVCTDPQPLKEQPALNDSRYCLSSRLRVSATFWQNPRNHFRCQVQFYGLSENDEWTQDRAKPVTQIVSAEAWGRADCDVKLVEKSFETDTNLNFQNLSVIGFRILLLKVAGFNLLMTLRLWSS

SEQ ID NO: 12962 - protein, 757 aa, synthetic construct
MALPVTALLLPLALLLHAARPEVQLVESGGGLVQPGGSLRLSCAASGFSFSDFWMSWVRQAPGKGLEWVATISQAGSEKDYVDSVKGRFTISRDNAKKSLYLQMNSLRAEDTAVYYCASGVYSFDYRGQGTLVTVSSGTGGGGSGGGGSGGGGSEFDIQLTQSPSFLSASVGDRVTITCSARSSISFMYWYQQKPGKAPKLLIYDTSNLASGVPSRFSGSGSGTEFTLTISSLEAEDAATYYCQQWSSYPLTFGQGTKLEIKLEIQNPDPAVYQLRDSKSSDKSVCLFTDFDSQTNVSQSKDSDVYITDKCVLDMRSMDFKSNSAVAWSNKSDFACANAFNNSIIPEDTFFPSPESSCGFTSESYQQGVLSATILYEILLGKATLYAVLVSALVLMAMVKRKDSRGRAKRSGSGVKQTLNFDLLKLAGDVESNPGPTSMDWIWRILFLVGAATGAHSFEQVQLVQSGAEVKKPGASVKVSCKASGYTFTGSWMNWVRQAPGQGLEWIGRIYPGDGETNYNGKFKDRVTITADKSTSTAYMELSSLRSEDTAVYYCARIYGNNVYFDVWGQGTTVTVSSTREDLKNVFPPEVAVFEPSEAEISHTQKATLVCLATGFYPDHVELSWWVNGKEVHSGVCTDPQPLKEQPALNDSRYCLSSRLRVSATFWQNPRNHFRCQVQFYGLSENDEWTQDRAKPVTQIVSAEAWGRADCDVKLVEKSFETDTNLNFQNLSVIGFRILLLKVAGFNLLMTLRLWSS

SEQ ID NO: 12963 - protein, 765 aa, synthetic construct
MALPVTALLLPLALLLHAARPEVQLVESGGGLVQPGGSLRLSCAASGFSFSDFWMSWVRQAPGKGLEWVATISQAGSEKDYVDSVKGRFTISRDNAKKSLYLQMNSLRAEDTAVYYCASGVYSFDYRGQGTLVTVSSGTGGGGSGGGGSGGGGSEFQLVLTQSPSASASLGSSVKLTCTLSSGHKTDTIDWYQQQPGKAPRYLMKLEGSGSYNKGSGVPDRFSGSSSGADWYLTISSLQSEDEADYYCGTDYPGNYLFGGGTQLTVLGLEIQNPDPAVYQLRDSKSSDKSVCLFTDFDSQTNVSQSKDSDVYITDKCVLDMRSMDFKSNSAVAWSNKSDFACANAFNNSIIPEDTFFPSPESSCGFTSESYQQGVLSATILYEILLGKATLYAVLVSALVLMAMVKRKDSRGRAKRSGSGVKQTLNFDLLKLAGDVESNPGPTSMDWIWRILFLVGAATGAHSFEQEQLVESGGGLVQPGGSLRLSCAASGFTFSDYYMSWIRQAPGKGLEWVATIYPSSGKTYYADSAKGRLTISSDNAKDSLYLQMNSLRAEDTAVYYCTRDSYADDAALFDIWGQGTTVTVSSTREDLKNVFPPEVAVFEPSEAEISHTQKATLVCLATGFYPDHVELSWWVNGKEVHSGVCTDPQPLKEQPALNDSRYCLSSRLRVSATFWQNPRNHFRCQVQFYGLSENDEWTQDRAKPVTQIVSAEAWGRADCDVKLVEKSFETDTNLNFQNLSVIGFRILLLKVAGFNLLMTLRLWSS

SEQ ID NO: 12964 - protein, 757 aa, synthetic construct; identical to SEQ ID NO: 12960

SEQ ID NO: 12965 - protein, 764 aa, synthetic construct; identical to SEQ ID NO: 12961

SEQ ID NO: 12966 - protein, 757 aa, synthetic construct; identical to SEQ ID NO: 12962

SEQ ID NO: 12967 - protein, 765 aa, synthetic construct; identical to SEQ ID NO: 12963

SEQ ID NO: 12968 - protein, 764 aa, synthetic construct
MALPVTALLLPLALLLHAARPEVQLVESGGGLVQPGGSLRLSCAASGFSFSDFWMSWVRQAPGKGLEWVATISQAGSEKDYVDSVKGRFTISRDNAKKSLYLQMNSLRAEDTAVYYCASGVYSFDYRGQGTLVTVSSGTGGGGSGGGGSGGGGSEFDIQLTQSPSSLSASVGDRVSFTCQASQDINNFLNWYQQKPGKAPKLLIYDASNLETGVPSRFSGSGSGTDFTFTISSLQPEDIATYYCQQYGNLPFTFGGGTKVEIKRLEIQNPDPAVYQLRDSKSSDKSVCLFTDFDSQTNVSQSKDSDVYITDKCVLDMRSMDFKSNSAVAWSNKSDFACANAFNNSIIPEDTFFPSPESSCGFTSESYQQGVLSATILYEILLGKATLYAVLVSALVLMAMVKRKDSRGRAKRSGSGVKQTLNFDLLKLAGDVESNPGPTSMDWIWRILFLVGAATGAHSFEQVQLQESGPGLVKPSQTLSLTCTVSGGSISSGGFYWSWIRQHPGKGLEWIGYIHHSGSTHYNPSLKSRVTISIDTSKNLFSLRLSSVTAADTAVYYCASLVYCGGDCYSGFDYWGQGTLVTVSSTREDLKNVFPPEVAVFEPSEAEISHTQKATLVCLATGFYPDHVELSWWVNGKEVHSGVCTDPQPLKEQPALNDSRYCLSSRLRVSATFWQNPRNHFRCQVQFYGLSENDEWTQDRAKPVTQIVSAEAWGRADCDVKLVEKSFETDTNLNFQNLSVIGFRILLLKVAGFNLLMTLRLWSS

SEQ ID NO: 12969 - protein, 760 aa, synthetic construct
MALPVTALLLPLALLLHAARPEVQLVESGGGLVQPGGSLRLSCAASGFSFSDFWMSWVRQAPGKGLEWVATISQAGSEKDYVDSVKGRFTISRDNAKKSLYLQMNSLRAEDTAVYYCASGVYSFDYRGQGTLVTVSSGTGGGGSGGGGSGGGGSEFDIQMTQSPSSLSASVGDRVTITCKSSQSVLYSSNQKNYLAWFQQKPGKAPKLLIYWASTRESGVPSRFSGSGSGTDFTLTISSLQPEDFATYFCHQYLSSYTFGQGTKVEIKRLEIQNPDPAVYQLRDSKSSDKSVCLFTDFDSQTNVSQSKDSDVYITDKCVLDMRSMDFKSNSAVAWSNKSDFACANAFNNSIIPEDTFFPSPESSCGFTSESYQQGVLSATILYEILLGKATLYAVLVSALVLMAMVKRKDSRGRAKRSGSGVKQTLNFDLLKLAGDVESNPGPTSMDWIWRILFLVGAATGAHSFEEVQLVESGGGLVQPGGSLRLSCAASGYTFTTYWMHWVRQAPGKGLEWVGYIRPSTGYTEYNQKFKDRFTISADTSKNTAYLQMNSLRAEDTAVYYCARSRWLLDYWGQGTLVTVSTREDLKNVFPPEVAVFEPSEAEISHTQKATLVCLATGFYPDHVELSWWVNGKEVHSGVCTDPQPLKEQPALNDSRYCLSSRLRVSATFWQNPRNHFRCQVQFYGLSENDEWTQDRAKPVTQIVSAEAWGRADCDVKLVEKSFETDTNLNFQNLSVIGFRILLLKVAGFNLLMTLRLWSS

SEQ ID NO: 12970 - protein, 757 aa, synthetic construct
MALPVTALLLPLALLLHAARPEVQLVESGGGLVQPGGSLRLSCAASGFSFSDFWMSWVRQAPGKGLEWVATISQAGSEKDYVDSVKGRFTISRDNAKKSLYLQMNSLRAEDTAVYYCASGVYSFDYRGQGTLVTVSSGTGGGGSGGGGSGGGGSEFDIQMTQSPSSLSASVGDRVTITCRASQDISNYLNWYQQKPGKAPKLLIYYTSRLHSGVPSRFSGSGSGTDFTLTISSLQPEDFATYYCQQGNTLPYTFGQGTKVEIKRLEIQNPDPAVYQLRDSKSSDKSVCLFTDFDSQTNVSQSKDSDVYITDKCVLDMRSMDFKSNSAVAWSNKSDFACANAFNNSIIPEDTFFPSPESSCGFTSESYQQGVLSATILYEILLGKATLYAVLVSALVLMAMVKRKDSRGRAKRSGSGVKQTLNFDLLKLAGDVESNPGPTSMDWIWRILFLVGAATGAHSFEEVQLVESGGGLVQPGGSLRLSCAASGFTFSDYFMSWVRQAPGKGLEWVATISNGGTYTYYPDSVKGRFTISRDNSKNTLYLQMNSLRAEDTAVYYCARFDGYIFDYWGQGTLVTVSSTREDLKNVFPPEVAVFEPSEAEISHTQKATLVCLATGFYPDHVELSWWVNGKEVHSGVCTDPQPLKEQPALNDSRYCLSSRLRVSATFWQNPRNHFRCQVQFYGLSENDEWTQDRAKPVTQIVSAEAWGRADCDVKLVEKSFETDTNLNFQNLSVIGFRILLLKVAGFNLLMTLRLWSS

SEQ ID NO: 12971 - protein, 891 aa, synthetic construct
MALPVTALLLPLALLLHAARPEVQLVESGGGLVQPGGSLRLSCAASGFSFSDFWMSWVRQAPGKGLEWVATISQAGSEKDYVDSVKGRFTISRDNAKKSLYLQMNSLRAEDTAVYYCASGVYSFDYRGQGTLVTVSSGTGGGGSGGGGSGGGGSEFDIQMTQTTSSLSASLGDRVTISCRASQDISKYLNWYQQKPDGTVKLLIYHTSRLHSGVPSRFSGSGSGTDYSLTISNLEQEDIATYFCQQGNTLPYTFGGGTKLEITLEDLKNVFPPEVAVFEPSEAEISHTQKATLVCLATGFYPDHVELSWWVNGKEVHSGVCTDPQPLKEQPALNDSRYCLSSRLRVSATFWQNPRNHFRCQVQFYGLSENDEWTQDRAKPVTQIVSAEAWGRADCDVKLVEKSFETDTNLNFQNLSVIGFRILLLKVAGFNLLMTLRLWSSRAKRSGSGATNFSLLKQAGDVEENPGPTSMDWIWRILFLVGAATGAHSGPQLQLQESGPGLVKPSETLSLTCTVSGDSISSGDYYWGWIRQPPGKGLEWIGHIYYSGVTYYNPSLKSRVTISVDTSRNQFSLKLSSVTAADTAVYYCTREDSSNWRSRGQGTLVTVSSGSGGGGSGGGGSGGGGSFEVKLQESGPGLVAPSQSLSVTCTVSGVSLPDYGVSWIRQPPRKGLEWLGVIWGSETTYYNSALKSRLTIIKDNSKSQVFLKMNSLQTDDTAIYYCAKHYYYGGSYAMDYWGQGTSVTVSSTRIQNPDPAVYQLRDSKSSDKSVCLFTDFDSQTNVSQSKDSDVYITDKCVLDMRSMDFKSNSAVAWSNKSDFACANAFNNSIIPEDTFFPSPESSCGFTSESYQQGVLSATILYEILLGKATLYAVLVSALVLMAMVKRKDSRG

SEQ ID NO: 12972 - protein, 892 aa, synthetic construct
MALPVTALLLPLALLLHAARPEVQLVESGGGLVQPGGSLRLSCAASGFSFSDFWMSWVRQAPGKGLEWVATISQAGSEKDYVDSVKGRFTISRDNAKKSLYLQMNSLRAEDTAVYYCASGVYSFDYRGQGTLVTVSSGTGGGGSGGGGSGGGGSEFEIVMTQSPATLSLSPGERATLSCRASQDISKYLNWYQQKPGQAPRLLIYHTSRLHSGIPARFSGSGSGTDYTLTISSLQPEDFAVYFCQQGNTLPYTFGQGTKLEIKLEDLKNVFPPEVAVFEPSEAEISHTQKATLVCLATGFYPDHVELSWWVNGKEVHSGVCTDPQPLKEQPALNDSRYCLSSRLRVSATFWQNPRNHFRCQVQFYGLSENDEWTQDRAKPVTQIVSAEAWGRADCDVKLVEKSFETDTNLNFQNLSVIGFRILLLKVAGFNLLMTLRLWSSRAKRSGSGATNFSLLKQAGDVEENPGPTSMDWIWRILFLVGAATGAHSGPQLQLQESGPGLVKPSETLSLTCTVSGDSISSGDYYWGWIRQPPGKGLEWIGHIYYSGVTYYNPSLKSRVTISVDTSRNQFSLKLSSVTAADTAVYYCTREDSSNWRSRGQGTLVTVSSGSGGGGSGGGGSGGGGSFEQVQLQESGPGLVKPSETLSLTCTVSGVSLPDYGVSWIRQPPGKGLEWIGVIWGSETTYYNSSLKSRVTISKDNSKNQVSLKLSSVTAADTAVYYCAKHYYYGGSYAMDYWGQGTLVTVSSTRIQNPDPAVYQLRDSKSSDKSVCLFTDFDSQTNVSQSKDSDVYITDKCVLDMRSMDFKSNSAVAWSNKSDFACANAFNNSIIPEDTFFPSPESSCGFTSESYQQGVLSATILYEILLGKATLYAVLVSALVLMAMVKRKDSRG

SEQ ID NO: 12973 - protein, 893 aa, synthetic construct
MALPVTALLLPLALLLHAARPEVQLVESGGGLVQPGGSLRLSCAASGFSFSDFWMSWVRQAPGKGLEWVATISQAGSEKDYVDSVKGRFTISRDNAKKSLYLQMNSLRAEDTAVYYCASGVYSFDYRGQGTLVTVSSGTGGGGSGGGGSGGGGSEFDEIVLTQSPATLSLSPGERATLSCSASSSVSYMHWYQQKPGQAPRLLIYDTSKLASGIPARFSGSGSGTDFTLTISSLEPEDVAVYYCFQGSVYPFTFGQGTKLEIKRLEDLKNVFPPEVAVFEPSEAEISHTQKATLVCLATGFYPDHVELSWWVNGKEVHSGVCTDPQPLKEQPALNDSRYCLSSRLRVSATFWQNPRNHFRCQVQFYGLSENDEWTQDRAKPVTQIVSAEAWGRADCDVKLVEKSFETDTNLNFQNLSVIGFRILLLKVAGFNLLMTLRLWSSRAKRSGSGATNFSLLKQAGDVEENPGPTSMDWIWRILFLVGAATGAHSGPQLQLQESGPGLVKPSETLSLTCTVSGDSISSGDYYWGWIRQPPGKGLEWIGHIYYSGVTYYNPSLKSRVTISVDTSRNQFSLKLSSVTAADTAVYYCTREDSSNWRSRGQGTLVTVSSGSGGGGSGGGGSGGGGSFEQVQLQESGPGLVKPSQTLSLTCTVSGGSISTSGMGVGWIRQHPGKGLEWIGHIWWDDDKRYNPALKSRVTISVDTSKNQFSLKLSSVTAADTAVYYCARMELWSYYFDYWGQGTLVTVSSTRIQNPDPAVYQLRDSKSSDKSVCLFTDFDSQTNVSQSKDSDVYITDKCVLDMRSMDFKSNSAVAWSNKSDFACANAFNNSIIPEDTFFPSPESSCGFTSESYQQGVLSATILYEILLGKATLYAVLVSALVLMAMVKRKDSRG

SEQ ID NO: 12974 - protein, 891 aa, synthetic construct
MALPVTALLLPLALLLHAARPEVQLVESGGGLVQPGGSLRLSCAASGFSFSDFWMSWVRQAPGKGLEWVATISQAGSEKDYVDSVKGRFTISRDNAKKSLYLQMNSLRAEDTAVYYCASGVYSFDYRGQGTLVTVSSGTGGGGSGGGGSGGGGSEFDYIHVTQSPSSLSVSIGDRVTINCQTSQGVGSDLHWYQHKPGRAPKLLIHHASSVEDGVPSRFSGTGFHTSFNLTINDLQADDIGTYYCQVLQSFGRGSRLDTKLEDLKNVFPPEVAVFEPSEAEISHTQKATLVCLATGFYPDHVELSWWVNGKEVHSGVCTDPQPLKEQPALNDSRYCLSSRLRVSATFWQNPRNHFRCQVQFYGLSENDEWTQDRAKPVTQIVSAEAWGRADCDVKLVEKSFETDTNLNFQNLSVIGFRILLLKVAGFNLLMTLRLWSSRAKRSGSGATNFSLLKQAGDVEENPGPTSMDWIWRILFLVGAATGAHSGPQLQLQESGPGLVKPSETLSLTCTVSGDSISSGDYYWGWIRQPPGKGLEWIGHIYYSGVTYYNPSLKSRVTISVDTSRNQFSLKLSSVTAADTAVYYCTREDSSNWRSRGQGTLVTVSSGSGGGGSGGGGSGGGGSFERAHLVQSGTAMKKPGASVRVSCQTSGYTFTAHILFWFRQAPGRGLEWVGWIKPQYGAVNFGGGFRDRVTLTRDVYREIAYMDIRGLKPDDTAVYYCARDRSYGDSSWALDAWGQGTTVVVSATRIQNPDPAVYQLRDSKSSDKSVCLFTDFDSQTNVSQSKDSDVYITDKCVLDMRSMDFKSNSAVAWSNKSDFACANAFNNSIIPEDTFFPSPESSCGFTSESYQQGVLSATILYEILLGKATLYAVLVSALVLMAMVKRKDSRG

SEQ ID NO: 12975 - protein, 901 aa, synthetic construct
MALPVTALLLPLALLLHAARPEVQLVESGGGLVQPGGSLRLSCAASGFSFSDFWMSWVRQAPGKGLEWVATISQAGSEKDYVDSVKGRFTISRDNAKKSLYLQMNSLRAEDTAVYYCASGVYSFDYRGQGTLVTVSSGTGGGGSGGGGSGGGGSEFDVQMIQTPDSLAVSLGQRATISCRASESVDNYGISFMHWYQQKPGQSPKLLIYRASNLESGIPARFSGSGSRTDFTLTINPVETDDVATYYCQQNNKDPPTFGGGTKLEIKLEDLKNVFPPEVAVFEPSEAEISHTQKATLVCLATGFYPDHVELSWWVNGKEVHSGVCTDPQPLKEQPALNDSRYCLSSRLRVSATFWQNPRNHFRCQVQFYGLSENDEWTQDRAKPVTQIVSAEAWGRADCDVKLVEKSFETDTNLNFQNLSVIGFRILLLKVAGFNLLMTLRLWSSRAKRSGSGATNFSLLKQAGDVEENPGPTSMDWIWRILFLVGAATGAHSGPQLQLQESGPGLVKPSETLSLTCTVSGDSISSGDYYWGWIRQPPGKGLEWIGHIYYSGVTYYNPSLKSRVTISVDTSRNQFSLKLSSVTAADTAVYYCTREDSSNWRSRGQGTLVTVSSGSGGGGSGGGGSGGGGSFEGGGGSQVQLQQSGAELVKPGASVKISCKASGYAFSSYWMNWVKQRPGKGLEWIGQIYPGDGDTTYNGKFKGKATLTADKSSSTVYMQLNSLTSEDSAVYFCVRYYYGSSGYFDYWGQGTTLTVSSTRIQNPDPAVYQLRDSKSSDKSVCLFTDFDSQTNVSQSKDSDVYITDKCVLDMRSMDFKSNSAVAWSNKSDFACANAFNNSIIPEDTFFPSPESSCGFTSESYQQGVLSATILYEILLGKATLYAVLVSALVLMAMVKRKDSRG

SEQ ID NO: 12976 - protein, 892 aa, synthetic construct
MALPVTALLLPLALLLHAARPEVQLVESGGGLVQPGGSLRLSCAASGFSFSDFWMSWVRQAPGKGLEWVATISQAGSEKDYVDSVKGRFTISRDNAKKSLYLQMNSLRAEDTAVYYCASGVYSFDYRGQGTLVTVSSGTGGGGSGGGGSGGGGSEFDVQMIQTPSSLSASLGDRVTISCRASQDIGNYLNWYQQKPDGTVKLLIYYTSRLHSGVPSRFSGSGSGTEYSLTISNLEQEDIATYFCQQGSALPPTFGGGTKLEINLEDLKNVFPPEVAVFEPSEAEISHTQKATLVCLATGFYPDHVELSWWVNGKEVHSGVCTDPQPLKEQPALNDSRYCLSSRLRVSATFWQNPRNHFRCQVQFYGLSENDEWTQDRAKPVTQIVSAEAWGRADCDVKLVEKSFETDTNLNFQNLSVIGFRILLLKVAGFNLLMTLRLWSSRAKRSGSGATNFSLLKQAGDVEENPGPTSMDWIWRILFLVGAATGAHSGPQLQLQESGPGLVKPSETLSLTCTVSGDSISSGDYYWGWIRQPPGKGLEWIGHIYYSGVTYYNPSLKSRVTISVDTSRNQFSLKLSSVTAADTAVYYCTREDSSNWRSRGQGTLVTVSSGSGGGGSGGGGSGGGGSFEALQLQQSGAELVRPGASVTLSCKASGYTFTDYEMHWVKQTPVHGLEWIGAIDPETGGTAYNQKFEGKAILTADKSSSTAYMELRSLTSEDSPVYYCARRRYYGSSSFDYWGQGTTLTVSSTRIQNPDPAVYQLRDSKSSDKSVCLFTDFDSQTNVSQSKDSDVYITDKCVLDMRSMDFKSNSAVAWSNKSDFACANAFNNSIIPEDTFFPSPESSCGFTSESYQQGVLSATILYEILLGKATLYAVLVSALVLMAMVKRKDSRG

SEQ ID NO: 12977 - protein, 896 aa, synthetic construct
MALPVTALLLPLALLLHAARPEVQLVESGGGLVQPGGSLRLSCAASGFSFSDFWMSWVRQAPGKGLEWVATISQAGSEKDYVDSVKGRFTISRDNAKKSLYLQMNSLRAEDTAVYYCASGVYSFDYRGQGTLVTVSSGTGGGGSGGGGSGGGGSEFDIVLTQSPASLAVSLGQRATISCRASKSVSTSGYSYLHWYQQKPGQPPKLLIYLASNLESGVPARFSGSGSGTDFTLNIHPVEEEDAATYYCQHSRELPFTFGSGTKLEIKLEDLKNVFPPEVAVFEPSEAEISHTQKATLVCLATGFYPDHVELSWWVNGKEVHSGVCTDPQPLKEQPALNDSRYCLSSRLRVSATFWQNPRNHFRCQVQFYGLSENDEWTQDRAKPVTQIVSAEAWGRADCDVKLVEKSFETDTNLNFQNLSVIGFRILLLKVAGFNLLMTLRLWSSRAKRSGSGATNFSLLKQAGDVEENPGPTSMDWIWRILFLVGAATGAHSGPQLQLQESGPGLVKPSETLSLTCTVSGDSISSGDYYWGWIRQPPGKGLEWIGHIYYSGVTYYNPSLKSRVTISVDTSRNQFSLKLSSVTAADTAVYYCTREDSSNWRSRGQGTLVTVSSGSGGGGSGGGGSGGGGSFEQVQLVESGGGLVQPGGSLKLSCAASGFDFSRYWMSWVRQAPGKGLEWIGEINPTSSTINFTPSLKDKVFISRDNAKNTLYLQMSKVRSEDTALYYCARGNYYRYGDAMDYWGQGTSVTVSTRIQNPDPAVYQLRDSKSSDKSVCLFTDFDSQTNVSQSKDSDVYITDKCVLDMRSMDFKSNSAVAWSNKSDFACANAFNNSIIPEDTFFPSPESSCGFTSESYQQGVLSATILYEILLGKATLYAVLVSALVLMAMVKRKDSRG

SEQ ID NO: 12978 - protein, 894 aa, synthetic construct
MALPVTALLLPLALLLHAARPEVQLVESGGGLVQPGGSLRLSCAASGFSFSDFWMSWVRQAPGKGLEWVATISQAGSEKDYVDSVKGRFTISRDNAKKSLYLQMNSLRAEDTAVYYCASGVYSFDYRGQGTLVTVSSGTGGGGSGGGGSGGGGSEFDIQMTQSPSSLSASVGDRVTITCSASQDISNYLNWYQQKPGKAPKLLIYYTSNLHSGVPSRFSGSGSGTDFTLTISSLQPEDFATYYCQQYRKLPWTFGQGTKLEIKRLEDLKNVFPPEVAVFEPSEAEISHTQKATLVCLATGFYPDHVELSWWVNGKEVHSGVCTDPQPLKEQPALNDSRYCLSSRLRVSATFWQNPRNHFRCQVQFYGLSENDEWTQDRAKPVTQIVSAEAWGRADCDVKLVEKSFETDTNLNFQNLSVIGFRILLLKVAGFNLLMTLRLWSSRAKRSGSGATNFSLLKQAGDVEENPGPTSMDWIWRILFLVGAATGAHSGPQLQLQESGPGLVKPSETLSLTCTVSGDSISSGDYYWGWIRQPPGKGLEWIGHIYYSGVTYYNPSLKSRVTISVDTSRNQFSLKLSSVTAADTAVYYCTREDSSNWRSRGQGTLVTVSSGSGGGGSGGGGSGGGGSFEQVQLVQSGAEVKKPGSSVKVSCKASGGTFSNYWMHWVRQAPGQGLEWMGATYRGHSDTYYNQKFKGRVTITADKSTSTAYMELSSLRSEDTAVYYCARGAIYDGYDVLDNWGQGTLVTVSSTRIQNPDPAVYQLRDSKSSDKSVCLFTDFDSQTNVSQSKDSDVYITDKCVLDMRSMDFKSNSAVAWSNKSDFACANAFNNSIIPEDTFFPSPESSCGFTSESYQQGVLSATILYEILLGKATLYAVLVSALVLMAMVKRKDSRG

SEQ ID NO: 12979 - protein, 894 aa, synthetic construct
MALPVTALLLPLALLLHAARPEVQLVESGGGLVQPGGSLRLSCAASGFSFSDFWMSWVRQAPGKGLEWVATISQAGSEKDYVDSVKGRFTISRDNAKKSLYLQMNSLRAEDTAVYYCASGVYSFDYRGQGTLVTVSSGTGGGGSGGGGSGGGGSEFDIVLTQSPATLSLSPGDRATISCRASESVTILGSHLIYWYQQKPGQPPRLLIQLASNVQTGVPARFSGSGSRTDFTLTISSVEPEDFAVYYCLQSRTIPRTFGQGTKLEIKRLEDLKNVFPPEVAVFEPSEAEISHTQKATLVCLATGFYPDHVELSWWVNGKEVHSGVCTDPQPLKEQPALNDSRYCLSSRLRVSATFWQNPRNHFRCQVQFYGLSENDEWTQDRAKPVTQIVSAEAWGRADCDVKLVEKSFETDTNLNFQNLSVIGFRILLLKVAGFNLLMTLRLWSSRAKRSGSGATNFSLLKQAGDVEENPGPTSMDWIWRILFLVGAATGAHSGPQLQLQESGPGLVKPSETLSLTCTVSGDSISSGDYYWGWIRQPPGKGLEWIGHIYYSGVTYYNPSLKSRVTISVDTSRNQFSLKLSSVTAADTAVYYCTREDSSNWRSRGQGTLVTVSSGSGGGGSGGGGSGGGGSFEQVQLVQSGPEVKKPGESVKISCKASGYTFRHYSMNWVKQAPGQGLKWMGRINTESGVPIYADDFKGRFSFTVDTSASTAYLEISSLTSEDTAVYFCSNDYLYSLDFWGQGTTLTVSSTRIQNPDPAVYQLRDSKSSDKSVCLFTDFDSQTNVSQSKDSDVYITDKCVLDMRSMDFKSNSAVAWSNKSDFACANAFNNSIIPEDTFFPSPESSCGFTSESYQQGVLSATILYEILLGKATLYAVLVSALVLMAMVKRKDSRG

SEQ ID NO: 12980 - protein, 895 aa, synthetic construct
MALPVTALLLPLALLLHAARPEVQLVESGGGLVQPGGSLRLSCAASGFSFSDFWMSWVRQAPGKGLEWVATISQAGSEKDYVDSVKGRFTISRDNAKKSLYLQMNSLRAEDTAVYYCASGVYSFDYRGQGTLVTVSSGTGGGGSGGGGSGGGGSEFQSVLTQPPSVSGAPGQRVTISCTGSSSNIGAGFDVHWYQQLPGTAPKLLIYGNSNRPSGVPDRFSGSKSGTSASLAITGLQAEDEADYYCQSYDSSLSGYVFGTGTKVTVLGLEDLKNVFPPEVAVFEPSEAEISHTQKATLVCLATGFYPDHVELSWWVNGKEVHSGVCTDPQPLKEQPALNDSRYCLSSRLRVSATFWQNPRNHFRCQVQFYGLSENDEWTQDRAKPVTQIVSAEAWGRADCDVKLVEKSFETDTNLNFQNLSVIGFRILLLKVAGFNLLMTLRLWSSRAKRSGSGATNFSLLKQAGDVEENPGPTSMDWIWRILFLVGAATGAHSGPQLQLQESGPGLVKPSETLSLTCTVSGDSISSGDYYWGWIRQPPGKGLEWIGHIYYSGVTYYNPSLKSRVTISVDTSRNQFSLKLSSVTAADTAVYYCTREDSSNWRSRGQGTLVTVSSGSGGGGSGGGGSGGGGSFEQVQLVQSGAEVKKPGASVKVSCKASGYTFTDYYMHWVRQAPGQRLEWMGWINPNSGGTNYAQKFQDRITVTRDTSSNTGYMELTRLRSDDTAVYYCARSPYSGVLDKWGQGTLVTVSSTRIQNPDPAVYQLRDSKSSDKSVCLFTDFDSQTNVSQSKDSDVYITDKCVLDMRSMDFKSNSAVAWSNKSDFACANAFNNSIIPEDTFFPSPESSCGFTSESYQQGVLSATILYEILLGKATLYAVLVSALVLMAMVKRKDSRG

SEQ ID NO: 12981 - protein, 892 aa, synthetic construct
MALPVTALLLPLALLLHAARPEVQLVESGGGLVQPGGSLRLSCAASGFSFSDFWMSWVRQAPGKGLEWVATISQAGSEKDYVDSVKGRFTISRDNAKKSLYLQMNSLRAEDTAVYYCASGVYSFDYRGQGTLVTVSSGTGGGGSGGGGSGGGGSEFQAVLTQPPSASGTPGQRVTISCSGSSSNIGSYTVSWYQQLPGTAPKFLIYSNNQRPSGVPDRFSGSKSGTSASLAISGLQSEDEADYYCAAWDDSLNGYVFGTGTKVTVLGLEDLKNVFPPEVAVFEPSEAEISHTQKATLVCLATGFYPDHVELSWWVNGKEVHSGVCTDPQPLKEQPALNDSRYCLSSRLRVSATFWQNPRNHFRCQVQFYGLSENDEWTQDRAKPVTQIVSAEAWGRADCDVKLVEKSFETDTNLNFQNLSVIGFRILLLKVAGFNLLMTLRLWSSRAKRSGSGATNFSLLKQAGDVEENPGPTSMDWIWRILFLVGAATGAHSGPQLQLQESGPGLVKPSETLSLTCTVSGDSISSGDYYWGWIRQPPGKGLEWIGHIYYSGVTYYNPSLKSRVTISVDTSRNQFSLKLSSVTAADTAVYYCTREDSSNWRSRGQGTLVTVSSGSGGGGSGGGGSGGGGSFEVQLVQSGAEVKKPGESLKISCKGSGYDFTTYWIGWVRQMPGKGLEWMGIIYPGDSDTRYSPSVRGRVTISADKSINTAYLQWSSLEASDTAMYYCARMWTFSQDGWGQGTLVTVSSTRIQNPDPAVYQLRDSKSSDKSVCLFTDFDSQTNVSQSKDSDVYITDKCVLDMRSMDFKSNSAVAWSNKSDFACANAFNNSIIPEDTFFPSPESSCGFTSESYQQGVLSATILYEILLGKATLYAVLVSALVLMAMVKRKDSRG

SEQ ID NO: 12982 - protein, 895 aa, synthetic construct
MALPVTALLLPLALLLHAARPEVQLVESGGGLVQPGGSLRLSCAASGFSFSDFWMSWVRQAPGKGLEWVATISQAGSEKDYVDSVKGRFTISRDNAKKSLYLQMNSLRAEDTAVYYCASGVYSFDYRGQGTLVTVSSGTGGGGSGGGGSGGGGSEFDIVMTQSPDSLAVSLGERATINCKSSQSILYSSNQKNYLAWYQQKPGQSPKLLIYWASTRESGVPDRFSGSGSGTDFTLTISSLQAEDVAVYYCHQYISSYTFGQGTKLEIKLEDLKNVFPPEVAVFEPSEAEISHTQKATLVCLATGFYPDHVELSWWVNGKEVHSGVCTDPQPLKEQPALNDSRYCLSSRLRVSATFWQNPRNHFRCQVQFYGLSENDEWTQDRAKPVTQIVSAEAWGRADCDVKLVEKSFETDTNLNFQNLSVIGFRILLLKVAGFNLLMTLRLWSSRAKRSGSGATNFSLLKQAGDVEENPGPTSMDWIWRILFLVGAATGAHSGPQLQLQESGPGLVKPSETLSLTCTVSGDSISSGDYYWGWIRQPPGKGLEWIGHIYYSGVTYYNPSLKSRVTISVDTSRNQFSLKLSSVTAADTAVYYCTREDSSNWRSRGQGTLVTVSSGSGGGGSGGGGSGGGGSFEQVQLVQSGAEVKKPGASVKVSCKASGYTFASQWMHWMRQAPGQGLEWIGWINPGNVNTKYNEKFKGRATLTVDTSTNTAYMELSSLRSEDTAVYYCARSTWYRPLDYWGQGTLVTVSSTRIQNPDPAVYQLRDSKSSDKSVCLFTDFDSQTNVSQSKDSDVYITDKCVLDMRSMDFKSNSAVAWSNKSDFACANAFNNSIIPEDTFFPSPESSCGFTSESYQQGVLSATILYEILLGKATLYAVLVSALVLMAMVKRKDSRG

SEQ ID NO: 12983 - protein, 895 aa, synthetic construct
MALPVTALLLPLALLLHAARPEVQLVESGGGLVQPGGSLRLSCAASGFSFSDFWMSWVRQAPGKGLEWVATISQAGSEKDYVDSVKGRFTISRDNAKKSLYLQMNSLRAEDTAVYYCASGVYSFDYRGQGTLVTVSSGTGGGGSGGGGSGGGGSEFDHIVLTQSPSSLSASLGDRVTISCRASQDISTYLNWYQQKPDGTVKLLIFYTSRLHAGVPSRFSGSGSGTHHSLTISNLEQEDIATYFCQQGNSLPFTFGSGTKLEIKRLEDLKNVFPPEVAVFEPSEAEISHTQKATLVCLATGFYPDHVELSWWVNGKEVHSGVCTDPQPLKEQPALNDSRYCLSSRLRVSATFWQNPRNHFRCQVQFYGLSENDEWTQDRAKPVTQIVSAEAWGRADCDVKLVEKSFETDTNLNFQNLSVIGFRILLLKVAGFNLLMTLRLWSSRAKRSGSGATNFSLLKQAGDVEENPGPTSMDWIWRILFLVGAATGAHSGPQLQLQESGPGLVKPSETLSLTCTVSGDSISSGDYYWGWIRQPPGKGLEWIGHIYYSGVTYYNPSLKSRVTISVDTSRNQFSLKLSSVTAADTAVYYCTREDSSNWRSRGQGTLVTVSSGSGGGGSGGGGSGGGGSFEQVQLKESGPELEKPGASVKISCKASGYSFTAYSMNWVKQNNGMSLEWIGSIDPYYGDTKYAQKFKGKATLTVDKASSTAYLQLKSLTSEDSAVYYCARRMITTGDWYFDVWGAGTTVTVSSTRIQNPDPAVYQLRDSKSSDKSVCLFTDFDSQTNVSQSKDSDVYITDKCVLDMRSMDFKSNSAVAWSNKSDFACANAFNNSIIPEDTFFPSPESSCGFTSESYQQGVLSATILYEILLGKATLYAVLVSALVLMAMVKRKDSRG

SEQ ID NO: 12984 - protein, 895 aa, synthetic construct; identical to SEQ ID NO: 12983

SEQ ID NO: 12985 - protein, 895 aa, synthetic construct
MALPVTALLLPLALLLHAARPEVQLVESGGGLVQPGGSLRLSCAASGFSFSDFWMSWVRQAPGKGLEWVATISQAGSEKDYVDSVKGRFTISRDNAKKSLYLQMNSLRAEDTAVYYCASGVYSFDYRGQGTLVTVSSGTGGGGSGGGGSGGGGSEFDEIVLTQSPATLSLSPGERATLSCRASQSVSSYLAWYQQKPGQAPRLLIYDASNRATGIPARFSGSGSGTDFTLTISSLEPEDFAVYYCQQRSNWPITFGQGTRLEIKLEDLKNVFPPEVAVFEPSEAEISHTQKATLVCLATGFYPDHVELSWWVNGKEVHSGVCTDPQPLKEQPALNDSRYCLSSRLRVSATFWQNPRNHFRCQVQFYGLSENDEWTQDRAKPVTQIVSAEAWGRADCDVKLVEKSFETDTNLNFQNLSVIGFRILLLKVAGFNLLMTLRLWSSRAKRSGSGATNFSLLKQAGDVEENPGPTSMDWIWRILFLVGAATGAHSGPQLQLQESGPGLVKPSETLSLTCTVSGDSISSGDYYWGWIRQPPGKGLEWIGHIYYSGVTYYNPSLKSRVTISVDTSRNQFSLKLSSVTAADTAVYYCTREDSSNWRSRGQGTLVTVSSGSGGGGSGGGGSGGGGSFEEVQLVESGGGLVQPGRSLRLSCAASGFTFNDYAMHWVRQAPGKGLEWVSTISWNSGSIGYADSVKGRFTISRDNAKKSLYLQMNSLRAEDTALYYCAKDIQYGNYYYGMDVWGQGTTVTVSSTRIQNPDPAVYQLRDSKSSDKSVCLFTDFDSQTNVSQSKDSDVYITDKCVLDMRSMDFKSNSAVAWSNKSDFACANAFNNSIIPEDTFFPSPESSCGFTSESYQQGVLSATILYEILLGKATLYAVLVSALVLMAMVKRKDSRG

SEQ ID NO: 12986 - protein, 897 aa, synthetic construct
MALPVTALLLPLALLLHAARPEVQLVESGGGLVQPGGSLRLSCAASGFSFSDFWMSWVRQAPGKGLEWVATISQAGSEKDYVDSVKGRFTISRDNAKKSLYLQMNSLRAEDTAVYYCASGVYSFDYRGQGTLVTVSSGTGGGGSGGGGSGGGGSEFDIVMTQTPLSLPVTPGEPASISCRSSKSLLHSNGITYLYWYLQKPGQSPQLLIYQMSNLVSGVPDRFSGSGSGTDFTLKISRVEAEDVGVYYCAQNLELPYTFGGGTKVEIKRLEDLKNVFPPEVAVFEPSEAEISHTQKATLVCLATGFYPDHVELSWWVNGKEVHSGVCTDPQPLKEQPALNDSRYCLSSRLRVSATFWQNPRNHFRCQVQFYGLSENDEWTQDRAKPVTQIVSAEAWGRADCDVKLVEKSFETDTNLNFQNLSVIGFRILLLKVAGFNLLMTLRLWSSRAKRSGSGATNFSLLKQAGDVEENPGPTSMDWIWRILFLVGAATGAHSGPQLQLQESGPGLVKPSETLSLTCTVSGDSISSGDYYWGWIRQPPGKGLEWIGHIYYSGVTYYNPSLKSRVTISVDTSRNQFSLKLSSVTAADTAVYYCTREDSSNWRSRGQGTLVTVSSGSGGGGSGGGGSGGGGSFEQVQLVQSGAEVKKPGSSVKVSCKASGYAFSYSWINWVRQAPGQGLEWMGRIFPGDGDTDYNGKFKGRVTITADKSTSTAYMELSSLRSEDTAVYYCARNVFDGYWLVYWGQGTLVTVSSTRIQNPDPAVYQLRDSKSSDKSVCLFTDFDSQTNVSQSKDSDVYITDKCVLDMRSMDFKSNSAVAWSNKSDFACANAFNNSIIPEDTFFPSPESSCGFTSESYQQGVLSATILYEILLGKATLYAVLVSALVLMAMVKRKDSRG

SEQ ID NO: 12987 - protein, 898 aa, synthetic construct
MALPVTALLLPLALLLHAARPEVQLVESGGGLVQPGGSLRLSCAASGFSFSDFWMSWVRQAPGKGLEWVATISQAGSEKDYVDSVKGRFTISRDNAKKSLYLQMNSLRAEDTAVYYCASGVYSFDYRGQGTLVTVSSGTGGGGSGGGGSGGGGSEFDIQMTQSPSSLSASVGDRVTITCRSSQSIVHSVGNTFLEWYQQKPGKAPKLLIYKVSNRFSGVPSRFSGSGSGTDFTLTISSLQPEDFATYYCFQGSQFPYTFGQGTKVEIKRLEDLKNVFPPEVAVFEPSEAEISHTQKATLVCLATGFYPDHVELSWWVNGKEVHSGVCTDPQPLKEQPALNDSRYCLSSRLRVSATFWQNPRNHFRCQVQFYGLSENDEWTQDRAKPVTQIVSAEAWGRADCDVKLVEKSFETDTNLNFQNLSVIGFRILLLKVAGFNLLMTLRLWSSRAKRSGSGATNFSLLKQAGDVEENPGPTSMDWIWRILFLVGAATGAHSGPQLQLQESGPGLVKPSETLSLTCTVSGDSISSGDYYWGWIRQPPGKGLEWIGHIYYSGVTYYNPSLKSRVTISVDTSRNQFSLKLSSVTAADTAVYYCTREDSSNWRSRGQGTLVTVSSGSGGGGSGGGGSGGGGSFEEVQLVESGGGLVQPGGSLRLSCAASGYEFSRSWMNWVRQAPGKGLEWVGRIYPGDGDTNYSGKFKGRFTISADTSKNTAYLQMNSLRAEDTAVYYCARDGSSWDWYFDVWGQGTLVTVSSTRIQNPDPAVYQLRDSKSSDKSVCLFTDFDSQTNVSQSKDSDVYITDKCVLDMRSMDFKSNSAVAWSNKSDFACANAFNNSIIPEDTFFPSPESSCGFTSESYQQGVLSATILYEILLGKATLYAVLVSALVLMAMVKRKDSRG

SEQ ID NO: 12988 - protein, 896 aa, synthetic construct
MALPVTALLLPLALLLHAARPEVQLVESGGGLVQPGGSLRLSCAASGFSFSDFWMSWVRQAPGKGLEWVATISQAGSEKDYVDSVKGRFTISRDNAKKSLYLQMNSLRAEDTAVYYCASGVYSFDYRGQGTLVTVSSGTGGGGSGGGGSGGGGSEFDIQMTQSPSSLSASVGDRVTITCRASQTIWSYLNWYQQRPGKAPNLLIYAASSLQSGVPSRFSGRGSGTDFTLTISSLQAEDFATYYCQQSYSIPQIFGQGTKLEIKLEDLKNVFPPEVAVFEPSEAEISHTQKATLVCLATGFYPDHVELSWWVNGKEVHSGVCTDPQPLKEQPALNDSRYCLSSRLRVSATFWQNPRNHFRCQVQFYGLSENDEWTQDRAKPVTQIVSAEAWGRADCDVKLVEKSFETDTNLNFQNLSVIGFRILLLKVAGFNLLMTLRLWSSRAKRSGSGATNFSLLKQAGDVEENPGPTSMDWIWRILFLVGAATGAHSGPQLQLQESGPGLVKPSETLSLTCTVSGDSISSGDYYWGWIRQPPGKGLEWIGHIYYSGVTYYNPSLKSRVTISVDTSRNQFSLKLSSVTAADTAVYYCTREDSSNWRSRGQGTLVTVSSGSGGGGSGGGGSGGGGSFEQVQLQQSGPGLVKPSQTLSLTCAISGDSVSSNSAAWNWIRQSPSRGLEWLGRTYYRSKWYNDYAVSVKSRITINPDTSKNQFSLQLNSVTPEDTAVYYCAREVTGDLEDAFDIWGQGTMVTVSSTRIQNPDPAVYQLRDSKSSDKSVCLFTDFDSQTNVSQSKDSDVYITDKCVLDMRSMDFKSNSAVAWSNKSDFACANAFNNSIIPEDTFFPSPESSCGFTSESYQQGVLSATILYEILLGKATLYAVLVSALVLMAMVKRKDSRG

SEQ ID NO: 12989 - protein, 889 aa, synthetic construct
MALPVTALLLPLALLLHAARPEVQLVESGGGLVQPGGSLRLSCAASGFSFSDFWMSWVRQAPGKGLEWVATISQAGSEKDYVDSVKGRFTISRDNAKKSLYLQMNSLRAEDTAVYYCASGVYSFDYRGQGTLVTVSSGTGGGGSGGGGSGGGGSEFDIQMTQSPATIENTSLSASVGDRVTITCRASQGISSWLTWYQQKPEKAPKSLIYAASSLQSGVPSRFSGSGSGTDFTLTISSLQPEDFATYYCQQYDSYPITFGQGTRLEIKLEDLKNVFPPEVAVFEPSEAEISHTQKATLVCLATGFYPDHVELSWWVNGKEVHSGVCTDPQPLKEQPALNDSRYCLSSRLRVSATFWQNPRNHFRCQVQFYGLSENDEWTQDRAKPVTQIVSAEAWGRADCDVKLVEKSFETDTNLNFQNLSVIGFRILLLKVAGFNLLMTLRLWSSRAKRSGSGATNFSLLKQAGDVEENPGPTSMDWIWRILFLVGAATGAHSGPQLQLQESGPGLVKPSETLSLTCTVSGDSISSGDYYWGWIRQPPGKGLEWIGHIYYSGVTYYNPSLKSRVTISVDTSRNQFSLKLSSVTAADTAVYYCTREDSSNWRSRGQGTLVTVSSGSGGGGSGGGGSGGGGSFEQVQLQQWGAGLLKPSETLSLTCAVYGGSFSAYYWSWIRQPPGKGLEWIGDINHGGGTNYNPSLKSRVTISVDTSKNQFSLKLNSVTAADTAVYYCASLTAYWGQGSLVTVSSTRIQNPDPAVYQLRDSKSSDKSVCLFTDFDSQTNVSQSKDSDVYITDKCVLDMRSMDFKSNSAVAWSNKSDFACANAFNNSIIPEDTFFPSPESSCGFTSESYQQGVLSATILYEILLGKATLYAVLVSALVLMAMVKRKDSRG

SEQ ID NO: 12990 - protein, 894 aa, synthetic construct
MALPVTALLLPLALLLHAARPEVQLVESGGGLVQPGGSLRLSCAASGFSFSDFWMSWVRQAPGKGLEWVATISQAGSEKDYVDSVKGRFTISRDNAKKSLYLQMNSLRAEDTAVYYCASGVYSFDYRGQGTLVTVSSGTGGGGSGGGGSGGGGSEFDEIVLTQSPDSLAVSLGERATINCKASQSVDFDGDSYLNWYQQKPGQPPKVLIYAASTLQSGVPSRFSGSGSGTDFTLTINSLEAEDAATYYCQQSNEDPWTFGGGTKVEIKLEDLKNVFPPEVAVFEPSEAEISHTQKATLVCLATGFYPDHVELSWWVNGKEVHSGVCTDPQPLKEQPALNDSRYCLSSRLRVSATFWQNPRNHFRCQVQFYGLSENDEWTQDRAKPVTQIVSAEAWGRADCDVKLVEKSFETDTNLNFQNLSVIGFRILLLKVAGFNLLMTLRLWSSRAKRSGSGATNFSLLKQAGDVEENPGPTSMDWIWRILFLVGAATGAHSGPQLQLQESGPGLVKPSETLSLTCTVSGDSISSGDYYWGWIRQPPGKGLEWIGHIYYSGVTYYNPSLKSRVTISVDTSRNQFSLKLSSVTAADTAVYYCTREDSSNWRSRGQGTLVTVSSGSGGGGSGGGGSGGGGSFEQVQLVQSGAEVKKPGASVKVSCKVSGYTFTDYYITWVRQAPGQALEWMGWIYPGSGNTKYSQKFQGRFVFSVDTSASTAYLQLSSLKAEDTAVYYCANYGNYWFAYWGQGTLVTVSSTRIQNPDPAVYQLRDSKSSDKSVCLFTDFDSQTNVSQSKDSDVYITDKCVLDMRSMDFKSNSAVAWSNKSDFACANAFNNSIIPEDTFFPSPESSCGFTSESYQQGVLSATILYEILLGKATLYAVLVSALVLMAMVKRKDSRG

SEQ ID NO: 12991 - protein, 891 aa, synthetic construct
MALPVTALLLPLALLLHAARPEVQLVESGGGLVQPGGSLRLSCAASGFSFSDFWMSWVRQAPGKGLEWVATISQAGSEKDYVDSVKGRFTISRDNAKKSLYLQMNSLRAEDTAVYYCASGVYSFDYRGQGTLVTVSSGTGGGGSGGGGSGGGGSEFDIQMTQSPSSLSASVGDRVTITCRASQGISSWLAWYQQKPEKAPKSLIYAASSLQSGVPSRFSGSGSGTDFTLTISSLQPEDFATYYCQQYNSYPPTFGGGTKVEIKLEDLKNVFPPEVAVFEPSEAEISHTQKATLVCLATGFYPDHVELSWWVNGKEVHSGVCTDPQPLKEQPALNDSRYCLSSRLRVSATFWQNPRNHFRCQVQFYGLSENDEWTQDRAKPVTQIVSAEAWGRADCDVKLVEKSFETDTNLNFQNLSVIGFRILLLKVAGFNLLMTLRLWSSRAKRSGSGATNFSLLKQAGDVEENPGPTSMDWIWRILFLVGAATGAHSGPQLQLQESGPGLVKPSETLSLTCTVSGDSISSGDYYWGWIRQPPGKGLEWIGHIYYSGVTYYNPSLKSRVTISVDTSRNQFSLKLSSVTAADTAVYYCTREDSSNWRSRGQGTLVTVSSGSGGGGSGGGGSGGGGSFEEVQLVQSGGGLVHPGGSLRLSCAGSGFAFSSSTMHWIRQAPGKGLEWISLIGSGGGIYYGDSVKGRFTISRDNAKNSLYLQMNSLRAEDMAVYYCVRGYFDWVDYFDYWGQGTLVTVSSTRIQNPDPAVYQLRDSKSSDKSVCLFTDFDSQTNVSQSKDSDVYITDKCVLDMRSMDFKSNSAVAWSNKSDFACANAFNNSIIPEDTFFPSPESSCGFTSESYQQGVLSATILYEILLGKATLYAVLVSALVLMAMVKRKDSRG

SEQ ID NO: 12992 - protein, 901 aa, synthetic construct
MALPVTALLLPLALLLHAARPEVQLVESGGGLVQPGGSLRLSCAASGFSFSDFWMSWVRQAPGKGLEWVATISQAGSEKDYVDSVKGRFTISRDNAKKSLYLQMNSLRAEDTAVYYCASGVYSFDYRGQGTLVTVSSGTGGGGSGGGGSGGGGSEFDDIVMTQSPDSLTVSLGERTTINCKSSQSVLDSSKNKNSLAWYQQKPGQPPKLLLSWASTRESGIPDRFSGSGSGTDFTLTIDSLQPEDSATYYCQQSAHFPITFGQGTRLEIKLEDLKNVFPPEVAVFEPSEAEISHTQKATLVCLATGFYPDHVELSWWVNGKEVHSGVCTDPQPLKEQPALNDSRYCLSSRLRVSATFWQNPRNHFRCQVQFYGLSENDEWTQDRAKPVTQIVSAEAWGRADCDVKLVEKSFETDTNLNFQNLSVIGFRILLLKVAGFNLLMTLRLWSSRAKRSGSGATNFSLLKQAGDVEENPGPTSMDWIWRILFLVGAATGAHSGPQLQLQESGPGLVKPSETLSLTCTVSGDSISSGDYYWGWIRQPPGKGLEWIGHIYYSGVTYYNPSLKSRVTISVDTSRNQFSLKLSSVTAADTAVYYCTREDSSNWRSRGQGTLVTVSSGSGGGGSGGGGSGGGGSFEQVQLVQSGAEVKKPGASVKVSCKASGYTFTNYGMNWVKQAPGQGLKWMGWINTYTGEPTYADDFKGRVTMTSDTSTSTAYLELHNLRSDDTAVYYCARWSWSDGYYVYFDYWGQGTTVTVSSTRIQNPDPAVYQLRDSKSSDKSVCLFTDFDSQTNVSQSKDSDVYITDKCVLDMRSMDFKSNSAVAWSNKSDFACANAFNNSIIPEDTFFPSPESSCGFTSESYQQGVLSATILYEILLGKATLYAVLVSALVLMAMVKRKDSRG

SEQ ID NO: 12993 - protein, 897 aa, synthetic construct
MALPVTALLLPLALLLHAARPEVQLVESGGGLVQPGGSLRLSCAASGFSFSDFWMSWVRQAPGKGLEWVATISQAGSEKDYVDSVKGRFTISRDNAKKSLYLQMNSLRAEDTAVYYCASGVYSFDYRGQGTLVTVSSGTGGGGSGGGGSGGGGSEFDEIVLTQSPGSLAVSPGERVTMSCKSSQSVFFSSSQKNYLAWYQQIPGQSPRLLIYWASTRESGVPDRFTGSGSGTDFTLTISSVQPEDLAIYYCHQYLSSRTFGQGTKLEIKRLEDLKNVFPPEVAVFEPSEAEISHTQKATLVCLATGFYPDHVELSWWVNGKEVHSGVCTDPQPLKEQPALNDSRYCLSSRLRVSATFWQNPRNHFRCQVQFYGLSENDEWTQDRAKPVTQIVSAEAWGRADCDVKLVEKSFETDTNLNFQNLSVIGFRILLLKVAGFNLLMTLRLWSSRAKRSGSGATNFSLLKQAGDVEENPGPTSMDWIWRILFLVGAATGAHSGPQLQLQESGPGLVKPSETLSLTCTVSGDSISSGDYYWGWIRQPPGKGLEWIGHIYYSGVTYYNPSLKSRVTISVDTSRNQFSLKLSSVTAADTAVYYCTREDSSNWRSRGQGTLVTVSSGSGGGGSGGGGSGGGGSFEQVQLQQPGAEVVKPGASVKMSCKASGYTFTSYYIHWIKQTPGQGLEWVGVIYPGNDDISYNQKFQGKATLTADKSSTTAYMQLSSLTSEDSAVYYCAREVRLRYFDVWGQGTTVTVSSTRIQNPDPAVYQLRDSKSSDKSVCLFTDFDSQTNVSQSKDSDVYITDKCVLDMRSMDFKSNSAVAWSNKSDFACANAFNNSIIPEDTFFPSPESSCGFTSESYQQGVLSATILYEILLGKATLYAVLVSALVLMAMVKRKDSRG

SEQ ID NO: 12994 - protein, 901 aa, synthetic construct
MALPVTALLLPLALLLHAARPEVQLVESGGGLVQPGGSLRLSCAASGFSFSDFWMSWVRQAPGKGLEWVATISQAGSEKDYVDSVKGRFTISRDNAKKSLYLQMNSLRAEDTAVYYCASGVYSFDYRGQGTLVTVSSGTGGGGSGGGGSGGGGSEFDVLLTQSPLSLPVTLGQPASISCRSSQTIVHSNGNTYLEWFQQRPGQSPRLLIYQVSNRFSGVPDRFSGSGSGTDFTLKISRVEAEDVGVYYCFQGSHVPRTFGGGTKVEIKRALEDLKNVFPPEVAVFEPSEAEISHTQKATLVCLATGFYPDHVELSWWVNGKEVHSGVCTDPQPLKEQPALNDSRYCLSSRLRVSATFWQNPRNHFRCQVQFYGLSENDEWTQDRAKPVTQIVSAEAWGRADCDVKLVEKSFETDTNLNFQNLSVIGFRILLLKVAGFNLLMTLRLWSSRAKRSGSGATNFSLLKQAGDVEENPGPTSMDWIWRILFLVGAATGAHSGPQLQLQESGPGLVKPSETLSLTCTVSGDSISSGDYYWGWIRQPPGKGLEWIGHIYYSGVTYYNPSLKSRVTISVDTSRNQFSLKLSSVTAADTAVYYCTREDSSNWRSRGQGTLVTVSSGSGGGGSGGGGSGGGGSFEQIQLVQSGSELKKPGASVKVSCKASGYTFTNYGMNWVRQAPGQGLKWMGWINTNTGEPKYAEEFKGRFALSLDTSVSTAYLQINSLKAEDTAVYFCARGYGNYARGAWLAYWGQGTLVTVSSTRIQNPDPAVYQLRDSKSSDKSVCLFTDFDSQTNVSQSKDSDVYITDKCVLDMRSMDFKSNSAVAWSNKSDFACANAFNNSIIPEDTFFPSPESSCGFTSESYQQGVLSATILYEILLGKATLYAVLVSALVLMAMVKRKDSRG

SEQ ID NO: 12995 - protein, 886 aa, synthetic construct
MALPVTALLLPLALLLHAARPEVQLVESGGGLVQPGGSLRLSCAASGFSFSDFWMSWVRQAPGKGLEWVATISQAGSEKDYVDSVKGRFTISRDNAKKSLYLQMNSLRAEDTAVYYCASGVYSFDYRGQGTLVTVSSGTGGGGSGGGGSGGGGSEFDEIVLTQSPATLSLSPGERATLSCSASSSINYIYWLQQKPGQAPRILIYLTSNLASGVPARFSGSGSGTDFTLTISSLEPEDFAVYYCLQWSSNPLTFGGGTKVEIKLEDLKNVFPPEVAVFEPSEAEISHTQKATLVCLATGFYPDHVELSWWVNGKEVHSGVCTDPQPLKEQPALNDSRYCLSSRLRVSATFWQNPRNHFRCQVQFYGLSENDEWTQDRAKPVTQIVSAEAWGRADCDVKLVEKSFETDTNLNFQNLSVIGFRILLLKVAGFNLLMTLRLWSSRAKRSGSGATNFSLLKQAGDVEENPGPTSMDWIWRILFLVGAATGAHSGPQLQLQESGPGLVKPSETLSLTCTVSGDSISSGDYYWGWIRQPPGKGLEWIGHIYYSGVTYYNPSLKSRVTISVDTSRNQFSLKLSSVTAADTAVYYCTREDSSNWRSRGQGTLVTVSSGSGGGGSGGGGSGGGGSFEEVQLVESGGGLVKPGGSLRLSCAASGFTFSSYDMSWVRQAPGKGLEWVSTISSGGSYTYYLDSIKGRFTISRDNAKNSLYLQMNSLRAEDTAVYYCARQGLDYWGRGTLVTVSSTRIQNPDPAVYQLRDSKSSDKSVCLFTDFDSQTNVSQSKDSDVYITDKCVLDMRSMDFKSNSAVAWSNKSDFACANAFNNSIIPEDTFFPSPESSCGFTSESYQQGVLSATILYEILLGKATLYAVLVSALVLMAMVKRKDSRG

SEQ ID NO: 12996 - protein, 895 aa, synthetic construct
MALPVTALLLPLALLLHAARPEVQLVESGGGLVQPGGSLRLSCAASGFSFSDFWMSWVRQAPGKGLEWVATISQAGSEKDYVDSVKGRFTISRDNAKKSLYLQMNSLRAEDTAVYYCASGVYSFDYRGQGTLVTVSSGTGGGGSGGGGSGGGGSEFDIVMTQSPDSLAVSLGERATINCRASKSVSTSGYSFMHWYQQKPGQPPKLLIYLASNLESGVPDRFSGSGSGTDFTLTISSLQAEDVAVYYCQHSREVPWTFGQGTKVEIKRLEDLKNVFPPEVAVFEPSEAEISHTQKATLVCLATGFYPDHVELSWWVNGKEVHSGVCTDPQPLKEQPALNDSRYCLSSRLRVSATFWQNPRNHFRCQVQFYGLSENDEWTQDRAKPVTQIVSAEAWGRADCDVKLVEKSFETDTNLNFQNLSVIGFRILLLKVAGFNLLMTLRLWSSRAKRSGSGATNFSLLKQAGDVEENPGPTSMDWIWRILFLVGAATGAHSGPQLQLQESGPGLVKPSETLSLTCTVSGDSISSGDYYWGWIRQPPGKGLEWIGHIYYSGVTYYNPSLKSRVTISVDTSRNQFSLKLSSVTAADTAVYYCTREDSSNWRSRGQGTLVTVSSGSGGGGSGGGGSGGGGSFEQVQLVQSGAEVKKPGASVKVSCKASGYTFTNYGMNWVRQAPGQGLEWMGWINTYTGEPTYADAFKGRFAFSLDTSTSTAYLQINSLRSDDTAVYYCARDYGDYGMDYWGQGTTVTVSSTRIQNPDPAVYQLRDSKSSDKSVCLFTDFDSQTNVSQSKDSDVYITDKCVLDMRSMDFKSNSAVAWSNKSDFACANAFNNSIIPEDTFFPSPESSCGFTSESYQQGVLSATILYEILLGKATLYAVLVSALVLMAMVKRKDSRG

SEQ ID NO: 12997 - protein, 891 aa, synthetic construct
MALPVTALLLPLALLLHAARPEVQLVESGGGLVQPGGSLRLSCAASGFSFSDFWMSWVRQAPGKGLEWVATISQAGSEKDYVDSVKGRFTISRDNAKKSLYLQMNSLRAEDTAVYYCASGVYSFDYRGQGTLVTVSSGTGGGGSGGGGSGGGGSEFDIVMTQTPLTLSVTIGQPASISCKSSQSLLDSDGKTYLNWLLQRPGQSPERLIYLVSKLDSGVPDRFTGSGSGTDFTLKISRVEAEDLGVYCCWQGTHFPYTFGGGTKVEIKGLEDLKNVFPPEVAVFEPSEAEISHTQKATLVCLATGFYPDHVELSWWVNGKEVHSGVCTDPQPLKEQPALNDSRYCLSSRLRVSATFWQNPRNHFRCQVQFYGLSENDEWTQDRAKPVTQIVSAEAWGRADCDVKLVEKSFETDTNLNFQNLSVIGFRILLLKVAGFNLLMTLRLWSSRAKRSGSGATNFSLLKQAGDVEENPGPTSMDWIWRILFLVGAATGAHSGPQLQLQESGPGLVKPSETLSLTCTVSGDSISSGDYYWGWIRQPPGKGLEWIGHIYYSGVTYYNPSLKSRVTISVDTSRNQFSLKLSSVTAADTAVYYCTREDSSNWRSRGQGTLVTVSSGSGGGGSGGGGSGGGGSFEQVQLQQPGAELVRPGASVKLSCKASGYTFTSYWMNWVKQRPGQGLEWIGMIDPSDSETHYNHIFKDKATLTVDKSSSTAYLQLSSLTSEDSAVYYCARNLYLWGQGTSVTVSSTRIQNPDPAVYQLRDSKSSDKSVCLFTDFDSQTNVSQSKDSDVYITDKCVLDMRSMDFKSNSAVAWSNKSDFACANAFNNSIIPEDTFFPSPESSCGFTSESYQQGVLSATILYEILLGKATLYAVLVSALVLMAMVKRKDSRG

SEQ ID NO: 12998 - protein, 899 aa, synthetic construct
MALPVTALLLPLALLLHAARPEVQLVESGGGLVQPGGSLRLSCAASGFSFSDFWMSWVRQAPGKGLEWVATISQAGSEKDYVDSVKGRFTISRDNAKKSLYLQMNSLRAEDTAVYYCASGVYSFDYRGQGTLVTVSSGTGGGGSGGGGSGGGGSEFDIVMTQSPDSLAVSLGERATINCESSQSLLNSGNQKNYLTWYQQKPGQPPKPLIYWASTRESGVPDRFSGSGSGTDFTLTISSLQAEDVAVYYCQNDYSYPYTFGQGTKLEIKRLEDLKNVFPPEVAVFEPSEAEISHTQKATLVCLATGFYPDHVELSWWVNGKEVHSGVCTDPQPLKEQPALNDSRYCLSSRLRVSATFWQNPRNHFRCQVQFYGLSENDEWTQDRAKPVTQIVSAEAWGRADCDVKLVEKSFETDTNLNFQNLSVIGFRILLLKVAGFNLLMTLRLWSSRAKRSGSGATNFSLLKQAGDVEENPGPTSMDWIWRILFLVGAATGAHSGPQLQLQESGPGLVKPSETLSLTCTVSGDSISSGDYYWGWIRQPPGKGLEWIGHIYYSGVTYYNPSLKSRVTISVDTSRNQFSLKLSSVTAADTAVYYCTREDSSNWRSRGQGTLVTVSSGSGGGGSGGGGSGGGGSFEEVQLVQSGAEVKKPGESLKISCKGSGYSFTDYYMKWARQMPGKGLEWMGDIIPSNGATFYNQKFKGQVTISADKSISTTYLQWSSLKASDTAMYYCARSHLLRASWFAYWGQGTMVTVSSTRIQNPDPAVYQLRDSKSSDKSVCLFTDFDSQTNVSQSKDSDVYITDKCVLDMRSMDFKSNSAVAWSNKSDFACANAFNNSIIPEDTFFPSPESSCGFTSESYQQGVLSATILYEILLGKATLYAVLVSALVLMAMVKRKDSRG

SEQ ID NO: 12999 - protein, 894 aa, synthetic construct
MALPVTALLLPLALLLHAARPEVQLVESGGGLVQPGGSLRLSCAASGFSFSDFWMSWVRQAPGKGLEWVATISQAGSEKDYVDSVKGRFTISRDNAKKSLYLQMNSLRAEDTAVYYCASGVYSFDYRGQGTLVTVSSGTGGGGSGGGGSGGGGSEFDIQMTQSTSSLSASLGDRVTISCSASQGINNYLNWYQQKPDGTVELLIYYTSTLQSGVPSRFSGSGSGTDYSLTISNLEPEDIGTYYCQQYSKLPRTFGGGTKLEIKLEDLKNVFPPEVAVFEPSEAEISHTQKATLVCLATGFYPDHVELSWWVNGKEVHSGVCTDPQPLKEQPALNDSRYCLSSRLRVSATFWQNPRNHFRCQVQFYGLSENDEWTQDRAKPVTQIVSAEAWGRADCDVKLVEKSFETDTNLNFQNLSVIGFRILLLKVAGFNLLMTLRLWSSRAKRSGSGATNFSLLKQAGDVEENPGPTSMDWIWRILFLVGAATGAHSGPQLQLQESGPGLVKPSETLSLTCTVSGDSISSGDYYWGWIRQPPGKGLEWIGHIYYSGVTYYNPSLKSRVTISVDTSRNQFSLKLSSVTAADTAVYYCTREDSSNWRSRGQGTLVTVSSGSGGGGSGGGGSGGGGSFEQVQLQQSGSELMMPGASVKISCKATGYTFSNYWIEWVKQRPGHGLEWIGEILPGTGRTIYNEKFKGKATFTADISSNTVQMQLSSLTSEDSAVYYCARRDYYGNFYYAMDYWGQGTSVTVSSTRIQNPDPAVYQLRDSKSSDKSVCLFTDFDSQTNVSQSKDSDVYITDKCVLDMRSMDFKSNSAVAWSNKSDFACANAFNNSIIPEDTFFPSPESSCGFTSESYQQGVLSATILYEILLGKATLYAVLVSALVLMAMVKRKDSRG

SEQ ID NO: 13000 - protein, 889 aa, synthetic construct
MALPVTALLLPLALLLHAARPEVQLVESGGGLVQPGGSLRLSCAASGFSFSDFWMSWVRQAPGKGLEWVATISQAGSEKDYVDSVKGRFTISRDNAKKSLYLQMNSLRAEDTAVYYCASGVYSFDYRGQGTLVTVSSGTGGGGSGGGGSGGGGSEFDIQMTQSPASLSVSVGETVTITCRASENIYSNLAWYQQKQGKSPQLLVYAATNLADGVPSRFSGSGSGTQYSLKINSLQSEDFGSYYCQHFWGTWTFGGGTTLEIKLEDLKNVFPPEVAVFEPSEAEISHTQKATLVCLATGFYPDHVELSWWVNGKEVHSGVCTDPQPLKEQPALNDSRYCLSSRLRVSATFWQNPRNHFRCQVQFYGLSENDEWTQDRAKPVTQIVSAEAWGRADCDVKLVEKSFETDTNLNFQNLSVIGFRILLLKVAGFNLLMTLRLWSSRAKRSGSGATNFSLLKQAGDVEENPGPTSMDWIWRILFLVGAATGAHSGPQLQLQESGPGLVKPSETLSLTCTVSGDSISSGDYYWGWIRQPPGKGLEWIGHIYYSGVTYYNPSLKSRVTISVDTSRNQFSLKLSSVTAADTAVYYCTREDSSNWRSRGQGTLVTVSSGSGGGGSGGGGSGGGGSFEEVQLQQSGPELVKPGASVKMSCKASGYTFTDYYMKWMKQSHGKSLEWIGDINPNNGGTTYNQKFKGKATLTVDKSSSTAYMQLNSLTSEDSAVYYCARDYGYGYFDYWGQGTTLTVSSTRIQNPDPAVYQLRDSKSSDKSVCLFTDFDSQTNVSQSKDSDVYITDKCVLDMRSMDFKSNSAVAWSNKSDFACANAFNNSIIPEDTFFPSPESSCGFTSESYQQGVLSATILYEILLGKATLYAVLVSALVLMAMVKRKDSRG

SEQ ID NO: 13001 - protein, 892 aa, synthetic construct
MALPVTALLLPLALLLHAARPEVQLVESGGGLVQPGGSLRLSCAASGFSFSDFWMSWVRQAPGKGLEWVATISQAGSEKDYVDSVKGRFTISRDNAKKSLYLQMNSLRAEDTAVYYCASGVYSFDYRGQGTLVTVSSGTGGGGSGGGGSGGGGSEFEIVLTQSPGTLSLSPGERATLSCRASQSVGGYLAWYQQKPGQAPRLLIYDASNRATGIPARFSGSGSGTDFTLTISSLEPEDFAVYYCQQRNNWPPMYTFGQGTKLEIKRLEDLKNVFPPEVAVFEPSEAEISHTQKATLVCLATGFYPDHVELSWWVNGKEVHSGVCTDPQPLKEQPALNDSRYCLSSRLRVSATFWQNPRNHFRCQVQFYGLSENDEWTQDRAKPVTQIVSAEAWGRADCDVKLVEKSFETDTNLNFQNLSVIGFRILLLKVAGFNLLMTLRLWSSRAKRSGSGATNFSLLKQAGDVEENPGPTSMDWIWRILFLVGAATGAHSGPQLQLQESGPGLVKPSETLSLTCTVSGDSISSGDYYWGWIRQPPGKGLEWIGHIYYSGVTYYNPSLKSRVTISVDTSRNQFSLKLSSVTAADTAVYYCTREDSSNWRSRGQGTLVTVSSGSGGGGSGGGGSGGGGSFEQVQLVQSGAEVKKPGSSVKVSCKASGGTFSSYAISWVRQAPGQGLEWMGGIIPILGTANYAQKFQGRVTITADESTSTAYMELSSLRSEDTAVYYCARWGGGAFDIWGQGTMVTVSSTRIQNPDPAVYQLRDSKSSDKSVCLFTDFDSQTNVSQSKDSDVYITDKCVLDMRSMDFKSNSAVAWSNKSDFACANAFNNSIIPEDTFFPSPESSCGFTSESYQQGVLSATILYEILLGKATLYAVLVSALVLMAMVKRKDSRG

SEQ ID NO: 13002 - protein, 887 aa, synthetic construct
MALPVTALLLPLALLLHAARPEVQLVESGGGLVQPGGSLRLSCAASGFSFSDFWMSWVRQAPGKGLEWVATISQAGSEKDYVDSVKGRFTISRDNAKKSLYLQMNSLRAEDTAVYYCASGVYSFDYRGQGTLVTVSSGTGGGGSGGGGSGGGGSEFQIVLTQSPALMSASPGEKVTMTCSASSSVRYMYWYQQKPRSSPKPWIHLTSNLASGVPARFSGSGSGTSYSLTISSMEAEDAATYYCQQWSSHPFTFGSGTKLEIKLEDLKNVFPPEVAVFEPSEAEISHTQKATLVCLATGFYPDHVELSWWVNGKEVHSGVCTDPQPLKEQPALNDSRYCLSSRLRVSATFWQNPRNHFRCQVQFYGLSENDEWTQDRAKPVTQIVSAEAWGRADCDVKLVEKSFETDTNLNFQNLSVIGFRILLLKVAGFNLLMTLRLWSSRAKRSGSGATNFSLLKQAGDVEENPGPTSMDWIWRILFLVGAATGAHSGPQLQLQESGPGLVKPSETLSLTCTVSGDSISSGDYYWGWIRQPPGKGLEWIGHIYYSGVTYYNPSLKSRVTISVDTSRNQFSLKLSSVTAADTAVYYCTREDSSNWRSRGQGTLVTVSSGSGGGGSGGGGSGGGGSFEDVQLQESGPGLVKPSQSLSLTCTVTGFSITSDYSWNWIRQFPGNKLEWMGYISYSGHTSYNPSLESRISITRDTSKNQFFLQLNSVTTEDTATYYCTRGNWDVVYWGQGTLVTVSATRIQNPDPAVYQLRDSKSSDKSVCLFTDFDSQTNVSQSKDSDVYITDKCVLDMRSMDFKSNSAVAWSNKSDFACANAFNNSIIPEDTFFPSPESSCGFTSESYQQGVLSATILYEILLGKATLYAVLVSALVLMAMVKRKDSRG

SEQ ID NO: 13003 - protein, 897 aa, synthetic construct
MALPVTALLLPLALLLHAARPEVQLVESGGGLVQPGGSLRLSCAASGFSFSDFWMSWVRQAPGKGLEWVATISQAGSEKDYVDSVKGRFTISRDNAKKSLYLQMNSLRAEDTAVYYCASGVYSFDYRGQGTLVTVSSGTGGGGSGGGGSGGGGSEFDVVMTQSPLSLPVTLGQPASISCRSSQSIVHSDGNTYLEWYQQRPGQSPRRLIYKVSNRFSGVPDRFSGSGSGTDFTLKISRVEAEDVGVYYCFQGSHAPWTFGGGTKVEIKLEDLKNVFPPEVAVFEPSEAEISHTQKATLVCLATGFYPDHVELSWWVNGKEVHSGVCTDPQPLKEQPALNDSRYCLSSRLRVSATFWQNPRNHFRCQVQFYGLSENDEWTQDRAKPVTQIVSAEAWGRADCDVKLVEKSFETDTNLNFQNLSVIGFRILLLKVAGFNLLMTLRLWSSRAKRSGSGATNFSLLKQAGDVEENPGPTSMDWIWRILFLVGAATGAHSGPQLQLQESGPGLVKPSETLSLTCTVSGDSISSGDYYWGWIRQPPGKGLEWIGHIYYSGVTYYNPSLKSRVTISVDTSRNQFSLKLSSVTAADTAVYYCTREDSSNWRSRGQGTLVTVSSGSGGGGSGGGGSGGGGSFEEVQLVESGGGLVQPGGSLRLSCAASGFTFSSYGMHWVRQAPGKGLEWVAYITTRSSTIYYADSVKGRFTISRDNAKNSLYLQMNSLRAEDTAVYYCTREPLTGYYAMDYWGQGTSVTVSSTRIQNPDPAVYQLRDSKSSDKSVCLFTDFDSQTNVSQSKDSDVYITDKCVLDMRSMDFKSNSAVAWSNKSDFACANAFNNSIIPEDTFFPSPESSCGFTSESYQQGVLSATILYEILLGKATLYAVLVSALVLMAMVKRKDSRG

SEQ ID NO: 13004 - protein, 889 aa, synthetic construct
MALPVTALLLPLALLLHAARPEVQLVESGGGLVQPGGSLRLSCAASGFSFSDFWMSWVRQAPGKGLEWVATISQAGSEKDYVDSVKGRFTISRDNAKKSLYLQMNSLRAEDTAVYYCASGVYSFDYRGQGTLVTVSSGTGGGGSGGGGSGGGGSEFDIQMTQSPSSLSASVGDRVTITCRASQSISLWLNWYQQKPGKAPKLLIYAASTLQSGVPSRFSGSGSGTDFTLTISSLQPEDFATYYCQQYYTSPYTFGQGTKVEIKRLEDLKNVFPPEVAVFEPSEAEISHTQKATLVCLATGFYPDHVELSWWVNGKEVHSGVCTDPQPLKEQPALNDSRYCLSSRLRVSATFWQNPRNHFRCQVQFYGLSENDEWTQDRAKPVTQIVSAEAWGRADCDVKLVEKSFETDTNLNFQNLSVIGFRILLLKVAGFNLLMTLRLWSSRAKRSGSGATNFSLLKQAGDVEENPGPTSMDWIWRILFLVGAATGAHSGPQLQLQESGPGLVKPSETLSLTCTVSGDSISSGDYYWGWIRQPPGKGLEWIGHIYYSGVTYYNPSLKSRVTISVDTSRNQFSLKLSSVTAADTAVYYCTREDSSNWRSRGQGTLVTVSSGSGGGGSGGGGSGGGGSFEQVQLLESGGGLVQPGGSLRLSCAASGFTFSSYAMSWVRQAPGKGLEWVSVIRSSGSSTYYADSVKGRFTISRDNSKNTLYLQMNSLRAEDTAVYYCARGGGYFDYWGQGTLVTVSSTRIQNPDPAVYQLRDSKSSDKSVCLFTDFDSQTNVSQSKDSDVYITDKCVLDMRSMDFKSNSAVAWSNKSDFACANAFNNSIIPEDTFFPSPESSCGFTSESYQQGVLSATILYEILLGKATLYAVLVSALVLMAMVKRKDSRG

SEQ ID NO: 13005 - protein, 892 aa, synthetic construct
MALPVTALLLPLALLLHAARPEVQLVESGGGLVQPGGSLRLSCAASGFSFSDFWMSWVRQAPGKGLEWVATISQAGSEKDYVDSVKGRFTISRDNAKKSLYLQMNSLRAEDTAVYYCASGVYSFDYRGQGTLVTVSSGTGGGGSGGGGSGGGGSEFDIQMTQSPSSLSASVGDRVTITCRASQSISSYLNWYQQKPGKAPKLLIYAVSTLQSGVPSRFSGSGSGTDFTLTISSLQPEDFATYYCQQSGTFPPTTFGQGTKVEIKRLEDLKNVFPPEVAVFEPSEAEISHTQKATLVCLATGFYPDHVELSWWVNGKEVHSGVCTDPQPLKEQPALNDSRYCLSSRLRVSATFWQNPRNHFRCQVQFYGLSENDEWTQDRAKPVTQIVSAEAWGRADCDVKLVEKSFETDTNLNFQNLSVIGFRILLLKVAGFNLLMTLRLWSSRAKRSGSGATNFSLLKQAGDVEENPGPTSMDWIWRILFLVGAATGAHSGPQLQLQESGPGLVKPSETLSLTCTVSGDSISSGDYYWGWIRQPPGKGLEWIGHIYYSGVTYYNPSLKSRVTISVDTSRNQFSLKLSSVTAADTAVYYCTREDSSNWRSRGQGTLVTVSSGSGGGGSGGGGSGGGGSFEQVQLLESGGGLVQPGGSLRLSCAASGFTFSSHGMHWVRQAPGKGLEWVSVISGSGSNTGYADSVKGRFTISRDNSKNTLYLQMNSLRAEDTAVYYCARQWGSYAFDSWGQGTLVTVSSTRIQNPDPAVYQLRDSKSSDKSVCLFTDFDSQTNVSQSKDSDVYITDKCVLDMRSMDFKSNSAVAWSNKSDFACANAFNNSIIPEDTFFPSPESSCGFTSESYQQGVLSATILYEILLGKATLYAVLVSALVLMAMVKRKDSRG

SEQ ID NO: 13006 - protein, 902 aa, synthetic construct
MALPVTALLLPLALLLHAARPEVQLVESGGGLVQPGGSLRLSCAASGFSFSDFWMSWVRQAPGKGLEWVATISQAGSEKDYVDSVKGRFTISRDNAKKSLYLQMNSLRAEDTAVYYCASGVYSFDYRGQGTLVTVSSGTGGGGSGGGGSGGGGSEFDIVMSQSPSSLAVSVGEKVTMSCKSSQSLLHSSNQKNYLAWYQQKPGQSPKVLIYWASTRESGVPDRFTGSGSGTDFTLTITSVKSEDLAVYYCQQYYSYPWTFGGGTRLEIKRLEDLKNVFPPEVAVFEPSEAEISHTQKATLVCLATGFYPDHVELSWWVNGKEVHSGVCTDPQPLKEQPALNDSRYCLSSRLRVSATFWQNPRNHFRCQVQFYGLSENDEWTQDRAKPVTQIVSAEAWGRADCDVKLVEKSFETDTNLNFQNLSVIGFRILLLKVAGFNLLMTLRLWSSRAKRSGSGATNFSLLKQAGDVEENPGPTSMDWIWRILFLVGAATGAHSGPQLQLQESGPGLVKPSETLSLTCTVSGDSISSGDYYWGWIRQPPGKGLEWIGHIYYSGVTYYNPSLKSRVTISVDTSRNQFSLKLSSVTAADTAVYYCTREDSSNWRSRGQGTLVTVSSGSGGGGSGGGGSGGGGSFEEVQLQQSVAELVKPGASVKMSCKVSGYTLTDHTIHWMKQRPEQGLEWIGYIYPRDGITGYNEKFKGKATLTADTSSSTAYMQLNSLTSEDSAVYFCARWGYSYRNYAYYYDYWGQGTTLTVSSTRIQNPDPAVYQLRDSKSSDKSVCLFTDFDSQTNVSQSKDSDVYITDKCVLDMRSMDFKSNSAVAWSNKSDFACANAFNNSIIPEDTFFPSPESSCGFTSESYQQGVLSATILYEILLGKATLYAVLVSALVLMAMVKRKDSRG

SEQ ID NO: 13007 - protein, 899 aa, synthetic construct
MALPVTALLLPLALLLHAARPEVQLVESGGGLVQPGGSLRLSCAASGFSFSDFWMSWVRQAPGKGLEWVATISQAGSEKDYVDSVKGRFTISRDNAKKSLYLQMNSLRAEDTAVYYCASGVYSFDYRGQGTLVTVSSGTGGGGSGGGGSGGGGSEFEIVLTQSPGTLSLSPGERATLSCRASQSVSSSYLAWYQQKPGQAPRLLIYGTSSRATGIPDRFSGSGSGTDFTLTISRLEPEDFAVYYCQQYGSSPFTFGGGTKVEIKRLEDLKNVFPPEVAVFEPSEAEISHTQKATLVCLATGFYPDHVELSWWVNGKEVHSGVCTDPQPLKEQPALNDSRYCLSSRLRVSATFWQNPRNHFRCQVQFYGLSENDEWTQDRAKPVTQIVSAEAWGRADCDVKLVEKSFETDTNLNFQNLSVIGFRILLLKVAGFNLLMTLRLWSSRAKRSGSGATNFSLLKQAGDVEENPGPTSMDWIWRILFLVGAATGAHSGPQLQLQESGPGLVKPSETLSLTCTVSGDSISSGDYYWGWIRQPPGKGLEWIGHIYYSGVTYYNPSLKSRVTISVDTSRNQFSLKLSSVTAADTAVYYCTREDSSNWRSRGQGTLVTVSSGSGGGGSGGGGSGGGGSFEQVQLQESGPGLAKPSETLSLTCTVSGDSITSYYWSWIRQPPGKGLEWIGYIYYSGSTNYNPSLKSRVTISVDTSKNQFSLKLSSVTAADTAVYYCARDQRRIAAAGTHFYGMDVWGQGTTVTVSSTRIQNPDPAVYQLRDSKSSDKSVCLFTDFDSQTNVSQSKDSDVYITDKCVLDMRSMDFKSNSAVAWSNKSDFACANAFNNSIIPEDTFFPSPESSCGFTSESYQQGVLSATILYEILLGKATLYAVLVSALVLMAMVKRKDSRG

SEQ ID NO: 13008 - protein, 891 aa, synthetic construct
MALPVTALLLPLALLLHAARPEVQLVESGGGLVQPGGSLRLSCAASGFSFSDFWMSWVRQAPGKGLEWVATISQAGSEKDYVDSVKGRFTISRDNAKKSLYLQMNSLRAEDTAVYYCASGVYSFDYRGQGTLVTVSSGTGGGGSGGGGSGGGGSEFDILLTQSPVILSVSPGERVSFSCRASQSIGTNIHWYQQRTNGSPRLLIKYASESISGIPSRFSGSGSGTDFTLSINSVESEDIADYYCQQNNNWPTTFGAGTKLELKLEDLKNVFPPEVAVFEPSEAEISHTQKATLVCLATGFYPDHVELSWWVNGKEVHSGVCTDPQPLKEQPALNDSRYCLSSRLRVSATFWQNPRNHFRCQVQFYGLSENDEWTQDRAKPVTQIVSAEAWGRADCDVKLVEKSFETDTNLNFQNLSVIGFRILLLKVAGFNLLMTLRLWSSRAKRSGSGATNFSLLKQAGDVEENPGPTSMDWIWRILFLVGAATGAHSGPQLQLQESGPGLVKPSETLSLTCTVSGDSISSGDYYWGWIRQPPGKGLEWIGHIYYSGVTYYNPSLKSRVTISVDTSRNQFSLKLSSVTAADTAVYYCTREDSSNWRSRGQGTLVTVSSGSGGGGSGGGGSGGGGSFEQVQLKQSGPGLVQPSQSLSITCTVSGFSLTNYGVHWVRQSPGKGLEWLGVIWSGGNTDYNTPFTSRLSINKDNSKSQVFFKMNSLQSNDTAIYYCARALTYYDYEFAYWGQGTLVTVSATRIQNPDPAVYQLRDSKSSDKSVCLFTDFDSQTNVSQSKDSDVYITDKCVLDMRSMDFKSNSAVAWSNKSDFACANAFNNSIIPEDTFFPSPESSCGFTSESYQQGVLSATILYEILLGKATLYAVLVSALVLMAMVKRKDSRG

SEQ ID NO: 13009 - protein, 884 aa, synthetic construct
MALPVTALLLPLALLLHAARPEVQLVESGGGLVQPGGSLRLSCAASGFSFSDFWMSWVRQAPGKGLEWVATISQAGSEKDYVDSVKGRFTISRDNAKKSLYLQMNSLRAEDTAVYYCASGVYSFDYRGQGTLVTVSSGTGGGGSGGGGSGGGGSEFMTQSPKFLLVSAGDRVTLTCKASQSVNNDVYWYQQEPGQSPKLLIYWASTRESGVPDRFTGSGSGTDFTLTISSVQAEDLAVYYCKQSYNLYTFGGGTKLEIKRLEDLKNVFPPEVAVFEPSEAEISHTQKATLVCLATGFYPDHVELSWWVNGKEVHSGVCTDPQPLKEQPALNDSRYCLSSRLRVSATFWQNPRNHFRCQVQFYGLSENDEWTQDRAKPVTQIVSAEAWGRADCDVKLVEKSFETDTNLNFQNLSVIGFRILLLKVAGFNLLMTLRLWSSRAKRSGSGATNFSLLKQAGDVEENPGPTSMDWIWRILFLVGAATGAHSGPQLQLQESGPGLVKPSETLSLTCTVSGDSISSGDYYWGWIRQPPGKGLEWIGHIYYSGVTYYNPSLKSRVTISVDTSRNQFSLKLSSVTAADTAVYYCTREDSSNWRSRGQGTLVTVSSGSGGGGSGGGGSGGGGSFEESGRGLVQPGGSRKLSCAASGFTFSTSGMHWVRQAPEKGLEWVAYISSGSTTIYHADTVKGRFTISRDNPKNTLFLQMTSLRSEDTAMYYCCARSGQFGNYFDYWGQGTTLTVSSTRIQNPDPAVYQLRDSKSSDKSVCLFTDFDSQTNVSQSKDSDVYITDKCVLDMRSMDFKSNSAVAWSNKSDFACANAFNNSIIPEDTFFPSPESSCGFTSESYQQGVLSATILYEILLGKATLYAVLVSALVLMAMVKRKDSRG

SEQ ID NO: 13010 - protein, 889 aa, synthetic construct
MALPVTALLLPLALLLHAARPEVQLVESGGGLVQPGGSLRLSCAASGFSFSDFWMSWVRQAPGKGLEWVATISQAGSEKDYVDSVKGRFTISRDNAKKSLYLQMNSLRAEDTAVYYCASGVYSFDYRGQGTLVTVSSGTGGGGSGGGGSGGGGSEFQSPSSLAVSAGEKVTMSCKSSQSLLNSRTRKNYLAWYQQKPGQSPKLLIYWASTRESGVPDRFTGSGSGTDFTLTISSVQAEDLAVYYCKQSNLYTFGGGTKLEIKLEDLKNVFPPEVAVFEPSEAEISHTQKATLVCLATGFYPDHVELSWWVNGKEVHSGVCTDPQPLKEQPALNDSRYCLSSRLRVSATFWQNPRNHFRCQVQFYGLSENDEWTQDRAKPVTQIVSAEAWGRADCDVKLVEKSFETDTNLNFQNLSVIGFRILLLKVAGFNLLMTLRLWSSRAKRSGSGATNFSLLKQAGDVEENPGPTSMDWIWRILFLVGAATGAHSGPQLQLQESGPGLVKPSETLSLTCTVSGDSISSGDYYWGWIRQPPGKGLEWIGHIYYSGVTYYNPSLKSRVTISVDTSRNQFSLKLSSVTAADTAVYYCTREDSSNWRSRGQGTLVTVSSGSGGGGSGGGGSGGGGSFEQVQLEESGPELVKPGASVKLSCKASGYTFTEYIIHWVKQRSGQGLEWIGWFYPGSGSIKYNEKFKDKATLTADKSSSTVYMELSGLTSEDSAVYFCARHDGYSYFDYWGQGTTLTVSSTRIQNPDPAVYQLRDSKSSDKSVCLFTDFDSQTNVSQSKDSDVYITDKCVLDMRSMDFKSNSAVAWSNKSDFACANAFNNSIIPEDTFFPSPESSCGFTSESYQQGVLSATILYEILLGKATLYAVLVSALVLMAMVKRKDSRG

SEQ ID NO: 13011 - protein, 892 aa, synthetic construct
MALPVTALLLPLALLLHAARPEVQLVESGGGLVQPGGSLRLSCAASGFSFSDFWMSWVRQAPGKGLEWVATISQAGSEKDYVDSVKGRFTISRDNAKKSLYLQMNSLRAEDTAVYYCASGVYSFDYRGQGTLVTVSSGTGGGGSGGGGSGGGGSEFDIQMTQSPSSLSASLGERVSLTCRATQELSGYLSWLQQKPDGTIKRLIYAASTLDSGVPKRFSGNRSGSDYSLTISSLESEDFADYYCLQYAIYPYTFGGGTKLEIKLEDLKNVFPPEVAVFEPSEAEISHTQKATLVCLATGFYPDHVELSWWVNGKEVHSGVCTDPQPLKEQPALNDSRYCLSSRLRVSATFWQNPRNHFRCQVQFYGLSENDEWTQDRAKPVTQIVSAEAWGRADCDVKLVEKSFETDTNLNFQNLSVIGFRILLLKVAGFNLLMTLRLWSSRAKRSGSGATNFSLLKQAGDVEENPGPTSMDWIWRILFLVGAATGAHSGPQLQLQESGPGLVKPSETLSLTCTVSGDSISSGDYYWGWIRQPPGKGLEWIGHIYYSGVTYYNPSLKSRVTISVDTSRNQFSLKLSSVTAADTAVYYCTREDSSNWRSRGQGTLVTVSSGSGGGGSGGGGSGGGGSFEEVQLQQSGPELVKPGASVKMSCKASGYTFTSYFIHWVKQKPGQGLEWIGFINPYNDGSKYNEKFKGKATLTSDKSSSTAYMELSSLTSEDSAVYYCTRDDGYYGYAMDYWGQGTSVTVSSTRIQNPDPAVYQLRDSKSSDKSVCLFTDFDSQTNVSQSKDSDVYITDKCVLDMRSMDFKSNSAVAWSNKSDFACANAFNNSIIPEDTFFPSPESSCGFTSESYQQGVLSATILYEILLGKATLYAVLVSALVLMAMVKRKDSRG

SEQ ID NO: 13012 - protein, 897 aa, synthetic construct
MALPVTALLLPLALLLHAARPEVQLVESGGGLVQPGGSLRLSCAASGFSFSDFWMSWVRQAPGKGLEWVATISQAGSEKDYVDSVKGRFTISRDNAKKSLYLQMNSLRAEDTAVYYCASGVYSFDYRGQGTLVTVSSGTGGGGSGGGGSGGGGSEFDTIVLTQSPASLAVSLGQRATISCRASESVDSYGNSFMHWYQQKPGQPPKLLIYLASNLESGVPARFSGSGSRTDFTLTIDPVEADDAATYYCQQNNYDPWTFGGGTKLEIKLEDLKNVFPPEVAVFEPSEAEISHTQKATLVCLATGFYPDHVELSWWVNGKEVHSGVCTDPQPLKEQPALNDSRYCLSSRLRVSATFWQNPRNHFRCQVQFYGLSENDEWTQDRAKPVTQIVSAEAWGRADCDVKLVEKSFETDTNLNFQNLSVIGFRILLLKVAGFNLLMTLRLWSSRAKRSGSGATNFSLLKQAGDVEENPGPTSMDWIWRILFLVGAATGAHSGPQLQLQESGPGLVKPSETLSLTCTVSGDSISSGDYYWGWIRQPPGKGLEWIGHIYYSGVTYYNPSLKSRVTISVDTSRNQFSLKLSSVTAADTAVYYCTREDSSNWRSRGQGTLVTVSSGSGGGGSGGGGSGGGGSFEEVQLQQSGPELVKPGASVKMSCKASGYTFTSYVMHWVKQKPGQGLEWIGYINPYNDGTKYNEKFKGKATLTSDTSSSTAYMELNSLTSEDSAVYFCARPIYFDNDYFDYWGQGTTLKVSSTRIQNPDPAVYQLRDSKSSDKSVCLFTDFDSQTNVSQSKDSDVYITDKCVLDMRSMDFKSNSAVAWSNKSDFACANAFNNSIIPEDTFFPSPESSCGFTSESYQQGVLSATILYEILLGKATLYAVLVSALVLMAMVKRKDSRG

SEQ ID NO: 13013 - protein, 892 aa, synthetic construct
MALPVTALLLPLALLLHAARPEVQLVESGGGLVQPGGSLRLSCAASGFSFSDFWMSWVRQAPGKGLEWVATISQAGSEKDYVDSVKGRFTISRDNAKKSLYLQMNSLRAEDTAVYYCASGVYSFDYRGQGTLVTVSSGTGGGGSGGGGSGGGGSEFDIQMTQSPSSLSASVGDRVTITCKASQDVGIAVAWYQQKPGKVPKLLIYWASTRHTGVPDRFSGSGSGTDFTLTISSLQPEDVATYYCQQYSSYPYTFGQGTKVEIKRLEDLKNVFPPEVAVFEPSEAEISHTQKATLVCLATGFYPDHVELSWWVNGKEVHSGVCTDPQPLKEQPALNDSRYCLSSRLRVSATFWQNPRNHFRCQVQFYGLSENDEWTQDRAKPVTQIVSAEAWGRADCDVKLVEKSFETDTNLNFQNLSVIGFRILLLKVAGFNLLMTLRLWSSRAKRSGSGATNFSLLKQAGDVEENPGPTSMDWIWRILFLVGAATGAHSGPQLQLQESGPGLVKPSETLSLTCTVSGDSISSGDYYWGWIRQPPGKGLEWIGHIYYSGVTYYNPSLKSRVTISVDTSRNQFSLKLSSVTAADTAVYYCTREDSSNWRSRGQGTLVTVSSGSGGGGSGGGGSGGGGSFEEVQLVESGGGLVQPGGSLRLSCAASGFDFSRYWMSWVRQAPGKGLEWIGEINPDSSTINYAPSLKDKFIISRDNAKNSLYLQMNSLRAEDTAVYYCARPDGNYWYFDVWGQGTLVTVSSTRIQNPDPAVYQLRDSKSSDKSVCLFTDFDSQTNVSQSKDSDVYITDKCVLDMRSMDFKSNSAVAWSNKSDFACANAFNNSIIPEDTFFPSPESSCGFTSESYQQGVLSATILYEILLGKATLYAVLVSALVLMAMVKRKDSRG

SEQ ID NO: 13014 - protein, 892 aa, synthetic construct
MALPVTALLLPLALLLHAARPEVQLVESGGGLVQPGGSLRLSCAASGFSFSDFWMSWVRQAPGKGLEWVATISQAGSEKDYVDSVKGRFTISRDNAKKSLYLQMNSLRAEDTAVYYCASGVYSFDYRGQGTLVTVSSGTGGGGSGGGGSGGGGSEFDIVMTQSQKSMSTSVGDRVSITCKASQDVITGVAWYQQKPGQSPKLLIYSASYRYTGVPDRFTGSGSGTDFTFTISNVQAEDLAVYYCQQHYSTPLTFGAGTKLELKLEDLKNVFPPEVAVFEPSEAEISHTQKATLVCLATGFYPDHVELSWWVNGKEVHSGVCTDPQPLKEQPALNDSRYCLSSRLRVSATFWQNPRNHFRCQVQFYGLSENDEWTQDRAKPVTQIVSAEAWGRADCDVKLVEKSFETDTNLNFQNLSVIGFRILLLKVAGFNLLMTLRLWSSRAKRSGSGATNFSLLKQAGDVEENPGPTSMDWIWRILFLVGAATGAHSGPQLQLQESGPGLVKPSETLSLTCTVSGDSISSGDYYWGWIRQPPGKGLEWIGHIYYSGVTYYNPSLKSRVTISVDTSRNQFSLKLSSVTAADTAVYYCTREDSSNWRSRGQGTLVTVSSGSGGGGSGGGGSGGGGSFEQVQLQQPGAELVRPGASVKLSCKASGYSFTTYWMNWVKQRPGQGLEWIGMIHPSDSETRLNQKFKDKATLTVDKSSSTAYMQLSSPTSEDSAVYYCARSTMIATRAMDYWGQGTSVTVSSTRIQNPDPAVYQLRDSKSSDKSVCLFTDFDSQTNVSQSKDSDVYITDKCVLDMRSMDFKSNSAVAWSNKSDFACANAFNNSIIPEDTFFPSPESSCGFTSESYQQGVLSATILYEILLGKATLYAVLVSALVLMAMVKRKDSRG

SEQ ID NO: 13015 - protein, 898 aa, synthetic construct
MALPVTALLLPLALLLHAARPEVQLVESGGGLVQPGGSLRLSCAASGFSFSDFWMSWVRQAPGKGLEWVATISQAGSEKDYVDSVKGRFTISRDNAKKSLYLQMNSLRAEDTAVYYCASGVYSFDYRGQGTLVTVSSGTGGGGSGGGGSGGGGSEFQSVLTQPPSVSGAPGQRVTISCTGSGSNIGAPYDVSWYQQLPGTAPKLLIYHNNKRPSGVPDRFSGSKSGTSASLAITGLQAEDEADYYCATVEAGLSGSVFGGGTKLTVLGALEDLKNVFPPEVAVFEPSEAEISHTQKATLVCLATGFYPDHVELSWWVNGKEVHSGVCTDPQPLKEQPALNDSRYCLSSRLRVSATFWQNPRNHFRCQVQFYGLSENDEWTQDRAKPVTQIVSAEAWGRADCDVKLVEKSFETDTNLNFQNLSVIGFRILLLKVAGFNLLMTLRLWSSRAKRSGSGATNFSLLKQAGDVEENPGPTSMDWIWRILFLVGAATGAHSGPQLQLQESGPGLVKPSETLSLTCTVSGDSISSGDYYWGWIRQPPGKGLEWIGHIYYSGVTYYNPSLKSRVTISVDTSRNQFSLKLSSVTAADTAVYYCTREDSSNWRSRGQGTLVTVSSGSGGGGSGGGGSGGGGSFEQVQLVQSGAEVKKPGASVKVSCKVSGYTLTELSIHWVRQAPGKGLEWMGGFDPEENEIVYAQRFQGRVTMTEDTSTDTAYMELSSLRSEDTAVYYCAIVGSFSPLTLGLWGQGTMVTVSSTRIQNPDPAVYQLRDSKSSDKSVCLFTDFDSQTNVSQSKDSDVYITDKCVLDMRSMDFKSNSAVAWSNKSDFACANAFNNSIIPEDTFFPSPESSCGFTSESYQQGVLSATILYEILLGKATLYAVLVSALVLMAMVKRKDSRG

SEQ ID NO: 13016 - protein, 898 aa, synthetic construct
MALPVTALLLPLALLLHAARPEVQLVESGGGLVQPGGSLRLSCAASGFSFSDFWMSWVRQAPGKGLEWVATISQAGSEKDYVDSVKGRFTISRDNAKKSLYLQMNSLRAEDTAVYYCASGVYSFDYRGQGTLVTVSSGTGGGGSGGGGSGGGGSEFQSVLTQPPSVSGAPGQRVTISCTGSGSNIGAPYDVSWYQQLPGTAPKLLIYHNNKRPSGVPDRFSGSKSGTSASLAITGLQAEDEADYYCQSYDSSSISTIFGGGTKLTVLGALEDLKNVFPPEVAVFEPSEAEISHTQKATLVCLATGFYPDHVELSWWVNGKEVHSGVCTDPQPLKEQPALNDSRYCLSSRLRVSATFWQNPRNHFRCQVQFYGLSENDEWTQDRAKPVTQIVSAEAWGRADCDVKLVEKSFETDTNLNFQNLSVIGFRILLLKVAGFNLLMTLRLWSSRAKRSGSGATNFSLLKQAGDVEENPGPTSMDWIWRILFLVGAATGAHSGPQLQLQESGPGLVKPSETLSLTCTVSGDSISSGDYYWGWIRQPPGKGLEWIGHIYYSGVTYYNPSLKSRVTISVDTSRNQFSLKLSSVTAADTAVYYCTREDSSNWRSRGQGTLVTVSSGSGGGGSGGGGSGGGGSFEQVQLVQSGAEVKKPGASVKVSCKVSGYTLTELSIHWVRQAPGKGLEWMGGFDPEENEIVYAQRFQGRVTMTEDTSTDTAYMELSSLRSEDTAVYYCAIVGSFSGIAYRPWGQGTMVTVSSTRIQNPDPAVYQLRDSKSSDKSVCLFTDFDSQTNVSQSKDSDVYITDKCVLDMRSMDFKSNSAVAWSNKSDFACANAFNNSIIPEDTFFPSPESSCGFTSESYQQGVLSATILYEILLGKATLYAVLVSALVLMAMVKRKDSRG

SEQ ID NO: 13017 - protein, 886 aa, synthetic construct
MALPVTALLLPLALLLHAARPEVQLVESGGGLVQPGGSLRLSCAASGFSFSDFWMSWVRQAPGKGLEWVATISQAGSEKDYVDSVKGRFTISRDNAKKSLYLQMNSLRAEDTAVYYCASGVYSFDYRGQGTLVTVSSGTGGGGSGGGGSGGGGSEFDIQMTQSPSSLSASVGDRVTITCRASQGIRNNLAWYQQKPGKAPKRLIYAASNLQSGVPSRFTGSGSGTEFTLIVSSLQPEDFATYYCLQHHSYPLTSGGGTKVELEDLKNVFPPEVAVFEPSEAEISHTQKATLVCLATGFYPDHVELSWWVNGKEVHSGVCTDPQPLKEQPALNDSRYCLSSRLRVSATFWQNPRNHFRCQVQFYGLSENDEWTQDRAKPVTQIVSAEAWGRADCDVKLVEKSFETDTNLNFQNLSVIGFRILLLKVAGFNLLMTLRLWSSRAKRSGSGATNFSLLKQAGDVEENPGPTSMDWIWRILFLVGAATGAHSGPQLQLQESGPGLVKPSETLSLTCTVSGDSISSGDYYWGWIRQPPGKGLEWIGHIYYSGVTYYNPSLKSRVTISVDTSRNQFSLKLSSVTAADTAVYYCTREDSSNWRSRGQGTLVTVSSGSGGGGSGGGGSGGGGSFEEVQVLESGGGLVQPGGSLRLSCAASGFTFSSYAMSWVRQAPGKGLEWVSAISGSGGSTNYADSVKGRFTISRDNSKNTLYLQMNSLRAEDTAVYYCAGSSGWSEYWGQGTLVTVSSTRIQNPDPAVYQLRDSKSSDKSVCLFTDFDSQTNVSQSKDSDVYITDKCVLDMRSMDFKSNSAVAWSNKSDFACANAFNNSIIPEDTFFPSPESSCGFTSESYQQGVLSATILYEILLGKATLYAVLVSALVLMAMVKRKDSRG

SEQ ID NO: 13018 - protein, 892 aa, synthetic construct
MALPVTALLLPLALLLHAARPEVQLVESGGGLVQPGGSLRLSCAASGFSFSDFWMSWVRQAPGKGLEWVATISQAGSEKDYVDSVKGRFTISRDNAKKSLYLQMNSLRAEDTAVYYCASGVYSFDYRGQGTLVTVSSGTGGGGSGGGGSGGGGSEFDEIQLVQSGAEVKKPGESLRISCKGSGFNIEDYYIHWVRQMPGKGLEWMGRIDPENDETKYGPIFQGHVTISADTSINTVYLQWSSLKASDTAMYYCAFRGGVYWGQGTTVTVSSLEDLKNVFPPEVAVFEPSEAEISHTQKATLVCLATGFYPDHVELSWWVNGKEVHSGVCTDPQPLKEQPALNDSRYCLSSRLRVSATFWQNPRNHFRCQVQFYGLSENDEWTQDRAKPVTQIVSAEAWGRADCDVKLVEKSFETDTNLNFQNLSVIGFRILLLKVAGFNLLMTLRLWSSRAKRSGSGATNFSLLKQAGDVEENPGPTSMDWIWRILFLVGAATGAHSGPQLQLQESGPGLVKPSETLSLTCTVSGDSISSGDYYWGWIRQPPGKGLEWIGHIYYSGVTYYNPSLKSRVTISVDTSRNQFSLKLSSVTAADTAVYYCTREDSSNWRSRGQGTLVTVSSGSGGGGSGGGGSGGGGSFEDVVMTQSPDSLAVSLGERATINCKSSQSLLDSDGKTYLNWLQQKPGQPPKRLISLVSKLDSGVPDRFSGSGSGTDFTLTISSLQAEDVAVYYCWQGTHFPGTFGGGTKVEIKTRIQNPDPAVYQLRDSKSSDKSVCLFTDFDSQTNVSQSKDSDVYITDKCVLDMRSMDFKSNSAVAWSNKSDFACANAFNNSIIPEDTFFPSPESSCGFTSESYQQGVLSATILYEILLGKATLYAVLVSALVLMAMVKRKDSRG

SEQ ID NO: 13019 - protein, 899 aa, synthetic construct
MALPVTALLLPLALLLHAARPEVQLVESGGGLVQPGGSLRLSCAASGFSFSDFWMSWVRQAPGKGLEWVATISQAGSEKDYVDSVKGRFTISRDNAKKSLYLQMNSLRAEDTAVYYCASGVYSFDYRGQGTLVTVSSGTGGGGSGGGGSGGGGSEFDELVMTQSPSSLTVTAGEKVTMSCKSSQSLLNSGNQKNYLTWYQQKPGQPPKLLIYWASTRESGVPDRFTGSGSGTDFTLTISSVQAEDLAVYYCQNDYSYPLTFGAGTKLEIKLEDLKNVFPPEVAVFEPSEAEISHTQKATLVCLATGFYPDHVELSWWVNGKEVHSGVCTDPQPLKEQPALNDSRYCLSSRLRVSATFWQNPRNHFRCQVQFYGLSENDEWTQDRAKPVTQIVSAEAWGRADCDVKLVEKSFETDTNLNFQNLSVIGFRILLLKVAGFNLLMTLRLWSSRAKRSGSGATNFSLLKQAGDVEENPGPTSMDWIWRILFLVGAATGAHSGPQLQLQESGPGLVKPSETLSLTCTVSGDSISSGDYYWGWIRQPPGKGLEWIGHIYYSGVTYYNPSLKSRVTISVDTSRNQFSLKLSSVTAADTAVYYCTREDSSNWRSRGQGTLVTVSSGSGGGGSGGGGSGGGGSFEEVQLLEQSGAELVRPGTSVKISCKASGYAFTNYWLGWVKQRPGHGLEWIGDIFPGSGNIHYNEKFKGKATLTADKSSSTAYMQLSSLTFEDSAVYFCARLRNWDEPMDYWGQGTTVTVSSTRIQNPDPAVYQLRDSKSSDKSVCLFTDFDSQTNVSQSKDSDVYITDKCVLDMRSMDFKSNSAVAWSNKSDFACANAFNNSIIPEDTFFPSPESSCGFTSESYQQGVLSATILYEILLGKATLYAVLVSALVLMAMVKRKDSRG

SEQ ID NO: 13020 - protein, 900 aa, synthetic construct
MALPVTALLLPLALLLHAARPEVQLVESGGGLVQPGGSLRLSCAASGFSFSDFWMSWVRQAPGKGLEWVATISQAGSEKDYVDSVKGRFTISRDNAKKSLYLQMNSLRAEDTAVYYCASGVYSFDYRGQGTLVTVSSGTGGGGSGGGGSGGGGSEFDELQMTQSPSSLSASVGDRVTITCRASQSISSYLNWYQQKPGQPPKLLIYWASTRESGVPDRFSGSESGTNYTLTISSLQPEDFATYFCQQSDSLPITFGQGTRLDIQLEDLKNVFPPEVAVFEPSEAEISHTQKATLVCLATGFYPDHVELSWWVNGKEVHSGVCTDPQPLKEQPALNDSRYCLSSRLRVSATFWQNPRNHFRCQVQFYGLSENDEWTQDRAKPVTQIVSAEAWGRADCDVKLVEKSFETDTNLNFQNLSVIGFRILLLKVAGFNLLMTLRLWSSRAKRSGSGATNFSLLKQAGDVEENPGPTSMDWIWRILFLVGAATGAHSGPQLQLQESGPGLVKPSETLSLTCTVSGDSISSGDYYWGWIRQPPGKGLEWIGHIYYSGVTYYNPSLKSRVTISVDTSRNQFSLKLSSVTAADTAVYYCTREDSSNWRSRGQGTLVTVSSGSGGGGSGGGGSGGGGSFEEVQLLESGGGVVQPGRSLRLSCAASGFTFSSYGMHWVRQAPGKGLEWVAVISYDGSNKYYADSVKGRFTISRDNSKNTLYLQMNSLRAEDTAVYYCAKDMGWGSGWRPYYYYGMDVWGQGTTVTVSSTRIQNPDPAVYQLRDSKSSDKSVCLFTDFDSQTNVSQSKDSDVYITDKCVLDMRSMDFKSNSAVAWSNKSDFACANAFNNSIIPEDTFFPSPESSCGFTSESYQQGVLSATILYEILLGKATLYAVLVSALVLMAMVKRKDSRG

SEQ ID NO: 13021 - protein, 897 aa, synthetic construct
MALPVTALLLPLALLLHAARPEVQLVESGGGLVQPGGSLRLSCAASGFSFSDFWMSWVRQAPGKGLEWVATISQAGSEKDYVDSVKGRFTISRDNAKKSLYLQMNSLRAEDTAVYYCASGVYSFDYRGQGTLVTVSSGTGGGGSGGGGSGGGGSEFDDIQMTQSPSSLSASVGDRVTITCRASQSISSYLNWYQQKPGKAPKLLIYAASSLQSGVPSRFSGSGSGTDFTLTISSLQPEDLATYYCQQSYSTPFTFGPGTKVDIKLEDLKNVFPPEVAVFEPSEAEISHTQKATLVCLATGFYPDHVELSWWVNGKEVHSGVCTDPQPLKEQPALNDSRYCLSSRLRVSATFWQNPRNHFRCQVQFYGLSENDEWTQDRAKPVTQIVSAEAWGRADCDVKLVEKSFETDTNLNFQNLSVIGFRILLLKVAGFNLLMTLRLWSSRAKRSGSGATNFSLLKQAGDVEENPGPTSMDWIWRILFLVGAATGAHSGPQLQLQESGPGLVKPSETLSLTCTVSGDSISSGDYYWGWIRQPPGKGLEWIGHIYYSGVTYYNPSLKSRVTISVDTSRNQFSLKLSSVTAADTAVYYCTREDSSNWRSRGQGTLVTVSSGSGGGGSGGGGSGGGGSFEVHEVQLVQSGAEVKKPGSSVKVSCKASGGTFSSYAISWVRQAPGQGLEWMGGIIPIFGTANYAQKFQGRVTITADKSTSTAYMELSSLRSEDTAVYYCATFALFGFREQAFDIWGQGTTVTVSSTRIQNPDPAVYQLRDSKSSDKSVCLFTDFDSQTNVSQSKDSDVYITDKCVLDMRSMDFKSNSAVAWSNKSDFACANAFNNSIIPEDTFFPSPESSCGFTSESYQQGVLSATILYEILLGKATLYAVLVSALVLMAMVKRKDSRG

SEQ ID NO: 13022 - protein, 895 aa, synthetic construct
MALPVTALLLPLALLLHAARPEVQLVESGGGLVQPGGSLRLSCAASGFSFSDFWMSWVRQAPGKGLEWVATISQAGSEKDYVDSVKGRFTISRDNAKKSLYLQMNSLRAEDTAVYYCASGVYSFDYRGQGTLVTVSSGTGGGGSGGGGSGGGGSEFDIVLTQSPLSLAVSLGQPAIISCKASQSVSFAGTSLMHWYHQKPGQQPRLLIYRASNLEAGVPDRFSGSGSKTDFTLTISPVEAEDAATYYCQQSREYPYTFGGGTKLEIKRLEDLKNVFPPEVAVFEPSEAEISHTQKATLVCLATGFYPDHVELSWWVNGKEVHSGVCTDPQPLKEQPALNDSRYCLSSRLRVSATFWQNPRNHFRCQVQFYGLSENDEWTQDRAKPVTQIVSAEAWGRADCDVKLVEKSFETDTNLNFQNLSVIGFRILLLKVAGFNLLMTLRLWSSRAKRSGSGATNFSLLKQAGDVEENPGPTSMDWIWRILFLVGAATGAHSGPQLQLQESGPGLVKPSETLSLTCTVSGDSISSGDYYWGWIRQPPGKGLEWIGHIYYSGVTYYNPSLKSRVTISVDTSRNQFSLKLSSVTAADTAVYYCTREDSSNWRSRGQGTLVTVSSGSGGGGSGGGGSGGGGSFEQVQLVQSGAEVVKPGASVKISCKASGYTFTGYFMNWVKQSPGQSLEWIGRIHPYDGDTFYNQKFQGKATLTVDKSSNTAHMELLSLTSEDFAVYYCTRYDGSRAMDYWGQGTTVTVSSTRIQNPDPAVYQLRDSKSSDKSVCLFTDFDSQTNVSQSKDSDVYITDKCVLDMRSMDFKSNSAVAWSNKSDFACANAFNNSIIPEDTFFPSPESSCGFTSESYQQGVLSATILYEILLGKATLYAVLVSALVLMAMVKRKDSRG

SEQ ID NO: 13023 - protein, 892 aa, synthetic construct
MALPVTALLLPLALLLHAARPEVQLVESGGGLVQPGGSLRLSCAASGFSFSDFWMSWVRQAPGKGLEWVATISQAGSEKDYVDSVKGRFTISRDNAKKSLYLQMNSLRAEDTAVYYCASGVYSFDYRGQGTLVTVSSGTGGGGSGGGGSGGGGSEFDDVVMTQTPLSLPVTPGEPASISCRSSQSLVHRNGNTYLHWYLQKPGQSPKLLIHKVSNRFSGVPDRFSGSGSGTDFTLKISRVEAEDLGVYFCSQSTHVPPLTFGAGTKLELKLEDLKNVFPPEVAVFEPSEAEISHTQKATLVCLATGFYPDHVELSWWVNGKEVHSGVCTDPQPLKEQPALNDSRYCLSSRLRVSATFWQNPRNHFRCQVQFYGLSENDEWTQDRAKPVTQIVSAEAWGRADCDVKLVEKSFETDTNLNFQNLSVIGFRILLLKVAGFNLLMTLRLWSSRAKRSGSGATNFSLLKQAGDVEENPGPTSMDWIWRILFLVGAATGAHSGPQLQLQESGPGLVKPSETLSLTCTVSGDSISSGDYYWGWIRQPPGKGLEWIGHIYYSGVTYYNPSLKSRVTISVDTSRNQFSLKLSSVTAADTAVYYCTREDSSNWRSRGQGTLVTVSSGSGGGGSGGGGSGGGGSFEEVQLVQSGAEVEKPGASVKISCKASGSSFTGYNMNWVRQNIGKSLEWIGAIDPYYGGTSYNQKFKGRATLTVDKSTSTAYMHLKSLRSEDTAVYYCVSGMEYWGQGTSVTVSSTRIQNPDPAVYQLRDSKSSDKSVCLFTDFDSQTNVSQSKDSDVYITDKCVLDMRSMDFKSNSAVAWSNKSDFACANAFNNSIIPEDTFFPSPESSCGFTSESYQQGVLSATILYEILLGKATLYAVLVSALVLMAMVKRKDSRG

SEQ ID NO: 13024 - protein, 890 aa, synthetic construct
MALPVTALLLPLALLLHAARPEVQLVESGGGLVQPGGSLRLSCAASGFSFSDFWMSWVRQAPGKGLEWVATISQAGSEKDYVDSVKGRFTISRDNAKKSLYLQMNSLRAEDTAVYYCASGVYSFDYRGQGTLVTVSSGTGGGGSGGGGSGGGGSEFDEIVMTQTPATLSVSAGERVTITCKASQSVSNDVTWYQQKPGQAPRLLIYSASNRYSGVPARFSGSGYGTEFTFTISSVQSEDFAVYFCQQDYSSFGQGTKLEIKRLEDLKNVFPPEVAVFEPSEAEISHTQKATLVCLATGFYPDHVELSWWVNGKEVHSGVCTDPQPLKEQPALNDSRYCLSSRLRVSATFWQNPRNHFRCQVQFYGLSENDEWTQDRAKPVTQIVSAEAWGRADCDVKLVEKSFETDTNLNFQNLSVIGFRILLLKVAGFNLLMTLRLWSSRAKRSGSGATNFSLLKQAGDVEENPGPTSMDWIWRILFLVGAATGAHSGPQLQLQESGPGLVKPSETLSLTCTVSGDSISSGDYYWGWIRQPPGKGLEWIGHIYYSGVTYYNPSLKSRVTISVDTSRNQFSLKLSSVTAADTAVYYCTREDSSNWRSRGQGTLVTVSSGSGGGGSGGGGSGGGGSFEQVQLVESGPGVVQPGRSLRISCAVSGFSVTNYGVHWVRQPPGKGLEWLGVIWAGGITNYNSAFMSRLTISKDNSKNTVYLQMNSLRAEDTAMYYCASRGGHYGYALDYWGQGTLVTVSSTRIQNPDPAVYQLRDSKSSDKSVCLFTDFDSQTNVSQSKDSDVYITDKCVLDMRSMDFKSNSAVAWSNKSDFACANAFNNSIIPEDTFFPSPESSCGFTSESYQQGVLSATILYEILLGKATLYAVLVSALVLMAMVKRKDSRG

SEQ ID NO: 13025 - protein, 892 aa, synthetic construct
MALPVTALLLPLALLLHAARPEVQLVESGGGLVQPGGSLRLSCAASGFSFSDFWMSWVRQAPGKGLEWVATISQAGSEKDYVDSVKGRFTISRDNAKKSLYLQMNSLRAEDTAVYYCASGVYSFDYRGQGTLVTVSSGTGGGGSGGGGSGGGGSEFDIQMTQTASSLPASLGDRVTISCSASQDISNYLNWYQQKPDGTVKLLIFYSSNLHSGVPSRFSGGGSGTDYSLTISNLEPEDIATYFCHQYSKLPWTFGGGTKLEIKRLEDLKNVFPPEVAVFEPSEAEISHTQKATLVCLATGFYPDHVELSWWVNGKEVHSGVCTDPQPLKEQPALNDSRYCLSSRLRVSATFWQNPRNHFRCQVQFYGLSENDEWTQDRAKPVTQIVSAEAWGRADCDVKLVEKSFETDTNLNFQNLSVIGFRILLLKVAGFNLLMTLRLWSSRAKRSGSGATNFSLLKQAGDVEENPGPTSMDWIWRILFLVGAATGAHSGPQLQLQESGPGLVKPSETLSLTCTVSGDSISSGDYYWGWIRQPPGKGLEWIGHIYYSGVTYYNPSLKSRVTISVDTSRNQFSLKLSSVTAADTAVYYCTREDSSNWRSRGQGTLVTVSSGSGGGGSGGGGSGGGGSFEEVTLVESGGDFVKPGGSLKVSCAASGFAFSHYAMSWVRQTPAKRLEWVAYISSGGSGTYYSDSVKGRFTISRDNAKNTLYLQMRSLRSEDSAMYFCTRVKLGTYYFDSWGQGTTLTVSSTRIQNPDPAVYQLRDSKSSDKSVCLFTDFDSQTNVSQSKDSDVYITDKCVLDMRSMDFKSNSAVAWSNKSDFACANAFNNSIIPEDTFFPSPESSCGFTSESYQQGVLSATILYEILLGKATLYAVLVSALVLMAMVKRKDSRG

SEQ ID NO: 13026 - protein, 894 aa, synthetic construct
MALPVTALLLPLALLLHAARPEVQLVESGGGLVQPGGSLRLSCAASGFSFSDFWMSWVRQAPGKGLEWVATISQAGSEKDYVDSVKGRFTISRDNAKKSLYLQMNSLRAEDTAVYYCASGVYSFDYRGQGTLVTVSSGTGGGGSGGGGSGGGGSEFQFVLTQSPSASAALGASAKLTCTLSSAHKTYTIDWYQQQKGKAPRYLIQVKSDGTYTKATGVPDRFSGSSSGADRYLIIPSVQADDEADYYCGTDYTGGYVFGGGTQLTVTLEDLKNVFPPEVAVFEPSEAEISHTQKATLVCLATGFYPDHVELSWWVNGKEVHSGVCTDPQPLKEQPALNDSRYCLSSRLRVSATFWQNPRNHFRCQVQFYGLSENDEWTQDRAKPVTQIVSAEAWGRADCDVKLVEKSFETDTNLNFQNLSVIGFRILLLKVAGFNLLMTLRLWSSRAKRSGSGATNFSLLKQAGDVEENPGPTSMDWIWRILFLVGAATGAHSGPQLQLQESGPGLVKPSETLSLTCTVSGDSISSGDYYWGWIRQPPGKGLEWIGHIYYSGVTYYNPSLKSRVTISVDTSRNQFSLKLSSVTAADTAVYYCTREDSSNWRSRGQGTLVTVSSGSGGGGSGGGGSGGGGSFEEQLKESGGGLFKPTDTLTLTCTVSGFSLSYYGVNWVRQAPGNGLEWIGTIGGSGDTYYASWAKSRSTIIRNTNENTVTLKMTSLTAADTATYFCVRYANIGYEYFNVWGPGTLVTVSSTRIQNPDPAVYQLRDSKSSDKSVCLFTDFDSQTNVSQSKDSDVYITDKCVLDMRSMDFKSNSAVAWSNKSDFACANAFNNSIIPEDTFFPSPESSCGFTSESYQQGVLSATILYEILLGKATLYAVLVSALVLMAMVKRKDSRG

SEQ ID NO: 13027 - protein, 899 aa, synthetic construct
MALPVTALLLPLALLLHAARPEVQLVESGGGLVQPGGSLRLSCAASGFSFSDFWMSWVRQAPGKGLEWVATISQAGSEKDYVDSVKGRFTISRDNAKKSLYLQMNSLRAEDTAVYYCASGVYSFDYRGQGTLVTVSSGTGGGGSGGGGSGGGGSEFQFVLTQSPSVSAALGASAKLTCTLSSAHKTYTIDWYQQQQGEAPRYLMQVKSDGSYTKGTGVPDRFSGSSSGADRYLIIPSVQADDEAGYVCGADDNGGYVFGGGTQLTVTLEDLKNVFPPEVAVFEPSEAEISHTQKATLVCLATGFYPDHVELSWWVNGKEVHSGVCTDPQPLKEQPALNDSRYCLSSRLRVSATFWQNPRNHFRCQVQFYGLSENDEWTQDRAKPVTQIVSAEAWGRADCDVKLVEKSFETDTNLNFQNLSVIGFRILLLKVAGFNLLMTLRLWSSRAKRSGSGATNFSLLKQAGDVEENPGPTSMDWIWRILFLVGAATGAHSGPQLQLQESGPGLVKPSETLSLTCTVSGDSISSGDYYWGWIRQPPGKGLEWIGHIYYSGVTYYNPSLKSRVTISVDTSRNQFSLKLSSVTAADTAVYYCTREDSSNWRSRGQGTLVTVSSGSGGGGSGGGGSGGGGSFEQSVKESEGGLFKPTDTLTLTCTVSGFSLSRHALTWVRQAPGNGLEWIGAIDNAGTTYYASWAKSRSTITRNTDLHTVTLKMTSLTASDTATYFCARVFYDINSGYYLDGMDLWGPGTLVTVSSTRIQNPDPAVYQLRDSKSSDKSVCLFTDFDSQTNVSQSKDSDVYITDKCVLDMRSMDFKSNSAVAWSNKSDFACANAFNNSIIPEDTFFPSPESSCGFTSESYQQGVLSATILYEILLGKATLYAVLVSALVLMAMVKRKDSRG

SEQ ID NO: 13028 - protein, 893 aa, synthetic construct
MALPVTALLLPLALLLHAARPEVQLVESGGGLVQPGGSLRLSCAASGFSFSDFWMSWVRQAPGKGLEWVATISQAGSEKDYVDSVKGRFTISRDNAKKSLYLQMNSLRAEDTAVYYCASGVYSFDYRGQGTLVTVSSGTGGGGSGGGGSGGGGSEFDIQMTQSPSSLSASVGDRVTITCRASQGISSWLAWYQQKPEKAPKSLIYAASSLQSGVPSRFSGSGSGTDFTLTISSLQPEDFATYYCQQYNSYPPTFGGGTKVEIKLEDLKNVFPPEVAVFEPSEAEISHTQKATLVCLATGFYPDHVELSWWVNGKEVHSGVCTDPQPLKEQPALNDSRYCLSSRLRVSATFWQNPRNHFRCQVQFYGLSENDEWTQDRAKPVTQIVSAEAWGRADCDVKLVEKSFETDTNLNFQNLSVIGFRILLLKVAGFNLLMTLRLWSSRAKRSGSGATNFSLLKQAGDVEENPGPTSMDWIWRILFLVGAATGAHSGPQLQLQESGPGLVKPSETLSLTCTVSGDSISSGDYYWGWIRQPPGKGLEWIGHIYYSGVTYYNPSLKSRVTISVDTSRNQFSLKLSSVTAADTAVYYCTREDSSNWRSRGQGTLVTVSSGSGGGGSGGGGSGGGGSFEEVQLVESGGGLVQPGESLRLSCVASGFTFSRYKMNWVRQAPGKGLEWVSYISRSGRDIYYADSVKGRFTISRDNAKNSLYLQMNSLRDEDTAVYYCAGTVTTYYYFGMDVWGHGTTVTVSSTRIQNPDPAVYQLRDSKSSDKSVCLFTDFDSQTNVSQSKDSDVYITDKCVLDMRSMDFKSNSAVAWSNKSDFACANAFNNSIIPEDTFFPSPESSCGFTSESYQQGVLSATILYEILLGKATLYAVLVSALVLMAMVKRKDSRG

SEQ ID NO: 13029 - protein, 894 aa, synthetic construct
MALPVTALLLPLALLLHAARPEVQLVESGGGLVQPGGSLRLSCAASGFSFSDFWMSWVRQAPGKGLEWVATISQAGSEKDYVDSVKGRFTISRDNAKKSLYLQMNSLRAEDTAVYYCASGVYSFDYRGQGTLVTVSSGTGGGGSGGGGSGGGGSEFDIQMTQSPSSLSASVGDRVTITCRASQGISSWLAWYQQKPEKAPKSLIYAASSLQSGVPSRFSGSGSGTDFTLTISSLQPEDFATYYCQQYNSYPPTFGGGTKVEIKLEDLKNVFPPEVAVFEPSEAEISHTQKATLVCLATGFYPDHVELSWWVNGKEVHSGVCTDPQPLKEQPALNDSRYCLSSRLRVSATFWQNPRNHFRCQVQFYGLSENDEWTQDRAKPVTQIVSAEAWGRADCDVKLVEKSFETDTNLNFQNLSVIGFRILLLKVAGFNLLMTLRLWSSRAKRSGSGATNFSLLKQAGDVEENPGPTSMDWIWRILFLVGAATGAHSGPQLQLQESGPGLVKPSETLSLTCTVSGDSISSGDYYWGWIRQPPGKGLEWIGHIYYSGVTYYNPSLKSRVTISVDTSRNQFSLKLSSVTAADTAVYYCTREDSSNWRSRGQGTLVTVSSGSGGGGSGGGGSGGGGSFEEVQLVESGGGSVQPGESLRLSCVASGFTFSRYKMNWVRQAPGKGLEWVSYISRSGRDIYYADSVKGRFTISRDNAKNSLYLQMNSLRDEDTAVYYCAGTVTTYYYDFGMDVWGQGTTVTVSSTRIQNPDPAVYQLRDSKSSDKSVCLFTDFDSQTNVSQSKDSDVYITDKCVLDMRSMDFKSNSAVAWSNKSDFACANAFNNSIIPEDTFFPSPESSCGFTSESYQQGVLSATILYEILLGKATLYAVLVSALVLMAMVKRKDSRG

SEQ ID NO: 13030 - protein, 892 aa, synthetic construct
MALPVTALLLPLALLLHAARPEVQLVESGGGLVQPGGSLRLSCAASGFSFSDFWMSWVRQAPGKGLEWVATISQAGSEKDYVDSVKGRFTISRDNAKKSLYLQMNSLRAEDTAVYYCASGVYSFDYRGQGTLVTVSSGTGGGGSGGGGSGGGGSEFQSVLTQPPSASGTPGQRVTISCSGSRSNVGGNYVFWYQQVPGATPKLLIYRSNQRPSGVPDRFAGSKSGSSASLAISGLRSEDEADYYCATWDDSLSGFVFGTGTKVTVLGLEDLKNVFPPEVAVFEPSEAEISHTQKATLVCLATGFYPDHVELSWWVNGKEVHSGVCTDPQPLKEQPALNDSRYCLSSRLRVSATFWQNPRNHFRCQVQFYGLSENDEWTQDRAKPVTQIVSAEAWGRADCDVKLVEKSFETDTNLNFQNLSVIGFRILLLKVAGFNLLMTLRLWSSRAKRSGSGATNFSLLKQAGDVEENPGPTSMDWIWRILFLVGAATGAHSGPQLQLQESGPGLVKPSETLSLTCTVSGDSISSGDYYWGWIRQPPGKGLEWIGHIYYSGVTYYNPSLKSRVTISVDTSRNQFSLKLSSVTAADTAVYYCTREDSSNWRSRGQGTLVTVSSGSGGGGSGGGGSGGGGSFEVQLVESGGGLVKPGGSLRLSCAASGFTFSDYYMSWIRQAPGKGLEWVSYISSSGSTIYYADSVKGRFTISRDNAKNSLYLQMNSLRAEDTAVYYCARGYGKAYDQWGQGTLVTVSSTRIQNPDPAVYQLRDSKSSDKSVCLFTDFDSQTNVSQSKDSDVYITDKCVLDMRSMDFKSNSAVAWSNKSDFACANAFNNSIIPEDTFFPSPESSCGFTSESYQQGVLSATILYEILLGKATLYAVLVSALVLMAMVKRKDSRG

SEQ ID NO: 13031 - protein, 891 aa, synthetic construct
MALPVTALLLPLALLLHAARPEVQLVESGGGLVQPGGSLRLSCAASGFSFSDFWMSWVRQAPGKGLEWVATISQAGSEKDYVDSVKGRFTISRDNAKKSLYLQMNSLRAEDTAVYYCASGVYSFDYRGQGTLVTVSSGTGGGGSGGGGSGGGGSEFQSVVTQPPSMSAAPGQQVTISCSGGNSNIERNYVSWYLQLPGTAPKLVIFDNDRRPSGIPDRFSGSKSGTSATLGITGLQTGDEADYYCGTWDSSLRGWVFGGGTKLTVLGLEDLKNVFPPEVAVFEPSEAEISHTQKATLVCLATGFYPDHVELSWWVNGKEVHSGVCTDPQPLKEQPALNDSRYCLSSRLRVSATFWQNPRNHFRCQVQFYGLSENDEWTQDRAKPVTQIVSAEAWGRADCDVKLVEKSFETDTNLNFQNLSVIGFRILLLKVAGFNLLMTLRLWSSRAKRSGSGATNFSLLKQAGDVEENPGPTSMDWIWRILFLVGAATGAHSGPQLQLQESGPGLVKPSETLSLTCTVSGDSISSGDYYWGWIRQPPGKGLEWIGHIYYSGVTYYNPSLKSRVTISVDTSRNQFSLKLSSVTAADTAVYYCTREDSSNWRSRGQGTLVTVSSGSGGGGSGGGGSGGGGSFEVQLVESGGGLIQPGGSLRLSCAASGFTFSNYAMNWVRQAPGKGLEWVSTINGRGSSTIYADSVKGRFTISRDNSKNTLYLQMNSLRAEDTATYYCARYISRGLGDSWGQGTLVTVTRIQNPDPAVYQLRDSKSSDKSVCLFTDFDSQTNVSQSKDSDVYITDKCVLDMRSMDFKSNSAVAWSNKSDFACANAFNNSIIPEDTFFPSPESSCGFTSESYQQGVLSATILYEILLGKATLYAVLVSALVLMAMVKRKDSRG

SEQ ID NO: 13032 - protein, 892 aa, synthetic construct
MALPVTALLLPLALLLHAARPEVQLVESGGGLVQPGGSLRLSCAASGFSFSDFWMSWVRQAPGKGLEWVATISQAGSEKDYVDSVKGRFTISRDNAKKSLYLQMNSLRAEDTAVYYCASGVYSFDYRGQGTLVTVSSGTGGGGSGGGGSGGGGSEFDVVMTQTPLSLPVSLGDQASISCRSSQSLVHSNGNTYLHWYLQKPGQSPKLLIYKVSNRFSGVPDRFSGSGSGTDFTLKISRVEAEDLGVYFCSQNTPVPPKFGSGTKLEIKLEDLKNVFPPEVAVFEPSEAEISHTQKATLVCLATGFYPDHVELSWWVNGKEVHSGVCTDPQPLKEQPALNDSRYCLSSRLRVSATFWQNPRNHFRCQVQFYGLSENDEWTQDRAKPVTQIVSAEAWGRADCDVKLVEKSFETDTNLNFQNLSVIGFRILLLKVAGFNLLMTLRLWSSRAKRSGSGATNFSLLKQAGDVEENPGPTSMDWIWRILFLVGAATGAHSGPQLQLQESGPGLVKPSETLSLTCTVSGDSISSGDYYWGWIRQPPGKGLEWIGHIYYSGVTYYNPSLKSRVTISVDTSRNQFSLKLSSVTAADTAVYYCTREDSSNWRSRGQGTLVTVSSGSGGGGSGGGGSGGGGSFEQVQLQQSGAELVRPGASVKLSCKASGYTFNDYEMHWVKQTPVHGLKWIGALEPKTGDTAYSQKFKGKATLTADKSSSTAYMELRSLTSEDSAVYYCTSCYYYTYSGQGTLVTVSATRIQNPDPAVYQLRDSKSSDKSVCLFTDFDSQTNVSQSKDSDVYITDKCVLDMRSMDFKSNSAVAWSNKSDFACANAFNNSIIPEDTFFPSPESSCGFTSESYQQGVLSATILYEILLGKATLYAVLVSALVLMAMVKRKDSRG

SEQ ID NO: 13033 - protein, 891 aa, synthetic construct
MALPVTALLLPLALLLHAARPEVQLVESGGGLVQPGGSLRLSCAASGFSFSDFWMSWVRQAPGKGLEWVATISQAGSEKDYVDSVKGRFTISRDNAKKSLYLQMNSLRAEDTAVYYCASGVYSFDYRGQGTLVTVSSGTGGGGSGGGGSGGGGSEFDIQLTQSPSSLSASVGDRVTITCRASQGIRNDLGWYQQKPGKAPKRLIYAASSLQNGVPSRFSGSGSGTEFTLTISSLQPEDFATYYCLQHNTYPAFGQGTKVEIKRLEDLKNVFPPEVAVFEPSEAEISHTQKATLVCLATGFYPDHVELSWWVNGKEVHSGVCTDPQPLKEQPALNDSRYCLSSRLRVSATFWQNPRNHFRCQVQFYGLSENDEWTQDRAKPVTQIVSAEAWGRADCDVKLVEKSFETDTNLNFQNLSVIGFRILLLKVAGFNLLMTLRLWSSRAKRSGSGATNFSLLKQAGDVEENPGPTSMDWIWRILFLVGAATGAHSGPQLQLQESGPGLVKPSETLSLTCTVSGDSISSGDYYWGWIRQPPGKGLEWIGHIYYSGVTYYNPSLKSRVTISVDTSRNQFSLKLSSVTAADTAVYYCTREDSSNWRSRGQGTLVTVSSGSGGGGSGGGGSGGGGSFEQVQLQESGPGLVKPSQTLSLTCTVSGGSISSFNYYWSWIRHHPGKGLEWIGYIYYSGSTYSNPSLKSRVTISVDTSKNQFSLTLSSVTAADTAVYYCARGYNWNYFDYWGQGTLVTVSSTRIQNPDPAVYQLRDSKSSDKSVCLFTDFDSQTNVSQSKDSDVYITDKCVLDMRSMDFKSNSAVAWSNKSDFACANAFNNSIIPEDTFFPSPESSCGFTSESYQQGVLSATILYEILLGKATLYAVLVSALVLMAMVKRKDSRG

SEQ ID NO: 13034 - protein, 893 aa, synthetic construct
MALPVTALLLPLALLLHAARPEVQLVESGGGLVQPGGSLRLSCAASGFSFSDFWMSWVRQAPGKGLEWVATISQAGSEKDYVDSVKGRFTISRDNAKKSLYLQMNSLRAEDTAVYYCASGVYSFDYRGQGTLVTVSSGTGGGGSGGGGSGGGGSEFDDIVLTQSPASLAVSLGQSVTISCRASESVEYYGTSLMQWYQQKPGQPPKLLIYATSNVESGVPARFSGSGSGTDFSLNIHPVEEDDIAMYFCQQSRKLPSTFGGGTKLEIKLEDLKNVFPPEVAVFEPSEAEISHTQKATLVCLATGFYPDHVELSWWVNGKEVHSGVCTDPQPLKEQPALNDSRYCLSSRLRVSATFWQNPRNHFRCQVQFYGLSENDEWTQDRAKPVTQIVSAEAWGRADCDVKLVEKSFETDTNLNFQNLSVIGFRILLLKVAGFNLLMTLRLWSSRAKRSGSGATNFSLLKQAGDVEENPGPTSMDWIWRILFLVGAATGAHSGPQLQLQESGPGLVKPSETLSLTCTVSGDSISSGDYYWGWIRQPPGKGLEWIGHIYYSGVTYYNPSLKSRVTISVDTSRNQFSLKLSSVTAADTAVYYCTREDSSNWRSRGQGTLVTVSSGSGGGGSGGGGSGGGGSFEDVRLQESGPGQVKPSQTVSLTCSVTGYSITNGNHWWNWIRQVSGSKLEWIGYISSSGSTDSNPSLKSRISITRDTSKNQLFLQLNSVTTEDIATYYCARGYYFDYWGQGTTLTVSSTRIQNPDPAVYQLRDSKSSDKSVCLFTDFDSQTNVSQSKDSDVYITDKCVLDMRSMDFKSNSAVAWSNKSDFACANAFNNSIIPEDTFFPSPESSCGFTSESYQQGVLSATILYEILLGKATLYAVLVSALVLMAMVKRKDSRG

SEQ ID NO: 13035 - protein, 892 aa, synthetic construct
MALPVTALLLPLALLLHAARPEVQLVESGGGLVQPGGSLRLSCAASGFSFSDFWMSWVRQAPGKGLEWVATISQAGSEKDYVDSVKGRFTISRDNAKKSLYLQMNSLRAEDTAVYYCASGVYSFDYRGQGTLVTVSSGTGGGGSGGGGSGGGGSEFDIQMTQSPSSLSASVGDRVTITCRASQDVNTAVAWYQQKPGKAPKLLIYSASFLESGVPSRFSGSRSGTDFTLTISSLQPEDFATYYCQQHYTTPPTFGQTKVEIKRLEDLKNVFPPEVAVFEPSEAEISHTQKATLVCLATGFYPDHVELSWWVNGKEVHSGVCTDPQPLKEQPALNDSRYCLSSRLRVSATFWQNPRNHFRCQVQFYGLSENDEWTQDRAKPVTQIVSAEAWGRADCDVKLVEKSFETDTNLNFQNLSVIGFRILLLKVAGFNLLMTLRLWSSRAKRSGSGATNFSLLKQAGDVEENPGPTSMDWIWRILFLVGAATGAHSGPQLQLQESGPGLVKPSETLSLTCTVSGDSISSGDYYWGWIRQPPGKGLEWIGHIYYSGVTYYNPSLKSRVTISVDTSRNQFSLKLSSVTAADTAVYYCTREDSSNWRSRGQGTLVTVSSGSGGGGSGGGGSGGGGSFEEVQLVESGGGLVQPGGSLRLSCAASGFNIKDTYIHWVRQAPGKGLEWVARIYPTNGYTRYADSVKGRFTISADTSKNTAYLQMNSLRAEDTAVYYCSRWGGDGFYAMDVWGQGTLVTVSSTRIQNPDPAVYQLRDSKSSDKSVCLFTDFDSQTNVSQSKDSDVYITDKCVLDMRSMDFKSNSAVAWSNKSDFACANAFNNSIIPEDTFFPSPESSCGFTSESYQQGVLSATILYEILLGKATLYAVLVSALVLMAMVKRKDSRG

SEQ ID NO: 13036 - protein, 891 aa, synthetic construct
MALPVTALLLPLALLLHAARPEVQLVESGGGLVQPGGSLRLSCAASGFSFSDFWMSWVRQAPGKGLEWVATISQAGSEKDYVDSVKGRFTISRDNAKKSLYLQMNSLRAEDTAVYYCASGVYSFDYRGQGTLVTVSSGTGGGGSGGGGSGGGGSEFDQSVLTQPPSVSVAPGKTARIPCEGNYIGSSNVHWYQQKPGQAPVLVIHFDSDRPSGIPDRFSGSNSGNMATLTISRVEAGDEADYYCQVWENHGWVFGGGTKLTVLSLEDLKNVFPPEVAVFEPSEAEISHTQKATLVCLATGFYPDHVELSWWVNGKEVHSGVCTDPQPLKEQPALNDSRYCLSSRLRVSATFWQNPRNHFRCQVQFYGLSENDEWTQDRAKPVTQIVSAEAWGRADCDVKLVEKSFETDTNLNFQNLSVIGFRILLLKVAGFNLLMTLRLWSSRAKRSGSGATNFSLLKQAGDVEENPGPTSMDWIWRILFLVGAATGAHSGPQLQLQESGPGLVKPSETLSLTCTVSGDSISSGDYYWGWIRQPPGKGLEWIGHIYYSGVTYYNPSLKSRVTISVDTSRNQFSLKLSSVTAADTAVYYCTREDSSNWRSRGQGTLVTVSSGSGGGGSGGGGSGGGGSFEEVQLVETGGGLVQPGESLRLSCAASGFTFSDYEMNWVRQAPGKGLEWVSYISSSGSTIYYADSVKGRFTIYRDNAKNSLYLQMNSLRAEDTALYYCARAWGVGPPDYWGQGTLVTVSSTRIQNPDPAVYQLRDSKSSDKSVCLFTDFDSQTNVSQSKDSDVYITDKCVLDMRSMDFKSNSAVAWSNKSDFACANAFNNSIIPEDTFFPSPESSCGFTSESYQQGVLSATILYEILLGKATLYAVLVSALVLMAMVKRKDSRG

SEQ ID NO: 13037 - protein, 899 aa, synthetic construct
MALPVTALLLPLALLLHAARPEVQLVESGGGLVQPGGSLRLSCAASGFSFSDFWMSWVRQAPGKGLEWVATISQAGSEKDYVDSVKGRFTISRDNAKKSLYLQMNSLRAEDTAVYYCASGVYSFDYRGQGTLVTVSSGTGGGGSGGGGSGGGGSEFDIQMTQSPSSLSASVGDTVTITCQANGYLNWYQQRRGKAPKLLIYDGSKLERGVPSRFSGRRWGQEYNLTINNLQPEDIATYFCQVYEFVVPGTRLDLKRTVAAPLEDLKNVFPPEVAVFEPSEAEISHTQKATLVCLATGFYPDHVELSWWVNGKEVHSGVCTDPQPLKEQPALNDSRYCLSSRLRVSATFWQNPRNHFRCQVQFYGLSENDEWTQDRAKPVTQIVSAEAWGRADCDVKLVEKSFETDTNLNFQNLSVIGFRILLLKVAGFNLLMTLRLWSSRAKRSGSGATNFSLLKQAGDVEENPGPTSMDWIWRILFLVGAATGAHSGPQLQLQESGPGLVKPSETLSLTCTVSGDSISSGDYYWGWIRQPPGKGLEWIGHIYYSGVTYYNPSLKSRVTISVDTSRNQFSLKLSSVTAADTAVYYCTREDSSNWRSRGQGTLVTVSSGSGGGGSGGGGSGGGGSFEQVQLLQSGAAVTKPGASVRVSCEASGYNIRDYFIHWWRQAPGQGLQWVGWINPKTGQPNNPRQFQGRVSLTRHASWDFDTFSFYMDLKALRSDDTAVYFCARQRSDYWDFDVWGSGTQVTVSSASTKGPTRIQNPDPAVYQLRDSKSSDKSVCLFTDFDSQTNVSQSKDSDVYITDKCVLDMRSMDFKSNSAVAWSNKSDFACANAFNNSIIPEDTFFPSPESSCGFTSESYQQGVLSATILYEILLGKATLYAVLVSALVLMAMVKRKDSRG

SEQ ID NO: 13038 - protein, 905 aa, synthetic construct
MALPVTALLLPLALLLHAARPEVQLVESGGGLVQPGGSLRLSCAASGFSFSDFWMSWVRQAPGKGLEWVATISQAGSEKDYVDSVKGRFTISRDNAKKSLYLQMNSLRAEDTAVYYCASGVYSFDYRGQGTLVTVSSGTGGGGSGGGGSGGGGSEFQSALTQPPSASGSPGQSITISCTGTSNNFVSWYQQHAGKAPKLVIYDVNKRPSGVPDRFSGSKSGNTASLTVSGLQTDDEAVYYCGSLVGNWDVIFGGGTKLTVLLEDLKNVFPPEVAVFEPSEAEISHTQKATLVCLATGFYPDHVELSWWVNGKEVHSGVCTDPQPLKEQPALNDSRYCLSSRLRVSATFWQNPRNHFRCQVQFYGLSENDEWTQDRAKPVTQIVSAEAWGRADCDVKLVEKSFETDTNLNFQNLSVIGFRILLLKVAGFNLLMTLRLWSSRAKRSGSGATNFSLLKQAGDVEENPGPTSMDWIWRILFLVGAATGAHSGPQLQLQESGPGLVKPSETLSLTCTVSGDSISSGDYYWGWIRQPPGKGLEWIGHIYYSGVTYYNPSLKSRVTISVDTSRNQFSLKLSSVTAADTAVYYCTREDSSNWRSRGQGTLVTVSSGSGGGGSGGGGSGGGGSFEQPQLQESGPTLVEASETLSLTCAVSGDSTAACNSFWGWVRQPPGKGLEWVGSLSHCASYWNRGWTYHNPSLKSRLTLALDTPKNLVFLKLNSVTAADTATYYCARFGGEVLRYTDWPKPAWVDLWGRGTLVTVSSTRIQNPDPAVYQLRDSKSSDKSVCLFTDFDSQTNVSQSKDSDVYITDKCVLDMRSMDFKSNSAVAWSNKSDFACANAFNNSIIPEDTFFPSPESSCGFTSESYQQGVLSATILYEILLGKATLYAVLVSALVLMAMVKRKDSRG

SEQ ID NO: 13039 - protein, 890 aa, synthetic construct
MALPVTALLLPLALLLHAARPEVQLVESGGGLVQPGGSLRLSCAASGFSFSDFWMSWVRQAPGKGLEWVATISQAGSEKDYVDSVKGRFTISRDNAKKSLYLQMNSLRAEDTAVYYCASGVYSFDYRGQGTLVTVSSGTGGGGSGGGGSGGGGSEFEIVLTQSPGTLSLSPGETAIISCRTSQYGSLAWYQQRPGQAPRLVIYSGSTRAAGIPDRFSGSRWGPDYNLTISNLESGDFGVYYCQQYEFFGQGTKVQVDIKRLEDLKNVFPPEVAVFEPSEAEISHTQKATLVCLATGFYPDHVELSWWVNGKEVHSGVCTDPQPLKEQPALNDSRYCLSSRLRVSATFWQNPRNHFRCQVQFYGLSENDEWTQDRAKPVTQIVSAEAWGRADCDVKLVEKSFETDTNLNFQNLSVIGFRILLLKVAGFNLLMTLRLWSSRAKRSGSGATNFSLLKQAGDVEENPGPTSMDWIWRILFLVGAATGAHSGPQLQLQESGPGLVKPSETLSLTCTVSGDSISSGDYYWGWIRQPPGKGLEWIGHIYYSGVTYYNPSLKSRVTISVDTSRNQFSLKLSSVTAADTAVYYCTREDSSNWRSRGQGTLVTVSSGSGGGGSGGGGSGGGGSFEQVQLVQSGGQMKKPGESMRISCRASGYEFIDCTLNWIRLAPGKRPEWMGWLKPRGGAVNYARPLQGRVTMTRDVYSDTAFLELRSLTVDDTAVYFCTRGKNCDYNWDFEHWGRGTPVIVSSTRIQNPDPAVYQLRDSKSSDKSVCLFTDFDSQTNVSQSKDSDVYITDKCVLDMRSMDFKSNSAVAWSNKSDFACANAFNNSIIPEDTFFPSPESSCGFTSESYQQGVLSATILYEILLGKATLYAVLVSALVLMAMVKRKDSRG

SEQ ID NO: 13040 - protein, 900 aa, synthetic construct
MALPVTALLLPLALLLHAARPEVQLVESGGGLVQPGGSLRLSCAASGFSFSDFWMSWVRQAPGKGLEWVATISQAGSEKDYVDSVKGRFTISRDNAKKSLYLQMNSLRAEDTAVYYCASGVYSFDYRGQGTLVTVSSGTGGGGSGGGGSGGGGSEFELVLTQSPGTLSLSAGERATLSCRASQSVSSGSLAWYQQKPGQAPRLLIYGASTRATGIPDRFSGSGSGTDFTLTIGRLEPEDLAVYYCQQYGTSPYTFGQGTKLEILEDLKNVFPPEVAVFEPSEAEISHTQKATLVCLATGFYPDHVELSWWVNGKEVHSGVCTDPQPLKEQPALNDSRYCLSSRLRVSATFWQNPRNHFRCQVQFYGLSENDEWTQDRAKPVTQIVSAEAWGRADCDVKLVEKSFETDTNLNFQNLSVIGFRILLLKVAGFNLLMTLRLWSSRAKRSGSGATNFSLLKQAGDVEENPGPTSMDWIWRILFLVGAATGAHSGPQLQLQESGPGLVKPSETLSLTCTVSGDSISSGDYYWGWIRQPPGKGLEWIGHIYYSGVTYYNPSLKSRVTISVDTSRNQFSLKLSSVTAADTAVYYCTREDSSNWRSRGQGTLVTVSSGSGGGGSGGGGSGGGGSFELEQSGAEVKKPGSSVQVSCKASGGTFSMYGFNWVRQAPGHGLEWMGGIIPIFGTSNYAQKFRGRVTFTADQATSTAYMELTNLRSDDTAVYYCARDFGPDWEDGDSYDGSGRGFFDFWGQGTLVTVSSTRIQNPDPAVYQLRDSKSSDKSVCLFTDFDSQTNVSQSKDSDVYITDKCVLDMRSMDFKSNSAVAWSNKSDFACANAFNNSIIPEDTFFPSPESSCGFTSESYQQGVLSATILYEILLGKATLYAVLVSALVLMAMVKRKDSRG

SEQ ID NO: 13041 - protein, 880 aa, synthetic construct
MALPVTALLLPLALLLHAARPEVQLVESGGGLVQPGGSLRLSCAASGFSFSDFWMSWVRQAPGKGLEWVATISQAGSEKDYVDSVKGRFTISRDNAKKSLYLQMNSLRAEDTAVYYCASGVYSFDYRGQGTLVTVSSGTGGGGSGGGGSGGGGSEFDIQMTQSPSSLSASVGDRVTITCQASQDINNYLNWYQQKPGKAPKLLIYDASNLQTGVPSRFSGSGSGTDFTFTIEDIATYYCQQYTFGPGTKVDIKLEDLKNVFPPEVAVFEPSEAEISHTQKATLVCLATGFYPDHVELSWWVNGKEVHSGVCTDPQPLKEQPALNDSRYCLSSRLRVSATFWQNPRNHFRCQVQFYGLSENDEWTQDRAKPVTQIVSAEAWGRADCDVKLVEKSFETDTNLNFQNLSVIGFRILLLKVAGFNLLMTLRLWSSRAKRSGSGATNFSLLKQAGDVEENPGPTSMDWIWRILFLVGAATGAHSGPQLQLQESGPGLVKPSETLSLTCTVSGDSISSGDYYWGWIRQPPGKGLEWIGHIYYSGVTYYNPSLKSRVTISVDTSRNQFSLKLSSVTAADTAVYYCTREDSSNWRSRGQGTLVTVSSGSGGGGSGGGGSGGGGSFEEVQLLESGGGLVQPGGSLRLSCAASGFTFSWYSMTWVRQAPGKGLEWVSSIVPWGDFTQYADSVKGRFTISRDNSKNTLYLQMNSLRAEDTAVYYCAKGPGWGSFDLWGRGTLVTVSSTRIQNPDPAVYQLRDSKSSDKSVCLFTDFDSQTNVSQSKDSDVYITDKCVLDMRSMDFKSNSAVAWSNKSDFACANAFNNSIIPEDTFFPSPESSCGFTSESYQQGVLSATILYEILLGKATLYAVLVSALVLMAMVKRKDSRG

SEQ ID NO: 13042 - protein, 890 aa, synthetic construct
MALPVTALLLPLALLLHAARPEVQLVESGGGLVQPGGSLRLSCAASGFSFSDFWMSWVRQAPGKGLEWVATISQAGSEKDYVDSVKGRFTISRDNAKKSLYLQMNSLRAEDTAVYYCASGVYSFDYRGQGTLVTVSSGTGGGGSGGGGSGGGGSEFDIQMTQSPSSLSASVGDRVTITCTASLSVSSTYLHWYQQKPGSSPKLWIYSTSNLASGVPSRFSGSGSGTSYTLTISSLQPEDFATYYCHQYHRSPLTFGGGTKVEIKRLEDLKNVFPPEVAVFEPSEAEISHTQKATLVCLATGFYPDHVELSWWVNGKEVHSGVCTDPQPLKEQPALNDSRYCLSSRLRVSATFWQNPRNHFRCQVQFYGLSENDEWTQDRAKPVTQIVSAEAWGRADCDVKLVEKSFETDTNLNFQNLSVIGFRILLLKVAGFNLLMTLRLWSSRAKRSGSGATNFSLLKQAGDVEENPGPTSMDWIWRILFLVGAATGAHSGPQLQLQESGPGLVKPSETLSLTCTVSGDSISSGDYYWGWIRQPPGKGLEWIGHIYYSGVTYYNPSLKSRVTISVDTSRNQFSLKLSSVTAADTAVYYCTREDSSNWRSRGQGTLVTVSSGSGGGGSGGGGSGGGGSFEEVQLVESGGGLVQPGGSLRLSCAASGFSLTKYGVHWVRQAPGKGLEWVGVKWAGGSTDYNSALMSRFTISKDNAKNSLYLQMNSLRAEDTAVYYCARDHRDAMDYWGQGTLVTVSSTRIQNPDPAVYQLRDSKSSDKSVCLFTDFDSQTNVSQSKDSDVYITDKCVLDMRSMDFKSNSAVAWSNKSDFACANAFNNSIIPEDTFFPSPESSCGFTSESYQQGVLSATILYEILLGKATLYAVLVSALVLMAMVKRKDSRG

SEQ ID NO: 13043 - protein, 894 aa, synthetic construct
MALPVTALLLPLALLLHAARPEVQLVESGGGLVQPGGSLRLSCAASGFSFSDFWMSWVRQAPGKGLEWVATISQAGSEKDYVDSVKGRFTISRDNAKKSLYLQMNSLRAEDTAVYYCASGVYSFDYRGQGTLVTVSSGTGGGGSGGGGSGGGGSEFDIQMTQSPSSLSASVGDRVTITCKASQDVGTAVAWYQQKPGKAPKLLIYSASYRSTGVPSRFSGSGSGTDFTLTISSLQPEDFATYYCQHHYSAPWTFGGGTKVEIKLEDLKNVFPPEVAVFEPSEAEISHTQKATLVCLATGFYPDHVELSWWVNGKEVHSGVCTDPQPLKEQPALNDSRYCLSSRLRVSATFWQNPRNHFRCQVQFYGLSENDEWTQDRAKPVTQIVSAEAWGRADCDVKLVEKSFETDTNLNFQNLSVIGFRILLLKVAGFNLLMTLRLWSSRAKRSGSGATNFSLLKQAGDVEENPGPTSMDWIWRILFLVGAATGAHSGPQLQLQESGPGLVKPSETLSLTCTVSGDSISSGDYYWGWIRQPPGKGLEWIGHIYYSGVTYYNPSLKSRVTISVDTSRNQFSLKLSSVTAADTAVYYCTREDSSNWRSRGQGTLVTVSSGSGGGGSGGGGSGGGGSFEEVQLVESGGGLVQPGGSLRLSCAASGFTFSRNGMSWVRQAPGKGLEWVATVSSGGSYIYYADSVKGRFTISRDNAKNSLYLQMNSLRAEDTAVYYCARQGTTALATRFFDVWGQGTLVTVSSTRIQNPDPAVYQLRDSKSSDKSVCLFTDFDSQTNVSQSKDSDVYITDKCVLDMRSMDFKSNSAVAWSNKSDFACANAFNNSIIPEDTFFPSPESSCGFTSESYQQGVLSATILYEILLGKATLYAVLVSALVLMAMVKRKDSRG

SEQ ID NO: 13044 - protein, 890 aa, synthetic construct
MALPVTALLLPLALLLHAARPEVQLVESGGGLVQPGGSLRLSCAASGFSFSDFWMSWVRQAPGKGLEWVATISQAGSEKDYVDSVKGRFTISRDNAKKSLYLQMNSLRAEDTAVYYCASGVYSFDYRGQGTLVTVSSGTGGGGSGGGGSGGGGSEFDIQMTQSPPSLSASVGGKVTITCKASQDIDRYMAWYQDKPGKGPKLLIHDTSTLQPGIPSRFSGSGSGRDYSFSISNLEPEDIATYYCLQYDNLWTFGGGTKLEIKRLEDLKNVFPPEVAVFEPSEAEISHTQKATLVCLATGFYPDHVELSWWVNGKEVHSGVCTDPQPLKEQPALNDSRYCLSSRLRVSATFWQNPRNHFRCQVQFYGLSENDEWTQDRAKPVTQIVSAEAWGRADCDVKLVEKSFETDTNLNFQNLSVIGFRILLLKVAGFNLLMTLRLWSSRAKRSGSGATNFSLLKQAGDVEENPGPTSMDWIWRILFLVGAATGAHSGPQLQLQESGPGLVKPSETLSLTCTVSGDSISSGDYYWGWIRQPPGKGLEWIGHIYYSGVTYYNPSLKSRVTISVDTSRNQFSLKLSSVTAADTAVYYCTREDSSNWRSRGQGTLVTVSSGSGGGGSGGGGSGGGGSFEQVQLVQSGAELVKPGASVKMSCKASGYIFTNYNIHWVKKSPGQGLEWIGAIYPGNGDAPYSQKFQDRATLTADTSSSTTYMELSSLTSEDSAVYYCVRANWDVAFAYWGQGTLVSVSSTRIQNPDPAVYQLRDSKSSDKSVCLFTDFDSQTNVSQSKDSDVYITDKCVLDMRSMDFKSNSAVAWSNKSDFACANAFNNSIIPEDTFFPSPESSCGFTSESYQQGVLSATILYEILLGKATLYAVLVSALVLMAMVKRKDSRG

SEQ ID NO: 13045 - protein, 891 aa, synthetic construct
MALPVTALLLPLALLLHAARPEVQLVESGGGLVQPGGSLRLSCAASGFSFSDFWMSWVRQAPGKGLEWVATISQAGSEKDYVDSVKGRFTISRDNAKKSLYLQMNSLRAEDTAVYYCASGVYSFDYRGQGTLVTVSSGTGGGGSGGGGSGGGGSEFDIQMTQSPASLSASVGETVTITCRVSGNIHNYLAWYQQKQGKSPQLLVYNAKTLADGVPSRFSGSGSGTQYSLKINSLQPEDFGSYYCQHFWSNPYTFGGGTKLEIKLEDLKNVFPPEVAVFEPSEAEISHTQKATLVCLATGFYPDHVELSWWVNGKEVHSGVCTDPQPLKEQPALNDSRYCLSSRLRVSATFWQNPRNHFRCQVQFYGLSENDEWTQDRAKPVTQIVSAEAWGRADCDVKLVEKSFETDTNLNFQNLSVIGFRILLLKVAGFNLLMTLRLWSSRAKRSGSGATNFSLLKQAGDVEENPGPTSMDWIWRILFLVGAATGAHSGPQLQLQESGPGLVKPSETLSLTCTVSGDSISSGDYYWGWIRQPPGKGLEWIGHIYYSGVTYYNPSLKSRVTISVDTSRNQFSLKLSSVTAADTAVYYCTREDSSNWRSRGQGTLVTVSSGSGGGGSGGGGSGGGGSFEQVQLQQSGASVKVSCKASELVRPGTGYAFTNYLIEWVKQRPGQGLEWIGVINPGSGGTNYNEKFKGKATLTADKSSSTAYMQLSSLTSDDSAVYFCARYRSYDWYFDVWGAGTTVTVSSTRIQNPDPAVYQLRDSKSSDKSVCLFTDFDSQTNVSQSKDSDVYITDKCVLDMRSMDFKSNSAVAWSNKSDFACANAFNNSIIPEDTFFPSPESSCGFTSESYQQGVLSATILYEILLGKATLYAVLVSALVLMAMVKRKDSRG

SEQ ID NO: 13046 - protein, 890 aa, synthetic construct
MALPVTALLLPLALLLHAARPEVQLVESGGGLVQPGGSLRLSCAASGFSFSDFWMSWVRQAPGKGLEWVATISQAGSEKDYVDSVKGRFTISRDNAKKSLYLQMNSLRAEDTAVYYCASGVYSFDYRGQGTLVTVSSGTGGGGSGGGGSGGGGSEFDIQMTQSFSSLSASVGDRVTITCRASQDISNYLNWYQQKPGKAPKLLIYYTSRLHSGVPSRFSGSGSGTDYTLTISSLQPEDFATYFCQQGNTLPWTFGGGTKLEIKRLEDLKNVFPPEVAVFEPSEAEISHTQKATLVCLATGFYPDHVELSWWVNGKEVHSGVCTDPQPLKEQPALNDSRYCLSSRLRVSATFWQNPRNHFRCQVQFYGLSENDEWTQDRAKPVTQIVSAEAWGRADCDVKLVEKSFETDTNLNFQNLSVIGFRILLLKVAGFNLLMTLRLWSSRAKRSGSGATNFSLLKQAGDVEENPGPTSMDWIWRILFLVGAATGAHSGPQLQLQESGPGLVKPSETLSLTCTVSGDSISSGDYYWGWIRQPPGKGLEWIGHIYYSGVTYYNPSLKSRVTISVDTSRNQFSLKLSSVTAADTAVYYCTREDSSNWRSRGQGTLVTVSSGSGGGGSGGGGSGGGGSFEEVQLVQSGGGLVQSGGSLRLSCRASGYTFTRYWMLWVRQRPGKGLEWVAEINPRNDRTNYNEKFKTRFTISVDRSKNTLYLQMDSLRAEDTAVYFCALGGGYAMDYWGQGTLVTVSSTRIQNPDPAVYQLRDSKSSDKSVCLFTDFDSQTNVSQSKDSDVYITDKCVLDMRSMDFKSNSAVAWSNKSDFACANAFNNSIIPEDTFFPSPESSCGFTSESYQQGVLSATILYEILLGKATLYAVLVSALVLMAMVKRKDSRG

SEQ ID NO: 13047 - protein, 891 aa, synthetic construct
MALPVTALLLPLALLLHAARPEVQLVESGGGLVQPGGSLRLSCAASGFSFSDFWMSWVRQAPGKGLEWVATISQAGSEKDYVDSVKGRFTISRDNAKKSLYLQMNSLRAEDTAVYYCASGVYSFDYRGQGTLVTVSSGTGGGGSGGGGSGGGGSEFDIQMTQSPASLSASVGETVTIICRASVNIYSYLAWYQQKQGKSPQLLVYNAKILAEGVPSRFSGSGSGTQFSLKINSLQPEDFGSYYCQHHYGTFTFGSGTKLEIKRLEDLKNVFPPEVAVFEPSEAEISHTQKATLVCLATGFYPDHVELSWWVNGKEVHSGVCTDPQPLKEQPALNDSRYCLSSRLRVSATFWQNPRNHFRCQVQFYGLSENDEWTQDRAKPVTQIVSAEAWGRADCDVKLVEKSFETDTNLNFQNLSVIGFRILLLKVAGFNLLMTLRLWSSRAKRSGSGATNFSLLKQAGDVEENPGPTSMDWIWRILFLVGAATGAHSGPQLQLQESGPGLVKPSETLSLTCTVSGDSISSGDYYWGWIRQPPGKGLEWIGHIYYSGVTYYNPSLKSRVTISVDTSRNQFSLKLSSVTAADTAVYYCTREDSSNWRSRGQGTLVTVSSGSGGGGSGGGGSGGGGSFEQVQLKESGPGLVAPSQSLSITCTISGFSLTSYGVHWVRQPPGKGLEWLVVIWSDGSTTYNSALKSRLSISKDNSKSQVFLKMNSLQTDDTAIYYCASHYGSTLAFASWGHGTLVTVSAATRIQNPDPAVYQLRDSKSSDKSVCLFTDFDSQTNVSQSKDSDVYITDKCVLDMRSMDFKSNSAVAWSNKSDFACANAFNNSIIPEDTFFPSPESSCGFTSESYQQGVLSATILYEILLGKATLYAVLVSALVLMAMVKRKDSRG

SEQ ID NO: 13048 - protein, 899 aa, synthetic construct
MALPVTALLLPLALLLHAARPEVQLVESGGGLVQPGGSLRLSCAASGFSFSDFWMSWVRQAPGKGLEWVATISQAGSEKDYVDSVKGRFTISRDNAKKSLYLQMNSLRAEDTAVYYCASGVYSFDYRGQGTLVTVSSGTGGGGSGGGGSGGGGSEFDIVMTQSHKFMSTSVGDRVSVTCKASQNVGNNVAWYQQKPGQSPKVLIYSASYRYSGVPDRFTGSGSGTDFTLTISNVQSEDLAEYFCQQYNTYPFTFGSGTKLEIKLEDLKNVFPPEVAVFEPSEAEISHTQKATLVCLATGFYPDHVELSWWVNGKEVHSGVCTDPQPLKEQPALNDSRYCLSSRLRVSATFWQNPRNHFRCQVQFYGLSENDEWTQDRAKPVTQIVSAEAWGRADCDVKLVEKSFETDTNLNFQNLSVIGFRILLLKVAGFNLLMTLRLWSSRAKRSGSGATNFSLLKQAGDVEENPGPTSMDWIWRILFLVGAATGAHSGPQLQLQESGPGLVKPSETLSLTCTVSGDSISSGDYYWGWIRQPPGKGLEWIGHIYYSGVTYYNPSLKSRVTISVDTSRNQFSLKLSSVTAADTAVYYCTREDSSNWRSRGQGTLVTVSSGSGGGGSGGGGSGGGGSFEEVQLEESGGGLVQPGGSMKLSCVASGFTFSNYWMNWVRQSPEKGLEWVAEIRFKSHNYATHFAESVKGRFTISRDDSKSSVYLQMNNLRAEDTGIYYCTRRIGNSDYDWWYFDVWGAGTSVTVSSASTRIQNPDPAVYQLRDSKSSDKSVCLFTDFDSQTNVSQSKDSDVYITDKCVLDMRSMDFKSNSAVAWSNKSDFACANAFNNSIIPEDTFFPSPESSCGFTSESYQQGVLSATILYEILLGKATLYAVLVSALVLMAMVKRKDSRG

SEQ ID NO: 13049 - protein, 892 aa, synthetic construct
MALPVTALLLPLALLLHAARPEVQLVESGGGLVQPGGSLRLSCAASGFSFSDFWMSWVRQAPGKGLEWVATISQAGSEKDYVDSVKGRFTISRDNAKKSLYLQMNSLRAEDTAVYYCASGVYSFDYRGQGTLVTVSSGTGGGGSGGGGSGGGGSEFDQIVLTQSPAIMSASPGEKVTISCSASSSVSYMYWYQQKPGSSPKPWIYRTSNLASGVPARFSGSGSGTSYSLTISNMEAEDAAAYYCQQYHSYPTTFGGGTKLEVKLEDLKNVFPPEVAVFEPSEAEISHTQKATLVCLATGFYPDHVELSWWVNGKEVHSGVCTDPQPLKEQPALNDSRYCLSSRLRVSATFWQNPRNHFRCQVQFYGLSENDEWTQDRAKPVTQIVSAEAWGRADCDVKLVEKSFETDTNLNFQNLSVIGFRILLLKVAGFNLLMTLRLWSSRAKRSGSGATNFSLLKQAGDVEENPGPTSMDWIWRILFLVGAATGAHSGPQLQLQESGPGLVKPSETLSLTCTVSGDSISSGDYYWGWIRQPPGKGLEWIGHIYYSGVTYYNPSLKSRVTISVDTSRNQFSLKLSSVTAADTAVYYCTREDSSNWRSRGQGTLVTVSSGSGGGGSGGGGSGGGGSFEEVQLVESGGGLVQPKGSLKLSCAASGFSFNTYAMNWVRQAPGKGLEWIAHIRSKSNNFATYYADSVKDRFSISRDASENILFLQMNNLKTEDTAMYYCVRQGGDFPMDYWGQGTSVTVSSTRIQNPDPAVYQLRDSKSSDKSVCLFTDFDSQTNVSQSKDSDVYITDKCVLDMRSMDFKSNSAVAWSNKSDFACANAFNNSIIPEDTFFPSPESSCGFTSESYQQGVLSATILYEILLGKATLYAVLVSALVLMAMVKRKDSRG

SEQ ID NO: 13050 - protein, 891 aa, synthetic construct
MALPVTALLLPLALLLHAARPEVQLVESGGGLVQPGGSLRLSCAASGFSFSDFWMSWVRQAPGKGLEWVATISQAGSEKDYVDSVKGRFTISRDNAKKSLYLQMNSLRAEDTAVYYCASGVYSFDYRGQGTLVTVSSGTGGGGSGGGGSGGGGSEFDDIQMTQSSSSFSVSLGDRVTITCMASEDIYIRLAWYQQKPGNAPRLLISAATSLETGVPSRFSGSGSGKDYTLSITSLQTEDVGTYYCQQYWSSPWTFGGGTKLEINLEDLKNVFPPEVAVFEPSEAEISHTQKATLVCLATGFYPDHVELSWWVNGKEVHSGVCTDPQPLKEQPALNDSRYCLSSRLRVSATFWQNPRNHFRCQVQFYGLSENDEWTQDRAKPVTQIVSAEAWGRADCDVKLVEKSFETDTNLNFQNLSVIGFRILLLKVAGFNLLMTLRLWSSRAKRSGSGATNFSLLKQAGDVEENPGPTSMDWIWRILFLVGAATGAHSGPQLQLQESGPGLVKPSETLSLTCTVSGDSISSGDYYWGWIRQPPGKGLEWIGHIYYSGVTYYNPSLKSRVTISVDTSRNQFSLKLSSVTAADTAVYYCTREDSSNWRSRGQGTLVTVSSGSGGGGSGGGGSGGGGSFEDVQLQESGPGLVKPSQSLSLTCTVTGYSITSDYTWNWIRQFPGNKLEWMGYITYSGSTSYNPSLKSRNSITRDTSKNQFFLQLNSVTTEDTATYYCARLGRRYTMDYWGQGTSVTVSSTRIQNPDPAVYQLRDSKSSDKSVCLFTDFDSQTNVSQSKDSDVYITDKCVLDMRSMDFKSNSAVAWSNKSDFACANAFNNSIIPEDTFFPSPESSCGFTSESYQQGVLSATILYEILLGKATLYAVLVSALVLMAMVKRKDSRG

SEQ ID NO: 13051 - protein, 894 aa, synthetic construct
MALPVTALLLPLALLLHAARPEVQLVESGGGLVQPGGSLRLSCAASGFSFSDFWMSWVRQAPGKGLEWVATISQAGSEKDYVDSVKGRFTISRDNAKKSLYLQMNSLRAEDTAVYYCASGVYSFDYRGQGTLVTVSSGTGGGGSGGGGSGGGGSEFDDIQMTQSPSSLSASVGDRVTITCRASQSISSYLNWYQQKPGKAPKLLIYDASNLETGVPSRFSGSGSGTDFTFTISSLQPEDIATYYCQQYDNLPLTFGGGTKVDIKRLEDLKNVFPPEVAVFEPSEAEISHTQKATLVCLATGFYPDHVELSWWVNGKEVHSGVCTDPQPLKEQPALNDSRYCLSSRLRVSATFWQNPRNHFRCQVQFYGLSENDEWTQDRAKPVTQIVSAEAWGRADCDVKLVEKSFETDTNLNFQNLSVIGFRILLLKVAGFNLLMTLRLWSSRAKRSGSGATNFSLLKQAGDVEENPGPTSMDWIWRILFLVGAATGAHSGPQLQLQESGPGLVKPSETLSLTCTVSGDSISSGDYYWGWIRQPPGKGLEWIGHIYYSGVTYYNPSLKSRVTISVDTSRNQFSLKLSSVTAADTAVYYCTREDSSNWRSRGQGTLVTVSSGSGGGGSGGGGSGGGGSFEQVQLVESGGGVVQPGRSLRLSCAASGFTFSSYAMHWVRQAPGKGLEWVAVISYDGSNKYYADSVKGRFTISRDNSKNTLYLQMNSLRAEDTAVYYCARAHNSSSWSFDYWGQGTLVTVSSTRIQNPDPAVYQLRDSKSSDKSVCLFTDFDSQTNVSQSKDSDVYITDKCVLDMRSMDFKSNSAVAWSNKSDFACANAFNNSIIPEDTFFPSPESSCGFTSESYQQGVLSATILYEILLGKATLYAVLVSALVLMAMVKRKDSRG

SEQ ID NO: 13052 - protein, 903 aa, synthetic construct
MALPVTALLLPLALLLHAARPEVQLVESGGGLVQPGGSLRLSCAASGFSFSDFWMSWVRQAPGKGLEWVATISQAGSEKDYVDSVKGRFTISRDNAKKSLYLQMNSLRAEDTAVYYCASGVYSFDYRGQGTLVTVSSGTGGGGSGGGGSGGGGSEFDDVVMTQSPLSLPVSLGDQASISCRSSQRLVHSNGNTYLHWYLQKPGQSPKLLIYRVSNRFPGVPDRFSGSGSGTDFTLKISRVEAEDLGIYFCSQSTHVPYTFGGGTKLEIKRLEDLKNVFPPEVAVFEPSEAEISHTQKATLVCLATGFYPDHVELSWWVNGKEVHSGVCTDPQPLKEQPALNDSRYCLSSRLRVSATFWQNPRNHFRCQVQFYGLSENDEWTQDRAKPVTQIVSAEAWGRADCDVKLVEKSFETDTNLNFQNLSVIGFRILLLKVAGFNLLMTLRLWSSRAKRSGSGATNFSLLKQAGDVEENPGPTSMDWIWRILFLVGAATGAHSGPQLQLQESGPGLVKPSETLSLTCTVSGDSISSGDYYWGWIRQPPGKGLEWIGHIYYSGVTYYNPSLKSRVTISVDTSRNQFSLKLSSVTAADTAVYYCTREDSSNWRSRGQGTLVTVSSGSGGGGSGGGGSGGGGSFEEVRLQQSGPDLIKPGASVKMSCKASGYTFTGYVMHWVKQRPGQGLEWIGFINPYNDDIQSNERFRGKATLTSDKSSTTAYMELSSLTSEDSAVYYCARGAGYNFDGAYRFFDFWGQGTTLTVSSTRIQNPDPAVYQLRDSKSSDKSVCLFTDFDSQTNVSQSKDSDVYITDKCVLDMRSMDFKSNSAVAWSNKSDFACANAFNNSIIPEDTFFPSPESSCGFTSESYQQGVLSATILYEILLGKATLYAVLVSALVLMAMVKRKDSRG

SEQ ID NO: 13053 - protein, 894 aa, synthetic construct
MALPVTALLLPLALLLHAARPEVQLVESGGGLVQPGGSLRLSCAASGFSFSDFWMSWVRQAPGKGLEWVATISQAGSEKDYVDSVKGRFTISRDNAKKSLYLQMNSLRAEDTAVYYCASGVYSFDYRGQGTLVTVSSGTGGGGSGGGGSGGGGSEFDSYELTQPPSVSVSPGQTATISCSGDQLGGKYGHWYQKKPGQSPVLVLYQDRKRPAGIPERFSGSSSGNTITLTISGTQAVDEADYYCQAWDTNLGGVFGGGTKVTVLGQLEDLKNVFPPEVAVFEPSEAEISHTQKATLVCLATGFYPDHVELSWWVNGKEVHSGVCTDPQPLKEQPALNDSRYCLSSRLRVSATFWQNPRNHFRCQVQFYGLSENDEWTQDRAKPVTQIVSAEAWGRADCDVKLVEKSFETDTNLNFQNLSVIGFRILLLKVAGFNLLMTLRLWSSRAKRSGSGATNFSLLKQAGDVEENPGPTSMDWIWRILFLVGAATGAHSGPQLQLQESGPGLVKPSETLSLTCTVSGDSISSGDYYWGWIRQPPGKGLEWIGHIYYSGVTYYNPSLKSRVTISVDTSRNQFSLKLSSVTAADTAVYYCTREDSSNWRSRGQGTLVTVSSGSGGGGSGGGGSGGGGSFEQVQLVESGAEVKKPGASVKVSCKASGYTFTGYYMHWVRQAPGQGLEWMGRINPNSGGTNYAQKFQGRVTMTRDTSISTAYMELSRLRSDDTAVYYCASPRGRGSAFDIWGQGTLVTVSSTRIQNPDPAVYQLRDSKSSDKSVCLFTDFDSQTNVSQSKDSDVYITDKCVLDMRSMDFKSNSAVAWSNKSDFACANAFNNSIIPEDTFFPSPESSCGFTSESYQQGVLSATILYEILLGKATLYAVLVSALVLMAMVKRKDSRG

SEQ ID NO: 13054 - protein, 897 aa, synthetic construct
MALPVTALLLPLALLLHAARPEVQLVESGGGLVQPGGSLRLSCAASGFSFSDFWMSWVRQAPGKGLEWVATISQAGSEKDYVDSVKGRFTISRDNAKKSLYLQMNSLRAEDTAVYYCASGVYSFDYRGQGTLVTVSSGTGGGGSGGGGSGGGGSEFDNFMLTQPHSVSESPGKTVTISCTRSSGSIASKYVQWYQQRPGSSPTTVIYEDNQRPSGVPDRFSGSIDTSSNSASLTISGLRTEDEADYYCHSYDSNNHSVFGGGTKVTVLGQLEDLKNVFPPEVAVFEPSEAEISHTQKATLVCLATGFYPDHVELSWWVNGKEVHSGVCTDPQPLKEQPALNDSRYCLSSRLRVSATFWQNPRNHFRCQVQFYGLSENDEWTQDRAKPVTQIVSAEAWGRADCDVKLVEKSFETDTNLNFQNLSVIGFRILLLKVAGFNLLMTLRLWSSRAKRSGSGATNFSLLKQAGDVEENPGPTSMDWIWRILFLVGAATGAHSGPQLQLQESGPGLVKPSETLSLTCTVSGDSISSGDYYWGWIRQPPGKGLEWIGHIYYSGVTYYNPSLKSRVTISVDTSRNQFSLKLSSVTAADTAVYYCTREDSSNWRSRGQGTLVTVSSGSGGGGSGGGGSGGGGSFEEVQLVESGGGVVQPGGSLRLSCAASGFTFSSYAMSWVRQAPGKGLEWVSAISGSGGSTYYADSVKGRFSISRDNSKNTLYLQMNSLRAEDTAVYYCARTRSSGAFDIWGQGTLVTVSSTRIQNPDPAVYQLRDSKSSDKSVCLFTDFDSQTNVSQSKDSDVYITDKCVLDMRSMDFKSNSAVAWSNKSDFACANAFNNSIIPEDTFFPSPESSCGFTSESYQQGVLSATILYEILLGKATLYAVLVSALVLMAMVKRKDSRG

SEQ ID NO: 13055 - protein, 892 aa, synthetic construct
MALPVTALLLPLALLLHAARPEVQLVESGGGLVQPGGSLRLSCAASGFSFSDFWMSWVRQAPGKGLEWVATISQAGSEKDYVDSVKGRFTISRDNAKKSLYLQMNSLRAEDTAVYYCASGVYSFDYRGQGTLVTVSSGTGGGGSGGGGSGGGGSEFDIQMNQSPSSLSASLGDTITITCHASQNINVWLSWYQQKPGNIPKLLIYKASNLHTGVPSRFSGSGSGTGFTITISSLQPEDIATYYCQQGQSYPWTFGGGTKLEIKRLEDLKNVFPPEVAVFEPSEAEISHTQKATLVCLATGFYPDHVELSWWVNGKEVHSGVCTDPQPLKEQPALNDSRYCLSSRLRVSATFWQNPRNHFRCQVQFYGLSENDEWTQDRAKPVTQIVSAEAWGRADCDVKLVEKSFETDTNLNFQNLSVIGFRILLLKVAGFNLLMTLRLWSSRAKRSGSGATNFSLLKQAGDVEENPGPTSMDWIWRILFLVGAATGAHSGPQLQLQESGPGLVKPSETLSLTCTVSGDSISSGDYYWGWIRQPPGKGLEWIGHIYYSGVTYYNPSLKSRVTISVDTSRNQFSLKLSSVTAADTAVYYCTREDSSNWRSRGQGTLVTVSSGSGGGGSGGGGSGGGGSFEEVQLQQSGPELVKPGASVKISCKASGYSFTGYFMNWVKQSHGKSLEYIGRFNPYNGETLYNQKFKGKATLTVDKSSSTVHMELLSVTSEDSAVYYCGRSGNDDAMDYWGQGTSVTVSSATRIQNPDPAVYQLRDSKSSDKSVCLFTDFDSQTNVSQSKDSDVYITDKCVLDMRSMDFKSNSAVAWSNKSDFACANAFNNSIIPEDTFFPSPESSCGFTSESYQQGVLSATILYEILLGKATLYAVLVSALVLMAMVKRKDSRG

SEQ ID NO: 13056 - protein, 893 aa, synthetic construct
MALPVTALLLPLALLLHAARPEVQLVESGGGLVQPGGSLRLSCAASGFSFSDFWMSWVRQAPGKGLEWVATISQAGSEKDYVDSVKGRFTISRDNAKKSLYLQMNSLRAEDTAVYYCASGVYSFDYRGQGTLVTVSSGTGGGGSGGGGSGGGGSEFEIVLTQSPATLSLSPGERATLSCRASQSVRSYLAWYQQKPGQAPRLLIYDASNRATGIPARFSGSGSGTDFTLTISSLEPEDFAVYYCQQRSNWPPTFGQGTKVEIKLEDLKNVFPPEVAVFEPSEAEISHTQKATLVCLATGFYPDHVELSWWVNGKEVHSGVCTDPQPLKEQPALNDSRYCLSSRLRVSATFWQNPRNHFRCQVQFYGLSENDEWTQDRAKPVTQIVSAEAWGRADCDVKLVEKSFETDTNLNFQNLSVIGFRILLLKVAGFNLLMTLRLWSSRAKRSGSGATNFSLLKQAGDVEENPGPTSMDWIWRILFLVGAATGAHSGPQLQLQESGPGLVKPSETLSLTCTVSGDSISSGDYYWGWIRQPPGKGLEWIGHIYYSGVTYYNPSLKSRVTISVDTSRNQFSLKLSSVTAADTAVYYCTREDSSNWRSRGQGTLVTVSSGSGGGGSGGGGSGGGGSFEQLQVQESGPGLVKPSETLSLTCTVSGGSISNSYFSWGWIRQPPGKGLEWIGSFYYGEKTYYNPSLKSRATISIDTSKSQFSLKLSSVTAADTAVYYCPRGPTMIRGVIDSWGQGTLVTVSSTRIQNPDPAVYQLRDSKSSDKSVCLFTDFDSQTNVSQSKDSDVYITDKCVLDMRSMDFKSNSAVAWSNKSDFACANAFNNSIIPEDTFFPSPESSCGFTSESYQQGVLSATILYEILLGKATLYAVLVSALVLMAMVKRKDSRG

SEQ ID NO: 13057 - protein, 902 aa, synthetic construct
MALPVTALLLPLALLLHAARPEVQLVESGGGLVQPGGSLRLSCAASGFSFSDFWMSWVRQAPGKGLEWVATISQAGSEKDYVDSVKGRFTISRDNAKKSLYLQMNSLRAEDTAVYYCASGVYSFDYRGQGTLVTVSSGTGGGGSGGGGSGGGGSEFDIVMTQTPLSLPVTPGEPASISCRSSRSLLDSDDGNTYLDWYLQKPGQSPQLLIYTLSYRASGVPDRFSGSGSGTDFTLKISRVEAEDVGVYYCMQRVEFPITFGQGTRLEIKRLEDLKNVFPPEVAVFEPSEAEISHTQKATLVCLATGFYPDHVELSWWVNGKEVHSGVCTDPQPLKEQPALNDSRYCLSSRLRVSATFWQNPRNHFRCQVQFYGLSENDEWTQDRAKPVTQIVSAEAWGRADCDVKLVEKSFETDTNLNFQNLSVIGFRILLLKVAGFNLLMTLRLWSSRAKRSGSGATNFSLLKQAGDVEENPGPTSMDWIWRILFLVGAATGAHSGPQLQLQESGPGLVKPSETLSLTCTVSGDSISSGDYYWGWIRQPPGKGLEWIGHIYYSGVTYYNPSLKSRVTISVDTSRNQFSLKLSSVTAADTAVYYCTREDSSNWRSRGQGTLVTVSSGSGGGGSGGGGSGGGGSFEQVQLVESGGGVVQPGRSLRLSCAASGFIFSRYGMHWVRQAPGKGLKWVAVIWYDGSNKLYADSVKGRFTISRDNSKNTLYLQMNSLRAEDTAVYYCARDYYDNSRHHWGFDYWGQGTLVTVSSTRIQNPDPAVYQLRDSKSSDKSVCLFTDFDSQTNVSQSKDSDVYITDKCVLDMRSMDFKSNSAVAWSNKSDFACANAFNNSIIPEDTFFPSPESSCGFTSESYQQGVLSATILYEILLGKATLYAVLVSALVLMAMVKRKDSRG

SEQ ID NO: 13058 - protein, 892 aa, synthetic construct
MALPVTALLLPLALLLHAARPEVQLVESGGGLVQPGGSLRLSCAASGFSFSDFWMSWVRQAPGKGLEWVATISQAGSEKDYVDSVKGRFTISRDNAKKSLYLQMNSLRAEDTAVYYCASGVYSFDYRGQGTLVTVSSGTGGGGSGGGGSGGGGSEFEIQMTQSPSSMSASLGDTITITCQATQDIFKNLNWYQQKPGKPPSLLIYYATELAEGVPSRFSGSGSGSDYSLTISNLESEDFAAYYCLQFFEFPFTFGSGTKLEMKLEDLKNVFPPEVAVFEPSEAEISHTQKATLVCLATGFYPDHVELSWWVNGKEVHSGVCTDPQPLKEQPALNDSRYCLSSRLRVSATFWQNPRNHFRCQVQFYGLSENDEWTQDRAKPVTQIVSAEAWGRADCDVKLVEKSFETDTNLNFQNLSVIGFRILLLKVAGFNLLMTLRLWSSRAKRSGSGATNFSLLKQAGDVEENPGPTSMDWIWRILFLVGAATGAHSGPQLQLQESGPGLVKPSETLSLTCTVSGDSISSGDYYWGWIRQPPGKGLEWIGHIYYSGVTYYNPSLKSRVTISVDTSRNQFSLKLSSVTAADTAVYYCTREDSSNWRSRGQGTLVTVSSGSGGGGSGGGGSGGGGSFEQVQLQQSGAELVRPGTSVKVSCKASGYVFTNYWIEWIKQRPGQGLEWIGVMNPGSGETTYNEKFKGKATLTADKSSSTAYMQLSSLTSVDSAVYFCARDHDRDYYAMDYWGQGTSVTVSSTRIQNPDPAVYQLRDSKSSDKSVCLFTDFDSQTNVSQSKDSDVYITDKCVLDMRSMDFKSNSAVAWSNKSDFACANAFNNSIIPEDTFFPSPESSCGFTSESYQQGVLSATILYEILLGKATLYAVLVSALVLMAMVKRKDSRG

SEQ ID NO: 13059 - protein, 889 aa, synthetic construct
MALPVTALLLPLALLLHAARPEVQLVESGGGLVQPGGSLRLSCAASGFSFSDFWMSWVRQAPGKGLEWVATISQAGSEKDYVDSVKGRFTISRDNAKKSLYLQMNSLRAEDTAVYYCASGVYSFDYRGQGTLVTVSSGTGGGGSGGGGSGGGGSEFDILLTQSPAILSVSPGERVSFSCRASQNIGTSIHWYQQRTNGSPRLLIKYASESVSGIPSRFSGSGSGTDFTLSINSVESEDIADYYCQHTNSWPTTFGGGTKLEIKRLEDLKNVFPPEVAVFEPSEAEISHTQKATLVCLATGFYPDHVELSWWVNGKEVHSGVCTDPQPLKEQPALNDSRYCLSSRLRVSATFWQNPRNHFRCQVQFYGLSENDEWTQDRAKPVTQIVSAEAWGRADCDVKLVEKSFETDTNLNFQNLSVIGFRILLLKVAGFNLLMTLRLWSSRAKRSGSGATNFSLLKQAGDVEENPGPTSMDWIWRILFLVGAATGAHSGPQLQLQESGPGLVKPSETLSLTCTVSGDSISSGDYYWGWIRQPPGKGLEWIGHIYYSGVTYYNPSLKSRVTISVDTSRNQFSLKLSSVTAADTAVYYCTREDSSNWRSRGQGTLVTVSSGSGGGGSGGGGSGGGGSFEQVQLQQSDAELVKPGASVKISCKASGYTFTDHAIHWVKQKPEQGLEWIGYFSPGNGDIKYNEKFKGKATLTADKSSSTAYMQLNSLTSEDSAVYFCKRSYGNYDYWGQGTTLTVSSTRIQNPDPAVYQLRDSKSSDKSVCLFTDFDSQTNVSQSKDSDVYITDKCVLDMRSMDFKSNSAVAWSNKSDFACANAFNNSIIPEDTFFPSPESSCGFTSESYQQGVLSATILYEILLGKATLYAVLVSALVLMAMVKRKDSRG

SEQ ID NO: 13060 - protein, 894 aa, synthetic construct
MALPVTALLLPLALLLHAARPEVQLVESGGGLVQPGGSLRLSCAASGFSFSDFWMSWVRQAPGKGLEWVATISQAGSEKDYVDSVKGRFTISRDNAKKSLYLQMNSLRAEDTAVYYCASGVYSFDYRGQGTLVTVSSGTGGGGSGGGGSGGGGSEFDIVMTQSPDSLAVSLGERATINCKSSQSLLNSGDQKNYLTWYQQKPGQPPKLLIYWASTRESGVPDRFSGSGSGTDFTLTISSLQAEDVAVYYCQNDYSYPLTFGQGTKVEIKLEDLKNVFPPEVAVFEPSEAEISHTQKATLVCLATGFYPDHVELSWWVNGKEVHSGVCTDPQPLKEQPALNDSRYCLSSRLRVSATFWQNPRNHFRCQVQFYGLSENDEWTQDRAKPVTQIVSAEAWGRADCDVKLVEKSFETDTNLNFQNLSVIGFRILLLKVAGFNLLMTLRLWSSRAKRSGSGATNFSLLKQAGDVEENPGPTSMDWIWRILFLVGAATGAHSGPQLQLQESGPGLVKPSETLSLTCTVSGDSISSGDYYWGWIRQPPGKGLEWIGHIYYSGVTYYNPSLKSRVTISVDTSRNQFSLKLSSVTAADTAVYYCTREDSSNWRSRGQGTLVTVSSGSGGGGSGGGGSGGGGSFEQVQLVQSGAEVKKTGSSVKVSCKASGYTFTDHAIHVWRQAPGQALEWMGHFSPGNTDIKYNDKFKGRVTLTVDRSMSTAYMELSSLRSEDTAMYYCKTSTFFFDYWGQGTMVTVSSTRIQNPDPAVYQLRDSKSSDKSVCLFTDFDSQTNVSQSKDSDVYITDKCVLDMRSMDFKSNSAVAWSNKSDFACANAFNNSIIPEDTFFPSPESSCGFTSESYQQGVLSATILYEILLGKATLYAVLVSALVLMAMVKRKDSRG

SEQ ID NO: 13061 - protein, 893 aa, synthetic construct
MALPVTALLLPLALLLHAARPEVQLVESGGGLVQPGGSLRLSCAASGFSFSDFWMSWVRQAPGKGLEWVATISQAGSEKDYVDSVKGRFTISRDNAKKSLYLQMNSLRAEDTAVYYCASGVYSFDYRGQGTLVTVSSGTGGGGSGGGGSGGGGSEFDIQMTQSPSSLSASVGDRVTITCKASQDVSIAVAWYQQKPGKAPKVLIYSASYRYTGVPDRFSGSGSGTDFTFTISSLQPEDIAVYYCQQHYITPLTFGGGTKVEIKLEDLKNVFPPEVAVFEPSEAEISHTQKATLVCLATGFYPDHVELSWWVNGKEVHSGVCTDPQPLKEQPALNDSRYCLSSRLRVSATFWQNPRNHFRCQVQFYGLSENDEWTQDRAKPVTQIVSAEAWGRADCDVKLVEKSFETDTNLNFQNLSVIGFRILLLKVAGFNLLMTLRLWSSRAKRSGSGATNFSLLKQAGDVEENPGPTSMDWIWRILFLVGAATGAHSGPQLQLQESGPGLVKPSETLSLTCTVSGDSISSGDYYWGWIRQPPGKGLEWIGHIYYSGVTYYNPSLKSRVTISVDTSRNQFSLKLSSVTAADTAVYYCTREDSSNWRSRGQGTLVTVSSGSGGGGSGGGGSGGGGSFEQIQLVQSGHEVKKPGASVKVSCKASGYTFTNYGMNWVRQAPGQGLEWMGWINTKTGEPTYAEEFKGRFVFSLETSASTAYLQISSLKAEDTAMYFCGRGGYGSSYWYFDVWGQGTTVTVSSTRIQNPDPAVYQLRDSKSSDKSVCLFTDFDSQTNVSQSKDSDVYITDKCVLDMRSMDFKSNSAVAWSNKSDFACANAFNNSIIPEDTFFPSPESSCGFTSESYQQGVLSATILYEILLGKATLYAVLVSALVLMAMVKRKDSRG

SEQ ID NO: 13062 - protein, 895 aa, synthetic construct
MALPVTALLLPLALLLHAARPEVQLVESGGGLVQPGGSLRLSCAASGFSFSDFWMSWVRQAPGKGLEWVATISQAGSEKDYVDSVKGRFTISRDNAKKSLYLQMNSLRAEDTAVYYCASGVYSFDYRGQGTLVTVSSGTGGGGSGGGGSGGGGSEFDIVMTQSPDSLAVSLGERATINCRASKSVSTSGYSYMHWYQQKPGQPPKLLIYLASNLESGVPDRFSGSGSGTDFTLTISSLQAEDVAVYYCQHSRELPYTFGQGTKLEIKLEDLKNVFPPEVAVFEPSEAEISHTQKATLVCLATGFYPDHVELSWWVNGKEVHSGVCTDPQPLKEQPALNDSRYCLSSRLRVSATFWQNPRNHFRCQVQFYGLSENDEWTQDRAKPVTQIVSAEAWGRADCDVKLVEKSFETDTNLNFQNLSVIGFRILLLKVAGFNLLMTLRLWSSRAKRSGSGATNFSLLKQAGDVEENPGPTSMDWIWRILFLVGAATGAHSGPQLQLQESGPGLVKPSETLSLTCTVSGDSISSGDYYWGWIRQPPGKGLEWIGHIYYSGVTYYNPSLKSRVTISVDTSRNQFSLKLSSVTAADTAVYYCTREDSSNWRSRGQGTLVTVSSGSGGGGSGGGGSGGGGSFEQVQLQESGPGLVKPSETLSLTCTVSGGSISSYGVHWIRQPPGKGLEWIGVIWTSGVTDYNSALMGRVTISVDTSKNQFSLKLSSVTAADTAVYYCARDGDYDRYTMDYWGQGTLVTVSSTRIQNPDPAVYQLRDSKSSDKSVCLFTDFDSQTNVSQSKDSDVYITDKCVLDMRSMDFKSNSAVAWSNKSDFACANAFNNSIIPEDTFFPSPESSCGFTSESYQQGVLSATILYEILLGKATLYAVLVSALVLMAMVKRKDSRG

SEQ ID NO: 13063 - protein, 895 aa, synthetic construct
MALPVTALLLPLALLLHAARPEVQLVESGGGLVQPGGSLRLSCAASGFSFSDFWMSWVRQAPGKGLEWVATISQAGSEKDYVDSVKGRFTISRDNAKKSLYLQMNSLRAEDTAVYYCASGVYSFDYRGQGTLVTVSSGTGGGGSGGGGSGGGGSEFDIQMTQSPSSLSASVGDRVTITCRASQSIGTSLHWYQQKPGKAPKLLIKFASRLQSGVPSRFSGSGSGTDFTLTISSLQPEDFATYYCQQSPGFPPTFGQGTKLEIKRLEDLKNVFPPEVAVFEPSEAEISHTQKATLVCLATGFYPDHVELSWWVNGKEVHSGVCTDPQPLKEQPALNDSRYCLSSRLRVSATFWQNPRNHFRCQVQFYGLSENDEWTQDRAKPVTQIVSAEAWGRADCDVKLVEKSFETDTNLNFQNLSVIGFRILLLKVAGFNLLMTLRLWSSRAKRSGSGATNFSLLKQAGDVEENPGPTSMDWIWRILFLVGAATGAHSGPQLQLQESGPGLVKPSETLSLTCTVSGDSISSGDYYWGWIRQPPGKGLEWIGHIYYSGVTYYNPSLKSRVTISVDTSRNQFSLKLSSVTAADTAVYYCTREDSSNWRSRGQGTLVTVSSGSGGGGSGGGGSGGGGSFEQVQLVESGGGLVKPGGSLRLSCAASGFSITTSGYYWTWIRQFPGKGLEWMGYIGYNSKTYYNPALKSRITISRDNAKNSLYLQMNSLRAEDTAVYYCARSLYGGYKDAFDSWGQGTLVTVSSTRIQNPDPAVYQLRDSKSSDKSVCLFTDFDSQTNVSQSKDSDVYITDKCVLDMRSMDFKSNSAVAWSNKSDFACANAFNNSIIPEDTFFPSPESSCGFTSESYQQGVLSATILYEILLGKATLYAVLVSALVLMAMVKRKDSRG

SEQ ID NO: 13064 - protein, 900 aa, synthetic construct
MALPVTALLLPLALLLHAARPEVQLVESGGGLVQPGGSLRLSCAASGFSFSDFWMSWVRQAPGKGLEWVATISQAGSEKDYVDSVKGRFTISRDNAKKSLYLQMNSLRAEDTAVYYCASGVYSFDYRGQGTLVTVSSGTGGGGSGGGGSGGGGSEFDEIVLTQSPLSLPVTPGEPASISCRSSQSLLHSIGYNYLDWYLQKPGQSPQLLIYLGSNRASGVPDRFSGSGSGTDFTLKISRVEAEDVGVYYCMQALQTPLTFGGGTKVEIKRLEDLKNVFPPEVAVFEPSEAEISHTQKATLVCLATGFYPDHVELSWWVNGKEVHSGVCTDPQPLKEQPALNDSRYCLSSRLRVSATFWQNPRNHFRCQVQFYGLSENDEWTQDRAKPVTQIVSAEAWGRADCDVKLVEKSFETDTNLNFQNLSVIGFRILLLKVAGFNLLMTLRLWSSRAKRSGSGATNFSLLKQAGDVEENPGPTSMDWIWRILFLVGAATGAHSGPQLQLQESGPGLVKPSETLSLTCTVSGDSISSGDYYWGWIRQPPGKGLEWIGHIYYSGVTYYNPSLKSRVTISVDTSRNQFSLKLSSVTAADTAVYYCTREDSSNWRSRGQGTLVTVSSGSGGGGSGGGGSGGGGSFEEVQLVESGGGVVQPGRSLRLSCAASGFTFRSYGMHWVRQAPGKGLEWVAVISYDGSNKYYTDSVNGRFTISRDNSKNTLYLQMNSLRAEDTAVYYCARGGGYYETSGPDYWGQGTLVTVSSTRIQNPDPAVYQLRDSKSSDKSVCLFTDFDSQTNVSQSKDSDVYITDKCVLDMRSMDFKSNSAVAWSNKSDFACANAFNNSIIPEDTFFPSPESSCGFTSESYQQGVLSATILYEILLGKATLYAVLVSALVLMAMVKRKDSRG

SEQ ID NO: 13065 - protein, 898 aa, synthetic construct
MALPVTALLLPLALLLHAARPEVQLVESGGGLVQPGGSLRLSCAASGFSFSDFWMSWVRQAPGKGLEWVATISQAGSEKDYVDSVKGRFTISRDNAKKSLYLQMNSLRAEDTAVYYCASGVYSFDYRGQGTLVTVSSGTGGGGSGGGGSGGGGSEFDDVVMTQSPLSLPVTPGEPASISCRSSQSLLHSIGYNYLHWFLQKPGQSPQLLIYLGSNRASGVPDRFSGSGSGTDFTLKISRVEAEDVGVYYCMQALQTPPTFGQGTRLEIKRLEDLKNVFPPEVAVFEPSEAEISHTQKATLVCLATGFYPDHVELSWWVNGKEVHSGVCTDPQPLKEQPALNDSRYCLSSRLRVSATFWQNPRNHFRCQVQFYGLSENDEWTQDRAKPVTQIVSAEAWGRADCDVKLVEKSFETDTNLNFQNLSVIGFRILLLKVAGFNLLMTLRLWSSRAKRSGSGATNFSLLKQAGDVEENPGPTSMDWIWRILFLVGAATGAHSGPQLQLQESGPGLVKPSETLSLTCTVSGDSISSGDYYWGWIRQPPGKGLEWIGHIYYSGVTYYNPSLKSRVTISVDTSRNQFSLKLSSVTAADTAVYYCTREDSSNWRSRGQGTLVTVSSGSGGGGSGGGGSGGGGSFEQLQLQESGPGLVKPSGTLSLTCAVSGGSISSSNWWSWVRQPPGKGLEWIGEIYHSGSTNYNPSLKSRVTISVDKSKNQFSLKLSSVTAADTAVYYCVGSPYGDYVLDYWGQGTLVTVSSTRIQNPDPAVYQLRDSKSSDKSVCLFTDFDSQTNVSQSKDSDVYITDKCVLDMRSMDFKSNSAVAWSNKSDFACANAFNNSIIPEDTFFPSPESSCGFTSESYQQGVLSATILYEILLGKATLYAVLVSALVLMAMVKRKDSRG

SEQ ID NO: 13066 - protein, 896 aa, synthetic construct
MALPVTALLLPLALLLHAARPEVQLVESGGGLVQPGGSLRLSCAASGFSFSDFWMSWVRQAPGKGLEWVATISQAGSEKDYVDSVKGRFTISRDNAKKSLYLQMNSLRAEDTAVYYCASGVYSFDYRGQGTLVTVSSGTGGGGSGGGGSGGGGSEFDEIVLTQSPGTLSLSLGERATLSCRASQSISSSFLAWYQQKPGQAPKLLIYAASTRATGIPDRFSGSGSGTDFTLTISRLEPEDFAVYYCQQYGRSLSFGGGTKVEVKLEDLKNVFPPEVAVFEPSEAEISHTQKATLVCLATGFYPDHVELSWWVNGKEVHSGVCTDPQPLKEQPALNDSRYCLSSRLRVSATFWQNPRNHFRCQVQFYGLSENDEWTQDRAKPVTQIVSAEAWGRADCDVKLVEKSFETDTNLNFQNLSVIGFRILLLKVAGFNLLMTLRLWSSRAKRSGSGATNFSLLKQAGDVEENPGPTSMDWIWRILFLVGAATGAHSGPQLQLQESGPGLVKPSETLSLTCTVSGDSISSGDYYWGWIRQPPGKGLEWIGHIYYSGVTYYNPSLKSRVTISVDTSRNQFSLKLSSVTAADTAVYYCTREDSSNWRSRGQGTLVTVSSGSGGGGSGGGGSGGGGSFEQVQLQQSGPGLVKPSQTLSLTCAISGDSVSGNSATWNWIRQSPSRGLEWLGRTYYRSKWNHDYAESVKSRITINPDTSKNQFSLQLNSVTPEDTAVYYCARGDSSSWYAFDYWGQGTLVTVSSTRIQNPDPAVYQLRDSKSSDKSVCLFTDFDSQTNVSQSKDSDVYITDKCVLDMRSMDFKSNSAVAWSNKSDFACANAFNNSIIPEDTFFPSPESSCGFTSESYQQGVLSATILYEILLGKATLYAVLVSALVLMAMVKRKDSRG

SEQ ID NO: 13067 - protein, 895 aa, synthetic construct
MALPVTALLLPLALLLHAARPEVQLVESGGGLVQPGGSLRLSCAASGFSFSDFWMSWVRQAPGKGLEWVATISQAGSEKDYVDSVKGRFTISRDNAKKSLYLQMNSLRAEDTAVYYCASGVYSFDYRGQGTLVTVSSGTGGGGSGGGGSGGGGSEFDQSVVTQPPSVSVAPGKTARITCGRNNIGSKSVHWYQQKPGQAPVLVVYDDSDRPSGIPERFSGSNSGNTATLTISRVEAGDEADYYCQVWDSSSDHVVFGGGTKLTVLGLEDLKNVFPPEVAVFEPSEAEISHTQKATLVCLATGFYPDHVELSWWVNGKEVHSGVCTDPQPLKEQPALNDSRYCLSSRLRVSATFWQNPRNHFRCQVQFYGLSENDEWTQDRAKPVTQIVSAEAWGRADCDVKLVEKSFETDTNLNFQNLSVIGFRILLLKVAGFNLLMTLRLWSSRAKRSGSGATNFSLLKQAGDVEENPGPTSMDWIWRILFLVGAATGAHSGPQLQLQESGPGLVKPSETLSLTCTVSGDSISSGDYYWGWIRQPPGKGLEWIGHIYYSGVTYYNPSLKSRVTISVDTSRNQFSLKLSSVTAADTAVYYCTREDSSNWRSRGQGTLVTVSSGSGGGGSGGGGSGGGGSFEVQLVQSGGGVMRPGGSLRLSCAASGFTFDDYGMSWVRQAPGKGLEWVSGINWNGGSTGYADSVRGRFTISRDNAKNSLYLQMNSLRAEDTALYYCARERGYGYHDPHDYWGQGTLVTVSSTRIQNPDPAVYQLRDSKSSDKSVCLFTDFDSQTNVSQSKDSDVYITDKCVLDMRSMDFKSNSAVAWSNKSDFACANAFNNSIIPEDTFFPSPESSCGFTSESYQQGVLSATILYEILLGKATLYAVLVSALVLMAMVKRKDSRG

SEQ ID NO: 13068 - protein, 908 aa, synthetic construct
MALPVTALLLPLALLLHAARPEVQLVESGGGLVQPGGSLRLSCAASGFSFSDFWMSWVRQAPGKGLEWVATISQAGSEKDYVDSVKGRFTISRDNAKKSLYLQMNSLRAEDTAVYYCASGVYSFDYRGQGTLVTVSSGTGGGGSGGGGSGGGGSEFEQKLISEEDLEFQAVVTQPPSASGTPGQRVTISCSGSSSNIGSNTVNWYQQVPGTAPKLLIYSNNQRPSGVPDRFSGSKSGTSASLAISGLQSEDEADYYCAAWDDSLNGWVFGGGTKLTVLLEDLKNVFPPEVAVFEPSEAEISHTQKATLVCLATGFYPDHVELSWWVNGKEVHSGVCTDPQPLKEQPALNDSRYCLSSRLRVSATFWQNPRNHFRCQVQFYGLSENDEWTQDRAKPVTQIVSAEAWGRADCDVKLVEKSFETDTNLNFQNLSVIGFRILLLKVAGFNLLMTLRLWSSRAKRSGSGATNFSLLKQAGDVEENPGPTSMDWIWRILFLVGAATGAHSGPQLQLQESGPGLVKPSETLSLTCTVSGDSISSGDYYWGWIRQPPGKGLEWIGHIYYSGVTYYNPSLKSRVTISVDTSRNQFSLKLSSVTAADTAVYYCTREDSSNWRSRGQGTLVTVSSGSGGGGSGGGGSGGGGSFEQMQLVQSGAEVKEPGESLRISCKGSGYSFTNFWISWVRQMPGKGLEWMGRVDPGYSYSTYSPSFQGHVTISADKSTSTAYLQWNSLKASDTAMYYCARVQYSGYYDWFDPWGQGTLVTVSSTRIQNPDPAVYQLRDSKSSDKSVCLFTDFDSQTNVSQSKDSDVYITDKCVLDMRSMDFKSNSAVAWSNKSDFACANAFNNSIIPEDTFFPSPESSCGFTSESYQQGVLSATILYEILLGKATLYAVLVSALVLMAMVKRKDSRG

SEQ ID NO: 13069 - protein, 902 aa, synthetic construct
MALPVTALLLPLALLLHAARPEVQLVESGGGLVQPGGSLRLSCAASGFSFSDFWMSWVRQAPGKGLEWVATISQAGSEKDYVDSVKGRFTISRDNAKKSLYLQMNSLRAEDTAVYYCASGVYSFDYRGQGTLVTVSSGTGGGGSGGGGSGGGGSEFEQKLISEEDLEFDIQMTQSPSTLSASVGDRVTITCRASQNINKWLAWYQQRPGKAPQLLIYKASSLESGVPSRFSGSGSGTEYTLTISSLQPDDFATYYCQQYNSYATFGQGTKVEIKRLEDLKNVFPPEVAVFEPSEAEISHTQKATLVCLATGFYPDHVELSWWVNGKEVHSGVCTDPQPLKEQPALNDSRYCLSSRLRVSATFWQNPRNHFRCQVQFYGLSENDEWTQDRAKPVTQIVSAEAWGRADCDVKLVEKSFETDTNLNFQNLSVIGFRILLLKVAGFNLLMTLRLWSSRAKRSGSGATNFSLLKQAGDVEENPGPTSMDWIWRILFLVGAATGAHSGPQLQLQESGPGLVKPSETLSLTCTVSGDSISSGDYYWGWIRQPPGKGLEWIGHIYYSGVTYYNPSLKSRVTISVDTSRNQFSLKLSSVTAADTAVYYCTREDSSNWRSRGQGTLVTVSSGSGGGGSGGGGSGGGGSFEQVQLVQSGAEVKKPGESLKISCKGSGYNFSNKWIGWVRQLPGRGLEWIAIIYPGYSDITYSPSFQGRVTISADTSINTAYLHWHSLKASDTAMYYCVRHTALAGFDYWGLGTLVTVSSTRIQNPDPAVYQLRDSKSSDKSVCLFTDFDSQTNVSQSKDSDVYITDKCVLDMRSMDFKSNSAVAWSNKSDFACANAFNNSIIPEDTFFPSPESSCGFTSESYQQGVLSATILYEILLGKATLYAVLVSALVLMAMVKRKDSRG

SEQ ID NO: 13070 - protein, 893 aa, synthetic construct
MALPVTALLLPLALLLHAARPEVQLVESGGGLVQPGGSLRLSCAASGFSFSDFWMSWVRQAPGKGLEWVATISQAGSEKDYVDSVKGRFTISRDNAKKSLYLQMNSLRAEDTAVYYCASGVYSFDYRGQGTLVTVSSGTGGGGSGGGGSGGGGSEFIVLTQSPASLAVSLGQRATISCRASESVDNYGNTFMHWYQQKPGQPPKLLIYRASNLESGIPARFSGSGSRTDFTLTINPVEADDVATYYCQQSNEDPPTFGAGTKLELKLEDLKNVFPPEVAVFEPSEAEISHTQKATLVCLATGFYPDHVELSWWVNGKEVHSGVCTDPQPLKEQPALNDSRYCLSSRLRVSATFWQNPRNHFRCQVQFYGLSENDEWTQDRAKPVTQIVSAEAWGRADCDVKLVEKSFETDTNLNFQNLSVIGFRILLLKVAGFNLLMTLRLWSSRAKRSGSGATNFSLLKQAGDVEENPGPTSMDWIWRILFLVGAATGAHSGPQLQLQESGPGLVKPSETLSLTCTVSGDSISSGDYYWGWIRQPPGKGLEWIGHIYYSGVTYYNPSLKSRVTISVDTSRNQFSLKLSSVTAADTAVYYCTREDSSNWRSRGQGTLVTVSSGSGGGGSGGGGSGGGGSFEQIQLVQSGPELKKPGETVKISCKASGYIFTNYGMNWVKQAPGKSFKWMGWINTYTGESTYSADFKGRFAFSLETSASTAYLHINDLKNEDTATYFCARSGGYDPMDYWGQGTSVTVSSTRIQNPDPAVYQLRDSKSSDKSVCLFTDFDSQTNVSQSKDSDVYITDKCVLDMRSMDFKSNSAVAWSNKSDFACANAFNNSIIPEDTFFPSPESSCGFTSESYQQGVLSATILYEILLGKATLYAVLVSALVLMAMVKRKDSRG

SEQ ID NO: 13071 - protein, 892 aa, synthetic construct
MALPVTALLLPLALLLHAARPEVQLVESGGGLVQPGGSLRLSCAASGFSFSDFWMSWVRQAPGKGLEWVATISQAGSEKDYVDSVKGRFTISRDNAKKSLYLQMNSLRAEDTAVYYCASGVYSFDYRGQGTLVTVSSGTGGGGSGGGGSGGGGSEFEIVLTQSPGTLSLSPGERATLSCRASQSVSNTYLAWYHQRPGQAPRLLIYGASSRATGIPDRFSGSGSGTDFALTISSLEPEDFAVYYCQQYSNSWTFGQGTKVEIKRLEDLKNVFPPEVAVFEPSEAEISHTQKATLVCLATGFYPDHVELSWWVNGKEVHSGVCTDPQPLKEQPALNDSRYCLSSRLRVSATFWQNPRNHFRCQVQFYGLSENDEWTQDRAKPVTQIVSAEAWGRADCDVKLVEKSFETDTNLNFQNLSVIGFRILLLKVAGFNLLMTLRLWSSRAKRSGSGATNFSLLKQAGDVEENPGPTSMDWIWRILFLVGAATGAHSGPQLQLQESGPGLVKPSETLSLTCTVSGDSISSGDYYWGWIRQPPGKGLEWIGHIYYSGVTYYNPSLKSRVTISVDTSRNQFSLKLSSVTAADTAVYYCTREDSSNWRSRGQGTLVTVSSGSGGGGSGGGGSGGGGSFEQVQLVESGGGVVQPGRSLRLSCAASGFTFSSYDMHWVRQAPGKGLEWVAVISYDGTNEYYADSVKGRFTISRDTSKNTLYLQMNSLRAEDTAVYYCARERYFDWSFDYWGQGTLVSVSSTRIQNPDPAVYQLRDSKSSDKSVCLFTDFDSQTNVSQSKDSDVYITDKCVLDMRSMDFKSNSAVAWSNKSDFACANAFNNSIIPEDTFFPSPESSCGFTSESYQQGVLSATILYEILLGKATLYAVLVSALVLMAMVKRKDSRG

SEQ ID NO: 13072 - protein, 891 aa, synthetic construct
MALPVTALLLPLALLLHAARPEVQLVESGGGLVQPGGSLRLSCAASGFSFSDFWMSWVRQAPGKGLEWVATISQAGSEKDYVDSVKGRFTISRDNAKKSLYLQMNSLRAEDTAVYYCASGVYSFDYRGQGTLVTVSSGTGGGGSGGGGSGGGGSEFELTQDPAVSVALGQTVRITCQGDSLRSNYANWYQQKPGQAPVLVIYGQNNRPSGIPDRFSGSSSGNTASLTITGAQAADEADYYCDSRVSTGNHVVFGGGTKLTVLGQLEDLKNVFPPEVAVFEPSEAEISHTQKATLVCLATGFYPDHVELSWWVNGKEVHSGVCTDPQPLKEQPALNDSRYCLSSRLRVSATFWQNPRNHFRCQVQFYGLSENDEWTQDRAKPVTQIVSAEAWGRADCDVKLVEKSFETDTNLNFQNLSVIGFRILLLKVAGFNLLMTLRLWSSRAKRSGSGATNFSLLKQAGDVEENPGPTSMDWIWRILFLVGAATGAHSGPQLQLQESGPGLVKPSETLSLTCTVSGDSISSGDYYWGWIRQPPGKGLEWIGHIYYSGVTYYNPSLKSRVTISVDTSRNQFSLKLSSVTAADTAVYYCTREDSSNWRSRGQGTLVTVSSGSGGGGSGGGGSGGGGSFEEVQLVQSGAEVKKPGASVKVSCKASGYTFTSYAMHWVRQAPGQRLEWMGWINAGNGNTKYSQKFQGRVTITRDTSASTAYMELSSLRSEDTAVYYCARDISYGSFDYWGQGTLVTVSSTRIQNPDPAVYQLRDSKSSDKSVCLFTDFDSQTNVSQSKDSDVYITDKCVLDMRSMDFKSNSAVAWSNKSDFACANAFNNSIIPEDTFFPSPESSCGFTSESYQQGVLSATILYEILLGKATLYAVLVSALVLMAMVKRKDSRG

SEQ ID NO: 13073 - protein, 893 aa, synthetic construct
MALPVTALLLPLALLLHAARPEVQLVESGGGLVQPGGSLRLSCAASGFSFSDFWMSWVRQAPGKGLEWVATISQAGSEKDYVDSVKGRFTISRDNAKKSLYLQMNSLRAEDTAVYYCASGVYSFDYRGQGTLVTVSSGTGGGGSGGGGSGGGGSEFDIVLTQTPATLSVTPGDSVSLSCRASQSISNNLHWYQQKSHESPRLLIKNASQSISGIPSKFSGSGSGTDFTLRINSVETEDFGMYFCQQSNSWPYTFGSGTKLEIKLEDLKNVFPPEVAVFEPSEAEISHTQKATLVCLATGFYPDHVELSWWVNGKEVHSGVCTDPQPLKEQPALNDSRYCLSSRLRVSATFWQNPRNHFRCQVQFYGLSENDEWTQDRAKPVTQIVSAEAWGRADCDVKLVEKSFETDTNLNFQNLSVIGFRILLLKVAGFNLLMTLRLWSSRAKRSGSGATNFSLLKQAGDVEENPGPTSMDWIWRILFLVGAATGAHSGPQLQLQESGPGLVKPSETLSLTCTVSGDSISSGDYYWGWIRQPPGKGLEWIGHIYYSGVTYYNPSLKSRVTISVDTSRNQFSLKLSSVTAADTAVYYCTREDSSNWRSRGQGTLVTVSSGSGGGGSGGGGSGGGGSFEQVKLQQSGPELVKPGASVKISCKASGYSFTGYYMHWVKQSHGNILDWIGYIYPYNGVSSYNQKFKGKATLTVDKSSSTAYMELRSLTSEDSAVYYCARERGLYQLRAMDYWGQGTSVTVSSTRIQNPDPAVYQLRDSKSSDKSVCLFTDFDSQTNVSQSKDSDVYITDKCVLDMRSMDFKSNSAVAWSNKSDFACANAFNNSIIPEDTFFPSPESSCGFTSESYQQGVLSATILYEILLGKATLYAVLVSALVLMAMVKRKDSRG

SEQ ID NO: 13074 - protein, 884 aa, synthetic construct
MALPVTALLLPLALLLHAARPEVQLVESGGGLVQPGGSLRLSCAASGFSFSDFWMSWVRQAPGKGLEWVATISQAGSEKDYVDSVKGRFTISRDNAKKSLYLQMNSLRAEDTAVYYCASGVYSFDYRGQGTLVTVSSGTGGGGSGGGGSGGGGSEFDIVMTQTPAIMSASPGQKVTITCSASSSVNYMHWYQQKLGSSPKLWIYDTSKLAPGVPARFSGSGSGTSYSLTISSMEAEDAASYFCHQWSSYPYTFGSGTKLEIKLEDLKNVFPPEVAVFEPSEAEISHTQKATLVCLATGFYPDHVELSWWVNGKEVHSGVCTDPQPLKEQPALNDSRYCLSSRLRVSATFWQNPRNHFRCQVQFYGLSENDEWTQDRAKPVTQIVSAEAWGRADCDVKLVEKSFETDTNLNFQNLSVIGFRILLLKVAGFNLLMTLRLWSSRAKRSGSGATNFSLLKQAGDVEENPGPTSMDWIWRILFLVGAATGAHSGPQLQLQESGPGLVKPSETLSLTCTVSGDSISSGDYYWGWIRQPPGKGLEWIGHIYYSGVTYYNPSLKSRVTISVDTSRNQFSLKLSSVTAADTAVYYCTREDSSNWRSRGQGTLVTVSSGSGGGGSGGGGSGGGGSFEEVQLQESGPDLVKPSQSLSLTCTVTGYSITSGYGWHWIRQFPGNKLEWMGYIHYSGSTTYNPSLKSRISISRDTSKNQFFLQLNSVTTEDTATYYCARSLRYWGQGTTLTVSSTRIQNPDPAVYQLRDSKSSDKSVCLFTDFDSQTNVSQSKDSDVYITDKCVLDMRSMDFKSNSAVAWSNKSDFACANAFNNSIIPEDTFFPSPESSCGFTSESYQQGVLSATILYEILLGKATLYAVLVSALVLMAMVKRKDSRG

SEQ ID NO: 13075 - protein, 887 aa, synthetic construct
MALPVTALLLPLALLLHAARPEVQLVESGGGLVQPGGSLRLSCAASGFSFSDFWMSWVRQAPGKGLEWVATISQAGSEKDYVDSVKGRFTISRDNAKKSLYLQMNSLRAEDTAVYYCASGVYSFDYRGQGTLVTVSSGTGGGGSGGGGSGGGGSEFDIQMTQSPSSLSASVGDRVTITCSATSSISYMHWYQQKPGKAPKGWIYDTSKLAHGVPSRFSGSGSGTDFTLTISSLQPEDFATYYCHQRRSYPFTFGQGTKVEIKLEDLKNVFPPEVAVFEPSEAEISHTQKATLVCLATGFYPDHVELSWWVNGKEVHSGVCTDPQPLKEQPALNDSRYCLSSRLRVSATFWQNPRNHFRCQVQFYGLSENDEWTQDRAKPVTQIVSAEAWGRADCDVKLVEKSFETDTNLNFQNLSVIGFRILLLKVAGFNLLMTLRLWSSRAKRSGSGATNFSLLKQAGDVEENPGPTSMDWIWRILFLVGAATGAHSGPQLQLQESGPGLVKPSETLSLTCTVSGDSISSGDYYWGWIRQPPGKGLEWIGHIYYSGVTYYNPSLKSRVTISVDTSRNQFSLKLSSVTAADTAVYYCTREDSSNWRSRGQGTLVTVSSGSGGGGSGGGGSGGGGSFEEVQLVQSGAEVKKPGASVKVSCKASGYTFTNFWIHWVRQAPGQGLEWIGEIDPSDSYTNYNQKFKGRVTITRDTSTSTAYLELSSLRSEDTAVYYCAREITTVDYWGQGTLVTVSSTRIQNPDPAVYQLRDSKSSDKSVCLFTDFDSQTNVSQSKDSDVYITDKCVLDMRSMDFKSNSAVAWSNKSDFACANAFNNSIIPEDTFFPSPESSCGFTSESYQQGVLSATILYEILLGKATLYAVLVSALVLMAMVKRKDSRG

SEQ ID NO: 13076 - protein, 894 aa, synthetic construct
MALPVTALLLPLALLLHAARPEVQLVESGGGLVQPGGSLRLSCAASGFSFSDFWMSWVRQAPGKGLEWVATISQAGSEKDYVDSVKGRFTISRDNAKKSLYLQMNSLRAEDTAVYYCASGVYSFDYRGQGTLVTVSSGTGGGGSGGGGSGGGGSEFDIQMTQSPSSLSASVGDRVTITCKASQGFNKYVAWYQQKPGKAPKLLIYYTSTLQPGVPSRFSGSGSGRDYTLTISSLQPEDFATYYCLQYGNLLYAFGQGTKVEIKRLEDLKNVFPPEVAVFEPSEAEISHTQKATLVCLATGFYPDHVELSWWVNGKEVHSGVCTDPQPLKEQPALNDSRYCLSSRLRVSATFWQNPRNHFRCQVQFYGLSENDEWTQDRAKPVTQIVSAEAWGRADCDVKLVEKSFETDTNLNFQNLSVIGFRILLLKVAGFNLLMTLRLWSSRAKRSGSGATNFSLLKQAGDVEENPGPTSMDWIWRILFLVGAATGAHSGPQLQLQESGPGLVKPSETLSLTCTVSGDSISSGDYYWGWIRQPPGKGLEWIGHIYYSGVTYYNPSLKSRVTISVDTSRNQFSLKLSSVTAADTAVYYCTREDSSNWRSRGQGTLVTVSSGSGGGGSGGGGSGGGGSFEEVQLVQSGAEVKKPGASVKVSCKASGYTFTSYWIGWVRQAPGQGLEWIGDIYPGGGYTNYNEKFKGRVTITRDTSTSTAYLELSSLRSEDTAVYYCARLDGSSYRGAMDSWGQGTLVTVSSTRIQNPDPAVYQLRDSKSSDKSVCLFTDFDSQTNVSQSKDSDVYITDKCVLDMRSMDFKSNSAVAWSNKSDFACANAFNNSIIPEDTFFPSPESSCGFTSESYQQGVLSATILYEILLGKATLYAVLVSALVLMAMVKRKDSRG

SEQ ID NO: 13077 - protein, 890 aa, synthetic construct
MALPVTALLLPLALLLHAARPEVQLVESGGGLVQPGGSLRLSCAASGFSFSDFWMSWVRQAPGKGLEWVATISQAGSEKDYVDSVKGRFTISRDNAKKSLYLQMNSLRAEDTAVYYCASGVYSFDYRGQGTLVTVSSGTGGGGSGGGGSGGGGSEFDIQMTQSPSSLSASVGDRVTITCRASQDIRYYLNWYQQKPGKAPKLLIYVASSLQSGVPSRFSGSGSGTEFTLTVSSLQPEDFATYYCLQVYSTPRTFGQGTKVEIKLEDLKNVFPPEVAVFEPSEAEISHTQKATLVCLATGFYPDHVELSWWVNGKEVHSGVCTDPQPLKEQPALNDSRYCLSSRLRVSATFWQNPRNHFRCQVQFYGLSENDEWTQDRAKPVTQIVSAEAWGRADCDVKLVEKSFETDTNLNFQNLSVIGFRILLLKVAGFNLLMTLRLWSSRAKRSGSGATNFSLLKQAGDVEENPGPTSMDWIWRILFLVGAATGAHSGPQLQLQESGPGLVKPSETLSLTCTVSGDSISSGDYYWGWIRQPPGKGLEWIGHIYYSGVTYYNPSLKSRVTISVDTSRNQFSLKLSSVTAADTAVYYCTREDSSNWRSRGQGTLVTVSSGSGGGGSGGGGSGGGGSFEEVQLVESGGGLAKPGGSLRLSCAASGFRFTFNNYYMDWVRQAPGQGLEWVSRISSSGDPTWYADSVKGRFTISRENAKNTLFLQMNSLRAEDTAVYYCASLTTGSDSWGQGVLVTVSSTRIQNPDPAVYQLRDSKSSDKSVCLFTDFDSQTNVSQSKDSDVYITDKCVLDMRSMDFKSNSAVAWSNKSDFACANAFNNSIIPEDTFFPSPESSCGFTSESYQQGVLSATILYEILLGKATLYAVLVSALVLMAMVKRKDSRG

SEQ ID NO: 13078 - protein, 891 aa, synthetic construct
MALPVTALLLPLALLLHAARPEVQLVESGGGLVQPGGSLRLSCAASGFSFSDFWMSWVRQAPGKGLEWVATISQAGSEKDYVDSVKGRFTISRDNAKKSLYLQMNSLRAEDTAVYYCASGVYSFDYRGQGTLVTVSSGTGGGGSGGGGSGGGGSEFEIVMTQSPATLSVSPGERATLSCRASQSVSRNLAWYQQKPGQAPRLLIYGASTRATGIPARFSGSGSGTEFTLTIGSLQSEDFAVYYCQQYKTWPRTFGQGTNVEIKLEDLKNVFPPEVAVFEPSEAEISHTQKATLVCLATGFYPDHVELSWWVNGKEVHSGVCTDPQPLKEQPALNDSRYCLSSRLRVSATFWQNPRNHFRCQVQFYGLSENDEWTQDRAKPVTQIVSAEAWGRADCDVKLVEKSFETDTNLNFQNLSVIGFRILLLKVAGFNLLMTLRLWSSRAKRSGSGATNFSLLKQAGDVEENPGPTSMDWIWRILFLVGAATGAHSGPQLQLQESGPGLVKPSETLSLTCTVSGDSISSGDYYWGWIRQPPGKGLEWIGHIYYSGVTYYNPSLKSRVTISVDTSRNQFSLKLSSVTAADTAVYYCTREDSSNWRSRGQGTLVTVSSGSGGGGSGGGGSGGGGSFEQVQLQQWGAGLLKPSETLSLTCAVFGGSFSGYYWSWIRQPPGKGLEWIGEINHRGNTNDNPSLKSRVTISVDTSKNQFALKLSSVTAADTAVYYCARERGYTYGNFDHWGQGTLVTVSSTRIQNPDPAVYQLRDSKSSDKSVCLFTDFDSQTNVSQSKDSDVYITDKCVLDMRSMDFKSNSAVAWSNKSDFACANAFNNSIIPEDTFFPSPESSCGFTSESYQQGVLSATILYEILLGKATLYAVLVSALVLMAMVKRKDSRG

SEQ ID NO: 13079 - protein, 892 aa, synthetic construct
MALPVTALLLPLALLLHAARPEVQLVESGGGLVQPGGSLRLSCAASGFSFSDFWMSWVRQAPGKGLEWVATISQAGSEKDYVDSVKGRFTISRDNAKKSLYLQMNSLRAEDTAVYYCASGVYSFDYRGQGTLVTVSSGTGGGGSGGGGSGGGGSEFEIVMTPSSATLSVSPGERATLSCRASQSVSRNLAWYQQKPGQAPRLLIYGASTRATGIPARFSGSGSGTEFTLTISSLQSEDFAVYYCHQYSNWMCSFGQGTKLEIKLEDLKNVFPPEVAVFEPSEAEISHTQKATLVCLATGFYPDHVELSWWVNGKEVHSGVCTDPQPLKEQPALNDSRYCLSSRLRVSATFWQNPRNHFRCQVQFYGLSENDEWTQDRAKPVTQIVSAEAWGRADCDVKLVEKSFETDTNLNFQNLSVIGFRILLLKVAGFNLLMTLRLWSSRAKRSGSGATNFSLLKQAGDVEENPGPTSMDWIWRILFLVGAATGAHSGPQLQLQESGPGLVKPSETLSLTCTVSGDSISSGDYYWGWIRQPPGKGLEWIGHIYYSGVTYYNPSLKSRVTISVDTSRNQFSLKLSSVTAADTAVYYCTREDSSNWRSRGQGTLVTVSSGSGGGGSGGGGSGGGGSFEEVQLLESGGGLVQPGGSLRLSCAASGFTFSRYAMNWVRQAPGKGLEWVSGISGSGGRTYYADSVKGRFTISRDNSKNTLYLQMNSLRAEDTAVYYCAKDRDFWSGPFDYWGQGTLVTVSSTRIQNPDPAVYQLRDSKSSDKSVCLFTDFDSQTNVSQSKDSDVYITDKCVLDMRSMDFKSNSAVAWSNKSDFACANAFNNSIIPEDTFFPSPESSCGFTSESYQQGVLSATILYEILLGKATLYAVLVSALVLMAMVKRKDSRG

SEQ ID NO: 13080 - protein, 897 aa, synthetic construct
MALPVTALLLPLALLLHAARPEVQLVESGGGLVQPGGSLRLSCAASGFSFSDFWMSWVRQAPGKGLEWVATISQAGSEKDYVDSVKGRFTISRDNAKKSLYLQMNSLRAEDTAVYYCASGVYSFDYRGQGTLVTVSSGTGGGGSGGGGSGGGGSEFDIQMTQSPSSLSASVGDRVTITCKASKNIRSYLAWYQQKPGKAPKLLIYSGSTLHSGVPSRFSGSGSGTDFTLTISSLQPEDFATYYCQQHHEYPLTFGQGTKVEIKRLEDLKNVFPPEVAVFEPSEAEISHTQKATLVCLATGFYPDHVELSWWVNGKEVHSGVCTDPQPLKEQPALNDSRYCLSSRLRVSATFWQNPRNHFRCQVQFYGLSENDEWTQDRAKPVTQIVSAEAWGRADCDVKLVEKSFETDTNLNFQNLSVIGFRILLLKVAGFNLLMTLRLWSSRAKRSGSGATNFSLLKQAGDVEENPGPTSMDWIWRILFLVGAATGAHSGPQLQLQESGPGLVKPSETLSLTCTVSGDSISSGDYYWGWIRQPPGKGLEWIGHIYYSGVTYYNPSLKSRVTISVDTSRNQFSLKLSSVTAADTAVYYCTREDSSNWRSRGQGTLVTVSSGSGGGGSGGGGSGGGGSFEQVQLQESGPGLVKPSETLSLTCTVSGYTITSGYDWSWIRQPPGKGLEWIGYINYGGSTNYKPSLGSRVTISVDTSKNQFSLKLSSVTAADTAVYYCARYNEYKSYIYDWYFDFWGQGTLVTVSSTRIQNPDPAVYQLRDSKSSDKSVCLFTDFDSQTNVSQSKDSDVYITDKCVLDMRSMDFKSNSAVAWSNKSDFACANAFNNSIIPEDTFFPSPESSCGFTSESYQQGVLSATILYEILLGKATLYAVLVSALVLMAMVKRKDSRG

SEQ ID NO: 13081 - protein, 899 aa, synthetic construct
MALPVTALLLPLALLLHAARPEVQLVESGGGLVQPGGSLRLSCAASGFSFSDFWMSWVRQAPGKGLEWVATISQAGSEKDYVDSVKGRFTISRDNAKKSLYLQMNSLRAEDTAVYYCASGVYSFDYRGQGTLVTVSSGTGGGGSGGGGSGGGGSEFQSVVTQPPSVSAAPGQKVTISCSGSSSNIGNNYVSWYQQLPGTAPKLLIYDNNKRPSGIPDRFSGSKSGTSATLGITGLQTGDEADYYCGTWDGSLYTMLFGGGTKLTVLLEDLKNVFPPEVAVFEPSEAEISHTQKATLVCLATGFYPDHVELSWWVNGKEVHSGVCTDPQPLKEQPALNDSRYCLSSRLRVSATFWQNPRNHFRCQVQFYGLSENDEWTQDRAKPVTQIVSAEAWGRADCDVKLVEKSFETDTNLNFQNLSVIGFRILLLKVAGFNLLMTLRLWSSRAKRSGSGATNFSLLKQAGDVEENPGPTSMDWIWRILFLVGAATGAHSGPQLQLQESGPGLVKPSETLSLTCTVSGDSISSGDYYWGWIRQPPGKGLEWIGHIYYSGVTYYNPSLKSRVTISVDTSRNQFSLKLSSVTAADTAVYYCTREDSSNWRSRGQGTLVTVSSGSGGGGSGGGGSGGGGSFEEVQLVESGGGLVKPGGSLRLSCAASGFTFSNAWMSWVRQAPGKGLEWVGFIRSKAYGGTTEYAASVKGRFTISRDDSKSIAYLQMNNLKTEDTAVYYCARDGLYSSSWYDSDYWGQGTLVTVSSTRIQNPDPAVYQLRDSKSSDKSVCLFTDFDSQTNVSQSKDSDVYITDKCVLDMRSMDFKSNSAVAWSNKSDFACANAFNNSIIPEDTFFPSPESSCGFTSESYQQGVLSATILYEILLGKATLYAVLVSALVLMAMVKRKDSRG

SEQ ID NO: 13082 - protein, 904 aa, synthetic construct
MALPVTALLLPLALLLHAARPEVQLVESGGGLVQPGGSLRLSCAASGFSFSDFWMSWVRQAPGKGLEWVATISQAGSEKDYVDSVKGRFTISRDNAKKSLYLQMNSLRAEDTAVYYCASGVYSFDYRGQGTLVTVSSGTGGGGSGGGGSGGGGSEFQSVLTQPPSVSGAPGQRVTISCTGSSSNIGAGYDVHWYQQLPGTAPKLLIFGNSNRPSGVPDRFSGFKSGTSASLAITGLQAEDEADYFCQSYDSSLSGSGVFGTGTKVTVLGLEDLKNVFPPEVAVFEPSEAEISHTQKATLVCLATGFYPDHVELSWWVNGKEVHSGVCTDPQPLKEQPALNDSRYCLSSRLRVSATFWQNPRNHFRCQVQFYGLSENDEWTQDRAKPVTQIVSAEAWGRADCDVKLVEKSFETDTNLNFQNLSVIGFRILLLKVAGFNLLMTLRLWSSRAKRSGSGATNFSLLKQAGDVEENPGPTSMDWIWRILFLVGAATGAHSGPQLQLQESGPGLVKPSETLSLTCTVSGDSISSGDYYWGWIRQPPGKGLEWIGHIYYSGVTYYNPSLKSRVTISVDTSRNQFSLKLSSVTAADTAVYYCTREDSSNWRSRGQGTLVTVSSGSGGGGSGGGGSGGGGSFEQMQLVQSGGGLVQPGRSLRLSCAASGFTFDDYAMHWVRQAPGKGLEWVSGISWNSGSIGYADSVKGRFTISRDNAKNSLYLQMNSLRAEDTALYYCAKDIHSGSYYGLLYYAMDVWGQGTTVTVSSTRIQNPDPAVYQLRDSKSSDKSVCLFTDFDSQTNVSQSKDSDVYITDKCVLDMRSMDFKSNSAVAWSNKSDFACANAFNNSIIPEDTFFPSPESSCGFTSESYQQGVLSATILYEILLGKATLYAVLVSALVLMAMVKRKDSRG

SEQ ID NO: 13083 - protein, 904 aa, synthetic construct
MALPVTALLLPLALLLHAARPEVQLVESGGGLVQPGGSLRLSCAASGFSFSDFWMSWVRQAPGKGLEWVATISQAGSEKDYVDSVKGRFTISRDNAKKSLYLQMNSLRAEDTAVYYCASGVYSFDYRGQGTLVTVSSGTGGGGSGGGGSGGGGSEFLPVLTQPPSASGTPGQRVTISCSGRSSNIGSNSVNWYRQLPGAAPKLLIYSNNQRPPGVPVRFSGSKSGTSASLAISGLQSEDEATYYCATWDDNLNVHYVFGTGTKVTVLGSRLEDLKNVFPPEVAVFEPSEAEISHTQKATLVCLATGFYPDHVELSWWVNGKEVHSGVCTDPQPLKEQPALNDSRYCLSSRLRVSATFWQNPRNHFRCQVQFYGLSENDEWTQDRAKPVTQIVSAEAWGRADCDVKLVEKSFETDTNLNFQNLSVIGFRILLLKVAGFNLLMTLRLWSSRAKRSGSGATNFSLLKQAGDVEENPGPTSMDWIWRILFLVGAATGAHSGPQLQLQESGPGLVKPSETLSLTCTVSGDSISSGDYYWGWIRQPPGKGLEWIGHIYYSGVTYYNPSLKSRVTISVDTSRNQFSLKLSSVTAADTAVYYCTREDSSNWRSRGQGTLVTVSSGSGGGGSGGGGSGGGGSFELEMAQVQLVQSGAEVKKPGSSVKVSCKASGGTFSSYAISWVRQAPGQGLEWMGRIIPILGIANYAQKFQGRVTITADKSTSTAYMELSSLRSEDTAVYYCARGGYYSHDMWSEDWGQGTLVTVSSTRIQNPDPAVYQLRDSKSSDKSVCLFTDFDSQTNVSQSKDSDVYITDKCVLDMRSMDFKSNSAVAWSNKSDFACANAFNNSIIPEDTFFPSPESSCGFTSESYQQGVLSATILYEILLGKATLYAVLVSALVLMAMVKRKDSRG

SEQ ID NO: 13084 - protein, 898 aa, synthetic construct
MALPVTALLLPLALLLHAARPEVQLVESGGGLVQPGGSLRLSCAASGFSFSDFWMSWVRQAPGKGLEWVATISQAGSEKDYVDSVKGRFTISRDNAKKSLYLQMNSLRAEDTAVYYCASGVYSFDYRGQGTLVTVSSGTGGGGSGGGGSGGGGSEFDFVMTQSPDSLAVSLGERVTMSCKSSQSLLNSGNQKNYLTWYQQKPGQPPKLLIYWASTRESGVPDRFSGSGSGTDFTLTISSLQAEDVAVYYCQNDYSYPYTFGQGTKLEIKLEDLKNVFPPEVAVFEPSEAEISHTQKATLVCLATGFYPDHVELSWWVNGKEVHSGVCTDPQPLKEQPALNDSRYCLSSRLRVSATFWQNPRNHFRCQVQFYGLSENDEWTQDRAKPVTQIVSAEAWGRADCDVKLVEKSFETDTNLNFQNLSVIGFRILLLKVAGFNLLMTLRLWSSRAKRSGSGATNFSLLKQAGDVEENPGPTSMDWIWRILFLVGAATGAHSGPQLQLQESGPGLVKPSETLSLTCTVSGDSISSGDYYWGWIRQPPGKGLEWIGHIYYSGVTYYNPSLKSRVTISVDTSRNQFSLKLSSVTAADTAVYYCTREDSSNWRSRGQGTLVTVSSGSGGGGSGGGGSGGGGSFEEVQLVQSGAELKKPGASVKVSCKASGYTFTDYYMKWVRQAPGQGLEWIGDIIPSNGATFYNQKFKGRVTITVDKSTSTAYMELSSLRSEDTAVYYCARSHLLRASWFAYWGQGTLVTVSSTRIQNPDPAVYQLRDSKSSDKSVCLFTDFDSQTNVSQSKDSDVYITDKCVLDMRSMDFKSNSAVAWSNKSDFACANAFNNSIIPEDTFFPSPESSCGFTSESYQQGVLSATILYEILLGKATLYAVLVSALVLMAMVKRKDSRG

SEQ ID NO: 13085 - protein, 898 aa, synthetic construct
MALPVTALLLPLALLLHAARPEVQLVESGGGLVQPGGSLRLSCAASGFSFSDFWMSWVRQAPGKGLEWVATISQAGSEKDYVDSVKGRFTISRDNAKKSLYLQMNSLRAEDTAVYYCASGVYSFDYRGQGTLVTVSSGTGGGGSGGGGSGGGGSEFDFVMTQSPDSLAVSLGERVTMSCKSSQSLLNSGNQKNYLTWYQQKPGQPPKLLIYWASTRESGVPDRFSGSGSGTDFTLTISSLQAEDVAVYYCQNDYSYPYTFGQGTKLEIKLEDLKNVFPPEVAVFEPSEAEISHTQKATLVCLATGFYPDHVELSWWVNGKEVHSGVCTDPQPLKEQPALNDSRYCLSSRLRVSATFWQNPRNHFRCQVQFYGLSENDEWTQDRAKPVTQIVSAEAWGRADCDVKLVEKSFETDTNLNFQNLSVIGFRILLLKVAGFNLLMTLRLWSSRAKRSGSGATNFSLLKQAGDVEENPGPTSMDWIWRILFLVGAATGAHSGPQLQLQESGPGLVKPSETLSLTCTVSGDSISSGDYYWGWIRQPPGKGLEWIGHIYYSGVTYYNPSLKSRVTISVDTSRNQFSLKLSSVTAADTAVYYCTREDSSNWRSRGQGTLVTVSSGSGGGGSGGGGSGGGGSFEQVQLVQSGAELKKPGASVKVSCKASGYTFTDYYMKWVRQAPGQGLEWIGDIIPSNGATFYNQKFKGRVTITVDKSTSTAYMELSSLRSEDTAVYYCARSHLLRASWFAYWGQGTLVTVSSTRIQNPDPAVYQLRDSKSSDKSVCLFTDFDSQTNVSQSKDSDVYITDKCVLDMRSMDFKSNSAVAWSNKSDFACANAFNNSIIPEDTFFPSPESSCGFTSESYQQGVLSATILYEILLGKATLYAVLVSALVLMAMVKRKDSRG

SEQ ID NO: 13086 - protein, 888 aa, synthetic construct
MALPVTALLLPLALLLHAARPEVQLVESGGGLVQPGGSLRLSCAASGFSFSDFWMSWVRQAPGKGLEWVATISQAGSEKDYVDSVKGRFTISRDNAKKSLYLQMNSLRAEDTAVYYCASGVYSFDYRGQGTLVTVSSGTGGGGSGGGGSGGGGSEFDVQITQSPSYLAASPGETITINCRASKSISKDLAWYQEKPGKTNKLLIYSGSTLQSGIPSRFSGSGSGTDFTLTISSLEPEDFAMYYCQQHNKYPYTFGGGTKLEIKRLEDLKNVFPPEVAVFEPSEAEISHTQKATLVCLATGFYPDHVELSWWVNGKEVHSGVCTDPQPLKEQPALNDSRYCLSSRLRVSATFWQNPRNHFRCQVQFYGLSENDEWTQDRAKPVTQIVSAEAWGRADCDVKLVEKSFETDTNLNFQNLSVIGFRILLLKVAGFNLLMTLRLWSSRAKRSGSGATNFSLLKQAGDVEENPGPTSMDWIWRILFLVGAATGAHSGPQLQLQESGPGLVKPSETLSLTCTVSGDSISSGDYYWGWIRQPPGKGLEWIGHIYYSGVTYYNPSLKSRVTISVDTSRNQFSLKLSSVTAADTAVYYCTREDSSNWRSRGQGTLVTVSSGSGGGGSGGGGSGGGGSFEQVQLQQPGAELVRPGASVKLSCKASGYTFTSYWMNWVKQRPDQGLEWIGRIDPYDSETHYNQKFKDKAILTVDKSSSTAYMQLSSLTSEDSAVYYCARGNWDDYWGQGTTLTVSSTRIQNPDPAVYQLRDSKSSDKSVCLFTDFDSQTNVSQSKDSDVYITDKCVLDMRSMDFKSNSAVAWSNKSDFACANAFNNSIIPEDTFFPSPESSCGFTSESYQQGVLSATILYEILLGKATLYAVLVSALVLMAMVKRKDSRG

SEQ ID NO: 13087 - protein, 890 aa, synthetic construct
MALPVTALLLPLALLLHAARPEVQLVESGGGLVQPGGSLRLSCAASGFSFSDFWMSWVRQAPGKGLEWVATISQAGSEKDYVDSVKGRFTISRDNAKKSLYLQMNSLRAEDTAVYYCASGVYSFDYRGQGTLVTVSSGTGGGGSGGGGSGGGGSEFEIVLTQSPTSMTASPGEQVTITCRASSSINYMHWYQQKPGASPRPWIYETSKLASGVPDRFSGSASGTSYSLTINNMEAEDAATYYCQQWNYPSWTFGGGTKLELKLEDLKNVFPPEVAVFEPSEAEISHTQKATLVCLATGFYPDHVELSWWVNGKEVHSGVCTDPQPLKEQPALNDSRYCLSSRLRVSATFWQNPRNHFRCQVQFYGLSENDEWTQDRAKPVTQIVSAEAWGRADCDVKLVEKSFETDTNLNFQNLSVIGFRILLLKVAGFNLLMTLRLWSSRAKRSGSGATNFSLLKQAGDVEENPGPTSMDWIWRILFLVGAATGAHSGPQLQLQESGPGLVKPSETLSLTCTVSGDSISSGDYYWGWIRQPPGKGLEWIGHIYYSGVTYYNPSLKSRVTISVDTSRNQFSLKLSSVTAADTAVYYCTREDSSNWRSRGQGTLVTVSSGSGGGGSGGGGSGGGGSFEEVQLVESGGGLVQPGRSLKLSCAASGFTFSDYNMAWVRQAPKKGLEWVATILYDGGRTYYRGSVKGRFTISRDNAKSTLYLRMDSLRSEDTATYYCATHSRGTDYFDYWGQGVMVTVSSTRIQNPDPAVYQLRDSKSSDKSVCLFTDFDSQTNVSQSKDSDVYITDKCVLDMRSMDFKSNSAVAWSNKSDFACANAFNNSIIPEDTFFPSPESSCGFTSESYQQGVLSATILYEILLGKATLYAVLVSALVLMAMVKRKDSRG

SEQ ID NO: 13088 - protein, 899 aa, synthetic construct
MALPVTALLLPLALLLHAARPEVQLVESGGGLVQPGGSLRLSCAASGFSFSDFWMSWVRQAPGKGLEWVATISQAGSEKDYVDSVKGRFTISRDNAKKSLYLQMNSLRAEDTAVYYCASGVYSFDYRGQGTLVTVSSGTGGGGSGGGGSGGGGSEFDIVMTQSPSSLAVSEGETVTINCKSSQSFLSSGDGKNYVAWYQYKPGQSPKLLIYWASTRQSGVPDRFIGSGSGTDFTLTISTVQAEDLAIYYCQQYYDTPLTFGSGTKLEIKLEDLKNVFPPEVAVFEPSEAEISHTQKATLVCLATGFYPDHVELSWWVNGKEVHSGVCTDPQPLKEQPALNDSRYCLSSRLRVSATFWQNPRNHFRCQVQFYGLSENDEWTQDRAKPVTQIVSAEAWGRADCDVKLVEKSFETDTNLNFQNLSVIGFRILLLKVAGFNLLMTLRLWSSRAKRSGSGATNFSLLKQAGDVEENPGPTSMDWIWRILFLVGAATGAHSGPQLQLQESGPGLVKPSETLSLTCTVSGDSISSGDYYWGWIRQPPGKGLEWIGHIYYSGVTYYNPSLKSRVTISVDTSRNQFSLKLSSVTAADTAVYYCTREDSSNWRSRGQGTLVTVSSGSGGGGSGGGGSGGGGSFEEVKLQESGPSLVQSSQTLSLTCTVSGFSLTSYHIHWVRQTPGKGLEWMGVMWSDGDTSYNSALKSRLSISRDTSQSQVFLKMNSLQTEDTATYYCARGYYSSYLYLWFAYWGQGTLVTVSSTRIQNPDPAVYQLRDSKSSDKSVCLFTDFDSQTNVSQSKDSDVYITDKCVLDMRSMDFKSNSAVAWSNKSDFACANAFNNSIIPEDTFFPSPESSCGFTSESYQQGVLSATILYEILLGKATLYAVLVSALVLMAMVKRKDSRG

SEQ ID NO: 13089 - protein, 903 aa, synthetic construct
MALPVTALLLPLALLLHAARPEVQLVESGGGLVQPGGSLRLSCAASGFSFSDFWMSWVRQAPGKGLEWVATISQAGSEKDYVDSVKGRFTISRDNAKKSLYLQMNSLRAEDTAVYYCASGVYSFDYRGQGTLVTVSSGTGGGGSGGGGSGGGGSEFDVLMTQTPVSLPVSLGGQVSISCRSSQSLVHSDGDTYLHWYLQKPGQSPQLLIYRVSNRFSGVPDRFSGSGSGTDFTLKISRVEPEDLGLYYCLQTTHFPPWTFGGGTKLEMKLEDLKNVFPPEVAVFEPSEAEISHTQKATLVCLATGFYPDHVELSWWVNGKEVHSGVCTDPQPLKEQPALNDSRYCLSSRLRVSATFWQNPRNHFRCQVQFYGLSENDEWTQDRAKPVTQIVSAEAWGRADCDVKLVEKSFETDTNLNFQNLSVIGFRILLLKVAGFNLLMTLRLWSSRAKRSGSGATNFSLLKQAGDVEENPGPTSMDWIWRILFLVGAATGAHSGPQLQLQESGPGLVKPSETLSLTCTVSGDSISSGDYYWGWIRQPPGKGLEWIGHIYYSGVTYYNPSLKSRVTISVDTSRNQFSLKLSSVTAADTAVYYCTREDSSNWRSRGQGTLVTVSSGSGGGGSGGGGSGGGGSFEQVQLQQSGPELRRPGSSVRLSCKASGYRIKDFLIHWIKNRPEHGLEWIGWIDPEDGETKYAQKFQTKATLTADTSSNTAYMQLSSLTSEDTATYFCARWGDVYYGLMRGHVMDAWGQGTSVTVSSTRIQNPDPAVYQLRDSKSSDKSVCLFTDFDSQTNVSQSKDSDVYITDKCVLDMRSMDFKSNSAVAWSNKSDFACANAFNNSIIPEDTFFPSPESSCGFTSESYQQGVLSATILYEILLGKATLYAVLVSALVLMAMVKRKDSRG

SEQ ID NO: 13090 - protein, 898 aa, synthetic construct
MALPVTALLLPLALLLHAARPEVQLVESGGGLVQPGGSLRLSCAASGFSFSDFWMSWVRQAPGKGLEWVATISQAGSEKDYVDSVKGRFTISRDNAKKSLYLQMNSLRAEDTAVYYCASGVYSFDYRGQGTLVTVSSGTGGGGSGGGGSGGGGSEFDIVMTQSPATLSLSPGERATLSCRSSKSLQNVNGNTYLYWFQQKPGQSPQLLIYRMSNLNSGVPDRFSGSGSGTEFTLTISSLEPEDFAVYYCMQHLEYPITFGAGTKLEIKLEDLKNVFPPEVAVFEPSEAEISHTQKATLVCLATGFYPDHVELSWWVNGKEVHSGVCTDPQPLKEQPALNDSRYCLSSRLRVSATFWQNPRNHFRCQVQFYGLSENDEWTQDRAKPVTQIVSAEAWGRADCDVKLVEKSFETDTNLNFQNLSVIGFRILLLKVAGFNLLMTLRLWSSRAKRSGSGATNFSLLKQAGDVEENPGPTSMDWIWRILFLVGAATGAHSGPQLQLQESGPGLVKPSETLSLTCTVSGDSISSGDYYWGWIRQPPGKGLEWIGHIYYSGVTYYNPSLKSRVTISVDTSRNQFSLKLSSVTAADTAVYYCTREDSSNWRSRGQGTLVTVSSGSGGGGSGGGGSGGGGSFEEVQLVESGGGLVKPGGSLKLSCAASGYTFTSYVMHWVRQAPGKGLEWIGYINPYNDGTKYNEKFQGRVTISSDKSISTAYMELSSLRSEDTAMYYCARGTYYYGTRVFDYWGQGTLVTVSSTRIQNPDPAVYQLRDSKSSDKSVCLFTDFDSQTNVSQSKDSDVYITDKCVLDMRSMDFKSNSAVAWSNKSDFACANAFNNSIIPEDTFFPSPESSCGFTSESYQQGVLSATILYEILLGKATLYAVLVSALVLMAMVKRKDSRG

SEQ ID NO: 13091 - protein, 894 aa, synthetic construct
MALPVTALLLPLALLLHAARPEVQLVESGGGLVQPGGSLRLSCAASGFSFSDFWMSWVRQAPGKGLEWVATISQAGSEKDYVDSVKGRFTISRDNAKKSLYLQMNSLRAEDTAVYYCASGVYSFDYRGQGTLVTVSSGTGGGGSGGGGSGGGGSEFDIQMTQSPSSLSASVGDRVTITCKASDHINNWLAWYQQKPGQAPKLLIYGATTLETGVPSRFSGSGSGTDYTLTISSLQPEDFATYYCQQSWNTPWTFGQGTKLEIKRLEDLKNVFPPEVAVFEPSEAEISHTQKATLVCLATGFYPDHVELSWWVNGKEVHSGVCTDPQPLKEQPALNDSRYCLSSRLRVSATFWQNPRNHFRCQVQFYGLSENDEWTQDRAKPVTQIVSAEAWGRADCDVKLVEKSFETDTNLNFQNLSVIGFRILLLKVAGFNLLMTLRLWSSRAKRSGSGATNFSLLKQAGDVEENPGPTSMDWIWRILFLVGAATGAHSGPQLQLQESGPGLVKPSETLSLTCTVSGDSISSGDYYWGWIRQPPGKGLEWIGHIYYSGVTYYNPSLKSRVTISVDTSRNQFSLKLSSVTAADTAVYYCTREDSSNWRSRGQGTLVTVSSGSGGGGSGGGGSGGGGSFEQVQLQQPGAELVKPGASVKMSCKASGYAFSSYWINWMKQKPGQGLEWIGQIYPGDGDTNYNGKFKGRATLTADTSSSTAYMQLSSLTSEDSAVYFCARSITTVVGCAMDYWGQGTSVTVSSTRIQNPDPAVYQLRDSKSSDKSVCLFTDFDSQTNVSQSKDSDVYITDKCVLDMRSMDFKSNSAVAWSNKSDFACANAFNNSIIPEDTFFPSPESSCGFTSESYQQGVLSATILYEILLGKATLYAVLVSALVLMAMVKRKDSRG

SEQ ID NO: 13092 - protein, 896 aa, synthetic construct
MALPVTALLLPLALLLHAARPEVQLVESGGGLVQPGGSLRLSCAASGFSFSDFWMSWVRQAPGKGLEWVATISQAGSEKDYVDSVKGRFTISRDNAKKSLYLQMNSLRAEDTAVYYCASGVYSFDYRGQGTLVTVSSGTGGGGSGGGGSGGGGSEFQIVLSQSPAILSASPGEKVTMTCRASSSVSYMHWYQQKPGSSPKPWIYATSNLASGVPARFSGSGSGTSYSFTISRVEAEDAATYYCQQWTFNPPTFGGGTRLEIKRTVAALEDLKNVFPPEVAVFEPSEAEISHTQKATLVCLATGFYPDHVELSWWVNGKEVHSGVCTDPQPLKEQPALNDSRYCLSSRLRVSATFWQNPRNHFRCQVQFYGLSENDEWTQDRAKPVTQIVSAEAWGRADCDVKLVEKSFETDTNLNFQNLSVIGFRILLLKVAGFNLLMTLRLWSSRAKRSGSGATNFSLLKQAGDVEENPGPTSMDWIWRILFLVGAATGAHSGPQLQLQESGPGLVKPSETLSLTCTVSGDSISSGDYYWGWIRQPPGKGLEWIGHIYYSGVTYYNPSLKSRVTISVDTSRNQFSLKLSSVTAADTAVYYCTREDSSNWRSRGQGTLVTVSSGSGGGGSGGGGSGGGGSFEQAYLQQSGAELVRPGASVKMSCKASGYTFTSYNMHWVKQTPRQGLEWIGGIYPGNGDTSYNQKFKGKATLTVGKSSSTAYMQLSSLTSEDSAVYFCARYDYNYAMDYWGQGTSVTVSSASTRIQNPDPAVYQLRDSKSSDKSVCLFTDFDSQTNVSQSKDSDVYITDKCVLDMRSMDFKSNSAVAWSNKSDFACANAFNNSIIPEDTFFPSPESSCGFTSESYQQGVLSATILYEILLGKATLYAVLVSALVLMAMVKRKDSRG

SEQ ID NO: 13093 - protein, 894 aa, synthetic construct
MALPVTALLLPLALLLHAARPEVQLVESGGGLVQPGGSLRLSCAASGFSFSDFWMSWVRQAPGKGLEWVATISQAGSEKDYVDSVKGRFTISRDNAKKSLYLQMNSLRAEDTAVYYCASGVYSFDYRGQGTLVTVSSGTGGGGSGGGGSGGGGSEFEIVLTQSPATLSLSPGERATLSCRASQSVSSYLAWYQQKPGQAPRLLIYDASNRATGIPARFSGSGSGTDFTLTISSLEPEDFAVYYCQQRSNWPITFGQGTRLEIKLEDLKNVFPPEVAVFEPSEAEISHTQKATLVCLATGFYPDHVELSWWVNGKEVHSGVCTDPQPLKEQPALNDSRYCLSSRLRVSATFWQNPRNHFRCQVQFYGLSENDEWTQDRAKPVTQIVSAEAWGRADCDVKLVEKSFETDTNLNFQNLSVIGFRILLLKVAGFNLLMTLRLWSSRAKRSGSGATNFSLLKQAGDVEENPGPTSMDWIWRILFLVGAATGAHSGPQLQLQESGPGLVKPSETLSLTCTVSGDSISSGDYYWGWIRQPPGKGLEWIGHIYYSGVTYYNPSLKSRVTISVDTSRNQFSLKLSSVTAADTAVYYCTREDSSNWRSRGQGTLVTVSSGSGGGGSGGGGSGGGGSFEEVQLVESGGGLVQPDRSLRLSCAASGFTFHDYAMHWVRQAPGKGLEWVSTISWNSGTIGYADSVKGRFTISRDNAKNSLYLQMNSLRAEDTALYYCAKDIQYGNYYYGMDVWGQGTTVTVSSTRIQNPDPAVYQLRDSKSSDKSVCLFTDFDSQTNVSQSKDSDVYITDKCVLDMRSMDFKSNSAVAWSNKSDFACANAFNNSIIPEDTFFPSPESSCGFTSESYQQGVLSATILYEILLGKATLYAVLVSALVLMAMVKRKDSRG

SEQ ID NO: 13094 - protein, 889 aa, synthetic construct
MALPVTALLLPLALLLHAARPEVQLVESGGGLVQPGGSLRLSCAASGFSFSDFWMSWVRQAPGKGLEWVATISQAGSEKDYVDSVKGRFTISRDNAKKSLYLQMNSLRAEDTAVYYCASGVYSFDYRGQGTLVTVSSGTGGGGSGGGGSGGGGSEFDIQMTQSPSSLSASVGDRVTINCKASQDINSYLSWFQQKPGKAPKTLIYRANRLVDGVPSRFSGSGSGQDYTLTISSLQPEDFATYYCLQYDEFPLTFGGGTKVEIKLEDLKNVFPPEVAVFEPSEAEISHTQKATLVCLATGFYPDHVELSWWVNGKEVHSGVCTDPQPLKEQPALNDSRYCLSSRLRVSATFWQNPRNHFRCQVQFYGLSENDEWTQDRAKPVTQIVSAEAWGRADCDVKLVEKSFETDTNLNFQNLSVIGFRILLLKVAGFNLLMTLRLWSSRAKRSGSGATNFSLLKQAGDVEENPGPTSMDWIWRILFLVGAATGAHSGPQLQLQESGPGLVKPSETLSLTCTVSGDSISSGDYYWGWIRQPPGKGLEWIGHIYYSGVTYYNPSLKSRVTISVDTSRNQFSLKLSSVTAADTAVYYCTREDSSNWRSRGQGTLVTVSSGSGGGGSGGGGSGGGGSFEQVQLVQSGAEVKKPGASVKVSCKASGYTFTNYDINWVRQAPGQGLEWIGWIYPGDGSTKYNEKFKAKATLTADTSTSTAYMELRSLRSDDTAVYYCASGYEDAMDYWGQGTTVTVSSTRIQNPDPAVYQLRDSKSSDKSVCLFTDFDSQTNVSQSKDSDVYITDKCVLDMRSMDFKSNSAVAWSNKSDFACANAFNNSIIPEDTFFPSPESSCGFTSESYQQGVLSATILYEILLGKATLYAVLVSALVLMAMVKRKDSRG

SEQ ID NO: 13095 - protein, 891 aa, synthetic construct
MALPVTALLLPLALLLHAARPEVQLVESGGGLVQPGGSLRLSCAASGFSFSDFWMSWVRQAPGKGLEWVATISQAGSEKDYVDSVKGRFTISRDNAKKSLYLQMNSLRAEDTAVYYCASGVYSFDYRGQGTLVTVSSGTGGGGSGGGGSGGGGSEFDIVMTQTPLSLSVTPGQPASISCKSSQSLLDGDGKTYLNWLLQKPGQSPQRLIYLVSKLDSGVPDRFSGSGSGTDFTLKISRVEAEDVGVYYCWQGTHFPRTFGQGTKLEIKLEDLKNVFPPEVAVFEPSEAEISHTQKATLVCLATGFYPDHVELSWWVNGKEVHSGVCTDPQPLKEQPALNDSRYCLSSRLRVSATFWQNPRNHFRCQVQFYGLSENDEWTQDRAKPVTQIVSAEAWGRADCDVKLVEKSFETDTNLNFQNLSVIGFRILLLKVAGFNLLMTLRLWSSRAKRSGSGATNFSLLKQAGDVEENPGPTSMDWIWRILFLVGAATGAHSGPQLQLQESGPGLVKPSETLSLTCTVSGDSISSGDYYWGWIRQPPGKGLEWIGHIYYSGVTYYNPSLKSRVTISVDTSRNQFSLKLSSVTAADTAVYYCTREDSSNWRSRGQGTLVTVSSGSGGGGSGGGGSGGGGSFEQVQLVQSGAEVKKPGASVKVSCKASGYTFKDTYIHWVRQAPGQGLEWMGRIDPANGNTKYDPKFQGRVTMTRDTSISTAYMELSRLRSDDTAVYYCARRGGVDWGQGTLVTVSSTRIQNPDPAVYQLRDSKSSDKSVCLFTDFDSQTNVSQSKDSDVYITDKCVLDMRSMDFKSNSAVAWSNKSDFACANAFNNSIIPEDTFFPSPESSCGFTSESYQQGVLSATILYEILLGKATLYAVLVSALVLMAMVKRKDSRG

SEQ ID NO: 13096 - protein, 892 aa, synthetic construct
MALPVTALLLPLALLLHAARPEVQLVESGGGLVQPGGSLRLSCAASGFSFSDFWMSWVRQAPGKGLEWVATISQAGSEKDYVDSVKGRFTISRDNAKKSLYLQMNSLRAEDTAVYYCASGVYSFDYRGQGTLVTVSSGTGGGGSGGGGSGGGGSEFDIQMTQSPSSLSASVGDRVTITCKASQDVSTAVAWFQQKPGKAPKLLIYSPSYRYTGVPSRFSGSGSGTDFTLTISSLQPEDFTYYCQQLYSTPYTFGQGTKVEIKLEDLKNVFPPEVAVFEPSEAEISHTQKATLVCLATGFYPDHVELSWWVNGKEVHSGVCTDPQPLKEQPALNDSRYCLSSRLRVSATFWQNPRNHFRCQVQFYGLSENDEWTQDRAKPVTQIVSAEAWGRADCDVKLVEKSFETDTNLNFQNLSVIGFRILLLKVAGFNLLMTLRLWSSRAKRSGSGATNFSLLKQAGDVEENPGPTSMDWIWRILFLVGAATGAHSGPQLQLQESGPGLVKPSETLSLTCTVSGDSISSGDYYWGWIRQPPGKGLEWIGHIYYSGVTYYNPSLKSRVTISVDTSRNQFSLKLSSVTAADTAVYYCTREDSSNWRSRGQGTLVTVSSGSGGGGSGGGGSGGGGSFEEVQLVQSGAEVKKPGASVKVSCKASGYTFTDYYLDVVVRQAPGQGLEWIGRVNPYNGGTIYNQKFKGRVTLTRDTSTSTAYLELSSLRSEDTAVYYCARDHYRYDPLLDYWGQGTLVTVSSTRIQNPDPAVYQLRDSKSSDKSVCLFTDFDSQTNVSQSKDSDVYITDKCVLDMRSMDFKSNSAVAWSNKSDFACANAFNNSIIPEDTFFPSPESSCGFTSESYQQGVLSATILYEILLGKATLYAVLVSALVLMAMVKRKDSRG

SEQ ID NO: 13097 - protein, 898 aa, synthetic construct
MALPVTALLLPLALLLHAARPEVQLVESGGGLVQPGGSLRLSCAASGFSFSDFWMSWVRQAPGKGLEWVATISQAGSEKDYVDSVKGRFTISRDNAKKSLYLQMNSLRAEDTAVYYCASGVYSFDYRGQGTLVTVSSGTGGGGSGGGGSGGGGSEFDIQMTQSPSSLSASVGDRVTITCRASQSVSTSSYNYMHWYQQKPGKPPKLLIKYASNLESGVPSRFSGSGSGTDFTLTISSLQPEDFATYYCQHSWEIPLTFGQGTKVEIKLEDLKNVFPPEVAVFEPSEAEISHTQKATLVCLATGFYPDHVELSWWVNGKEVHSGVCTDPQPLKEQPALNDSRYCLSSRLRVSATFWQNPRNHFRCQVQFYGLSENDEWTQDRAKPVTQIVSAEAWGRADCDVKLVEKSFETDTNLNFQNLSVIGFRILLLKVAGFNLLMTLRLWSSRAKRSGSGATNFSLLKQAGDVEENPGPTSMDWIWRILFLVGAATGAHSGPQLQLQESGPGLVKPSETLSLTCTVSGDSISSGDYYWGWIRQPPGKGLEWIGHIYYSGVTYYNPSLKSRVTISVDTSRNQFSLKLSSVTAADTAVYYCTREDSSNWRSRGQGTLVTVSSGSGGGGSGGGGSGGGGSFEEVQLVQSGAEVKKPGASVKVSCKASGYSFTDYYMHWVRQAPGQGLEWIGRINPYNGAAFYSQNFKDRVTLTVDTSTSTAYLELSSLRSEDTAVYYCAIERGADLEGYAMDYWGQGTLVTVSSTRIQNPDPAVYQLRDSKSSDKSVCLFTDFDSQTNVSQSKDSDVYITDKCVLDMRSMDFKSNSAVAWSNKSDFACANAFNNSIIPEDTFFPSPESSCGFTSESYQQGVLSATILYEILLGKATLYAVLVSALVLMAMVKRKDSRG

SEQ ID NO: 13098 - protein, 896 aa, synthetic construct
MALPVTALLLPLALLLHAARPEVQLVESGGGLVQPGGSLRLSCAASGFSFSDFWMSWVRQAPGKGLEWVATISQAGSEKDYVDSVKGRFTISRDNAKKSLYLQMNSLRAEDTAVYYCASGVYSFDYRGQGTLVTVSSGTGGGGSGGGGSGGGGSEFEIVLTQSPATLSASPGERVTLTCRASSNVISSYVHWYQQKPGSSPRLFLYSTSNLASGVPSRFSGSGSGTDFTFTISSLEAEDAATYYCQQYSGYPLTFGQGTRLEIKLEDLKNVFPPEVAVFEPSEAEISHTQKATLVCLATGFYPDHVELSWWVNGKEVHSGVCTDPQPLKEQPALNDSRYCLSSRLRVSATFWQNPRNHFRCQVQFYGLSENDEWTQDRAKPVTQIVSAEAWGRADCDVKLVEKSFETDTNLNFQNLSVIGFRILLLKVAGFNLLMTLRLWSSRAKRSGSGATNFSLLKQAGDVEENPGPTSMDWIWRILFLVGAATGAHSGPQLQLQESGPGLVKPSETLSLTCTVSGDSISSGDYYWGWIRQPPGKGLEWIGHIYYSGVTYYNPSLKSRVTISVDTSRNQFSLKLSSVTAADTAVYYCTREDSSNWRSRGQGTLVTVSSGSGGGGSGGGGSGGGGSFEQVQLQESGPGLVKPSETLSLTCAVSGYSITSAYYWNWIRQPPGKGLEWIGYISYDGRNNYNPSLKNRITINPDTSKNQFSLQLNSVTPEDTAVYYCAREGDYDVGNYYAMDYWGQGTLVTVSSTRIQNPDPAVYQLRDSKSSDKSVCLFTDFDSQTNVSQSKDSDVYITDKCVLDMRSMDFKSNSAVAWSNKSDFACANAFNNSIIPEDTFFPSPESSCGFTSESYQQGVLSATILYEILLGKATLYAVLVSALVLMAMVKRKDSRG

SEQ ID NO: 13099 - protein, 896 aa, synthetic construct
MALPVTALLLPLALLLHAARPEVQLVESGGGLVQPGGSLRLSCAASGFSFSDFWMSWVRQAPGKGLEWVATISQAGSEKDYVDSVKGRFTISRDNAKKSLYLQMNSLRAEDTAVYYCASGVYSFDYRGQGTLVTVSSGTGGGGSGGGGSGGGGSEFEIVLTQSPATLSLSPGERATLSCRASSNVISSYVHWYQQKPGQAPRLLIYSTSNLASGIPARFSGSGSGTDFTLTISSLEPEDFAVYYCQQYSGYPLTFGQGTRLEIKLEDLKNVFPPEVAVFEPSEAEISHTQKATLVCLATGFYPDHVELSWWVNGKEVHSGVCTDPQPLKEQPALNDSRYCLSSRLRVSATFWQNPRNHFRCQVQFYGLSENDEWTQDRAKPVTQIVSAEAWGRADCDVKLVEKSFETDTNLNFQNLSVIGFRILLLKVAGFNLLMTLRLWSSRAKRSGSGATNFSLLKQAGDVEENPGPTSMDWIWRILFLVGAATGAHSGPQLQLQESGPGLVKPSETLSLTCTVSGDSISSGDYYWGWIRQPPGKGLEWIGHIYYSGVTYYNPSLKSRVTISVDTSRNQFSLKLSSVTAADTAVYYCTREDSSNWRSRGQGTLVTVSSGSGGGGSGGGGSGGGGSFEEVQLVESGGGLVQPGRSLRLSCAASGYSITSAYYWNWVRQAPGKGLEWVSYISYDGRNNYNPSLKNRFTISRDNAKKSLYLQMNSLRAEDTALYYCAKEGDYDVGNYYAMDYWGQGTTVTVSSTRIQNPDPAVYQLRDSKSSDKSVCLFTDFDSQTNVSQSKDSDVYITDKCVLDMRSMDFKSNSAVAWSNKSDFACANAFNNSIIPEDTFFPSPESSCGFTSESYQQGVLSATILYEILLGKATLYAVLVSALVLMAMVKRKDSRG

SEQ ID NO: 13100 - protein, 895 aa, synthetic construct
MALPVTALLLPLALLLHAARPEVQLVESGGGLVQPGGSLRLSCAASGFSFSDFWMSWVRQAPGKGLEWVATISQAGSEKDYVDSVKGRFTISRDNAKKSLYLQMNSLRAEDTAVYYCASGVYSFDYRGQGTLVTVSSGTGGGGSGGGGSGGGGSEFDVVMTQTPLSLPVSLGDQASISCRSSQSLVHSNGNTYLRWYLQKPGQSPKVLIYKVSNRVSGVPDRFSGSGSGTDFTLKINRVEAEDLGVYFCSQSTHVPWTFGGGTKLEIKLEDLKNVFPPEVAVFEPSEAEISHTQKATLVCLATGFYPDHVELSWWVNGKEVHSGVCTDPQPLKEQPALNDSRYCLSSRLRVSATFWQNPRNHFRCQVQFYGLSENDEWTQDRAKPVTQIVSAEAWGRADCDVKLVEKSFETDTNLNFQNLSVIGFRILLLKVAGFNLLMTLRLWSSRAKRSGSGATNFSLLKQAGDVEENPGPTSMDWIWRILFLVGAATGAHSGPQLQLQESGPGLVKPSETLSLTCTVSGDSISSGDYYWGWIRQPPGKGLEWIGHIYYSGVTYYNPSLKSRVTISVDTSRNQFSLKLSSVTAADTAVYYCTREDSSNWRSRGQGTLVTVSSGSGGGGSGGGGSGGGGSFEGVKLDETGGGLVQPGGAMKLSCVTSGFTFGHYWMNWVRQSPEKGLEWVAQFRNKPYNYETYYSDSVKGRFTISRDDSKSSVYLQMNNLRVEDTGIYYCTGASYGMEYLGQGTSVTVSTTRIQNPDPAVYQLRDSKSSDKSVCLFTDFDSQTNVSQSKDSDVYITDKCVLDMRSMDFKSNSAVAWSNKSDFACANAFNNSIIPEDTFFPSPESSCGFTSESYQQGVLSATILYEILLGKATLYAVLVSALVLMAMVKRKDSRG

SEQ ID NO: 13101 - protein, 901 aa, synthetic construct
MALPVTALLLPLALLLHAARPEVQLVESGGGLVQPGGSLRLSCAASGFSFSDFWMSWVRQAPGKGLEWVATISQAGSEKDYVDSVKGRFTISRDNAKKSLYLQMNSLRAEDTAVYYCASGVYSFDYRGQGTLVTVSSGTGGGGSGGGGSGGGGSEFQVQLVESGGNLVQPGGSLRLSCAASGFTFGSFSMSWVRQAPGGGLEWVAGLSARSSLTHYADSVKGRFTISRDNAKNSVYLQMNSLRVEDTAVYYCARRSYDSSGYWGHFYSYMDVWGQGTLVTVSLEDLKNVFPPEVAVFEPSEAEISHTQKATLVCLATGFYPDHVELSWWVNGKEVHSGVCTDPQPLKEQPALNDSRYCLSSRLRVSATFWQNPRNHFRCQVQFYGLSENDEWTQDRAKPVTQIVSAEAWGRADCDVKLVEKSFETDTNLNFQNLSVIGFRILLLKVAGFNLLMTLRLWSSRAKRSGSGATNFSLLKQAGDVEENPGPTSMDWIWRILFLVGAATGAHSGPQLQLQESGPGLVKPSETLSLTCTVSGDSISSGDYYWGWIRQPPGKGLEWIGHIYYSGVTYYNPSLKSRVTISVDTSRNQFSLKLSSVTAADTAVYYCTREDSSNWRSRGQGTLVTVSSGSGGGGSGGGGSGGGGSFESVLTQPSSVSAAPGQKVTISCSGSTSNIGNNYVSWYQQHPGKAPKLMIYDVSKRPSGVPDRFSGSKSGNSASLDISGLQSEDEADYYCAAWDDSLSEFLFGTGTKLTVLGTRIQNPDPAVYQLRDSKSSDKSVCLFTDFDSQTNVSQSKDSDVYITDKCVLDMRSMDFKSNSAVAWSNKSDFACANAFNNSIIPEDTFFPSPESSCGFTSESYQQGVLSATILYEILLGKATLYAVLVSALVLMAMVKRKDSRG

SEQ ID NO: 13102 - protein, 896 aa, synthetic construct
MALPVTALLLPLALLLHAARPEVQLVESGGGLVQPGGSLRLSCAASGFSFSDFWMSWVRQAPGKGLEWVATISQAGSEKDYVDSVKGRFTISRDNAKKSLYLQMNSLRAEDTAVYYCASGVYSFDYRGQGTLVTVSSGTGGGGSGGGGSGGGGSEFDVVMTQSPSSLSASVGDRVTITCQSSLDISHYLNWYQQKPGKAPKLLIYDASNLETGVPSRFSGSGSGTHFTFTISSLQPEDFATYYCQQYDNLPLTFGGGTKLEIKRLEDLKNVFPPEVAVFEPSEAEISHTQKATLVCLATGFYPDHVELSWWVNGKEVHSGVCTDPQPLKEQPALNDSRYCLSSRLRVSATFWQNPRNHFRCQVQFYGLSENDEWTQDRAKPVTQIVSAEAWGRADCDVKLVEKSFETDTNLNFQNLSVIGFRILLLKVAGFNLLMTLRLWSSRAKRSGSGATNFSLLKQAGDVEENPGPTSMDWIWRILFLVGAATGAHSGPQLQLQESGPGLVKPSETLSLTCTVSGDSISSGDYYWGWIRQPPGKGLEWIGHIYYSGVTYYNPSLKSRVTISVDTSRNQFSLKLSSVTAADTAVYYCTREDSSNWRSRGQGTLVTVSSGSGGGGSGGGGSGGGGSFEQVQLVQSGGGVVQPGGSLRVSCAASGVTLSDYGMHWVRQAPGKGLEWVAFIRNDGSDKYYADSVKGRFTISRDNSEKTVSLQMSSLRAEDTAVYYCAKNGESGPLDYWYLDLWGRGTLVTVSSTRIQNPDPAVYQLRDSKSSDKSVCLFTDFDSQTNVSQSKDSDVYITDKCVLDMRSMDFKSNSAVAWSNKSDFACANAFNNSIIPEDTFFPSPESSCGFTSESYQQGVLSATILYEILLGKATLYAVLVSALVLMAMVKRKDSRG

SEQ ID NO: 13103 - protein, 900 aa, synthetic construct
MALPVTALLLPLALLLHAARPEVQLVESGGGLVQPGGSLRLSCAASGFSFSDFWMSWVRQAPGKGLEWVATISQAGSEKDYVDSVKGRFTISRDNAKKSLYLQMNSLRAEDTAVYYCASGVYSFDYRGQGTLVTVSSGTGGGGSGGGGSGGGGSEFSYELTQPPSVSGTPGQRVAISCSGSSSNIGTRMVTWYQHVPGTAPKLLIFNNNQRPSGVPDRFSASKSGTSASLAIIGLQSDDEADYYCATWDDNVKSYVFGTGTKVTVLGSRLEDLKNVFPPEVAVFEPSEAEISHTQKATLVCLATGFYPDHVELSWWVNGKEVHSGVCTDPQPLKEQPALNDSRYCLSSRLRVSATFWQNPRNHFRCQVQFYGLSENDEWTQDRAKPVTQIVSAEAWGRADCDVKLVEKSFETDTNLNFQNLSVIGFRILLLKVAGFNLLMTLRLWSSRAKRSGSGATNFSLLKQAGDVEENPGPTSMDWIWRILFLVGAATGAHSGPQLQLQESGPGLVKPSETLSLTCTVSGDSISSGDYYWGWIRQPPGKGLEWIGHIYYSGVTYYNPSLKSRVTISVDTSRNQFSLKLSSVTAADTAVYYCTREDSSNWRSRGQGTLVTVSSGSGGGGSGGGGSGGGGSFELEMAQVQLQQWGAGLLKPSETLSLTCAVYGGSFSGYYWSWIRQPPGKGLEWIGEINHSGSTNYNPSLKSRVTISVDTSKNQFSLKLSSVTAADTAVYYCARAPQSWYVGDVWGQGTLVTVSSTRIQNPDPAVYQLRDSKSSDKSVCLFTDFDSQTNVSQSKDSDVYITDKCVLDMRSMDFKSNSAVAWSNKSDFACANAFNNSIIPEDTFFPSPESSCGFTSESYQQGVLSATILYEILLGKATLYAVLVSALVLMAMVKRKDSRG

SEQ ID NO: 13104 - protein, 897 aa, synthetic construct
MALPVTALLLPLALLLHAARPEVQLVESGGGLVQPGGSLRLSCAASGFSFSDFWMSWVRQAPGKGLEWVATISQAGSEKDYVDSVKGRFTISRDNAKKSLYLQMNSLRAEDTAVYYCASGVYSFDYRGQGTLVTVSSGTGGGGSGGGGSGGGGSEFQSVLTQPPSLSVAPGKTASITCGGNNIGMKSVHWYQQRPGQAPVLVIYYDSDRPSGIPGRFSGSNSGNTATLTISRVEAGDEADYYCQVWDTTGDHPGYVFGTGTKVTVLLEDLKNVFPPEVAVFEPSEAEISHTQKATLVCLATGFYPDHVELSWWVNGKEVHSGVCTDPQPLKEQPALNDSRYCLSSRLRVSATFWQNPRNHFRCQVQFYGLSENDEWTQDRAKPVTQIVSAEAWGRADCDVKLVEKSFETDTNLNFQNLSVIGFRILLLKVAGFNLLMTLRLWSSRAKRSGSGATNFSLLKQAGDVEENPGPTSMDWIWRILFLVGAATGAHSGPQLQLQESGPGLVKPSETLSLTCTVSGDSISSGDYYWGWIRQPPGKGLEWIGHIYYSGVTYYNPSLKSRVTISVDTSRNQFSLKLSSVTAADTAVYYCTREDSSNWRSRGQGTLVTVSSGSGGGGSGGGGSGGGGSFEQVQLVQSGAEVKKPGSSVKVSCKASGGTFSSYAISWVRQAPGQGLEWMGGIIPIFGTANYAQKFQGRVTITADESTSTAYMELSSLRSEDTAVYYCARGVYGYSGSAPYDEWGQGTLVTVSSTRIQNPDPAVYQLRDSKSSDKSVCLFTDFDSQTNVSQSKDSDVYITDKCVLDMRSMDFKSNSAVAWSNKSDFACANAFNNSIIPEDTFFPSPESSCGFTSESYQQGVLSATILYEILLGKATLYAVLVSALVLMAMVKRKDSRG

SEQ ID NO: 13105 - protein, 895 aa, synthetic construct
MALPVTALLLPLALLLHAARPEVQLVESGGGLVQPGGSLRLSCAASGFSFSDFWMSWVRQAPGKGLEWVATISQAGSEKDYVDSVKGRFTISRDNAKKSLYLQMNSLRAEDTAVYYCASGVYSFDYRGQGTLVTVSSGTGGGGSGGGGSGGGGSEFEVQLVESGGGLVQPGRSLRLSCAASGFTFDDYAMHWVRQAPGKGLEWVSGISWNSGSIGYADSVKGRFTISRDNAKNSLYLQMNSLRAEDTALYYCAKDKGGGYYDFWSGSDYWGQGTLVTVSSLEDLKNVFPPEVAVFEPSEAEISHTQKATLVCLATGFYPDHVELSWWVNGKEVHSGVCTDPQPLKEQPALNDSRYCLSSRLRVSATFWQNPRNHFRCQVQFYGLSENDEWTQDRAKPVTQIVSAEAWGRADCDVKLVEKSFETDTNLNFQNLSVIGFRILLLKVAGFNLLMTLRLWSSRAKRSGSGATNFSLLKQAGDVEENPGPTSMDWIWRILFLVGAATGAHSGPQLQLQESGPGLVKPSETLSLTCTVSGDSISSGDYYWGWIRQPPGKGLEWIGHIYYSGVTYYNPSLKSRVTISVDTSRNQFSLKLSSVTAADTAVYYCTREDSSNWRSRGQGTLVTVSSGSGGGGSGGGGSGGGGSFESSELTQDPAVSVALGQTVRITCQGDSLRSYYASWYQQKPGQAPVLVIYGKNNRPSGIPDRFSGSSSGNTASLTITGAQAEDEADYYCNSRDSSGWVFGGGTKLTVLTRIQNPDPAVYQLRDSKSSDKSVCLFTDFDSQTNVSQSKDSDVYITDKCVLDMRSMDFKSNSAVAWSNKSDFACANAFNNSIIPEDTFFPSPESSCGFTSESYQQGVLSATILYEILLGKATLYAVLVSALVLMAMVKRKDSRG

SEQ ID NO: 13106 - protein, 904 aa, synthetic construct
MALPVTALLLPLALLLHAARPEVQLVESGGGLVQPGGSLRLSCAASGFSFSDFWMSWVRQAPGKGLEWVATISQAGSEKDYVDSVKGRFTISRDNAKKSLYLQMNSLRAEDTAVYYCASGVYSFDYRGQGTLVTVSSGTGGGGSGGGGSGGGGSEFEVQLQQSGPGLVKPSQTLSLTCAISGDSVLSNSDTWNWIRQSPSRGLEWLGRTYHRSTWYDDYASSVRGRVSINVDTSKNQYSLQLNAVTPEDTGVYYCARDRLQDGNSWSDAFDVWGQGTMVTVSSLEDLKNVFPPEVAVFEPSEAEISHTQKATLVCLATGFYPDHVELSWWVNGKEVHSGVCTDPQPLKEQPALNDSRYCLSSRLRVSATFWQNPRNHFRCQVQFYGLSENDEWTQDRAKPVTQIVSAEAWGRADCDVKLVEKSFETDTNLNFQNLSVIGFRILLLKVAGFNLLMTLRLWSSRAKRSGSGATNFSLLKQAGDVEENPGPTSMDWIWRILFLVGAATGAHSGPQLQLQESGPGLVKPSETLSLTCTVSGDSISSGDYYWGWIRQPPGKGLEWIGHIYYSGVTYYNPSLKSRVTISVDTSRNQFSLKLSSVTAADTAVYYCTREDSSNWRSRGQGTLVTVSSGSGGGGSGGGGSGGGGSFEQSALTQPASVSGSPGQSITISCTGTSSDVGGYNYVSWYQQHPGKAPKLMIYDVSNRPSGVSNRFSGSKSGNTASLTISGLQAEDEADYYCSSYTSSSTLVYVFGTGTKVTVLTRIQNPDPAVYQLRDSKSSDKSVCLFTDFDSQTNVSQSKDSDVYITDKCVLDMRSMDFKSNSAVAWSNKSDFACANAFNNSIIPEDTFFPSPESSCGFTSESYQQGVLSATILYEILLGKATLYAVLVSALVLMAMVKRKDSRG

SEQ ID NO: 13107 - protein, 882 aa, synthetic construct
MALPVTALLLPLALLLHAARPEVQLVESGGGLVQPGGSLRLSCAASGFSFSDFWMSWVRQAPGKGLEWVATISQAGSEKDYVDSVKGRFTISRDNAKKSLYLQMNSLRAEDTAVYYCASGVYSFDYRGQGTLVTVSSGTGGGGSGGGGSGGGGSEFQVQLVQSGAEVKKPGASVKVSCKASGYTFTSYDINWVRQATGQGLEWMGWMNPNSGNTGYAQKFQGRVTMTRNTSISTAYMELSSLRSEDTAVYYCARGDSTKVEIKLEDLKNVFPPEVAVFEPSEAEISHTQKATLVCLATGFYPDHVELSWWVNGKEVHSGVCTDPQPLKEQPALNDSRYCLSSRLRVSATFWQNPRNHFRCQVQFYGLSENDEWTQDRAKPVTQIVSAEAWGRADCDVKLVEKSFETDTNLNFQNLSVIGFRILLLKVAGFNLLMTLRLWSSRAKRSGSGATNFSLLKQAGDVEENPGPTSMDWIWRILFLVGAATGAHSGPQLQLQESGPGLVKPSETLSLTCTVSGDSISSGDYYWGWIRQPPGKGLEWIGHIYYSGVTYYNPSLKSRVTISVDTSRNQFSLKLSSVTAADTAVYYCTREDSSNWRSRGQGTLVTVSSGSGGGGSGGGGSGGGGSFEQSVLTQPRSVSGSPGQSVTISCTGTSSDVGGYNYVSWYQQHPGEAPKLIIYDADKRPSGISNRFSSGKSGNTASLTISGLQVEDEADYYCCSYAGGSTWVFGGGTKVTVLTRIQNPDPAVYQLRDSKSSDKSVCLFTDFDSQTNVSQSKDSDVYITDKCVLDMRSMDFKSNSAVAWSNKSDFACANAFNNSIIPEDTFFPSPESSCGFTSESYQQGVLSATILYEILLGKATLYAVLVSALVLMAMVKRKDSRG

SEQ ID NO: 13108 - protein, 904 aa, synthetic construct
MALPVTALLLPLALLLHAARPEVQLVESGGGLVQPGGSLRLSCAASGFSFSDFWMSWVRQAPGKGLEWVATISQAGSEKDYVDSVKGRFTISRDNAKKSLYLQMNSLRAEDTAVYYCASGVYSFDYRGQGTLVTVSSGTGGGGSGGGGSGGGGSEFEVQLQQSGPGLVKPSQTLSLTCAISGDSVSSNSAAWNWIRQSPSRGLEWLGRTYYRSKWYSDYAVSVKSRITINPDTSKNQFSLQLNSVTPEDTAVYYCARDPYDFWSGYPDAFDIWGQGTMVTVSSLEDLKNVFPPEVAVFEPSEAEISHTQKATLVCLATGFYPDHVELSWWVNGKEVHSGVCTDPQPLKEQPALNDSRYCLSSRLRVSATFWQNPRNHFRCQVQFYGLSENDEWTQDRAKPVTQIVSAEAWGRADCDVKLVEKSFETDTNLNFQNLSVIGFRILLLKVAGFNLLMTLRLWSSRAKRSGSGATNFSLLKQAGDVEENPGPTSMDWIWRILFLVGAATGAHSGPQLQLQESGPGLVKPSETLSLTCTVSGDSISSGDYYWGWIRQPPGKGLEWIGHIYYSGVTYYNPSLKSRVTISVDTSRNQFSLKLSSVTAADTAVYYCTREDSSNWRSRGQGTLVTVSSGSGGGGSGGGGSGGGGSFEQSALTQPASVSGSPGQSITISCTGTSSDVGGYNYVSWYQQHPGKAPKVIISEVNNRPSGVSHRFSGSKSGNTASLTISGLQAEDEADYFCSSYTSGRTLYVFGTGSKVTVLGTRIQNPDPAVYQLRDSKSSDKSVCLFTDFDSQTNVSQSKDSDVYITDKCVLDMRSMDFKSNSAVAWSNKSDFACANAFNNSIIPEDTFFPSPESSCGFTSESYQQGVLSATILYEILLGKATLYAVLVSALVLMAMVKRKDSRG

SEQ ID NO: 13109 - protein, 903 aa, synthetic construct
MALPVTALLLPLALLLHAARPEVQLVESGGGLVQPGGSLRLSCAASGFSFSDFWMSWVRQAPGKGLEWVATISQAGSEKDYVDSVKGRFTISRDNAKKSLYLQMNSLRAEDTAVYYCASGVYSFDYRGQGTLVTVSSGTGGGGSGGGGSGGGGSEFQSALTQPASASGSPGQSVTISCTGTSSDVGGYNYVSWYQQHPGKAPKLMIYDVSNRPSGVSNRFSGSKSGNTASLTISGLQAEDEADYYCSSYTSSSTLYVFGTGTQLTVLLEDLKNVFPPEVAVFEPSEAEISHTQKATLVCLATGFYPDHVELSWWVNGKEVHSGVCTDPQPLKEQPALNDSRYCLSSRLRVSATFWQNPRNHFRCQVQFYGLSENDEWTQDRAKPVTQIVSAEAWGRADCDVKLVEKSFETDTNLNFQNLSVIGFRILLLKVAGFNLLMTLRLWSSRAKRSGSGATNFSLLKQAGDVEENPGPTSMDWIWRILFLVGAATGAHSGPQLQLQESGPGLVKPSETLSLTCTVSGDSISSGDYYWGWIRQPPGKGLEWIGHIYYSGVTYYNPSLKSRVTISVDTSRNQFSLKLSSVTAADTAVYYCTREDSSNWRSRGQGTLVTVSSGSGGGGSGGGGSGGGGSFEEVQLQQSGPGLVKPSQTLSLTCAISGDSMLSNSDTWNWIRQSPSRGLEWLGRTYHRSTWYDDYASSVRGRVSINVDTSKNQYSLQLNAVTPEDTGVYYCARVRLQDGNSWSDAFDVWGQGTMVTVSSTRIQNPDPAVYQLRDSKSSDKSVCLFTDFDSQTNVSQSKDSDVYITDKCVLDMRSMDFKSNSAVAWSNKSDFACANAFNNSIIPEDTFFPSPESSCGFTSESYQQGVLSATILYEILLGKATLYAVLVSALVLMAMVKRKDSRG

SEQ ID NO: 13110 - protein, 903 aa, synthetic construct
MALPVTALLLPLALLLHAARPEVQLVESGGGLVQPGGSLRLSCAASGFSFSDFWMSWVRQAPGKGLEWVATISQAGSEKDYVDSVKGRFTISRDNAKKSLYLQMNSLRAEDTAVYYCASGVYSFDYRGQGTLVTVSSGTGGGGSGGGGSGGGGSEFDVMLTQTPLSLPVSLGDQASISCRSSQSILHSTGDTYLEWYLQKPGQSPKLLINKVSNRLSGVPDRFSGSGSGTDFTLKISRVEAEDLGVYYCFQGSHVPWTFGGGTKLEIKRADAAPTVSIFPLEDLKNVFPPEVAVFEPSEAEISHTQKATLVCLATGFYPDHVELSWWVNGKEVHSGVCTDPQPLKEQPALNDSRYCLSSRLRVSATFWQNPRNHFRCQVQFYGLSENDEWTQDRAKPVTQIVSAEAWGRADCDVKLVEKSFETDTNLNFQNLSVIGFRILLLKVAGFNLLMTLRLWSSRAKRSGSGATNFSLLKQAGDVEENPGPTSMDWIWRILFLVGAATGAHSGPQLQLQESGPGLVKPSETLSLTCTVSGDSISSGDYYWGWIRQPPGKGLEWIGHIYYSGVTYYNPSLKSRVTISVDTSRNQFSLKLSSVTAADTAVYYCTREDSSNWRSRGQGTLVTVSSGSGGGGSGGGGSGGGGSFEQVKLQQSGPSLVKPGASVKMSCKASGYTFTDFYMKWVKQSHGKSLEWIGDINPNIGDTFYNQKFKGKATLTVDKSSSTAYMQLNSLTSEDSAVYFCSVGYFDVWGAGTTVTVSSTRIQNPDPAVYQLRDSKSSDKSVCLFTDFDSQTNVSQSKDSDVYITDKCVLDMRSMDFKSNSAVAWSNKSDFACANAFNNSIIPEDTFFPSPESSCGFTSESYQQGVLSATILYEILLGKATLYAVLVSALVLMAMVKRKDSRG

SEQ ID NO: 13111 - protein, 899 aa, synthetic construct
MALPVTALLLPLALLLHAARPEVQLVESGGGLVQPGGSLRLSCAASGFSFSDFWMSWVRQAPGKGLEWVATISQAGSEKDYVDSVKGRFTISRDNAKKSLYLQMNSLRAEDTAVYYCASGVYSFDYRGQGTLVTVSSGTGGGGSGGGGSGGGGSEFEIVLTQSPATLSLSPGERATLSCRASQSVSIYLAWYQQKPGQAPRLLIYDASNRATGIPARFSGSGSGTDFTLTISSLEPEDFAVYYCQQRSNWPPFTFGPGTKVDIKLEDLKNVFPPEVAVFEPSEAEISHTQKATLVCLATGFYPDHVELSWWVNGKEVHSGVCTDPQPLKEQPALNDSRYCLSSRLRVSATFWQNPRNHFRCQVQFYGLSENDEWTQDRAKPVTQIVSAEAWGRADCDVKLVEKSFETDTNLNFQNLSVIGFRILLLKVAGFNLLMTLRLWSSRAKRSGSGATNFSLLKQAGDVEENPGPTSMDWIWRILFLVGAATGAHSGPQLQLQESGPGLVKPSETLSLTCTVSGDSISSGDYYWGWIRQPPGKGLEWIGHIYYSGVTYYNPSLKSRVTISVDTSRNQFSLKLSSVTAADTAVYYCTREDSSNWRSRGQGTLVTVSSGSGGGGSGGGGSGGGGSFEQVQLVESGGGVVQPGRSLRLSCAASGFTFSSYGMHWVRQAPGKGLEWVAVIWDDGSNKYYVDSVKGRFTISRDNSKNTLYLQMNSLRAEDTAVYYCARDDYYGSGSFNSYYGTDVWGQGTTVTVSSTRIQNPDPAVYQLRDSKSSDKSVCLFTDFDSQTNVSQSKDSDVYITDKCVLDMRSMDFKSNSAVAWSNKSDFACANAFNNSIIPEDTFFPSPESSCGFTSESYQQGVLSATILYEILLGKATLYAVLVSALVLMAMVKRKDSRG

SEQ ID NO: 13112 - protein, 884 aa, synthetic construct
MALPVTALLLPLALLLHAARPEVQLVESGGGLVQPGGSLRLSCAASGFSFSDFWMSWVRQAPGKGLEWVATISQAGSEKDYVDSVKGRFTISRDNAKKSLYLQMNSLRAEDTAVYYCASGVYSFDYRGQGTLVTVSSGTGGGGSGGGGSGGGGSEFDIQMTQSPSSLSASVGDRVTITCRASQGISSWLAWYQQKPEKAPKSLIYAASSLQSGVPSRFSGSGSGTDFTLTISSLQPEDFATYYCQQYNSYPYTFGQGTKLEIKLEDLKNVFPPEVAVFEPSEAEISHTQKATLVCLATGFYPDHVELSWWVNGKEVHSGVCTDPQPLKEQPALNDSRYCLSSRLRVSATFWQNPRNHFRCQVQFYGLSENDEWTQDRAKPVTQIVSAEAWGRADCDVKLVEKSFETDTNLNFQNLSVIGFRILLLKVAGFNLLMTLRLWSSRAKRSGSGATNFSLLKQAGDVEENPGPTSMDWIWRILFLVGAATGAHSGPQLQLQESGPGLVKPSETLSLTCTVSGDSISSGDYYWGWIRQPPGKGLEWIGHIYYSGVTYYNPSLKSRVTISVDTSRNQFSLKLSSVTAADTAVYYCTREDSSNWRSRGQGTLVTVSSGSGGGGSGGGGSGGGGSFEEVQLVQSGGGLVHPGGSLRLSCAGSGFTFSTYLMYWVRQAPGKTLEWVSAIGSGGDTYYADSVKGRFTISRDNAKNSLYLQMNSLRAEDMAVYYCARGLGYWGQGTLVTVSSTRIQNPDPAVYQLRDSKSSDKSVCLFTDFDSQTNVSQSKDSDVYITDKCVLDMRSMDFKSNSAVAWSNKSDFACANAFNNSIIPEDTFFPSPESSCGFTSESYQQGVLSATILYEILLGKATLYAVLVSALVLMAMVKRKDSRG

SEQ ID NO: 13113 - protein, 903 aa, synthetic construct
MALPVTALLLPLALLLHAARPEVQLVESGGGLVQPGGSLRLSCAASGFSFSDFWMSWVRQAPGKGLEWVATISQAGSEKDYVDSVKGRFTISRDNAKKSLYLQMNSLRAEDTAVYYCASGVYSFDYRGQGTLVTVSSGTGGGGSGGGGSGGGGSEFLPVLTQPPSVSVAPGKTARITCGGNNIGSKSVHWYQQKPGQAPVLVVYDDSDRPSGIPERFSGSNSGNTATLTISRVEAGDEADYYCQVWDSSSDYVVFGGGTKLTVLLEDLKNVFPPEVAVFEPSEAEISHTQKATLVCLATGFYPDHVELSWWVNGKEVHSGVCTDPQPLKEQPALNDSRYCLSSRLRVSATFWQNPRNHFRCQVQFYGLSENDEWTQDRAKPVTQIVSAEAWGRADCDVKLVEKSFETDTNLNFQNLSVIGFRILLLKVAGFNLLMTLRLWSSRAKRSGSGATNFSLLKQAGDVEENPGPTSMDWIWRILFLVGAATGAHSGPQLQLQESGPGLVKPSETLSLTCTVSGDSISSGDYYWGWIRQPPGKGLEWIGHIYYSGVTYYNPSLKSRVTISVDTSRNQFSLKLSSVTAADTAVYYCTREDSSNWRSRGQGTLVTVSSGSGGGGSGGGGSGGGGSFEEVQLVQSGAEVKKPGESLKISCKGSGYSFTSYWIGWVRQMPGKGLEWMGIIYPGDSDTRYSPSFQGQVTISADKSISTAYLQWSSLKASDTAMYYCARQVWGWQGGMYPRSNWWYNLDSWGQGTLVTVSSTRIQNPDPAVYQLRDSKSSDKSVCLFTDFDSQTNVSQSKDSDVYITDKCVLDMRSMDFKSNSAVAWSNKSDFACANAFNNSIIPEDTFFPSPESSCGFTSESYQQGVLSATILYEILLGKATLYAVLVSALVLMAMVKRKDSRG

SEQ ID NO: 13114 - protein, 896 aa, synthetic construct
MALPVTALLLPLALLLHAARPEVQLVESGGGLVQPGGSLRLSCAASGFSFSDFWMSWVRQAPGKGLEWVATISQAGSEKDYVDSVKGRFTISRDNAKKSLYLQMNSLRAEDTAVYYCASGVYSFDYRGQGTLVTVSSGTGGGGSGGGGSGGGGSEFELVMTQSPASLAVSLGQRATISCRASESVDSYGKSFMHWYQLKPGQPPKLLIYRASNLESGVPARFSGSGSRTDFTLTIDPVEADDAATYYCQQNNEDPWTFGGGTKLEIKLEDLKNVFPPEVAVFEPSEAEISHTQKATLVCLATGFYPDHVELSWWVNGKEVHSGVCTDPQPLKEQPALNDSRYCLSSRLRVSATFWQNPRNHFRCQVQFYGLSENDEWTQDRAKPVTQIVSAEAWGRADCDVKLVEKSFETDTNLNFQNLSVIGFRILLLKVAGFNLLMTLRLWSSRAKRSGSGATNFSLLKQAGDVEENPGPTSMDWIWRILFLVGAATGAHSGPQLQLQESGPGLVKPSETLSLTCTVSGDSISSGDYYWGWIRQPPGKGLEWIGHIYYSGVTYYNPSLKSRVTISVDTSRNQFSLKLSSVTAADTAVYYCTREDSSNWRSRGQGTLVTVSSGSGGGGSGGGGSGGGGSFEEVQLEQSGPELVKPGASVKMSCKASGYTFTNYYMKWVKQSHGKSLEWIGDLNPNNGDTFYNQKFKGKATLTVDKSSNTAYMQLNSLTSEDSAVYYCARTGRYEENAMDYWGQGTSVTVSSTRIQNPDPAVYQLRDSKSSDKSVCLFTDFDSQTNVSQSKDSDVYITDKCVLDMRSMDFKSNSAVAWSNKSDFACANAFNNSIIPEDTFFPSPESSCGFTSESYQQGVLSATILYEILLGKATLYAVLVSALVLMAMVKRKDSRG

SEQ ID NO: 13115 - protein, 890 aa, synthetic construct
MALPVTALLLPLALLLHAARPEVQLVESGGGLVQPGGSLRLSCAASGFSFSDFWMSWVRQAPGKGLEWVATISQAGSEKDYVDSVKGRFTISRDNAKKSLYLQMNSLRAEDTAVYYCASGVYSFDYRGQGTLVTVSSGTGGGGSGGGGSGGGGSEFDVVMTQSPSSLSASVGDRVTITCMASEDIYIRLAWYQQKPGNAPKLLIYAATSLETGVPSRFSGSGSGTDFTLTISSLQPEDFATYYCQQYWSSPWTFGGGTKVEIKLEDLKNVFPPEVAVFEPSEAEISHTQKATLVCLATGFYPDHVELSWWVNGKEVHSGVCTDPQPLKEQPALNDSRYCLSSRLRVSATFWQNPRNHFRCQVQFYGLSENDEWTQDRAKPVTQIVSAEAWGRADCDVKLVEKSFETDTNLNFQNLSVIGFRILLLKVAGFNLLMTLRLWSSRAKRSGSGATNFSLLKQAGDVEENPGPTSMDWIWRILFLVGAATGAHSGPQLQLQESGPGLVKPSETLSLTCTVSGDSISSGDYYWGWIRQPPGKGLEWIGHIYYSGVTYYNPSLKSRVTISVDTSRNQFSLKLSSVTAADTAVYYCTREDSSNWRSRGQGTLVTVSSGSGGGGSGGGGSGGGGSFEQVQLQESGPGLVKPSQTLSLTCTVSGYSITSDYTWNWIRQPPGNGLEWIGYITYSGSTSYNPSLKSRVLISVDTSKNQVSLKLSSVTAADTAVYYCARLGRRYTMDYWGQGTTVTVSSTRIQNPDPAVYQLRDSKSSDKSVCLFTDFDSQTNVSQSKDSDVYITDKCVLDMRSMDFKSNSAVAWSNKSDFACANAFNNSIIPEDTFFPSPESSCGFTSESYQQGVLSATILYEILLGKATLYAVLVSALVLMAMVKRKDSRG

SEQ ID NO: 13116 - protein, 894 aa, synthetic construct; identical to SEQ ID NO: 12979

SEQ ID NO: 13117 - protein, 894 aa, synthetic construct
MALPVTALLLPLALLLHAARPEVQLVESGGGLVQPGGSLRLSCAASGFSFSDFWMSWVRQAPGKGLEWVATISQAGSEKDYVDSVKGRFTISRDNAKKSLYLQMNSLRAEDTAVYYCASGVYSFDYRGQGTLVTVSSGTGGGGSGGGGSGGGGSEFDIVLTQSPATLSLSPGDRATLSCRASESVTILGSHLIYWYQQKPGQAPRLLIQLASNVQTGIPARFSGSGSRTDFTLTISSLEPEDFAVYYCLQSRTIPRTFGQGTKLEIKRLEDLKNVFPPEVAVFEPSEAEISHTQKATLVCLATGFYPDHVELSWWVNGKEVHSGVCTDPQPLKEQPALNDSRYCLSSRLRVSATFWQNPRNHFRCQVQFYGLSENDEWTQDRAKPVTQIVSAEAWGRADCDVKLVEKSFETDTNLNFQNLSVIGFRILLLKVAGFNLLMTLRLWSSRAKRSGSGATNFSLLKQAGDVEENPGPTSMDWIWRILFLVGAATGAHSGPQLQLQESGPGLVKPSETLSLTCTVSGDSISSGDYYWGWIRQPPGKGLEWIGHIYYSGVTYYNPSLKSRVTISVDTSRNQFSLKLSSVTAADTAVYYCTREDSSNWRSRGQGTLVTVSSGSGGGGSGGGGSGGGGSFEQVQLVQSGSELKKPGESVKISCKASGYTFTHYSMNWVRQAPGQGLEWMGRINTETGEPLYADDFKGRFVFSLDTSASTAYLQISSLKAEDTAVYYCSNDYLYSLDYWGQGTLVTVSSTRIQNPDPAVYQLRDSKSSDKSVCLFTDFDSQTNVSQSKDSDVYITDKCVLDMRSMDFKSNSAVAWSNKSDFACANAFNNSIIPEDTFFPSPESSCGFTSESYQQGVLSATILYEILLGKATLYAVLVSALVLMAMVKRKDSRG

SEQ ID NO: 13118 - protein, 895 aa, synthetic construct
MALPVTALLLPLALLLHAARPEVQLVESGGGLVQPGGSLRLSCAASGFSFSDFWMSWVRQAPGKGLEWVATISQAGSEKDYVDSVKGRFTISRDNAKKSLYLQMNSLRAEDTAVYYCASGVYSFDYRGQGTLVTVSSGTGGGGSGGGGSGGGGSEFDIQLTQSPSFLSASVGDRVTITCRASQGISTDLNWYQQKPGKAPKLLIYAASNLESGVPSRFSGSGSGTEFTLTISSLQPEDFATYYCQQSYNWPYTFGGGTKVEIKRLEDLKNVFPPEVAVFEPSEAEISHTQKATLVCLATGFYPDHVELSWWVNGKEVHSGVCTDPQPLKEQPALNDSRYCLSSRLRVSATFWQNPRNHFRCQVQFYGLSENDEWTQDRAKPVTQIVSAEAWGRADCDVKLVEKSFETDTNLNFQNLSVIGFRILLLKVAGFNLLMTLRLWSSRAKRSGSGATNFSLLKQAGDVEENPGPTSMDWIWRILFLVGAATGAHSGPQLQLQESGPGLVKPSETLSLTCTVSGDSISSGDYYWGWIRQPPGKGLEWIGHIYYSGVTYYNPSLKSRVTISVDTSRNQFSLKLSSVTAADTAVYYCTREDSSNWRSRGQGTLVTVSSGSGGGGSGGGGSGGGGSFEEVQLVESGGGLVKPGGSLRLSCAASGFTFSNFEMNWVRQAPGKGLEWVSGISSNGRYINYADSVKGRFTISRDNAKNSLYLQMNSLRAEDTAVYYCARVVDFDQDYNGFDYWGQGTLVTVSSTRIQNPDPAVYQLRDSKSSDKSVCLFTDFDSQTNVSQSKDSDVYITDKCVLDMRSMDFKSNSAVAWSNKSDFACANAFNNSIIPEDTFFPSPESSCGFTSESYQQGVLSATILYEILLGKATLYAVLVSALVLMAMVKRKDSRG

SEQ ID NO: 13119 - protein, 893 aa, synthetic construct
MALPVTALLLPLALLLHAARPEVQLVESGGGLVQPGGSLRLSCAASGFSFSDFWMSWVRQAPGKGLEWVATISQAGSEKDYVDSVKGRFTISRDNAKKSLYLQMNSLRAEDTAVYYCASGVYSFDYRGQGTLVTVSSGTGGGGSGGGGSGGGGSEFDIQLTQSPSFLSASVGDRVTITCSLSLGISTWRDWFPPRLGRGLEPLTYAASTLQSGVPSRFSGSGSGTEFTLTISSLQPEDFATYYCQQLNSYPLTFGGGTKVEIKRLEDLKNVFPPEVAVFEPSEAEISHTQKATLVCLATGFYPDHVELSWWVNGKEVHSGVCTDPQPLKEQPALNDSRYCLSSRLRVSATFWQNPRNHFRCQVQFYGLSENDEWTQDRAKPVTQIVSAEAWGRADCDVKLVEKSFETDTNLNFQNLSVIGFRILLLKVAGFNLLMTLRLWSSRAKRSGSGATNFSLLKQAGDVEENPGPTSMDWIWRILFLVGAATGAHSGPQLQLQESGPGLVKPSETLSLTCTVSGDSISSGDYYWGWIRQPPGKGLEWIGHIYYSGVTYYNPSLKSRVTISVDTSRNQFSLKLSSVTAADTAVYYCTREDSSNWRSRGQGTLVTVSSGSGGGGSGGGGSGGGGSFEEVQLVESGGGLVKPGGSLRLSCAASGFTFSTYGMSWVRQAPGKGLEWVAYINNGSGYIYYADSVKGRFTISRDNAKNSLYLQMNSLRAEDTAVYYCARGQWWSGGDFDYWGQGTLVTVSSTRIQNPDPAVYQLRDSKSSDKSVCLFTDFDSQTNVSQSKDSDVYITDKCVLDMRSMDFKSNSAVAWSNKSDFACANAFNNSIIPEDTFFPSPESSCGFTSESYQQGVLSATILYEILLGKATLYAVLVSALVLMAMVKRKDSRG

SEQ ID NO: 13120 - protein, 894 aa, synthetic construct
MALPVTALLLPLALLLHAARPEVQLVESGGGLVQPGGSLRLSCAASGFSFSDFWMSWVRQAPGKGLEWVATISQAGSEKDYVDSVKGRFTISRDNAKKSLYLQMNSLRAEDTAVYYCASGVYSFDYRGQGTLVTVSSGTGGGGSGGGGSGGGGSEFEIVLTQSPATLSLSPGERATLSCSASSSVSYMYWYQQKPGQAPRLLIYRTSNLASGIPARFSGSGSGTDFTLTISSLEPEDFAVYYCQQYHSYPTTFGQGTKVEIKRTVLEDLKNVFPPEVAVFEPSEAEISHTQKATLVCLATGFYPDHVELSWWVNGKEVHSGVCTDPQPLKEQPALNDSRYCLSSRLRVSATFWQNPRNHFRCQVQFYGLSENDEWTQDRAKPVTQIVSAEAWGRADCDVKLVEKSFETDTNLNFQNLSVIGFRILLLKVAGFNLLMTLRLWSSRAKRSGSGATNFSLLKQAGDVEENPGPTSMDWIWRILFLVGAATGAHSGPQLQLQESGPGLVKPSETLSLTCTVSGDSISSGDYYWGWIRQPPGKGLEWIGHIYYSGVTYYNPSLKSRVTISVDTSRNQFSLKLSSVTAADTAVYYCTREDSSNWRSRGQGTLVTVSSGSGGGGSGGGGSGGGGSFEEVQLVESGGGLVQPGGSLRLSCAASGFSFNTYAMNWVRQAPGKGLEWVSHIRSKSNNFATYYADSVKDRFTISRDNAKNSLYLQMNSLRAEDTAVYYCARQGGDFPMDYWGQGTLVTVSSTRIQNPDPAVYQLRDSKSSDKSVCLFTDFDSQTNVSQSKDSDVYITDKCVLDMRSMDFKSNSAVAWSNKSDFACANAFNNSIIPEDTFFPSPESSCGFTSESYQQGVLSATILYEILLGKATLYAVLVSALVLMAMVKRKDSRG

SEQ ID NO: 13121 - protein, 890 aa, synthetic construct
MALPVTALLLPLALLLHAARPEVQLVESGGGLVQPGGSLRLSCAASGFSFSDFWMSWVRQAPGKGLEWVATISQAGSEKDYVDSVKGRFTISRDNAKKSLYLQMNSLRAEDTAVYYCASGVYSFDYRGQGTLVTVSSGTGGGGSGGGGSGGGGSEFDVVMTQSPSSLSASVGDRVTITCKASEDIYIRLAWYQQKPGKAPKLLIYAATSLETGVPSRFSGSGSGTDFTLTISSLQPEDFATYYCQQYWTTPWTFGGGTKVEIKLEDLKNVFPPEVAVFEPSEAEISHTQKATLVCLATGFYPDHVELSWWVNGKEVHSGVCTDPQPLKEQPALNDSRYCLSSRLRVSATFWQNPRNHFRCQVQFYGLSENDEWTQDRAKPVTQIVSAEAWGRADCDVKLVEKSFETDTNLNFQNLSVIGFRILLLKVAGFNLLMTLRLWSSRAKRSGSGATNFSLLKQAGDVEENPGPTSMDWIWRILFLVGAATGAHSGPQLQLQESGPGLVKPSETLSLTCTVSGDSISSGDYYWGWIRQPPGKGLEWIGHIYYSGVTYYNPSLKSRVTISVDTSRNQFSLKLSSVTAADTAVYYCTREDSSNWRSRGQGTLVTVSSGSGGGGSGGGGSGGGGSFEQVQLQESGPGLVKPSQTLSLTCTVSGYSITIDYTWNWIRQPPGKGLEWIGYITYSGSTDYNPSLKSRVLISVDTSKNQVSLKLSSVTAADTAVYYCARLGRRYALDYWGQGTTVTVSSTRIQNPDPAVYQLRDSKSSDKSVCLFTDFDSQTNVSQSKDSDVYITDKCVLDMRSMDFKSNSAVAWSNKSDFACANAFNNSIIPEDTFFPSPESSCGFTSESYQQGVLSATILYEILLGKATLYAVLVSALVLMAMVKRKDSRG

SEQ ID NO: 13122 - protein, 895 aa, synthetic construct
MALPVTALLLPLALLLHAARPEVQLVESGGGLVQPGGSLRLSCAASGFSFSDFWMSWVRQAPGKGLEWVATISQAGSEKDYVDSVKGRFTISRDNAKKSLYLQMNSLRAEDTAVYYCASGVYSFDYRGQGTLVTVSSGTGGGGSGGGGSGGGGSEFDIQMTQTTSSLSASLGDRVTISCRASQDISNYLNWYQQKPDGTVKLLIYYTSILHSGVPSRFSGSGSGTDYSLTISNLEQEDFATYFCQQGNTLPWTFGGGTKLEIKALEDLKNVFPPEVAVFEPSEAEISHTQKATLVCLATGFYPDHVELSWWVNGKEVHSGVCTDPQPLKEQPALNDSRYCLSSRLRVSATFWQNPRNHFRCQVQFYGLSENDEWTQDRAKPVTQIVSAEAWGRADCDVKLVEKSFETDTNLNFQNLSVIGFRILLLKVAGFNLLMTLRLWSSRAKRSGSGATNFSLLKQAGDVEENPGPTSMDWIWRILFLVGAATGAHSGPQLQLQESGPGLVKPSETLSLTCTVSGDSISSGDYYWGWIRQPPGKGLEWIGHIYYSGVTYYNPSLKSRVTISVDTSRNQFSLKLSSVTAADTAVYYCTREDSSNWRSRGQGTLVTVSSGSGGGGSGGGGSGGGGSFEEVQLVESGGGLVKPGGSLKLSCAASGFAFSIYDMSWVRQTPEKRLEWVAYISSGGGTYYPDTVKGRFTISRDNAKNTLYLQMSSLKSEDTAMYYCARHSGYGTHWGVLFAYWGQGTLVTVSATRIQNPDPAVYQLRDSKSSDKSVCLFTDFDSQTNVSQSKDSDVYITDKCVLDMRSMDFKSNSAVAWSNKSDFACANAFNNSIIPEDTFFPSPESSCGFTSESYQQGVLSATILYEILLGKATLYAVLVSALVLMAMVKRKDSRG

SEQ ID NO: 13123 - protein, 905 aa, synthetic construct
MALPVTALLLPLALLLHAARPEVQLVESGGGLVQPGGSLRLSCAASGFSFSDFWMSWVRQAPGKGLEWVATISQAGSEKDYVDSVKGRFTISRDNAKKSLYLQMNSLRAEDTAVYYCASGVYSFDYRGQGTLVTVSSGTGGGGSGGGGSGGGGSEFDIVMTQSPDSLAVSLGERATINCKSSQSLLYRSNQKNYLAWYQQKPGQPPKLLIYWASTRESGVPDRFSGSGSGTDFTLTISSLQAEDVAVYYCQQYYNYPRTFGQGTKVEIKRTVLEDLKNVFPPEVAVFEPSEAEISHTQKATLVCLATGFYPDHVELSWWVNGKEVHSGVCTDPQPLKEQPALNDSRYCLSSRLRVSATFWQNPRNHFRCQVQFYGLSENDEWTQDRAKPVTQIVSAEAWGRADCDVKLVEKSFETDTNLNFQNLSVIGFRILLLKVAGFNLLMTLRLWSSRAKRSGSGATNFSLLKQAGDVEENPGPTSMDWIWRILFLVGAATGAHSGPQLQLQESGPGLVKPSETLSLTCTVSGDSISSGDYYWGWIRQPPGKGLEWIGHIYYSGVTYYNPSLKSRVTISVDTSRNQFSLKLSSVTAADTAVYYCTREDSSNWRSRGQGTLVTVSSGSGGGGSGGGGSGGGGSFEEVQLLESGGGLVQPGGSLRLSCAASGYSITSDYAWNWVRQAPGKGLEWVSYISNSGSTSYNPSLKSRFTISRDNSKNTLYLQMNSLRAEDTAVYYCAKERNYDYDDYYYAMDYWGQGTLVTVSSTRIQNPDPAVYQLRDSKSSDKSVCLFTDFDSQTNVSQSKDSDVYITDKCVLDMRSMDFKSNSAVAWSNKSDFACANAFNNSIIPEDTFFPSPESSCGFTSESYQQGVLSATILYEILLGKATLYAVLVSALVLMAMVKRKDSRG

SEQ ID NO: 13124 - protein, 898 aa, synthetic construct
MALPVTALLLPLALLLHAARPEVQLVESGGGLVQPGGSLRLSCAASGFSFSDFWMSWVRQAPGKGLEWVATISQAGSEKDYVDSVKGRFTISRDNAKKSLYLQMNSLRAEDTAVYYCASGVYSFDYRGQGTLVTVSSGTGGGGSGGGGSGGGGSEFDVVMTQSPLSLPVTLGQPASISCRSSQSLLHSSGNTYLEWYQQRPGQSPRPLIYKISTRFSGVPDRFSGSGSGTDFTLKISRVEAEDVGVYYCFQGSHVPYTFGGGTKVEIKRLEDLKNVFPPEVAVFEPSEAEISHTQKATLVCLATGFYPDHVELSWWVNGKEVHSGVCTDPQPLKEQPALNDSRYCLSSRLRVSATFWQNPRNHFRCQVQFYGLSENDEWTQDRAKPVTQIVSAEAWGRADCDVKLVEKSFETDTNLNFQNLSVIGFRILLLKVAGFNLLMTLRLWSSRAKRSGSGATNFSLLKQAGDVEENPGPTSMDWIWRILFLVGAATGAHSGPQLQLQESGPGLVKPSETLSLTCTVSGDSISSGDYYWGWIRQPPGKGLEWIGHIYYSGVTYYNPSLKSRVTISVDTSRNQFSLKLSSVTAADTAVYYCTREDSSNWRSRGQGTLVTVSSGSGGGGSGGGGSGGGGSFEQVQLVQSGAEVKKPGASVKVSCKASGLTIEDYYMHWVRQAPGQGLEWMGWIDPENGDTEYGPKFQGRVTMTRDTSINTAYMELSRLRSDDTAVYYCAVHNAHYGTWFAYWGQGTLVTVSSTRIQNPDPAVYQLRDSKSSDKSVCLFTDFDSQTNVSQSKDSDVYITDKCVLDMRSMDFKSNSAVAWSNKSDFACANAFNNSIIPEDTFFPSPESSCGFTSESYQQGVLSATILYEILLGKATLYAVLVSALVLMAMVKRKDSRG

SEQ ID NO: 13125 - protein, 890 aa, synthetic construct
MALPVTALLLPLALLLHAARPEVQLVESGGGLVQPGGSLRLSCAASGFSFSDFWMSWVRQAPGKGLEWVATISQAGSEKDYVDSVKGRFTISRDNAKKSLYLQMNSLRAEDTAVYYCASGVYSFDYRGQGTLVTVSSGTGGGGSGGGGSGGGGSEFDIQMTQSPSSLSASVGDRVTITCRASENIYSNLAWYQQKPGKAPKLLIYAATNLADGVPSRFSGSGSGTDFTLTISSLQPEDFATYYCQHFWGTPTFGQGTKVEIKRTVLEDLKNVFPPEVAVFEPSEAEISHTQKATLVCLATGFYPDHVELSWWVNGKEVHSGVCTDPQPLKEQPALNDSRYCLSSRLRVSATFWQNPRNHFRCQVQFYGLSENDEWTQDRAKPVTQIVSAEAWGRADCDVKLVEKSFETDTNLNFQNLSVIGFRILLLKVAGFNLLMTLRLWSSRAKRSGSGATNFSLLKQAGDVEENPGPTSMDWIWRILFLVGAATGAHSGPQLQLQESGPGLVKPSETLSLTCTVSGDSISSGDYYWGWIRQPPGKGLEWIGHIYYSGVTYYNPSLKSRVTISVDTSRNQFSLKLSSVTAADTAVYYCTREDSSNWRSRGQGTLVTVSSGSGGGGSGGGGSGGGGSFEEVQLVESGGGLVQPGGSLRLSCAASGFSLTNYGVHWVRQAPGKGLEWVSVIWSGGSTDYNAAFISRFTISADTSKNTAYLQMNSLRAEDTAVYYCARELIHAMDNWGQGTLVTVSSTRIQNPDPAVYQLRDSKSSDKSVCLFTDFDSQTNVSQSKDSDVYITDKCVLDMRSMDFKSNSAVAWSNKSDFACANAFNNSIIPEDTFFPSPESSCGFTSESYQQGVLSATILYEILLGKATLYAVLVSALVLMAMVKRKDSRG

SEQ ID NO: 13126 - protein, 897 aa, synthetic construct
MALPVTALLLPLALLLHAARPEVQLVESGGGLVQPGGSLRLSCAASGFSFSDFWMSWVRQAPGKGLEWVATISQAGSEKDYVDSVKGRFTISRDNAKKSLYLQMNSLRAEDTAVYYCASGVYSFDYRGQGTLVTVSSGTGGGGSGGGGSGGGGSEFDFVMTQSPLSLPVTPGEPASISCRSSQSIVHSNGNTYLEWYLQKPGQSPQLLIYKVSNRFSGVPDRFSGSGSGTDFTLKISRVEAEDVGVYYCFQGSHVPLTFGQGTKLEIKRLEDLKNVFPPEVAVFEPSEAEISHTQKATLVCLATGFYPDHVELSWWVNGKEVHSGVCTDPQPLKEQPALNDSRYCLSSRLRVSATFWQNPRNHFRCQVQFYGLSENDEWTQDRAKPVTQIVSAEAWGRADCDVKLVEKSFETDTNLNFQNLSVIGFRILLLKVAGFNLLMTLRLWSSRAKRSGSGATNFSLLKQAGDVEENPGPTSMDWIWRILFLVGAATGAHSGPQLQLQESGPGLVKPSETLSLTCTVSGDSISSGDYYWGWIRQPPGKGLEWIGHIYYSGVTYYNPSLKSRVTISVDTSRNQFSLKLSSVTAADTAVYYCTREDSSNWRSRGQGTLVTVSSGSGGGGSGGGGSGGGGSFEEVQLVESGAEVKKPGASVKVSCKASGYTFTSYWIHWVRQAPGQGLEWMGENDPSNGRTNYNEKFKNRVTLTVDTSISTAYMELSRLRSDDTAVYYCARGPNYFYSMDYWGQGTMVTVSSTRIQNPDPAVYQLRDSKSSDKSVCLFTDFDSQTNVSQSKDSDVYITDKCVLDMRSMDFKSNSAVAWSNKSDFACANAFNNSIIPEDTFFPSPESSCGFTSESYQQGVLSATILYEILLGKATLYAVLVSALVLMAMVKRKDSRG

SEQ ID NO: 13127 - protein, 890 aa, synthetic construct
MALPVTALLLPLALLLHAARPEVQLVESGGGLVQPGGSLRLSCAASGFSFSDFWMSWVRQAPGKGLEWVATISQAGSEKDYVDSVKGRFTISRDNAKKSLYLQMNSLRAEDTAVYYCASGVYSFDYRGQGTLVTVSSGTGGGGSGGGGSGGGGSEFDIQLTQSPSFLSASVGDRVTITCSARSSISFMYWYQQKPGKAPKLLIYDTSNLASGVPSRFSGSGSGTEFTLTISSLEAEDAATYYCQQWSSYPLTFGQGTKLEIKLEDLKNVFPPEVAVFEPSEAEISHTQKATLVCLATGFYPDHVELSWWVNGKEVHSGVCTDPQPLKEQPALNDSRYCLSSRLRVSATFWQNPRNHFRCQVQFYGLSENDEWTQDRAKPVTQIVSAEAWGRADCDVKLVEKSFETDTNLNFQNLSVIGFRILLLKVAGFNLLMTLRLWSSRAKRSGSGATNFSLLKQAGDVEENPGPTSMDWIWRILFLVGAATGAHSGPQLQLQESGPGLVKPSETLSLTCTVSGDSISSGDYYWGWIRQPPGKGLEWIGHIYYSGVTYYNPSLKSRVTISVDTSRNQFSLKLSSVTAADTAVYYCTREDSSNWRSRGQGTLVTVSSGSGGGGSGGGGSGGGGSFEQVQLVQSGAEVKKPGASVKVSCKASGYTFTGSWMNWVRQAPGQGLEWIGRIYPGDGETNYNGKFKDRVTITADKSTSTAYMELSSLRSEDTAVYYCARIYGNNVYFDVWGQGTTVTVSSTRIQNPDPAVYQLRDSKSSDKSVCLFTDFDSQTNVSQSKDSDVYITDKCVLDMRSMDFKSNSAVAWSNKSDFACANAFNNSIIPEDTFFPSPESSCGFTSESYQQGVLSATILYEILLGKATLYAVLVSALVLMAMVKRKDSRG

SEQ ID NO: 13128 - protein, 898 aa, synthetic construct
MALPVTALLLPLALLLHAARPEVQLVESGGGLVQPGGSLRLSCAASGFSFSDFWMSWVRQAPGKGLEWVATISQAGSEKDYVDSVKGRFTISRDNAKKSLYLQMNSLRAEDTAVYYCASGVYSFDYRGQGTLVTVSSGTGGGGSGGGGSGGGGSEFQLVLTQSPSASASLGSSVKLTCTLSSGHKTDTIDWYQQQPGKAPRYLMKLEGSGSYNKGSGVPDRFSGSSSGADWYLTISSLQSEDEADYYCGTDYPGNYLFGGGTQLTVLGLEDLKNVFPPEVAVFEPSEAEISHTQKATLVCLATGFYPDHVELSWWVNGKEVHSGVCTDPQPLKEQPALNDSRYCLSSRLRVSATFWQNPRNHFRCQVQFYGLSENDEWTQDRAKPVTQIVSAEAWGRADCDVKLVEKSFETDTNLNFQNLSVIGFRILLLKVAGFNLLMTLRLWSSRAKRSGSGATNFSLLKQAGDVEENPGPTSMDWIWRILFLVGAATGAHSGPQLQLQESGPGLVKPSETLSLTCTVSGDSISSGDYYWGWIRQPPGKGLEWIGHIYYSGVTYYNPSLKSRVTISVDTSRNQFSLKLSSVTAADTAVYYCTREDSSNWRSRGQGTLVTVSSGSGGGGSGGGGSGGGGSFEQEQLVESGGGLVQPGGSLRLSCAASGFTFSDYYMSWIRQAPGKGLEWVATIYPSSGKTYYADSAKGRLTISSDNAKDSLYLQMNSLRAEDTAVYYCTRDSYADDAALFDIWGQGTTVTVSSTRIQNPDPAVYQLRDSKSSDKSVCLFTDFDSQTNVSQSKDSDVYITDKCVLDMRSMDFKSNSAVAWSNKSDFACANAFNNSIIPEDTFFPSPESSCGFTSESYQQGVLSATILYEILLGKATLYAVLVSALVLMAMVKRKDSRG

SEQ ID NO: 13129 - protein, 890 aa, synthetic construct; identical to SEQ ID NO: 13125

SEQ ID NO: 13130 - protein, 897 aa, synthetic construct; identical to SEQ ID NO: 13126

SEQ ID NO: 13131 - protein, 890 aa, synthetic construct; identical to SEQ ID NO: 13127

SEQ ID NO: 13132 - protein, 898 aa, synthetic construct; identical to SEQ ID NO: 13128

SEQ ID NO: 13133 - protein, 897 aa, synthetic construct
MALPVTALLLPLALLLHAARPEVQLVESGGGLVQPGGSLRLSCAASGFSFSDFWMSWVRQAPGKGLEWVATISQAGSEKDYVDSVKGRFTISRDNAKKSLYLQMNSLRAEDTAVYYCASGVYSFDYRGQGTLVTVSSGTGGGGSGGGGSGGGGSEFDIQLTQSPSSLSASVGDRVSFTCQASQDINNFLNWYQQKPGKAPKLLIYDASNLETGVPSRFSGSGSGTDFTFTISSLQPEDIATYYCQQYGNLPFTFGGGTKVEIKRLEDLKNVFPPEVAVFEPSEAEISHTQKATLVCLATGFYPDHVELSWWVNGKEVHSGVCTDPQPLKEQPALNDSRYCLSSRLRVSATFWQNPRNHFRCQVQFYGLSENDEWTQDRAKPVTQIVSAEAWGRADCDVKLVEKSFETDTNLNFQNLSVIGFRILLLKVAGFNLLMTLRLWSSRAKRSGSGATNFSLLKQAGDVEENPGPTSMDWIWRILFLVGAATGAHSGPQLQLQESGPGLVKPSETLSLTCTVSGDSISSGDYYWGWIRQPPGKGLEWIGHIYYSGVTYYNPSLKSRVTISVDTSRNQFSLKLSSVTAADTAVYYCTREDSSNWRSRGQGTLVTVSSGSGGGGSGGGGSGGGGSFEQVQLQESGPGLVKPSQTLSLTCTVSGGSISSGGFYWSWIRQHPGKGLEWIGYIHHSGSTHYNPSLKSRVTISIDTSKNLFSLRLSSVTAADTAVYYCASLVYCGGDCYSGFDYWGQGTLVTVSSTRIQNPDPAVYQLRDSKSSDKSVCLFTDFDSQTNVSQSKDSDVYITDKCVLDMRSMDFKSNSAVAWSNKSDFACANAFNNSIIPEDTFFPSPESSCGFTSESYQQGVLSATILYEILLGKATLYAVLVSALVLMAMVKRKDSRG

SEQ ID NO: 13134 - protein, 893 aa, synthetic construct
MALPVTALLLPLALLLHAARPEVQLVESGGGLVQPGGSLRLSCAASGFSFSDFWMSWVRQAPGKGLEWVATISQAGSEKDYVDSVKGRFTISRDNAKKSLYLQMNSLRAEDTAVYYCASGVYSFDYRGQGTLVTVSSGTGGGGSGGGGSGGGGSEFDIQMTQSPSSLSASVGDRVTITCKSSQSVLYSSNQKNYLAWFQQKPGKAPKLLIYWASTRESGVPSRFSGSGSGTDFTLTISSLQPEDFATYFCHQYLSSYTFGQGTKVEIKRLEDLKNVFPPEVAVFEPSEAEISHTQKATLVCLATGFYPDHVELSWWVNGKEVHSGVCTDPQPLKEQPALNDSRYCLSSRLRVSATFWQNPRNHFRCQVQFYGLSENDEWTQDRAKPVTQIVSAEAWGRADCDVKLVEKSFETDTNLNFQNLSVIGFRILLLKVAGFNLLMTLRLWSSRAKRSGSGATNFSLLKQAGDVEENPGPTSMDWIWRILFLVGAATGAHSGPQLQLQESGPGLVKPSETLSLTCTVSGDSISSGDYYWGWIRQPPGKGLEWIGHIYYSGVTYYNPSLKSRVTISVDTSRNQFSLKLSSVTAADTAVYYCTREDSSNWRSRGQGTLVTVSSGSGGGGSGGGGSGGGGSFEEVQLVESGGGLVQPGGSLRLSCAASGYTFTTYWMHWVRQAPGKGLEWVGYIRPSTGYTEYNQKFKDRFTISADTSKNTAYLQMNSLRAEDTAVYYCARSRWLLDYWGQGTLVTVSTRIQNPDPAVYQLRDSKSSDKSVCLFTDFDSQTNVSQSKDSDVYITDKCVLDMRSMDFKSNSAVAWSNKSDFACANAFNNSIIPEDTFFPSPESSCGFTSESYQQGVLSATILYEILLGKATLYAVLVSALVLMAMVKRKDSRG

SEQ ID NO: 13135 - protein, 890 aa, synthetic construct
MALPVTALLLPLALLLHAARPEVQLVESGGGLVQPGGSLRLSCAASGFSFSDFWMSWVRQAPGKGLEWVATISQAGSEKDYVDSVKGRFTISRDNAKKSLYLQMNSLRAEDTAVYYCASGVYSFDYRGQGTLVTVSSGTGGGGSGGGGSGGGGSEFDIQMTQSPSSLSASVGDRVTITCRASQDISNYLNWYQQKPGKAPKLLIYYTSRLHSGVPSRFSGSGSGTDFTLTISSLQPEDFATYYCQQGNTLPYTFGQGTKVEIKRLEDLKNVFPPEVAVFEPSEAEISHTQKATLVCLATGFYPDHVELSWWVNGKEVHSGVCTDPQPLKEQPALNDSRYCLSSRLRVSATFWQNPRNHFRCQVQFYGLSENDEWTQDRAKPVTQIVSAEAWGRADCDVKLVEKSFETDTNLNFQNLSVIGFRILLLKVAGFNLLMTLRLWSSRAKRSGSGATNFSLLKQAGDVEENPGPTSMDWIWRILFLVGAATGAHSGPQLQLQESGPGLVKPSETLSLTCTVSGDSISSGDYYWGWIRQPPGKGLEWIGHIYYSGVTYYNPSLKSRVTISVDTSRNQFSLKLSSVTAADTAVYYCTREDSSNWRSRGQGTLVTVSSGSGGGGSGGGGSGGGGSFEEVQLVESGGGLVQPGGSLRLSCAASGFTFSDYFMSWVRQAPGKGLEWVATISNGGTYTYYPDSVKGRFTISRDNSKNTLYLQMNSLRAEDTAVYYCARFDGYIFDYWGQGTLVTVSSTRIQNPDPAVYQLRDSKSSDKSVCLFTDFDSQTNVSQSKDSDVYITDKCVLDMRSMDFKSNSAVAWSNKSDFACANAFNNSIIPEDTFFPSPESSCGFTSESYQQGVLSATILYEILLGKATLYAVLVSALVLMAMVKRKDSRG

SEQ ID NO: 13136 - protein, 895 aa, synthetic construct
MALPVTALLLPLALLLHAARPEVQLVESGGGLVQPGGSLRLSCAASGFSFSDFWMSWVRQAPGKGLEWVATISQAGSEKDYVDSVKGRFTISRDNAKKSLYLQMNSLRAEDTAVYYCASGVYSFDYRGQGTLVTVSSGTGGGGSGGGGSGGGGSEFDIQMTQTTSSLSASLGDRVTISCRASQDISKYLNWYQQKPDGTVKLLIYHTSRLHSGVPSRFSGSGSGTDYSLTISNLEQEDIATYFCQQGNTLPYTFGGGTKLEITLEIQNPDPAVYQLRDSKSSDKSVCLFTDFDSQTNVSQSKDSDVYITDKCVLDMRSMDFKSNSAVAWSNKSDFACANAFNNSIIPEDTFFPSPESSCGFTSESYQQGVLSATILYEILLGKATLYAVLVSALVLMAMVKRKDSRGRAKRSGSGVKQTLNFDLLKLAGDVESNPGPTSMDWIWRILFLVGAATGAHSGPQLQLQESGPGLVKPSETLSLTCTVSGDSISSGDYYWGWIRQPPGKGLEWIGHIYYSGVTYYNPSLKSRVTISVDTSRNQFSLKLSSVTAADTAVYYCTREDSSNWRSRGQGTLVTVSSGSGGGGSGGGGSGGGGSFEVKLQESGPGLVAPSQSLSVTCTVSGVSLPDYGVSWIRQPPRKGLEWLGVIWGSETTYYNSALKSRLTIIKDNSKSQVFLKMNSLQTDDTAIYYCAKHYYYGGSYAMDYWGQGTSVTVSSTREDLKNVFPPEVAVFEPSEAEISHTQKATLVCLATGFYPDHVELSWWVNGKEVHSGVCTDPQPLKEQPALNDSRYCLSSRLRVSATFWQNPRNHFRCQVQFYGLSENDEWTQDRAKPVTQIVSAEAWGRADCDVKLVEKSFETDTNLNFQNLSVIGFRILLLKVAGFNLLMTLRLWSS

SEQ ID NO: 13137 - protein, 896 aa, synthetic construct
MALPVTALLLPLALLLHAARPEVQLVESGGGLVQPGGSLRLSCAASGFSFSDFWMSWVRQAPGKGLEWVATISQAGSEKDYVDSVKGRFTISRDNAKKSLYLQMNSLRAEDTAVYYCASGVYSFDYRGQGTLVTVSSGTGGGGSGGGGSGGGGSEFEIVMTQSPATLSLSPGERATLSCRASQDISKYLNWYQQKPGQAPRLLIYHTSRLHSGIPARFSGSGSGTDYTLTISSLQPEDFAVYFCQQGNTLPYTFGQGTKLEIKLEIQNPDPAVYQLRDSKSSDKSVCLFTDFDSQTNVSQSKDSDVYITDKCVLDMRSMDFKSNSAVAWSNKSDFACANAFNNSIIPEDTFFPSPESSCGFTSESYQQGVLSATILYEILLGKATLYAVLVSALVLMAMVKRKDSRGRAKRSGSGVKQTLNFDLLKLAGDVESNPGPTSMDWIWRILFLVGAATGAHSGPQLQLQESGPGLVKPSETLSLTCTVSGDSISSGDYYWGWIRQPPGKGLEWIGHIYYSGVTYYNPSLKSRVTISVDTSRNQFSLKLSSVTAADTAVYYCTREDSSNWRSRGQGTLVTVSSGSGGGGSGGGGSGGGGSFEQVQLQESGPGLVKPSETLSLTCTVSGVSLPDYGVSWIRQPPGKGLEWIGVIWGSETTYYNSSLKSRVTISKDNSKNQVSLKLSSVTAADTAVYYCAKHYYYGGSYAMDYWGQGTLVTVSSTREDLKNVFPPEVAVFEPSEAEISHTQKATLVCLATGFYPDHVELSWWVNGKEVHSGVCTDPQPLKEQPALNDSRYCLSSRLRVSATFWQNPRNHFRCQVQFYGLSENDEWTQDRAKPVTQIVSAEAWGRADCDVKLVEKSFETDTNLNFQNLSVIGFRILLLKVAGFNLLMTLRLWSS

SEQ ID NO: 13138 - protein, 897 aa, synthetic construct
MALPVTALLLPLALLLHAARPEVQLVESGGGLVQPGGSLRLSCAASGFSFSDFWMSWVRQAPGKGLEWVATISQAGSEKDYVDSVKGRFTISRDNAKKSLYLQMNSLRAEDTAVYYCASGVYSFDYRGQGTLVTVSSGTGGGGSGGGGSGGGGSEFDEIVLTQSPATLSLSPGERATLSCSASSSVSYMHWYQQKPGQAPRLLIYDTSKLASGIPARFSGSGSGTDFTLTISSLEPEDVAVYYCFQGSVYPFTFGQGTKLEIKRLEIQNPDPAVYQLRDSKSSDKSVCLFTDFDSQTNVSQSKDSDVYITDKCVLDMRSMDFKSNSAVAWSNKSDFACANAFNNSIIPEDTFFPSPESSCGFTSESYQQGVLSATILYEILLGKATLYAVLVSALVLMAMVKRKDSRGRAKRSGSGVKQTLNFDLLKLAGDVESNPGPTSMDWIWRILFLVGAATGAHSGPQLQLQESGPGLVKPSETLSLTCTVSGDSISSGDYYWGWIRQPPGKGLEWIGHIYYSGVTYYNPSLKSRVTISVDTSRNQFSLKLSSVTAADTAVYYCTREDSSNWRSRGQGTLVTVSSGSGGGGSGGGGSGGGGSFEQVQLQESGPGLVKPSQTLSLTCTVSGGSISTSGMGVGWIRQHPGKGLEWIGHIWWDDDKRYNPALKSRVTISVDTSKNQFSLKLSSVTAADTAVYYCARMELWSYYFDYWGQGTLVTVSSTREDLKNVFPPEVAVFEPSEAEISHTQKATLVCLATGFYPDHVELSWWVNGKEVHSGVCTDPQPLKEQPALNDSRYCLSSRLRVSATFWQNPRNHFRCQVQFYGLSENDEWTQDRAKPVTQIVSAEAWGRADCDVKLVEKSFETDTNLNFQNLSVIGFRILLLKVAGFNLLMTLRLWSS

SEQ ID NO: 13139 - protein, 895 aa, synthetic construct
MALPVTALLLPLALLLHAARPEVQLVESGGGLVQPGGSLRLSCAASGFSFSDFWMSWVRQAPGKGLEWVATISQAGSEKDYVDSVKGRFTISRDNAKKSLYLQMNSLRAEDTAVYYCASGVYSFDYRGQGTLVTVSSGTGGGGSGGGGSGGGGSEFDYIHVTQSPSSLSVSIGDRVTINCQTSQGVGSDLHWYQHKPGRAPKLLIHHASSVEDGVPSRFSGTGFHTSFNLTINDLQADDIGTYYCQVLQSFGRGSRLDTKLEIQNPDPAVYQLRDSKSSDKSVCLFTDFDSQTNVSQSKDSDVYITDKCVLDMRSMDFKSNSAVAWSNKSDFACANAFNNSIIPEDTFFPSPESSCGFTSESYQQGVLSATILYEILLGKATLYAVLVSALVLMAMVKRKDSRGRAKRSGSGVKQTLNFDLLKLAGDVESNPGPTSMDWIWRILFLVGAATGAHSGPQLQLQESGPGLVKPSETLSLTCTVSGDSISSGDYYWGWIRQPPGKGLEWIGHIYYSGVTYYNPSLKSRVTISVDTSRNQFSLKLSSVTAADTAVYYCTREDSSNWRSRGQGTLVTVSSGSGGGGSGGGGSGGGGSFERAHLVQSGTAMKKPGASVRVSCQTSGYTFTAHILFWFRQAPGRGLEWVGWIKPQYGAVNFGGGFRDRVTLTRDVYREIAYMDIRGLKPDDTAVYYCARDRSYGDSSWALDAWGQGTTVVVSATREDLKNVFPPEVAVFEPSEAEISHTQKATLVCLATGFYPDHVELSWWVNGKEVHSGVCTDPQPLKEQPALNDSRYCLSSRLRVSATFWQNPRNHFRCQVQFYGLSENDEWTQDRAKPVTQIVSAEAWGRADCDVKLVEKSFETDTNLNFQNLSVIGFRILLLKVAGFNLLMTLRLWSS

SEQ ID NO: 13140 - protein, 905 aa, synthetic construct
MALPVTALLLPLALLLHAARPEVQLVESGGGLVQPGGSLRLSCAASGFSFSDFWMSWVRQAPGKGLEWVATISQAGSEKDYVDSVKGRFTISRDNAKKSLYLQMNSLRAEDTAVYYCASGVYSFDYRGQGTLVTVSSGTGGGGSGGGGSGGGGSEFDVQMIQTPDSLAVSLGQRATISCRASESVDNYGISFMHWYQQKPGQSPKLLIYRASNLESGIPARFSGSGSRTDFTLTINPVETDDVATYYCQQNNKDPPTFGGGTKLEIKLEIQNPDPAVYQLRDSKSSDKSVCLFTDFDSQTNVSQSKDSDVYITDKCVLDMRSMDFKSNSAVAWSNKSDFACANAFNNSIIPEDTFFPSPESSCGFTSESYQQGVLSATILYEILLGKATLYAVLVSALVLMAMVKRKDSRGRAKRSGSGVKQTLNFDLLKLAGDVESNPGPTSMDWIWRILFLVGAATGAHSGPQLQLQESGPGLVKPSETLSLTCTVSGDSISSGDYYWGWIRQPPGKGLEWIGHIYYSGVTYYNPSLKSRVTISVDTSRNQFSLKLSSVTAADTAVYYCTREDSSNWRSRGQGTLVTVSSGSGGGGSGGGGSGGGGSFEGGGGSQVQLQQSGAELVKPGASVKISCKASGYAFSSYWMNWVKQRPGKGLEWIGQIYPGDGDTTYNGKFKGKATLTADKSSSTVYMQLNSLTSEDSAVYFCVRYYYGSSGYFDYWGQGTTLTVSSTREDLKNVFPPEVAVFEPSEAEISHTQKATLVCLATGFYPDHVELSWWVNGKEVHSGVCTDPQPLKEQPALNDSRYCLSSRLRVSATFWQNPRNHFRCQVQFYGLSENDEWTQDRAKPVTQIVSAEAWGRADCDVKLVEKSFETDTNLNFQNLSVIGFRILLLKVAGFNLLMTLRLWSS

SEQ ID NO: 13141 - protein, 896 aa, synthetic construct
MALPVTALLLPLALLLHAARPEVQLVESGGGLVQPGGSLRLSCAASGFSFSDFWMSWVRQAPGKGLEWVATISQAGSEKDYVDSVKGRFTISRDNAKKSLYLQMNSLRAEDTAVYYCASGVYSFDYRGQGTLVTVSSGTGGGGSGGGGSGGGGSEFDVQMIQTPSSLSASLGDRVTISCRASQDIGNYLNWYQQKPDGTVKLLIYYTSRLHSGVPSRFSGSGSGTEYSLTISNLEQEDIATYFCQQGSALPPTFGGGTKLEINLEIQNPDPAVYQLRDSKSSDKSVCLFTDFDSQTNVSQSKDSDVYITDKCVLDMRSMDFKSNSAVAWSNKSDFACANAFNNSIIPEDTFFPSPESSCGFTSESYQQGVLSATILYEILLGKATLYAVLVSALVLMAMVKRKDSRGRAKRSGSGVKQTLNFDLLKLAGDVESNPGPTSMDWIWRILFLVGAATGAHSGPQLQLQESGPGLVKPSETLSLTCTVSGDSISSGDYYWGWIRQPPGKGLEWIGHIYYSGVTYYNPSLKSRVTISVDTSRNQFSLKLSSVTAADTAVYYCTREDSSNWRSRGQGTLVTVSSGSGGGGSGGGGSGGGGSFEALQLQQSGAELVRPGASVTLSCKASGYTFTDYEMHWVKQTPVHGLEWIGAIDPETGGTAYNQKFEGKAILTADKSSSTAYMELRSLTSEDSPVYYCARRRYYGSSSFDYWGQGTTLTVSSTREDLKNVFPPEVAVFEPSEAEISHTQKATLVCLATGFYPDHVELSWWVNGKEVHSGVCTDPQPLKEQPALNDSRYCLSSRLRVSATFWQNPRNHFRCQVQFYGLSENDEWTQDRAKPVTQIVSAEAWGRADCDVKLVEKSFETDTNLNFQNLSVIGFRILLLKVAGFNLLMTLRLWSS

SEQ ID NO: 13142 - protein, 900 aa, synthetic construct
MALPVTALLLPLALLLHAARPEVQLVESGGGLVQPGGSLRLSCAASGFSFSDFWMSWVRQAPGKGLEWVATISQAGSEKDYVDSVKGRFTISRDNAKKSLYLQMNSLRAEDTAVYYCASGVYSFDYRGQGTLVTVSSGTGGGGSGGGGSGGGGSEFDIVLTQSPASLAVSLGQRATISCRASKSVSTSGYSYLHWYQQKPGQPPKLLIYLASNLESGVPARFSGSGSGTDFTLNIHPVEEEDAATYYCQHSRELPFTFGSGTKLEIKLEIQNPDPAVYQLRDSKSSDKSVCLFTDFDSQTNVSQSKDSDVYITDKCVLDMRSMDFKSNSAVAWSNKSDFACANAFNNSIIPEDTFFPSPESSCGFTSESYQQGVLSATILYEILLGKATLYAVLVSALVLMAMVKRKDSRGRAKRSGSGVKQTLNFDLLKLAGDVESNPGPTSMDWIWRILFLVGAATGAHSGPQLQLQESGPGLVKPSETLSLTCTVSGDSISSGDYYWGWIRQPPGKGLEWIGHIYYSGVTYYNPSLKSRVTISVDTSRNQFSLKLSSVTAADTAVYYCTREDSSNWRSRGQGTLVTVSSGSGGGGSGGGGSGGGGSFEQVQLVESGGGLVQPGGSLKLSCAASGFDFSRYWMSWVRQAPGKGLEWIGEINPTSSTINFTPSLKDKVFISRDNAKNTLYLQMSKVRSEDTALYYCARGNYYRYGDAMDYWGQGTSVTVSTREDLKNVFPPEVAVFEPSEAEISHTQKATLVCLATGFYPDHVELSWWVNGKEVHSGVCTDPQPLKEQPALNDSRYCLSSRLRVSATFWQNPRNHFRCQVQFYGLSENDEWTQDRAKPVTQIVSAEAWGRADCDVKLVEKSFETDTNLNFQNLSVIGFRILLLKVAGFNLLMTLRLWSS

SEQ ID NO: 13143 - protein, 898 aa, synthetic construct
MALPVTALLLPLALLLHAARPEVQLVESGGGLVQPGGSLRLSCAASGFSFSDFWMSWVRQAPGKGLEWVATISQAGSEKDYVDSVKGRFTISRDNAKKSLYLQMNSLRAEDTAVYYCASGVYSFDYRGQGTLVTVSSGTGGGGSGGGGSGGGGSEFDIQMTQSPSSLSASVGDRVTITCSASQDISNYLNWYQQKPGKAPKLLIYYTSNLHSGVPSRFSGSGSGTDFTLTISSLQPEDFATYYCQQYRKLPWTFGQGTKLEIKRLEIQNPDPAVYQLRDSKSSDKSVCLFTDFDSQTNVSQSKDSDVYITDKCVLDMRSMDFKSNSAVAWSNKSDFACANAFNNSIIPEDTFFPSPESSCGFTSESYQQGVLSATILYEILLGKATLYAVLVSALVLMAMVKRKDSRGRAKRSGSGVKQTLNFDLLKLAGDVESNPGPTSMDWIWRILFLVGAATGAHSGPQLQLQESGPGLVKPSETLSLTCTVSGDSISSGDYYWGWIRQPPGKGLEWIGHIYYSGVTYYNPSLKSRVTISVDTSRNQFSLKLSSVTAADTAVYYCTREDSSNWRSRGQGTLVTVSSGSGGGGSGGGGSGGGGSFEQVQLVQSGAEVKKPGSSVKVSCKASGGTFSNYWMHWVRQAPGQGLEWMGATYRGHSDTYYNQKFKGRVTITADKSTSTAYMELSSLRSEDTAVYYCARGAIYDGYDVLDNWGQGTLVTVSSTREDLKNVFPPEVAVFEPSEAEISHTQKATLVCLATGFYPDHVELSWWVNGKEVHSGVCTDPQPLKEQPALNDSRYCLSSRLRVSATFWQNPRNHFRCQVQFYGLSENDEWTQDRAKPVTQIVSAEAWGRADCDVKLVEKSFETDTNLNFQNLSVIGFRILLLKVAGFNLLMTLRLWSS

SEQ ID NO: 13144 - protein, 898 aa, synthetic construct
MALPVTALLLPLALLLHAARPEVQLVESGGGLVQPGGSLRLSCAASGFSFSDFWMSWVRQAPGKGLEWVATISQAGSEKDYVDSVKGRFTISRDNAKKSLYLQMNSLRAEDTAVYYCASGVYSFDYRGQGTLVTVSSGTGGGGSGGGGSGGGGSEFDIVLTQSPATLSLSPGDRATISCRASESVTILGSHLIYWYQQKPGQPPRLLIQLASNVQTGVPARFSGSGSRTDFTLTISSVEPEDFAVYYCLQSRTIPRTFGQGTKLEIKRLEIQNPDPAVYQLRDSKSSDKSVCLFTDFDSQTNVSQSKDSDVYITDKCVLDMRSMDFKSNSAVAWSNKSDFACANAFNNSIIPEDTFFPSPESSCGFTSESYQQGVLSATILYEILLGKATLYAVLVSALVLMAMVKRKDSRGRAKRSGSGVKQTLNFDLLKLAGDVESNPGPTSMDWIWRILFLVGAATGAHSGPQLQLQESGPGLVKPSETLSLTCTVSGDSISSGDYYWGWIRQPPGKGLEWIGHIYYSGVTYYNPSLKSRVTISVDTSRNQFSLKLSSVTAADTAVYYCTREDSSNWRSRGQGTLVTVSSGSGGGGSGGGGSGGGGSFEQVQLVQSGPEVKKPGESVKISCKASGYTFRHYSMNWVKQAPGQGLKWMGRINTESGVPIYADDFKGRFSFTVDTSASTAYLEISSLTSEDTAVYFCSNDYLYSLDFWGQGTTLTVSSTREDLKNVFPPEVAVFEPSEAEISHTQKATLVCLATGFYPDHVELSWWVNGKEVHSGVCTDPQPLKEQPALNDSRYCLSSRLRVSATFWQNPRNHFRCQVQFYGLSENDEWTQDRAKPVTQIVSAEAWGRADCDVKLVEKSFETDTNLNFQNLSVIGFRILLLKVAGFNLLMTLRLWSS

SEQ ID NO: 13145 - protein, 899 aa, synthetic construct
MALPVTALLLPLALLLHAARPEVQLVESGGGLVQPGGSLRLSCAASGFSFSDFWMSWVRQAPGKGLEWVATISQAGSEKDYVDSVKGRFTISRDNAKKSLYLQMNSLRAEDTAVYYCASGVYSFDYRGQGTLVTVSSGTGGGGSGGGGSGGGGSEFQSVLTQPPSVSGAPGQRVTISCTGSSSNIGAGFDVHWYQQLPGTAPKLLIYGNSNRPSGVPDRFSGSKSGTSASLAITGLQAEDEADYYCQSYDSSLSGYVFGTGTKVTVLGLEIQNPDPAVYQLRDSKSSDKSVCLFTDFDSQTNVSQSKDSDVYITDKCVLDMRSMDFKSNSAVAWSNKSDFACANAFNNSIIPEDTFFPSPESSCGFTSESYQQGVLSATILYEILLGKATLYAVLVSALVLMAMVKRKDSRGRAKRSGSGVKQTLNFDLLKLAGDVESNPGPTSMDWIWRILFLVGAATGAHSGPQLQLQESGPGLVKPSETLSLTCTVSGDSISSGDYYWGWIRQPPGKGLEWIGHIYYSGVTYYNPSLKSRVTISVDTSRNQFSLKLSSVTAADTAVYYCTREDSSNWRSRGQGTLVTVSSGSGGGGSGGGGSGGGGSFEQVQLVQSGAEVKKPGASVKVSCKASGYTFTDYYMHWVRQAPGQRLEWMGWINPNSGGTNYAQKFQDRITVTRDTSSNTGYMELTRLRSDDTAVYYCARSPYSGVLDKWGQGTLVTVSSTREDLKNVFPPEVAVFEPSEAEISHTQKATLVCLATGFYPDHVELSWWVNGKEVHSGVCTDPQPLKEQPALNDSRYCLSSRLRVSATFWQNPRNHFRCQVQFYGLSENDEWTQDRAKPVTQIVSAEAWGRADCDVKLVEKSFETDTNLNFQNLSVIGFRILLLKVAGFNLLMTLRLWSS

SEQ ID NO: 13146 - protein, 896 aa, synthetic construct
MALPVTALLLPLALLLHAARPEVQLVESGGGLVQPGGSLRLSCAASGFSFSDFWMSWVRQAPGKGLEWVATISQAGSEKDYVDSVKGRFTISRDNAKKSLYLQMNSLRAEDTAVYYCASGVYSFDYRGQGTLVTVSSGTGGGGSGGGGSGGGGSEFQAVLTQPPSASGTPGQRVTISCSGSSSNIGSYTVSWYQQLPGTAPKFLIYSNNQRPSGVPDRFSGSKSGTSASLAISGLQSEDEADYYCAAWDDSLNGYVFGTGTKVTVLGLEIQNPDPAVYQLRDSKSSDKSVCLFTDFDSQTNVSQSKDSDVYITDKCVLDMRSMDFKSNSAVAWSNKSDFACANAFNNSIIPEDTFFPSPESSCGFTSESYQQGVLSATILYEILLGKATLYAVLVSALVLMAMVKRKDSRGRAKRSGSGVKQTLNFDLLKLAGDVESNPGPTSMDWIWRILFLVGAATGAHSGPQLQLQESGPGLVKPSETLSLTCTVSGDSISSGDYYWGWIRQPPGKGLEWIGHIYYSGVTYYNPSLKSRVTISVDTSRNQFSLKLSSVTAADTAVYYCTREDSSNWRSRGQGTLVTVSSGSGGGGSGGGGSGGGGSFEVQLVQSGAEVKKPGESLKISCKGSGYDFTTYWIGWVRQMPGKGLEWMGIIYPGDSDTRYSPSVRGRVTISADKSINTAYLQWSSLEASDTAMYYCARMWTFSQDGWGQGTLVTVSSTREDLKNVFPPEVAVFEPSEAEISHTQKATLVCLATGFYPDHVELSWWVNGKEVHSGVCTDPQPLKEQPALNDSRYCLSSRLRVSATFWQNPRNHFRCQVQFYGLSENDEWTQDRAKPVTQIVSAEAWGRADCDVKLVEKSFETDTNLNFQNLSVIGFRILLLKVAGFNLLMTLRLWSS

SEQ ID NO: 13147 - protein, 899 aa, synthetic construct
MALPVTALLLPLALLLHAARPEVQLVESGGGLVQPGGSLRLSCAASGFSFSDFWMSWVRQAPGKGLEWVATISQAGSEKDYVDSVKGRFTISRDNAKKSLYLQMNSLRAEDTAVYYCASGVYSFDYRGQGTLVTVSSGTGGGGSGGGGSGGGGSEFDIVMTQSPDSLAVSLGERATINCKSSQSILYSSNQKNYLAWYQQKPGQSPKLLIYWASTRESGVPDRFSGSGSGTDFTLTISSLQAEDVAVYYCHQYISSYTFGQGTKLEIKLEIQNPDPAVYQLRDSKSSDKSVCLFTDFDSQTNVSQSKDSDVYITDKCVLDMRSMDFKSNSAVAWSNKSDFACANAFNNSIIPEDTFFPSPESSCGFTSESYQQGVLSATILYEILLGKATLYAVLVSALVLMAMVKRKDSRGRAKRSGSGVKQTLNFDLLKLAGDVESNPGPTSMDWIWRILFLVGAATGAHSGPQLQLQESGPGLVKPSETLSLTCTVSGDSISSGDYYWGWIRQPPGKGLEWIGHIYYSGVTYYNPSLKSRVTISVDTSRNQFSLKLSSVTAADTAVYYCTREDSSNWRSRGQGTLVTVSSGSGGGGSGGGGSGGGGSFEQVQLVQSGAEVKKPGASVKVSCKASGYTFASQWMHWMRQAPGQGLEWIGWINPGNVNTKYNEKFKGRATLTVDTSTNTAYMELSSLRSEDTAVYYCARSTWYRPLDYWGQGTLVTVSSTREDLKNVFPPEVAVFEPSEAEISHTQKATLVCLATGFYPDHVELSWWVNGKEVHSGVCTDPQPLKEQPALNDSRYCLSSRLRVSATFWQNPRNHFRCQVQFYGLSENDEWTQDRAKPVTQIVSAEAWGRADCDVKLVEKSFETDTNLNFQNLSVIGFRILLLKVAGFNLLMTLRLWSS

SEQ ID NO: 13148 - protein, 899 aa, synthetic construct
MALPVTALLLPLALLLHAARPEVQLVESGGGLVQPGGSLRLSCAASGFSFSDFWMSWVRQAPGKGLEWVATISQAGSEKDYVDSVKGRFTISRDNAKKSLYLQMNSLRAEDTAVYYCASGVYSFDYRGQGTLVTVSSGTGGGGSGGGGSGGGGSEFDHIVLTQSPSSLSASLGDRVTISCRASQDISTYLNWYQQKPDGTVKLLIFYTSRLHAGVPSRFSGSGSGTHHSLTISNLEQEDIATYFCQQGNSLPFTFGSGTKLEIKRLEIQNPDPAVYQLRDSKSSDKSVCLFTDFDSQTNVSQSKDSDVYITDKCVLDMRSMDFKSNSAVAWSNKSDFACANAFNNSIIPEDTFFPSPESSCGFTSESYQQGVLSATILYEILLGKATLYAVLVSALVLMAMVKRKDSRGRAKRSGSGVKQTLNFDLLKLAGDVESNPGPTSMDWIWRILFLVGAATGAHSGPQLQLQESGPGLVKPSETLSLTCTVSGDSISSGDYYWGWIRQPPGKGLEWIGHIYYSGVTYYNPSLKSRVTISVDTSRNQFSLKLSSVTAADTAVYYCTREDSSNWRSRGQGTLVTVSSGSGGGGSGGGGSGGGGSFEQVQLKESGPELEKPGASVKISCKASGYSFTAYSMNWVKQNNGMSLEWIGSIDPYYGDTKYAQKFKGKATLTVDKASSTAYLQLKSLTSEDSAVYYCARRMITTGDWYFDVWGAGTTVTVSSTREDLKNVFPPEVAVFEPSEAEISHTQKATLVCLATGFYPDHVELSWWVNGKEVHSGVCTDPQPLKEQPALNDSRYCLSSRLRVSATFWQNPRNHFRCQVQFYGLSENDEWTQDRAKPVTQIVSAEAWGRADCDVKLVEKSFETDTNLNFQNLSVIGFRILLLKVAGFNLLMTLRLWSS

SEQ ID NO: 13149 - protein, 899 aa, synthetic construct; identical to SEQ ID NO: 13148

SEQ ID NO: 13150 - protein, 899 aa, synthetic construct
MALPVTALLLPLALLLHAARPEVQLVESGGGLVQPGGSLRLSCAASGFSFSDFWMSWVRQAPGKGLEWVATISQAGSEKDYVDSVKGRFTISRDNAKKSLYLQMNSLRAEDTAVYYCASGVYSFDYRGQGTLVTVSSGTGGGGSGGGGSGGGGSEFDEIVLTQSPATLSLSPGERATLSCRASQSVSSYLAWYQQKPGQAPRLLIYDASNRATGIPARFSGSGSGTDFTLTISSLEPEDFAVYYCQQRSNWPITFGQGTRLEIKLEIQNPDPAVYQLRDSKSSDKSVCLFTDFDSQTNVSQSKDSDVYITDKCVLDMRSMDFKSNSAVAWSNKSDFACANAFNNSIIPEDTFFPSPESSCGFTSESYQQGVLSATILYEILLGKATLYAVLVSALVLMAMVKRKDSRGRAKRSGSGVKQTLNFDLLKLAGDVESNPGPTSMDWIWRILFLVGAATGAHSGPQLQLQESGPGLVKPSETLSLTCTVSGDSISSGDYYWGWIRQPPGKGLEWIGHIYYSGVTYYNPSLKSRVTISVDTSRNQFSLKLSSVTAADTAVYYCTREDSSNWRSRGQGTLVTVSSGSGGGGSGGGGSGGGGSFEEVQLVESGGGLVQPGRSLRLSCAASGFTFNDYAMHWVRQAPGKGLEWVSTISWNSGSIGYADSVKGRFTISRDNAKKSLYLQMNSLRAEDTALYYCAKDIQYGNYYYGMDVWGQGTTVTVSSTREDLKNVFPPEVAVFEPSEAEISHTQKATLVCLATGFYPDHVELSWWVNGKEVHSGVCTDPQPLKEQPALNDSRYCLSSRLRVSATFWQNPRNHFRCQVQFYGLSENDEWTQDRAKPVTQIVSAEAWGRADCDVKLVEKSFETDTNLNFQNLSVIGFRILLLKVAGFNLLMTLRLWSS

SEQ ID NO: 13151 - protein, 901 aa, synthetic construct
MALPVTALLLPLALLLHAARPEVQLVESGGGLVQPGGSLRLSCAASGFSFSDFWMSWVRQAPGKGLEWVATISQAGSEKDYVDSVKGRFTISRDNAKKSLYLQMNSLRAEDTAVYYCASGVYSFDYRGQGTLVTVSSGTGGGGSGGGGSGGGGSEFDIVMTQTPLSLPVTPGEPASISCRSSKSLLHSNGITYLYWYLQKPGQSPQLLIYQMSNLVSGVPDRFSGSGSGTDFTLKISRVEAEDVGVYYCAQNLELPYTFGGGTKVEIKRLEIQNPDPAVYQLRDSKSSDKSVCLFTDFDSQTNVSQSKDSDVYITDKCVLDMRSMDFKSNSAVAWSNKSDFACANAFNNSIIPEDTFFPSPESSCGFTSESYQQGVLSATILYEILLGKATLYAVLVSALVLMAMVKRKDSRGRAKRSGSGVKQTLNFDLLKLAGDVESNPGPTSMDWIWRILFLVGAATGAHSGPQLQLQESGPGLVKPSETLSLTCTVSGDSISSGDYYWGWIRQPPGKGLEWIGHIYYSGVTYYNPSLKSRVTISVDTSRNQFSLKLSSVTAADTAVYYCTREDSSNWRSRGQGTLVTVSSGSGGGGSGGGGSGGGGSFEQVQLVQSGAEVKKPGSSVKVSCKASGYAFSYSWINWVRQAPGQGLEWMGRIFPGDGDTDYNGKFKGRVTITADKSTSTAYMELSSLRSEDTAVYYCARNVFDGYWLVYWGQGTLVTVSSTREDLKNVFPPEVAVFEPSEAEISHTQKATLVCLATGFYPDHVELSWWVNGKEVHSGVCTDPQPLKEQPALNDSRYCLSSRLRVSATFWQNPRNHFRCQVQFYGLSENDEWTQDRAKPVTQIVSAEAWGRADCDVKLVEKSFETDTNLNFQNLSVIGFRILLLKVAGFNLLMTLRLWSS

SEQ ID NO: 13152 - protein, 902 aa, synthetic construct
MALPVTALLLPLALLLHAARPEVQLVESGGGLVQPGGSLRLSCAASGFSFSDFWMSWVRQAPGKGLEWVATISQAGSEKDYVDSVKGRFTISRDNAKKSLYLQMNSLRAEDTAVYYCASGVYSFDYRGQGTLVTVSSGTGGGGSGGGGSGGGGSEFDIQMTQSPSSLSASVGDRVTITCRSSQSIVHSVGNTFLEWYQQKPGKAPKLLIYKVSNRFSGVPSRFSGSGSGTDFTLTISSLQPEDFATYYCFQGSQFPYTFGQGTKVEIKRLEIQNPDPAVYQLRDSKSSDKSVCLFTDFDSQTNVSQSKDSDVYITDKCVLDMRSMDFKSNSAVAWSNKSDFACANAFNNSIIPEDTFFPSPESSCGFTSESYQQGVLSATILYEILLGKATLYAVLVSALVLMAMVKRKDSRGRAKRSGSGVKQTLNFDLLKLAGDVESNPGPTSMDWIWRILFLVGAATGAHSGPQLQLQESGPGLVKPSETLSLTCTVSGDSISSGDYYWGWIRQPPGKGLEWIGHIYYSGVTYYNPSLKSRVTISVDTSRNQFSLKLSSVTAADTAVYYCTREDSSNWRSRGQGTLVTVSSGSGGGGSGGGGSGGGGSFEEVQLVESGGGLVQPGGSLRLSCAASGYEFSRSWMNWVRQAPGKGLEWVGRIYPGDGDTNYSGKFKGRFTISADTSKNTAYLQMNSLRAEDTAVYYCARDGSSWDWYFDVWGQGTLVTVSSTREDLKNVFPPEVAVFEPSEAEISHTQKATLVCLATGFYPDHVELSWWVNGKEVHSGVCTDPQPLKEQPALNDSRYCLSSRLRVSATFWQNPRNHFRCQVQFYGLSENDEWTQDRAKPVTQIVSAEAWGRADCDVKLVEKSFETDTNLNFQNLSVIGFRILLLKVAGFNLLMTLRLWSS

SEQ ID NO: 13153 - protein, 900 aa, synthetic construct
MALPVTALLLPLALLLHAARPEVQLVESGGGLVQPGGSLRLSCAASGFSFSDFWMSWVRQAPGKGLEWVATISQAGSEKDYVDSVKGRFTISRDNAKKSLYLQMNSLRAEDTAVYYCASGVYSFDYRGQGTLVTVSSGTGGGGSGGGGSGGGGSEFDIQMTQSPSSLSASVGDRVTITCRASQTIWSYLNWYQQRPGKAPNLLIYAASSLQSGVPSRFSGRGSGTDFTLTISSLQAEDFATYYCQQSYSIPQIFGQGTKLEIKLEIQNPDPAVYQLRDSKSSDKSVCLFTDFDSQTNVSQSKDSDVYITDKCVLDMRSMDFKSNSAVAWSNKSDFACANAFNNSIIPEDTFFPSPESSCGFTSESYQQGVLSATILYEILLGKATLYAVLVSALVLMAMVKRKDSRGRAKRSGSGVKQTLNFDLLKLAGDVESNPGPTSMDWIWRILFLVGAATGAHSGPQLQLQESGPGLVKPSETLSLTCTVSGDSISSGDYYWGWIRQPPGKGLEWIGHIYYSGVTYYNPSLKSRVTISVDTSRNQFSLKLSSVTAADTAVYYCTREDSSNWRSRGQGTLVTVSSGSGGGGSGGGGSGGGGSFEQVQLQQSGPGLVKPSQTLSLTCAISGDSVSSNSAAWNWIRQSPSRGLEWLGRTYYRSKWYNDYAVSVKSRITINPDTSKNQFSLQLNSVTPEDTAVYYCAREVTGDLEDAFDIWGQGTMVTVSSTREDLKNVFPPEVAVFEPSEAEISHTQKATLVCLATGFYPDHVELSWWVNGKEVHSGVCTDPQPLKEQPALNDSRYCLSSRLRVSATFWQNPRNHFRCQVQFYGLSENDEWTQDRAKPVTQIVSAEAWGRADCDVKLVEKSFETDTNLNFQNLSVIGFRILLLKVAGFNLLMTLRLWSS

SEQ ID NO: 13154 - protein, 893 aa, synthetic construct
MALPVTALLLPLALLLHAARPEVQLVESGGGLVQPGGSLRLSCAASGFSFSDFWMSWVRQAPGKGLEWVATISQAGSEKDYVDSVKGRFTISRDNAKKSLYLQMNSLRAEDTAVYYCASGVYSFDYRGQGTLVTVSSGTGGGGSGGGGSGGGGSEFDIQMTQSPATIENTSLSASVGDRVTITCRASQGISSWLTWYQQKPEKAPKSLIYAASSLQSGVPSRFSGSGSGTDFTLTISSLQPEDFATYYCQQYDSYPITFGQGTRLEIKLEIQNPDPAVYQLRDSKSSDKSVCLFTDFDSQTNVSQSKDSDVYITDKCVLDMRSMDFKSNSAVAWSNKSDFACANAFNNSIIPEDTFFPSPESSCGFTSESYQQGVLSATILYEILLGKATLYAVLVSALVLMAMVKRKDSRGRAKRSGSGVKQTLNFDLLKLAGDVESNPGPTSMDWIWRILFLVGAATGAHSGPQLQLQESGPGLVKPSETLSLTCTVSGDSISSGDYYWGWIRQPPGKGLEWIGHIYYSGVTYYNPSLKSRVTISVDTSRNQFSLKLSSVTAADTAVYYCTREDSSNWRSRGQGTLVTVSSGSGGGGSGGGGSGGGGSFEQVQLQQWGAGLLKPSETLSLTCAVYGGSFSAYYWSWIRQPPGKGLEWIGDINHGGGTNYNPSLKSRVTISVDTSKNQFSLKLNSVTAADTAVYYCASLTAYWGQGSLVTVSSTREDLKNVFPPEVAVFEPSEAEISHTQKATLVCLATGFYPDHVELSWWVNGKEVHSGVCTDPQPLKEQPALNDSRYCLSSRLRVSATFWQNPRNHFRCQVQFYGLSENDEWTQDRAKPVTQIVSAEAWGRADCDVKLVEKSFETDTNLNFQNLSVIGFRILLLKVAGFNLLMTLRLWSS

SEQ ID NO: 13155 - protein, 898 aa, synthetic construct
MALPVTALLLPLALLLHAARPEVQLVESGGGLVQPGGSLRLSCAASGFSFSDFWMSWVRQAPGKGLEWVATISQAGSEKDYVDSVKGRFTISRDNAKKSLYLQMNSLRAEDTAVYYCASGVYSFDYRGQGTLVTVSSGTGGGGSGGGGSGGGGSEFDEIVLTQSPDSLAVSLGERATINCKASQSVDFDGDSYLNWYQQKPGQPPKVLIYAASTLQSGVPSRFSGSGSGTDFTLTINSLEAEDAATYYCQQSNEDPWTFGGGTKVEIKLEIQNPDPAVYQLRDSKSSDKSVCLFTDFDSQTNVSQSKDSDVYITDKCVLDMRSMDFKSNSAVAWSNKSDFACANAFNNSIIPEDTFFPSPESSCGFTSESYQQGVLSATILYEILLGKATLYAVLVSALVLMAMVKRKDSRGRAKRSGSGVKQTLNFDLLKLAGDVESNPGPTSMDWIWRILFLVGAATGAHSGPQLQLQESGPGLVKPSETLSLTCTVSGDSISSGDYYWGWIRQPPGKGLEWIGHIYYSGVTYYNPSLKSRVTISVDTSRNQFSLKLSSVTAADTAVYYCTREDSSNWRSRGQGTLVTVSSGSGGGGSGGGGSGGGGSFEQVQLVQSGAEVKKPGASVKVSCKVSGYTFTDYYITWVRQAPGQALEWMGWIYPGSGNTKYSQKFQGRFVFSVDTSASTAYLQLSSLKAEDTAVYYCANYGNYWFAYWGQGTLVTVSSTREDLKNVFPPEVAVFEPSEAEISHTQKATLVCLATGFYPDHVELSWWVNGKEVHSGVCTDPQPLKEQPALNDSRYCLSSRLRVSATFWQNPRNHFRCQVQFYGLSENDEWTQDRAKPVTQIVSAEAWGRADCDVKLVEKSFETDTNLNFQNLSVIGFRILLLKVAGFNLLMTLRLWSS

SEQ ID NO: 13156 - protein, 895 aa, synthetic construct
MALPVTALLLPLALLLHAARPEVQLVESGGGLVQPGGSLRLSCAASGFSFSDFWMSWVRQAPGKGLEWVATISQAGSEKDYVDSVKGRFTISRDNAKKSLYLQMNSLRAEDTAVYYCASGVYSFDYRGQGTLVTVSSGTGGGGSGGGGSGGGGSEFDIQMTQSPSSLSASVGDRVTITCRASQGISSWLAWYQQKPEKAPKSLIYAASSLQSGVPSRFSGSGSGTDFTLTISSLQPEDFATYYCQQYNSYPPTFGGGTKVEIKLEIQNPDPAVYQLRDSKSSDKSVCLFTDFDSQTNVSQSKDSDVYITDKCVLDMRSMDFKSNSAVAWSNKSDFACANAFNNSIIPEDTFFPSPESSCGFTSESYQQGVLSATILYEILLGKATLYAVLVSALVLMAMVKRKDSRGRAKRSGSGVKQTLNFDLLKLAGDVESNPGPTSMDWIWRILFLVGAATGAHSGPQLQLQESGPGLVKPSETLSLTCTVSGDSISSGDYYWGWIRQPPGKGLEWIGHIYYSGVTYYNPSLKSRVTISVDTSRNQFSLKLSSVTAADTAVYYCTREDSSNWRSRGQGTLVTVSSGSGGGGSGGGGSGGGGSFEEVQLVQSGGGLVHPGGSLRLSCAGSGFAFSSSTMHWIRQAPGKGLEWISLIGSGGGIYYGDSVKGRFTISRDNAKNSLYLQMNSLRAEDMAVYYCVRGYFDWVDYFDYWGQGTLVTVSSTREDLKNVFPPEVAVFEPSEAEISHTQKATLVCLATGFYPDHVELSWWVNGKEVHSGVCTDPQPLKEQPALNDSRYCLSSRLRVSATFWQNPRNHFRCQVQFYGLSENDEWTQDRAKPVTQIVSAEAWGRADCDVKLVEKSFETDTNLNFQNLSVIGFRILLLKVAGFNLLMTLRLWSS

SEQ ID NO: 13157 - protein, 905 aa, synthetic construct
MALPVTALLLPLALLLHAARPEVQLVESGGGLVQPGGSLRLSCAASGFSFSDFWMSWVRQAPGKGLEWVATISQAGSEKDYVDSVKGRFTISRDNAKKSLYLQMNSLRAEDTAVYYCASGVYSFDYRGQGTLVTVSSGTGGGGSGGGGSGGGGSEFDDIVMTQSPDSLTVSLGERTTINCKSSQSVLDSSKNKNSLAWYQQKPGQPPKLLLSWASTRESGIPDRFSGSGSGTDFTLTIDSLQPEDSATYYCQQSAHFPITFGQGTRLEIKLEIQNPDPAVYQLRDSKSSDKSVCLFTDFDSQTNVSQSKDSDVYITDKCVLDMRSMDFKSNSAVAWSNKSDFACANAFNNSIIPEDTFFPSPESSCGFTSESYQQGVLSATILYEILLGKATLYAVLVSALVLMAMVKRKDSRGRAKRSGSGVKQTLNFDLLKLAGDVESNPGPTSMDWIWRILFLVGAATGAHSGPQLQLQESGPGLVKPSETLSLTCTVSGDSISSGDYYWGWIRQPPGKGLEWIGHIYYSGVTYYNPSLKSRVTISVDTSRNQFSLKLSSVTAADTAVYYCTREDSSNWRSRGQGTLVTVSSGSGGGGSGGGGSGGGGSFEQVQLVQSGAEVKKPGASVKVSCKASGYTFTNYGMNWVKQAPGQGLKWMGWINTYTGEPTYADDFKGRVTMTSDTSTSTAYLELHNLRSDDTAVYYCARWSWSDGYYVYFDYWGQGTTVTVSSTREDLKNVFPPEVAVFEPSEAEISHTQKATLVCLATGFYPDHVELSWWVNGKEVHSGVCTDPQPLKEQPALNDSRYCLSSRLRVSATFWQNPRNHFRCQVQFYGLSENDEWTQDRAKPVTQIVSAEAWGRADCDVKLVEKSFETDTNLNFQNLSVIGFRILLLKVAGFNLLMTLRLWSS

SEQ ID NO: 13158 - protein, 901 aa, synthetic construct
MALPVTALLLPLALLLHAARPEVQLVESGGGLVQPGGSLRLSCAASGFSFSDFWMSWVRQAPGKGLEWVATISQAGSEKDYVDSVKGRFTISRDNAKKSLYLQMNSLRAEDTAVYYCASGVYSFDYRGQGTLVTVSSGTGGGGSGGGGSGGGGSEFDEIVLTQSPGSLAVSPGERVTMSCKSSQSVFFSSSQKNYLAWYQQIPGQSPRLLIYWASTRESGVPDRFTGSGSGTDFTLTISSVQPEDLAIYYCHQYLSSRTFGQGTKLEIKRLEIQNPDPAVYQLRDSKSSDKSVCLFTDFDSQTNVSQSKDSDVYITDKCVLDMRSMDFKSNSAVAWSNKSDFACANAFNNSIIPEDTFFPSPESSCGFTSESYQQGVLSATILYEILLGKATLYAVLVSALVLMAMVKRKDSRGRAKRSGSGVKQTLNFDLLKLAGDVESNPGPTSMDWIWRILFLVGAATGAHSGPQLQLQESGPGLVKPSETLSLTCTVSGDSISSGDYYWGWIRQPPGKGLEWIGHIYYSGVTYYNPSLKSRVTISVDTSRNQFSLKLSSVTAADTAVYYCTREDSSNWRSRGQGTLVTVSSGSGGGGSGGGGSGGGGSFEQVQLQQPGAEVVKPGASVKMSCKASGYTFTSYYIHWIKQTPGQGLEWVGVIYPGNDDISYNQKFQGKATLTADKSSTTAYMQLSSLTSEDSAVYYCAREVRLRYFDVWGQGTTVTVSSTREDLKNVFPPEVAVFEPSEAEISHTQKATLVCLATGFYPDHVELSWWVNGKEVHSGVCTDPQPLKEQPALNDSRYCLSSRLRVSATFWQNPRNHFRCQVQFYGLSENDEWTQDRAKPVTQIVSAEAWGRADCDVKLVEKSFETDTNLNFQNLSVIGFRILLLKVAGFNLLMTLRLWSS

SEQ ID NO: 13159 - protein, 905 aa, synthetic construct
MALPVTALLLPLALLLHAARPEVQLVESGGGLVQPGGSLRLSCAASGFSFSDFWMSWVRQAPGKGLEWVATISQAGSEKDYVDSVKGRFTISRDNAKKSLYLQMNSLRAEDTAVYYCASGVYSFDYRGQGTLVTVSSGTGGGGSGGGGSGGGGSEFDVLLTQSPLSLPVTLGQPASISCRSSQTIVHSNGNTYLEWFQQRPGQSPRLLIYQVSNRFSGVPDRFSGSGSGTDFTLKISRVEAEDVGVYYCFQGSHVPRTFGGGTKVEIKRALEIQNPDPAVYQLRDSKSSDKSVCLFTDFDSQTNVSQSKDSDVYITDKCVLDMRSMDFKSNSAVAWSNKSDFACANAFNNSIIPEDTFFPSPESSCGFTSESYQQGVLSATILYEILLGKATLYAVLVSALVLMAMVKRKDSRGRAKRSGSGVKQTLNFDLLKLAGDVESNPGPTSMDWIWRILFLVGAATGAHSGPQLQLQESGPGLVKPSETLSLTCTVSGDSISSGDYYWGWIRQPPGKGLEWIGHIYYSGVTYYNPSLKSRVTISVDTSRNQFSLKLSSVTAADTAVYYCTREDSSNWRSRGQGTLVTVSSGSGGGGSGGGGSGGGGSFEQIQLVQSGSELKKPGASVKVSCKASGYTFTNYGMNWVRQAPGQGLKWMGWINTNTGEPKYAEEFKGRFALSLDTSVSTAYLQINSLKAEDTAVYFCARGYGNYARGAWLAYWGQGTLVTVSSTREDLKNVFPPEVAVFEPSEAEISHTQKATLVCLATGFYPDHVELSWWVNGKEVHSGVCTDPQPLKEQPALNDSRYCLSSRLRVSATFWQNPRNHFRCQVQFYGLSENDEWTQDRAKPVTQIVSAEAWGRADCDVKLVEKSFETDTNLNFQNLSVIGFRILLLKVAGFNLLMTLRLWSS

SEQ ID NO: 13160 - protein, 890 aa, synthetic construct
MALPVTALLLPLALLLHAARPEVQLVESGGGLVQPGGSLRLSCAASGFSFSDFWMSWVRQAPGKGLEWVATISQAGSEKDYVDSVKGRFTISRDNAKKSLYLQMNSLRAEDTAVYYCASGVYSFDYRGQGTLVTVSSGTGGGGSGGGGSGGGGSEFDEIVLTQSPATLSLSPGERATLSCSASSSINYIYWLQQKPGQAPRILIYLTSNLASGVPARFSGSGSGTDFTLTISSLEPEDFAVYYCLQWSSNPLTFGGGTKVEIKLEIQNPDPAVYQLRDSKSSDKSVCLFTDFDSQTNVSQSKDSDVYITDKCVLDMRSMDFKSNSAVAWSNKSDFACANAFNNSIIPEDTFFPSPESSCGFTSESYQQGVLSATILYEILLGKATLYAVLVSALVLMAMVKRKDSRGRAKRSGSGVKQTLNFDLLKLAGDVESNPGPTSMDWIWRILFLVGAATGAHSGPQLQLQESGPGLVKPSETLSLTCTVSGDSISSGDYYWGWIRQPPGKGLEWIGHIYYSGVTYYNPSLKSRVTISVDTSRNQFSLKLSSVTAADTAVYYCTREDSSNWRSRGQGTLVTVSSGSGGGGSGGGGSGGGGSFEEVQLVESGGGLVKPGGSLRLSCAASGFTFSSYDMSWVRQAPGKGLEWVSTISSGGSYTYYLDSIKGRFTISRDNAKNSLYLQMNSLRAEDTAVYYCARQGLDYWGRGTLVTVSSTREDLKNVFPPEVAVFEPSEAEISHTQKATLVCLATGFYPDHVELSWWVNGKEVHSGVCTDPQPLKEQPALNDSRYCLSSRLRVSATFWQNPRNHFRCQVQFYGLSENDEWTQDRAKPVTQIVSAEAWGRADCDVKLVEKSFETDTNLNFQNLSVIGFRILLLKVAGFNLLMTLRLWSS

SEQ ID NO: 13161 - protein, 899 aa, synthetic construct
MALPVTALLLPLALLLHAARPEVQLVESGGGLVQPGGSLRLSCAASGFSFSDFWMSWVRQAPGKGLEWVATISQAGSEKDYVDSVKGRFTISRDNAKKSLYLQMNSLRAEDTAVYYCASGVYSFDYRGQGTLVTVSSGTGGGGSGGGGSGGGGSEFDIVMTQSPDSLAVSLGERATINCRASKSVSTSGYSFMHWYQQKPGQPPKLLIYLASNLESGVPDRFSGSGSGTDFTLTISSLQAEDVAVYYCQHSREVPWTFGQGTKVEIKRLEIQNPDPAVYQLRDSKSSDKSVCLFTDFDSQTNVSQSKDSDVYITDKCVLDMRSMDFKSNSAVAWSNKSDFACANAFNNSIIPEDTFFPSPESSCGFTSESYQQGVLSATILYEILLGKATLYAVLVSALVLMAMVKRKDSRGRAKRSGSGVKQTLNFDLLKLAGDVESNPGPTSMDWIWRILFLVGAATGAHSGPQLQLQESGPGLVKPSETLSLTCTVSGDSISSGDYYWGWIRQPPGKGLEWIGHIYYSGVTYYNPSLKSRVTISVDTSRNQFSLKLSSVTAADTAVYYCTREDSSNWRSRGQGTLVTVSSGSGGGGSGGGGSGGGGSFEQVQLVQSGAEVKKPGASVKVSCKASGYTFTNYGMNWVRQAPGQGLEWMGWINTYTGEPTYADAFKGRFAFSLDTSTSTAYLQINSLRSDDTAVYYCARDYGDYGMDYWGQGTTVTVSSTREDLKNVFPPEVAVFEPSEAEISHTQKATLVCLATGFYPDHVELSWWVNGKEVHSGVCTDPQPLKEQPALNDSRYCLSSRLRVSATFWQNPRNHFRCQVQFYGLSENDEWTQDRAKPVTQIVSAEAWGRADCDVKLVEKSFETDTNLNFQNLSVIGFRILLLKVAGFNLLMTLRLWSS

SEQ ID NO: 13162 - protein, 895 aa, synthetic construct
MALPVTALLLPLALLLHAARPEVQLVESGGGLVQPGGSLRLSCAASGFSFSDFWMSWVRQAPGKGLEWVATISQAGSEKDYVDSVKGRFTISRDNAKKSLYLQMNSLRAEDTAVYYCASGVYSFDYRGQGTLVTVSSGTGGGGSGGGGSGGGGSEFDIVMTQTPLTLSVTIGQPASISCKSSQSLLDSDGKTYLNWLLQRPGQSPERLIYLVSKLDSGVPDRFTGSGSGTDFTLKISRVEAEDLGVYCCWQGTHFPYTFGGGTKVEIKGLEIQNPDPAVYQLRDSKSSDKSVCLFTDFDSQTNVSQSKDSDVYITDKCVLDMRSMDFKSNSAVAWSNKSDFACANAFNNSIIPEDTFFPSPESSCGFTSESYQQGVLSATILYEILLGKATLYAVLVSALVLMAMVKRKDSRGRAKRSGSGVKQTLNFDLLKLAGDVESNPGPTSMDWIWRILFLVGAATGAHSGPQLQLQESGPGLVKPSETLSLTCTVSGDSISSGDYYWGWIRQPPGKGLEWIGHIYYSGVTYYNPSLKSRVTISVDTSRNQFSLKLSSVTAADTAVYYCTREDSSNWRSRGQGTLVTVSSGSGGGGSGGGGSGGGGSFEQVQLQQPGAELVRPGASVKLSCKASGYTFTSYWMNWVKQRPGQGLEWIGMIDPSDSETHYNHIFKDKATLTVDKSSSTAYLQLSSLTSEDSAVYYCARNLYLWGQGTSVTVSSTREDLKNVFPPEVAVFEPSEAEISHTQKATLVCLATGFYPDHVELSWWVNGKEVHSGVCTDPQPLKEQPALNDSRYCLSSRLRVSATFWQNPRNHFRCQVQFYGLSENDEWTQDRAKPVTQIVSAEAWGRADCDVKLVEKSFETDTNLNFQNLSVIGFRILLLKVAGFNLLMTLRLWSS

SEQ ID NO: 13163 - protein, 903 aa, synthetic construct
MALPVTALLLPLALLLHAARPEVQLVESGGGLVQPGGSLRLSCAASGFSFSDFWMSWVRQAPGKGLEWVATISQAGSEKDYVDSVKGRFTISRDNAKKSLYLQMNSLRAEDTAVYYCASGVYSFDYRGQGTLVTVSSGTGGGGSGGGGSGGGGSEFDIVMTQSPDSLAVSLGERATINCESSQSLLNSGNQKNYLTWYQQKPGQPPKPLIYWASTRESGVPDRFSGSGSGTDFTLTISSLQAEDVAVYYCQNDYSYPYTFGQGTKLEIKRLEIQNPDPAVYQLRDSKSSDKSVCLFTDFDSQTNVSQSKDSDVYITDKCVLDMRSMDFKSNSAVAWSNKSDFACANAFNNSIIPEDTFFPSPESSCGFTSESYQQGVLSATILYEILLGKATLYAVLVSALVLMAMVKRKDSRGRAKRSGSGVKQTLNFDLLKLAGDVESNPGPTSMDWIWRILFLVGAATGAHSGPQLQLQESGPGLVKPSETLSLTCTVSGDSISSGDYYWGWIRQPPGKGLEWIGHIYYSGVTYYNPSLKSRVTISVDTSRNQFSLKLSSVTAADTAVYYCTREDSSNWRSRGQGTLVTVSSGSGGGGSGGGGSGGGGSFEEVQLVQSGAEVKKPGESLKISCKGSGYSFTDYYMKWARQMPGKGLEWMGDIIPSNGATFYNQKFKGQVTISADKSISTTYLQWSSLKASDTAMYYCARSHLLRASWFAYWGQGTMVTVSSTREDLKNVFPPEVAVFEPSEAEISHTQKATLVCLATGFYPDHVELSWWVNGKEVHSGVCTDPQPLKEQPALNDSRYCLSSRLRVSATFWQNPRNHFRCQVQFYGLSENDEWTQDRAKPVTQIVSAEAWGRADCDVKLVEKSFETDTNLNFQNLSVIGFRILLLKVAGFNLLMTLRLWSS

SEQ ID NO: 13164 - protein, 898 aa, synthetic construct
MALPVTALLLPLALLLHAARPEVQLVESGGGLVQPGGSLRLSCAASGFSFSDFWMSWVRQAPGKGLEWVATISQAGSEKDYVDSVKGRFTISRDNAKKSLYLQMNSLRAEDTAVYYCASGVYSFDYRGQGTLVTVSSGTGGGGSGGGGSGGGGSEFDIQMTQSTSSLSASLGDRVTISCSASQGINNYLNWYQQKPDGTVELLIYYTSTLQSGVPSRFSGSGSGTDYSLTISNLEPEDIGTYYCQQYSKLPRTFGGGTKLEIKLEIQNPDPAVYQLRDSKSSDKSVCLFTDFDSQTNVSQSKDSDVYITDKCVLDMRSMDFKSNSAVAWSNKSDFACANAFNNSIIPEDTFFPSPESSCGFTSESYQQGVLSATILYEILLGKATLYAVLVSALVLMAMVKRKDSRGRAKRSGSGVKQTLNFDLLKLAGDVESNPGPTSMDWIWRILFLVGAATGAHSGPQLQLQESGPGLVKPSETLSLTCTVSGDSISSGDYYWGWIRQPPGKGLEWIGHIYYSGVTYYNPSLKSRVTISVDTSRNQFSLKLSSVTAADTAVYYCTREDSSNWRSRGQGTLVTVSSGSGGGGSGGGGSGGGGSFEQVQLQQSGSELMMPGASVKISCKATGYTFSNYWIEWVKQRPGHGLEWIGEILPGTGRTIYNEKFKGKATFTADISSNTVQMQLSSLTSEDSAVYYCARRDYYGNFYYAMDYWGQGTSVTVSSTREDLKNVFPPEVAVFEPSEAEISHTQKATLVCLATGFYPDHVELSWWVNGKEVHSGVCTDPQPLKEQPALNDSRYCLSSRLRVSATFWQNPRNHFRCQVQFYGLSENDEWTQDRAKPVTQIVSAEAWGRADCDVKLVEKSFETDTNLNFQNLSVIGFRILLLKVAGFNLLMTLRLWSS

SEQ ID NO: 13165 - protein, 893 aa, synthetic construct
MALPVTALLLPLALLLHAARPEVQLVESGGGLVQPGGSLRLSCAASGFSFSDFWMSWVRQAPGKGLEWVATISQAGSEKDYVDSVKGRFTISRDNAKKSLYLQMNSLRAEDTAVYYCASGVYSFDYRGQGTLVTVSSGTGGGGSGGGGSGGGGSEFDIQMTQSPASLSVSVGETVTITCRASENIYSNLAWYQQKQGKSPQLLVYAATNLADGVPSRFSGSGSGTQYSLKINSLQSEDFGSYYCQHFWGTWTFGGGTTLEIKLEIQNPDPAVYQLRDSKSSDKSVCLFTDFDSQTNVSQSKDSDVYITDKCVLDMRSMDFKSNSAVAWSNKSDFACANAFNNSIIPEDTFFPSPESSCGFTSESYQQGVLSATILYEILLGKATLYAVLVSALVLMAMVKRKDSRGRAKRSGSGVKQTLNFDLLKLAGDVESNPGPTSMDWIWRILFLVGAATGAHSGPQLQLQESGPGLVKPSETLSLTCTVSGDSISSGDYYWGWIRQPPGKGLEWIGHIYYSGVTYYNPSLKSRVTISVDTSRNQFSLKLSSVTAADTAVYYCTREDSSNWRSRGQGTLVTVSSGSGGGGSGGGGSGGGGSFEEVQLQQSGPELVKPGASVKMSCKASGYTFTDYYMKWMKQSHGKSLEWIGDINPNNGGTTYNQKFKGKATLTVDKSSSTAYMQLNSLTSEDSAVYYCARDYGYGYFDYWGQGTTLTVSSTREDLKNVFPPEVAVFEPSEAEISHTQKATLVCLATGFYPDHVELSWWVNGKEVHSGVCTDPQPLKEQPALNDSRYCLSSRLRVSATFWQNPRNHFRCQVQFYGLSENDEWTQDRAKPVTQIVSAEAWGRADCDVKLVEKSFETDTNLNFQNLSVIGFRILLLKVAGFNLLMTLRLWSS

SEQ ID NO: 13166 - protein, 896 aa, synthetic construct
MALPVTALLLPLALLLHAARPEVQLVESGGGLVQPGGSLRLSCAASGFSFSDFWMSWVRQAPGKGLEWVATISQAGSEKDYVDSVKGRFTISRDNAKKSLYLQMNSLRAEDTAVYYCASGVYSFDYRGQGTLVTVSSGTGGGGSGGGGSGGGGSEFEIVLTQSPGTLSLSPGERATLSCRASQSVGGYLAWYQQKPGQAPRLLIYDASNRATGIPARFSGSGSGTDFTLTISSLEPEDFAVYYCQQRNNWPPMYTFGQGTKLEIKRLEIQNPDPAVYQLRDSKSSDKSVCLFTDFDSQTNVSQSKDSDVYITDKCVLDMRSMDFKSNSAVAWSNKSDFACANAFNNSIIPEDTFFPSPESSCGFTSESYQQGVLSATILYEILLGKATLYAVLVSALVLMAMVKRKDSRGRAKRSGSGVKQTLNFDLLKLAGDVESNPGPTSMDWIWRILFLVGAATGAHSGPQLQLQESGPGLVKPSETLSLTCTVSGDSISSGDYYWGWIRQPPGKGLEWIGHIYYSGVTYYNPSLKSRVTISVDTSRNQFSLKLSSVTAADTAVYYCTREDSSNWRSRGQGTLVTVSSGSGGGGSGGGGSGGGGSFEQVQLVQSGAEVKKPGSSVKVSCKASGGTFSSYAISWVRQAPGQGLEWMGGIIPILGTANYAQKFQGRVTITADESTSTAYMELSSLRSEDTAVYYCARWGGGAFDIWGQGTMVTVSSTREDLKNVFPPEVAVFEPSEAEISHTQKATLVCLATGFYPDHVELSWWVNGKEVHSGVCTDPQPLKEQPALNDSRYCLSSRLRVSATFWQNPRNHFRCQVQFYGLSENDEWTQDRAKPVTQIVSAEAWGRADCDVKLVEKSFETDTNLNFQNLSVIGFRILLLKVAGFNLLMTLRLWSS

SEQ ID NO: 13167 - protein, 891 aa, synthetic construct
MALPVTALLLPLALLLHAARPEVQLVESGGGLVQPGGSLRLSCAASGFSFSDFWMSWVRQAPGKGLEWVATISQAGSEKDYVDSVKGRFTISRDNAKKSLYLQMNSLRAEDTAVYYCASGVYSFDYRGQGTLVTVSSGTGGGGSGGGGSGGGGSEFQIVLTQSPALMSASPGEKVTMTCSASSSVRYMYWYQQKPRSSPKPWIHLTSNLASGVPARFSGSGSGTSYSLTISSMEAEDAATYYCQQWSSHPFTFGSGTKLEIKLEIQNPDPAVYQLRDSKSSDKSVCLFTDFDSQTNVSQSKDSDVYITDKCVLDMRSMDFKSNSAVAWSNKSDFACANAFNNSIIPEDTFFPSPESSCGFTSESYQQGVLSATILYEILLGKATLYAVLVSALVLMAMVKRKDSRGRAKRSGSGVKQTLNFDLLKLAGDVESNPGPTSMDWIWRILFLVGAATGAHSGPQLQLQESGPGLVKPSETLSLTCTVSGDSISSGDYYWGWIRQPPGKGLEWIGHIYYSGVTYYNPSLKSRVTISVDTSRNQFSLKLSSVTAADTAVYYCTREDSSNWRSRGQGTLVTVSSGSGGGGSGGGGSGGGGSFEDVQLQESGPGLVKPSQSLSLTCTVTGFSITSDYSWNWIRQFPGNKLEWMGYISYSGHTSYNPSLESRISITRDTSKNQFFLQLNSVTTEDTATYYCTRGNWDVVYWGQGTLVTVSATREDLKNVFPPEVAVFEPSEAEISHTQKATLVCLATGFYPDHVELSWWVNGKEVHSGVCTDPQPLKEQPALNDSRYCLSSRLRVSATFWQNPRNHFRCQVQFYGLSENDEWTQDRAKPVTQIVSAEAWGRADCDVKLVEKSFETDTNLNFQNLSVIGFRILLLKVAGFNLLMTLRLWSS

SEQ ID NO: 13168 - protein, 901 aa, synthetic construct
MALPVTALLLPLALLLHAARPEVQLVESGGGLVQPGGSLRLSCAASGFSFSDFWMSWVRQAPGKGLEWVATISQAGSEKDYVDSVKGRFTISRDNAKKSLYLQMNSLRAEDTAVYYCASGVYSFDYRGQGTLVTVSSGTGGGGSGGGGSGGGGSEFDVVMTQSPLSLPVTLGQPASISCRSSQSIVHSDGNTYLEWYQQRPGQSPRRLIYKVSNRFSGVPDRFSGSGSGTDFTLKISRVEAEDVGVYYCFQGSHAPWTFGGGTKVEIKLEIQNPDPAVYQLRDSKSSDKSVCLFTDFDSQTNVSQSKDSDVYITDKCVLDMRSMDFKSNSAVAWSNKSDFACANAFNNSIIPEDTFFPSPESSCGFTSESYQQGVLSATILYEILLGKATLYAVLVSALVLMAMVKRKDSRGRAKRSGSGVKQTLNFDLLKLAGDVESNPGPTSMDWIWRILFLVGAATGAHSGPQLQLQESGPGLVKPSETLSLTCTVSGDSISSGDYYWGWIRQPPGKGLEWIGHIYYSGVTYYNPSLKSRVTISVDTSRNQFSLKLSSVTAADTAVYYCTREDSSNWRSRGQGTLVTVSSGSGGGGSGGGGSGGGGSFEEVQLVESGGGLVQPGGSLRLSCAASGFTFSSYGMHWVRQAPGKGLEWVAYITTRSSTIYYADSVKGRFTISRDNAKNSLYLQMNSLRAEDTAVYYCTREPLTGYYAMDYWGQGTSVTVSSTREDLKNVFPPEVAVFEPSEAEISHTQKATLVCLATGFYPDHVELSWWVNGKEVHSGVCTDPQPLKEQPALNDSRYCLSSRLRVSATFWQNPRNHFRCQVQFYGLSENDEWTQDRAKPVTQIVSAEAWGRADCDVKLVEKSFETDTNLNFQNLSVIGFRILLLKVAGFNLLMTLRLWSS

SEQ ID NO: 13169 - protein, 893 aa, synthetic construct
MALPVTALLLPLALLLHAARPEVQLVESGGGLVQPGGSLRLSCAASGFSFSDFWMSWVRQAPGKGLEWVATISQAGSEKDYVDSVKGRFTISRDNAKKSLYLQMNSLRAEDTAVYYCASGVYSFDYRGQGTLVTVSSGTGGGGSGGGGSGGGGSEFDIQMTQSPSSLSASVGDRVTITCRASQSISLWLNWYQQKPGKAPKLLIYAASTLQSGVPSRFSGSGSGTDFTLTISSLQPEDFATYYCQQYYTSPYTFGQGTKVEIKRLEIQNPDPAVYQLRDSKSSDKSVCLFTDFDSQTNVSQSKDSDVYITDKCVLDMRSMDFKSNSAVAWSNKSDFACANAFNNSIIPEDTFFPSPESSCGFTSESYQQGVLSATILYEILLGKATLYAVLVSALVLMAMVKRKDSRGRAKRSGSGVKQTLNFDLLKLAGDVESNPGPTSMDWIWRILFLVGAATGAHSGPQLQLQESGPGLVKPSETLSLTCTVSGDSISSGDYYWGWIRQPPGKGLEWIGHIYYSGVTYYNPSLKSRVTISVDTSRNQFSLKLSSVTAADTAVYYCTREDSSNWRSRGQGTLVTVSSGSGGGGSGGGGSGGGGSFEQVQLLESGGGLVQPGGSLRLSCAASGFTFSSYAMSWVRQAPGKGLEWVSVIRSSGSSTYYADSVKGRFTISRDNSKNTLYLQMNSLRAEDTAVYYCARGGGYFDYWGQGTLVTVSSTREDLKNVFPPEVAVFEPSEAEISHTQKATLVCLATGFYPDHVELSWWVNGKEVHSGVCTDPQPLKEQPALNDSRYCLSSRLRVSATFWQNPRNHFRCQVQFYGLSENDEWTQDRAKPVTQIVSAEAWGRADCDVKLVEKSFETDTNLNFQNLSVIGFRILLLKVAGFNLLMTLRLWSS

SEQ ID NO: 13170 - protein, 896 aa, synthetic construct
MALPVTALLLPLALLLHAARPEVQLVESGGGLVQPGGSLRLSCAASGFSFSDFWMSWVRQAPGKGLEWVATISQAGSEKDYVDSVKGRFTISRDNAKKSLYLQMNSLRAEDTAVYYCASGVYSFDYRGQGTLVTVSSGTGGGGSGGGGSGGGGSEFDIQMTQSPSSLSASVGDRVTITCRASQSISSYLNWYQQKPGKAPKLLIYAVSTLQSGVPSRFSGSGSGTDFTLTISSLQPEDFATYYCQQSGTFPPTTFGQGTKVEIKRLEIQNPDPAVYQLRDSKSSDKSVCLFTDFDSQTNVSQSKDSDVYITDKCVLDMRSMDFKSNSAVAWSNKSDFACANAFNNSIIPEDTFFPSPESSCGFTSESYQQGVLSATILYEILLGKATLYAVLVSALVLMAMVKRKDSRGRAKRSGSGVKQTLNFDLLKLAGDVESNPGPTSMDWIWRILFLVGAATGAHSGPQLQLQESGPGLVKPSETLSLTCTVSGDSISSGDYYWGWIRQPPGKGLEWIGHIYYSGVTYYNPSLKSRVTISVDTSRNQFSLKLSSVTAADTAVYYCTREDSSNWRSRGQGTLVTVSSGSGGGGSGGGGSGGGGSFEQVQLLESGGGLVQPGGSLRLSCAASGFTFSSHGMHWVRQAPGKGLEWVSVISGSGSNTGYADSVKGRFTISRDNSKNTLYLQMNSLRAEDTAVYYCARQWGSYAFDSWGQGTLVTVSSTREDLKNVFPPEVAVFEPSEAEISHTQKATLVCLATGFYPDHVELSWWVNGKEVHSGVCTDPQPLKEQPALNDSRYCLSSRLRVSATFWQNPRNHFRCQVQFYGLSENDEWTQDRAKPVTQIVSAEAWGRADCDVKLVEKSFETDTNLNFQNLSVIGFRILLLKVAGFNLLMTLRLWSS

SEQ ID NO: 13171 - protein, 906 aa, synthetic construct
MALPVTALLLPLALLLHAARPEVQLVESGGGLVQPGGSLRLSCAASGFSFSDFWMSWVRQAPGKGLEWVATISQAGSEKDYVDSVKGRFTISRDNAKKSLYLQMNSLRAEDTAVYYCASGVYSFDYRGQGTLVTVSSGTGGGGSGGGGSGGGGSEFDIVMSQSPSSLAVSVGEKVTMSCKSSQSLLHSSNQKNYLAWYQQKPGQSPKVLIYWASTRESGVPDRFTGSGSGTDFTLTITSVKSEDLAVYYCQQYYSYPWTFGGGTRLEIKRLEIQNPDPAVYQLRDSKSSDKSVCLFTDFDSQTNVSQSKDSDVYITDKCVLDMRSMDFKSNSAVAWSNKSDFACANAFNNSIIPEDTFFPSPESSCGFTSESYQQGVLSATILYEILLGKATLYAVLVSALVLMAMVKRKDSRGRAKRSGSGVKQTLNFDLLKLAGDVESNPGPTSMDWIWRILFLVGAATGAHSGPQLQLQESGPGLVKPSETLSLTCTVSGDSISSGDYYWGWIRQPPGKGLEWIGHIYYSGVTYYNPSLKSRVTISVDTSRNQFSLKLSSVTAADTAVYYCTREDSSNWRSRGQGTLVTVSSGSGGGGSGGGGSGGGGSFEEVQLQQSVAELVKPGASVKMSCKVSGYTLTDHTIHWMKQRPEQGLEWIGYIYPRDGITGYNEKFKGKATLTADTSSSTAYMQLNSLTSEDSAVYFCARWGYSYRNYAYYYDYWGQGTTLTVSSTREDLKNVFPPEVAVFEPSEAEISHTQKATLVCLATGFYPDHVELSWWVNGKEVHSGVCTDPQPLKEQPALNDSRYCLSSRLRVSATFWQNPRNHFRCQVQFYGLSENDEWTQDRAKPVTQIVSAEAWGRADCDVKLVEKSFETDTNLNFQNLSVIGFRILLLKVAGFNLLMTLRLWSS

SEQ ID NO: 13172 - protein, 903 aa, synthetic construct
MALPVTALLLPLALLLHAARPEVQLVESGGGLVQPGGSLRLSCAASGFSFSDFWMSWVRQAPGKGLEWVATISQAGSEKDYVDSVKGRFTISRDNAKKSLYLQMNSLRAEDTAVYYCASGVYSFDYRGQGTLVTVSSGTGGGGSGGGGSGGGGSEFEIVLTQSPGTLSLSPGERATLSCRASQSVSSSYLAWYQQKPGQAPRLLIYGTSSRATGIPDRFSGSGSGTDFTLTISRLEPEDFAVYYCQQYGSSPFTFGGGTKVEIKRLEIQNPDPAVYQLRDSKSSDKSVCLFTDFDSQTNVSQSKDSDVYITDKCVLDMRSMDFKSNSAVAWSNKSDFACANAFNNSIIPEDTFFPSPESSCGFTSESYQQGVLSATILYEILLGKATLYAVLVSALVLMAMVKRKDSRGRAKRSGSGVKQTLNFDLLKLAGDVESNPGPTSMDWIWRILFLVGAATGAHSGPQLQLQESGPGLVKPSETLSLTCTVSGDSISSGDYYWGWIRQPPGKGLEWIGHIYYSGVTYYNPSLKSRVTISVDTSRNQFSLKLSSVTAADTAVYYCTREDSSNWRSRGQGTLVTVSSGSGGGGSGGGGSGGGGSFEQVQLQESGPGLAKPSETLSLTCTVSGDSITSYYWSWIRQPPGKGLEWIGYIYYSGSTNYNPSLKSRVTISVDTSKNQFSLKLSSVTAADTAVYYCARDQRRIAAAGTHFYGMDVWGQGTTVTVSSTREDLKNVFPPEVAVFEPSEAEISHTQKATLVCLATGFYPDHVELSWWVNGKEVHSGVCTDPQPLKEQPALNDSRYCLSSRLRVSATFWQNPRNHFRCQVQFYGLSENDEWTQDRAKPVTQIVSAEAWGRADCDVKLVEKSFETDTNLNFQNLSVIGFRILLLKVAGFNLLMTLRLWSS

SEQ ID NO: 13173 - protein, 895 aa, synthetic construct
MALPVTALLLPLALLLHAARPEVQLVESGGGLVQPGGSLRLSCAASGFSFSDFWMSWVRQAPGKGLEWVATISQAGSEKDYVDSVKGRFTISRDNAKKSLYLQMNSLRAEDTAVYYCASGVYSFDYRGQGTLVTVSSGTGGGGSGGGGSGGGGSEFDILLTQSPVILSVSPGERVSFSCRASQSIGTNIHWYQQRTNGSPRLLIKYASESISGIPSRFSGSGSGTDFTLSINSVESEDIADYYCQQNNNWPTTFGAGTKLELKLEIQNPDPAVYQLRDSKSSDKSVCLFTDFDSQTNVSQSKDSDVYITDKCVLDMRSMDFKSNSAVAWSNKSDFACANAFNNSIIPEDTFFPSPESSCGFTSESYQQGVLSATILYEILLGKATLYAVLVSALVLMAMVKRKDSRGRAKRSGSGVKQTLNFDLLKLAGDVESNPGPTSMDWIWRILFLVGAATGAHSGPQLQLQESGPGLVKPSETLSLTCTVSGDSISSGDYYWGWIRQPPGKGLEWIGHIYYSGVTYYNPSLKSRVTISVDTSRNQFSLKLSSVTAADTAVYYCTREDSSNWRSRGQGTLVTVSSGSGGGGSGGGGSGGGGSFEQVQLKQSGPGLVQPSQSLSITCTVSGFSLTNYGVHWVRQSPGKGLEWLGVIWSGGNTDYNTPFTSRLSINKDNSKSQVFFKMNSLQSNDTAIYYCARALTYYDYEFAYWGQGTLVTVSATREDLKNVFPPEVAVFEPSEAEISHTQKATLVCLATGFYPDHVELSWWVNGKEVHSGVCTDPQPLKEQPALNDSRYCLSSRLRVSATFWQNPRNHFRCQVQFYGLSENDEWTQDRAKPVTQIVSAEAWGRADCDVKLVEKSFETDTNLNFQNLSVIGFRILLLKVAGFNLLMTLRLWSS

SEQ ID NO: 13174 - protein, 888 aa, synthetic construct
MALPVTALLLPLALLLHAARPEVQLVESGGGLVQPGGSLRLSCAASGFSFSDFWMSWVRQAPGKGLEWVATISQAGSEKDYVDSVKGRFTISRDNAKKSLYLQMNSLRAEDTAVYYCASGVYSFDYRGQGTLVTVSSGTGGGGSGGGGSGGGGSEFMTQSPKFLLVSAGDRVTLTCKASQSVNNDVYWYQQEPGQSPKLLIYWASTRESGVPDRFTGSGSGTDFTLTISSVQAEDLAVYYCKQSYNLYTFGGGTKLEIKRLEIQNPDPAVYQLRDSKSSDKSVCLFTDFDSQTNVSQSKDSDVYITDKCVLDMRSMDFKSNSAVAWSNKSDFACANAFNNSIIPEDTFFPSPESSCGFTSESYQQGVLSATILYEILLGKATLYAVLVSALVLMAMVKRKDSRGRAKRSGSGVKQTLNFDLLKLAGDVESNPGPTSMDWIWRILFLVGAATGAHSGPQLQLQESGPGLVKPSETLSLTCTVSGDSISSGDYYWGWIRQPPGKGLEWIGHIYYSGVTYYNPSLKSRVTISVDTSRNQFSLKLSSVTAADTAVYYCTREDSSNWRSRGQGTLVTVSSGSGGGGSGGGGSGGGGSFEESGRGLVQPGGSRKLSCAASGFTFSTSGMHWVRQAPEKGLEWVAYISSGSTTIYHADTVKGRFTISRDNPKNTLFLQMTSLRSEDTAMYYCCARSGQFGNYFDYWGQGTTLTVSSTREDLKNVFPPEVAVFEPSEAEISHTQKATLVCLATGFYPDHVELSWWVNGKEVHSGVCTDPQPLKEQPALNDSRYCLSSRLRVSATFWQNPRNHFRCQVQFYGLSENDEWTQDRAKPVTQIVSAEAWGRADCDVKLVEKSFETDTNLNFQNLSVIGFRILLLKVAGFNLLMTLRLWSS

SEQ ID NO: 13175 - protein, 893 aa, synthetic construct
MALPVTALLLPLALLLHAARPEVQLVESGGGLVQPGGSLRLSCAASGFSFSDFWMSWVRQAPGKGLEWVATISQAGSEKDYVDSVKGRFTISRDNAKKSLYLQMNSLRAEDTAVYYCASGVYSFDYRGQGTLVTVSSGTGGGGSGGGGSGGGGSEFQSPSSLAVSAGEKVTMSCKSSQSLLNSRTRKNYLAWYQQKPGQSPKLLIYWASTRESGVPDRFTGSGSGTDFTLTISSVQAEDLAVYYCKQSNLYTFGGGTKLEIKLEIQNPDPAVYQLRDSKSSDKSVCLFTDFDSQTNVSQSKDSDVYITDKCVLDMRSMDFKSNSAVAWSNKSDFACANAFNNSIIPEDTFFPSPESSCGFTSESYQQGVLSATILYEILLGKATLYAVLVSALVLMAMVKRKDSRGRAKRSGSGVKQTLNFDLLKLAGDVESNPGPTSMDWIWRILFLVGAATGAHSGPQLQLQESGPGLVKPSETLSLTCTVSGDSISSGDYYWGWIRQPPGKGLEWIGHIYYSGVTYYNPSLKSRVTISVDTSRNQFSLKLSSVTAADTAVYYCTREDSSNWRSRGQGTLVTVSSGSGGGGSGGGGSGGGGSFEQVQLEESGPELVKPGASVKLSCKASGYTFTEYIIHWVKQRSGQGLEWIGWFYPGSGSIKYNEKFKDKATLTADKSSSTVYMELSGLTSEDSAVYFCARHDGYSYFDYWGQGTTLTVSSTREDLKNVFPPEVAVFEPSEAEISHTQKATLVCLATGFYPDHVELSWWVNGKEVHSGVCTDPQPLKEQPALNDSRYCLSSRLRVSATFWQNPRNHFRCQVQFYGLSENDEWTQDRAKPVTQIVSAEAWGRADCDVKLVEKSFETDTNLNFQNLSVIGFRILLLKVAGFNLLMTLRLWSS

SEQ ID NO: 13176 - protein, 896 aa, synthetic construct
MALPVTALLLPLALLLHAARPEVQLVESGGGLVQPGGSLRLSCAASGFSFSDFWMSWVRQAPGKGLEWVATISQAGSEKDYVDSVKGRFTISRDNAKKSLYLQMNSLRAEDTAVYYCASGVYSFDYRGQGTLVTVSSGTGGGGSGGGGSGGGGSEFDIQMTQSPSSLSASLGERVSLTCRATQELSGYLSWLQQKPDGTIKRLIYAASTLDSGVPKRFSGNRSGSDYSLTISSLESEDFADYYCLQYAIYPYTFGGGTKLEIKLEIQNPDPAVYQLRDSKSSDKSVCLFTDFDSQTNVSQSKDSDVYITDKCVLDMRSMDFKSNSAVAWSNKSDFACANAFNNSIIPEDTFFPSPESSCGFTSESYQQGVLSATILYEILLGKATLYAVLVSALVLMAMVKRKDSRGRAKRSGSGVKQTLNFDLLKLAGDVESNPGPTSMDWIWRILFLVGAATGAHSGPQLQLQESGPGLVKPSETLSLTCTVSGDSISSGDYYWGWIRQPPGKGLEWIGHIYYSGVTYYNPSLKSRVTISVDTSRNQFSLKLSSVTAADTAVYYCTREDSSNWRSRGQGTLVTVSSGSGGGGSGGGGSGGGGSFEEVQLQQSGPELVKPGASVKMSCKASGYTFTSYFIHWVKQKPGQGLEWIGFINPYNDGSKYNEKFKGKATLTSDKSSSTAYMELSSLTSEDSAVYYCTRDDGYYGYAMDYWGQGTSVTVSSTREDLKNVFPPEVAVFEPSEAEISHTQKATLVCLATGFYPDHVELSWWVNGKEVHSGVCTDPQPLKEQPALNDSRYCLSSRLRVSATFWQNPRNHFRCQVQFYGLSENDEWTQDRAKPVTQIVSAEAWGRADCDVKLVEKSFETDTNLNFQNLSVIGFRILLLKVAGFNLLMTLRLWSS

SEQ ID NO: 13177 - protein, 901 aa, synthetic construct
MALPVTALLLPLALLLHAARPEVQLVESGGGLVQPGGSLRLSCAASGFSFSDFWMSWVRQAPGKGLEWVATISQAGSEKDYVDSVKGRFTISRDNAKKSLYLQMNSLRAEDTAVYYCASGVYSFDYRGQGTLVTVSSGTGGGGSGGGGSGGGGSEFDTIVLTQSPASLAVSLGQRATISCRASESVDSYGNSFMHWYQQKPGQPPKLLIYLASNLESGVPARFSGSGSRTDFTLTIDPVEADDAATYYCQQNNYDPWTFGGGTKLEIKLEIQNPDPAVYQLRDSKSSDKSVCLFTDFDSQTNVSQSKDSDVYITDKCVLDMRSMDFKSNSAVAWSNKSDFACANAFNNSIIPEDTFFPSPESSCGFTSESYQQGVLSATILYEILLGKATLYAVLVSALVLMAMVKRKDSRGRAKRSGSGVKQTLNFDLLKLAGDVESNPGPTSMDWIWRILFLVGAATGAHSGPQLQLQESGPGLVKPSETLSLTCTVSGDSISSGDYYWGWIRQPPGKGLEWIGHIYYSGVTYYNPSLKSRVTISVDTSRNQFSLKLSSVTAADTAVYYCTREDSSNWRSRGQGTLVTVSSGSGGGGSGGGGSGGGGSFEEVQLQQSGPELVKPGASVKMSCKASGYTFTSYVMHWVKQKPGQGLEWIGYINPYNDGTKYNEKFKGKATLTSDTSSSTAYMELNSLTSEDSAVYFCARPIYFDNDYFDYWGQGTTLKVSSTREDLKNVFPPEVAVFEPSEAEISHTQKATLVCLATGFYPDHVELSWWVNGKEVHSGVCTDPQPLKEQPALNDSRYCLSSRLRVSATFWQNPRNHFRCQVQFYGLSENDEWTQDRAKPVTQIVSAEAWGRADCDVKLVEKSFETDTNLNFQNLSVIGFRILLLKVAGFNLLMTLRLWSS

SEQ ID NO: 13178 - protein, 896 aa, synthetic construct
MALPVTALLLPLALLLHAARPEVQLVESGGGLVQPGGSLRLSCAASGFSFSDFWMSWVRQAPGKGLEWVATISQAGSEKDYVDSVKGRFTISRDNAKKSLYLQMNSLRAEDTAVYYCASGVYSFDYRGQGTLVTVSSGTGGGGSGGGGSGGGGSEFDIQMTQSPSSLSASVGDRVTITCKASQDVGIAVAWYQQKPGKVPKLLIYWASTRHTGVPDRFSGSGSGTDFTLTISSLQPEDVATYYCQQYSSYPYTFGQGTKVEIKRLEIQNPDPAVYQLRDSKSSDKSVCLFTDFDSQTNVSQSKDSDVYITDKCVLDMRSMDFKSNSAVAWSNKSDFACANAFNNSIIPEDTFFPSPESSCGFTSESYQQGVLSATILYEILLGKATLYAVLVSALVLMAMVKRKDSRGRAKRSGSGVKQTLNFDLLKLAGDVESNPGPTSMDWIWRILFLVGAATGAHSGPQLQLQESGPGLVKPSETLSLTCTVSGDSISSGDYYWGWIRQPPGKGLEWIGHIYYSGVTYYNPSLKSRVTISVDTSRNQFSLKLSSVTAADTAVYYCTREDSSNWRSRGQGTLVTVSSGSGGGGSGGGGSGGGGSFEEVQLVESGGGLVQPGGSLRLSCAASGFDFSRYWMSWVRQAPGKGLEWIGEINPDSSTINYAPSLKDKFIISRDNAKNSLYLQMNSLRAEDTAVYYCARPDGNYWYFDVWGQGTLVTVSSTREDLKNVFPPEVAVFEPSEAEISHTQKATLVCLATGFYPDHVELSWWVNGKEVHSGVCTDPQPLKEQPALNDSRYCLSSRLRVSATFWQNPRNHFRCQVQFYGLSENDEWTQDRAKPVTQIVSAEAWGRADCDVKLVEKSFETDTNLNFQNLSVIGFRILLLKVAGFNLLMTLRLWSS

SEQ ID NO: 13179 - protein, 896 aa, synthetic construct
MALPVTALLLPLALLLHAARPEVQLVESGGGLVQPGGSLRLSCAASGFSFSDFWMSWVRQAPGKGLEWVATISQAGSEKDYVDSVKGRFTISRDNAKKSLYLQMNSLRAEDTAVYYCASGVYSFDYRGQGTLVTVSSGTGGGGSGGGGSGGGGSEFDIVMTQSQKSMSTSVGDRVSITCKASQDVITGVAWYQQKPGQSPKLLIYSASYRYTGVPDRFTGSGSGTDFTFTISNVQAEDLAVYYCQQHYSTPLTFGAGTKLELKLEIQNPDPAVYQLRDSKSSDKSVCLFTDFDSQTNVSQSKDSDVYITDKCVLDMRSMDFKSNSAVAWSNKSDFACANAFNNSIIPEDTFFPSPESSCGFTSESYQQGVLSATILYEILLGKATLYAVLVSALVLMAMVKRKDSRGRAKRSGSGVKQTLNFDLLKLAGDVESNPGPTSMDWIWRILFLVGAATGAHSGPQLQLQESGPGLVKPSETLSLTCTVSGDSISSGDYYWGWIRQPPGKGLEWIGHIYYSGVTYYNPSLKSRVTISVDTSRNQFSLKLSSVTAADTAVYYCTREDSSNWRSRGQGTLVTVSSGSGGGGSGGGGSGGGGSFEQVQLQQPGAELVRPGASVKLSCKASGYSFTTYWMNWVKQRPGQGLEWIGMIHPSDSETRLNQKFKDKATLTVDKSSSTAYMQLSSPTSEDSAVYYCARSTMIATRAMDYWGQGTSVTVSSTREDLKNVFPPEVAVFEPSEAEISHTQKATLVCLATGFYPDHVELSWWVNGKEVHSGVCTDPQPLKEQPALNDSRYCLSSRLRVSATFWQNPRNHFRCQVQFYGLSENDEWTQDRAKPVTQIVSAEAWGRADCDVKLVEKSFETDTNLNFQNLSVIGFRILLLKVAGFNLLMTLRLWSS

SEQ ID NO: 13180 - protein, 902 aa, synthetic construct
MALPVTALLLPLALLLHAARPEVQLVESGGGLVQPGGSLRLSCAASGFSFSDFWMSWVRQAPGKGLEWVATISQAGSEKDYVDSVKGRFTISRDNAKKSLYLQMNSLRAEDTAVYYCASGVYSFDYRGQGTLVTVSSGTGGGGSGGGGSGGGGSEFQSVLTQPPSVSGAPGQRVTISCTGSGSNIGAPYDVSWYQQLPGTAPKLLIYHNNKRPSGVPDRFSGSKSGTSASLAITGLQAEDEADYYCATVEAGLSGSVFGGGTKLTVLGALEIQNPDPAVYQLRDSKSSDKSVCLFTDFDSQTNVSQSKDSDVYITDKCVLDMRSMDFKSNSAVAWSNKSDFACANAFNNSIIPEDTFFPSPESSCGFTSESYQQGVLSATILYEILLGKATLYAVLVSALVLMAMVKRKDSRGRAKRSGSGVKQTLNFDLLKLAGDVESNPGPTSMDWIWRILFLVGAATGAHSGPQLQLQESGPGLVKPSETLSLTCTVSGDSISSGDYYWGWIRQPPGKGLEWIGHIYYSGVTYYNPSLKSRVTISVDTSRNQFSLKLSSVTAADTAVYYCTREDSSNWRSRGQGTLVTVSSGSGGGGSGGGGSGGGGSFEQVQLVQSGAEVKKPGASVKVSCKVSGYTLTELSIHWVRQAPGKGLEWMGGFDPEENEIVYAQRFQGRVTMTEDTSTDTAYMELSSLRSEDTAVYYCAIVGSFSPLTLGLWGQGTMVTVSSTREDLKNVFPPEVAVFEPSEAEISHTQKATLVCLATGFYPDHVELSWWVNGKEVHSGVCTDPQPLKEQPALNDSRYCLSSRLRVSATFWQNPRNHFRCQVQFYGLSENDEWTQDRAKPVTQIVSAEAWGRADCDVKLVEKSFETDTNLNFQNLSVIGFRILLLKVAGFNLLMTLRLWSS

SEQ ID NO: 13181 - protein, 902 aa, synthetic construct
MALPVTALLLPLALLLHAARPEVQLVESGGGLVQPGGSLRLSCAASGFSFSDFWMSWVRQAPGKGLEWVATISQAGSEKDYVDSVKGRFTISRDNAKKSLYLQMNSLRAEDTAVYYCASGVYSFDYRGQGTLVTVSSGTGGGGSGGGGSGGGGSEFQSVLTQPPSVSGAPGQRVTISCTGSGSNIGAPYDVSWYQQLPGTAPKLLIYHNNKRPSGVPDRFSGSKSGTSASLAITGLQAEDEADYYCQSYDSSSISTIFGGGTKLTVLGALEIQNPDPAVYQLRDSKSSDKSVCLFTDFDSQTNVSQSKDSDVYITDKCVLDMRSMDFKSNSAVAWSNKSDFACANAFNNSIIPEDTFFPSPESSCGFTSESYQQGVLSATILYEILLGKATLYAVLVSALVLMAMVKRKDSRGRAKRSGSGVKQTLNFDLLKLAGDVESNPGPTSMDWIWRILFLVGAATGAHSGPQLQLQESGPGLVKPSETLSLTCTVSGDSISSGDYYWGWIRQPPGKGLEWIGHIYYSGVTYYNPSLKSRVTISVDTSRNQFSLKLSSVTAADTAVYYCTREDSSNWRSRGQGTLVTVSSGSGGGGSGGGGSGGGGSFEQVQLVQSGAEVKKPGASVKVSCKVSGYTLTELSIHWVRQAPGKGLEWMGGFDPEENEIVYAQRFQGRVTMTEDTSTDTAYMELSSLRSEDTAVYYCAIVGSFSGIAYRPWGQGTMVTVSSTREDLKNVFPPEVAVFEPSEAEISHTQKATLVCLATGFYPDHVELSWWVNGKEVHSGVCTDPQPLKEQPALNDSRYCLSSRLRVSATFWQNPRNHFRCQVQFYGLSENDEWTQDRAKPVTQIVSAEAWGRADCDVKLVEKSFETDTNLNFQNLSVIGFRILLLKVAGFNLLMTLRLWSS

SEQ ID NO: 13182 - protein, 890 aa, synthetic construct
MALPVTALLLPLALLLHAARPEVQLVESGGGLVQPGGSLRLSCAASGFSFSDFWMSWVRQAPGKGLEWVATISQAGSEKDYVDSVKGRFTISRDNAKKSLYLQMNSLRAEDTAVYYCASGVYSFDYRGQGTLVTVSSGTGGGGSGGGGSGGGGSEFDIQMTQSPSSLSASVGDRVTITCRASQGIRNNLAWYQQKPGKAPKRLIYAASNLQSGVPSRFTGSGSGTEFTLIVSSLQPEDFATYYCLQHHSYPLTSGGGTKVELEIQNPDPAVYQLRDSKSSDKSVCLFTDFDSQTNVSQSKDSDVYITDKCVLDMRSMDFKSNSAVAWSNKSDFACANAFNNSIIPEDTFFPSPESSCGFTSESYQQGVLSATILYEILLGKATLYAVLVSALVLMAMVKRKDSRGRAKRSGSGVKQTLNFDLLKLAGDVESNPGPTSMDWIWRILFLVGAATGAHSGPQLQLQESGPGLVKPSETLSLTCTVSGDSISSGDYYWGWIRQPPGKGLEWIGHIYYSGVTYYNPSLKSRVTISVDTSRNQFSLKLSSVTAADTAVYYCTREDSSNWRSRGQGTLVTVSSGSGGGGSGGGGSGGGGSFEEVQVLESGGGLVQPGGSLRLSCAASGFTFSSYAMSWVRQAPGKGLEWVSAISGSGGSTNYADSVKGRFTISRDNSKNTLYLQMNSLRAEDTAVYYCAGSSGWSEYWGQGTLVTVSSTREDLKNVFPPEVAVFEPSEAEISHTQKATLVCLATGFYPDHVELSWWVNGKEVHSGVCTDPQPLKEQPALNDSRYCLSSRLRVSATFWQNPRNHFRCQVQFYGLSENDEWTQDRAKPVTQIVSAEAWGRADCDVKLVEKSFETDTNLNFQNLSVIGFRILLLKVAGFNLLMTLRLWSS

SEQ ID NO: 13183 - protein, 896 aa, synthetic construct
MALPVTALLLPLALLLHAARPEVQLVESGGGLVQPGGSLRLSCAASGFSFSDFWMSWVRQAPGKGLEWVATISQAGSEKDYVDSVKGRFTISRDNAKKSLYLQMNSLRAEDTAVYYCASGVYSFDYRGQGTLVTVSSGTGGGGSGGGGSGGGGSEFDEIQLVQSGAEVKKPGESLRISCKGSGFNIEDYYIHWVRQMPGKGLEWMGRIDPENDETKYGPIFQGHVTISADTSINTVYLQWSSLKASDTAMYYCAFRGGVYWGQGTTVTVSSLEIQNPDPAVYQLRDSKSSDKSVCLFTDFDSQTNVSQSKDSDVYITDKCVLDMRSMDFKSNSAVAWSNKSDFACANAFNNSIIPEDTFFPSPESSCGFTSESYQQGVLSATILYEILLGKATLYAVLVSALVLMAMVKRKDSRGRAKRSGSGVKQTLNFDLLKLAGDVESNPGPTSMDWIWRILFLVGAATGAHSGPQLQLQESGPGLVKPSETLSLTCTVSGDSISSGDYYWGWIRQPPGKGLEWIGHIYYSGVTYYNPSLKSRVTISVDTSRNQFSLKLSSVTAADTAVYYCTREDSSNWRSRGQGTLVTVSSGSGGGGSGGGGSGGGGSFEDVVMTQSPDSLAVSLGERATINCKSSQSLLDSDGKTYLNWLQQKPGQPPKRLISLVSKLDSGVPDRFSGSGSGTDFTLTISSLQAEDVAVYYCWQGTHFPGTFGGGTKVEIKTREDLKNVFPPEVAVFEPSEAEISHTQKATLVCLATGFYPDHVELSWWVNGKEVHSGVCTDPQPLKEQPALNDSRYCLSSRLRVSATFWQNPRNHFRCQVQFYGLSENDEWTQDRAKPVTQIVSAEAWGRADCDVKLVEKSFETDTNLNFQNLSVIGFRILLLKVAGFNLLMTLRLWSS

SEQ ID NO: 13184 - protein, 903 aa, synthetic construct
MALPVTALLLPLALLLHAARPEVQLVESGGGLVQPGGSLRLSCAASGFSFSDFWMSWVRQAPGKGLEWVATISQAGSEKDYVDSVKGRFTISRDNAKKSLYLQMNSLRAEDTAVYYCASGVYSFDYRGQGTLVTVSSGTGGGGSGGGGSGGGGSEFDELVMTQSPSSLTVTAGEKVTMSCKSSQSLLNSGNQKNYLTWYQQKPGQPPKLLIYWASTRESGVPDRFTGSGSGTDFTLTISSVQAEDLAVYYCQNDYSYPLTFGAGTKLEIKLEIQNPDPAVYQLRDSKSSDKSVCLFTDFDSQTNVSQSKDSDVYITDKCVLDMRSMDFKSNSAVAWSNKSDFACANAFNNSIIPEDTFFPSPESSCGFTSESYQQGVLSATILYEILLGKATLYAVLVSALVLMAMVKRKDSRGRAKRSGSGVKQTLNFDLLKLAGDVESNPGPTSMDWIWRILFLVGAATGAHSGPQLQLQESGPGLVKPSETLSLTCTVSGDSISSGDYYWGWIRQPPGKGLEWIGHIYYSGVTYYNPSLKSRVTISVDTSRNQFSLKLSSVTAADTAVYYCTREDSSNWRSRGQGTLVTVSSGSGGGGSGGGGSGGGGSFEEVQLLEQSGAELVRPGTSVKISCKASGYAFTNYWLGWVKQRPGHGLEWIGDIFPGSGNIHYNEKFKGKATLTADKSSSTAYMQLSSLTFEDSAVYFCARLRNWDEPMDYWGQGTTVTVSSTREDLKNVFPPEVAVFEPSEAEISHTQKATLVCLATGFYPDHVELSWWVNGKEVHSGVCTDPQPLKEQPALNDSRYCLSSRLRVSATFWQNPRNHFRCQVQFYGLSENDEWTQDRAKPVTQIVSAEAWGRADCDVKLVEKSFETDTNLNFQNLSVIGFRILLLKVAGFNLLMTLRLWSS

SEQ ID NO: 13185 - protein, 904 aa, synthetic construct
MALPVTALLLPLALLLHAARPEVQLVESGGGLVQPGGSLRLSCAASGFSFSDFWMSWVRQAPGKGLEWVATISQAGSEKDYVDSVKGRFTISRDNAKKSLYLQMNSLRAEDTAVYYCASGVYSFDYRGQGTLVTVSSGTGGGGSGGGGSGGGGSEFDELQMTQSPSSLSASVGDRVTITCRASQSISSYLNWYQQKPGQPPKLLIYWASTRESGVPDRFSGSESGTNYTLTISSLQPEDFATYFCQQSDSLPITFGQGTRLDIQLEIQNPDPAVYQLRDSKSSDKSVCLFTDFDSQTNVSQSKDSDVYITDKCVLDMRSMDFKSNSAVAWSNKSDFACANAFNNSIIPEDTFFPSPESSCGFTSESYQQGVLSATILYEILLGKATLYAVLVSALVLMAMVKRKDSRGRAKRSGSGVKQTLNFDLLKLAGDVESNPGPTSMDWIWRILFLVGAATGAHSGPQLQLQESGPGLVKPSETLSLTCTVSGDSISSGDYYWGWIRQPPGKGLEWIGHIYYSGVTYYNPSLKSRVTISVDTSRNQFSLKLSSVTAADTAVYYCTREDSSNWRSRGQGTLVTVSSGSGGGGSGGGGSGGGGSFEEVQLLESGGGVVQPGRSLRLSCAASGFTFSSYGMHWVRQAPGKGLEWVAVISYDGSNKYYADSVKGRFTISRDNSKNTLYLQMNSLRAEDTAVYYCAKDMGWGSGWRPYYYYGMDVWGQGTTVTVSSTREDLKNVFPPEVAVFEPSEAEISHTQKATLVCLATGFYPDHVELSWWVNGKEVHSGVCTDPQPLKEQPALNDSRYCLSSRLRVSATFWQNPRNHFRCQVQFYGLSENDEWTQDRAKPVTQIVSAEAWGRADCDVKLVEKSFETDTNLNFQNLSVIGFRILLLKVAGFNLLMTLRLWSS

SEQ ID NO: 13186 - protein, 901 aa, synthetic construct
MALPVTALLLPLALLLHAARPEVQLVESGGGLVQPGGSLRLSCAASGFSFSDFWMSWVRQAPGKGLEWVATISQAGSEKDYVDSVKGRFTISRDNAKKSLYLQMNSLRAEDTAVYYCASGVYSFDYRGQGTLVTVSSGTGGGGSGGGGSGGGGSEFDDIQMTQSPSSLSASVGDRVTITCRASQSISSYLNWYQQKPGKAPKLLIYAASSLQSGVPSRFSGSGSGTDFTLTISSLQPEDLATYYCQQSYSTPFTFGPGTKVDIKLEIQNPDPAVYQLRDSKSSDKSVCLFTDFDSQTNVSQSKDSDVYITDKCVLDMRSMDFKSNSAVAWSNKSDFACANAFNNSIIPEDTFFPSPESSCGFTSESYQQGVLSATILYEILLGKATLYAVLVSALVLMAMVKRKDSRGRAKRSGSGVKQTLNFDLLKLAGDVESNPGPTSMDWIWRILFLVGAATGAHSGPQLQLQESGPGLVKPSETLSLTCTVSGDSISSGDYYWGWIRQPPGKGLEWIGHIYYSGVTYYNPSLKSRVTISVDTSRNQFSLKLSSVTAADTAVYYCTREDSSNWRSRGQGTLVTVSSGSGGGGSGGGGSGGGGSFEVHEVQLVQSGAEVKKPGSSVKVSCKASGGTFSSYAISWVRQAPGQGLEWMGGIIPIFGTANYAQKFQGRVTITADKSTSTAYMELSSLRSEDTAVYYCATFALFGFREQAFDIWGQGTTVTVSSTREDLKNVFPPEVAVFEPSEAEISHTQKATLVCLATGFYPDHVELSWWVNGKEVHSGVCTDPQPLKEQPALNDSRYCLSSRLRVSATFWQNPRNHFRCQVQFYGLSENDEWTQDRAKPVTQIVSAEAWGRADCDVKLVEKSFETDTNLNFQNLSVIGFRILLLKVAGFNLLMTLRLWSS

SEQ ID NO: 13187 - protein, 899 aa, synthetic construct
MALPVTALLLPLALLLHAARPEVQLVESGGGLVQPGGSLRLSCAASGFSFSDFWMSWVRQAPGKGLEWVATISQAGSEKDYVDSVKGRFTISRDNAKKSLYLQMNSLRAEDTAVYYCASGVYSFDYRGQGTLVTVSSGTGGGGSGGGGSGGGGSEFDIVLTQSPLSLAVSLGQPAIISCKASQSVSFAGTSLMHWYHQKPGQQPRLLIYRASNLEAGVPDRFSGSGSKTDFTLTISPVEAEDAATYYCQQSREYPYTFGGGTKLEIKRLEIQNPDPAVYQLRDSKSSDKSVCLFTDFDSQTNVSQSKDSDVYITDKCVLDMRSMDFKSNSAVAWSNKSDFACANAFNNSIIPEDTFFPSPESSCGFTSESYQQGVLSATILYEILLGKATLYAVLVSALVLMAMVKRKDSRGRAKRSGSGVKQTLNFDLLKLAGDVESNPGPTSMDWIWRILFLVGAATGAHSGPQLQLQESGPGLVKPSETLSLTCTVSGDSISSGDYYWGWIRQPPGKGLEWIGHIYYSGVTYYNPSLKSRVTISVDTSRNQFSLKLSSVTAADTAVYYCTREDSSNWRSRGQGTLVTVSSGSGGGGSGGGGSGGGGSFEQVQLVQSGAEVVKPGASVKISCKASGYTFTGYFMNWVKQSPGQSLEWIGRIHPYDGDTFYNQKFQGKATLTVDKSSNTAHMELLSLTSEDFAVYYCTRYDGSRAMDYWGQGTTVTVSSTREDLKNVFPPEVAVFEPSEAEISHTQKATLVCLATGFYPDHVELSWWVNGKEVHSGVCTDPQPLKEQPALNDSRYCLSSRLRVSATFWQNPRNHFRCQVQFYGLSENDEWTQDRAKPVTQIVSAEAWGRADCDVKLVEKSFETDTNLNFQNLSVIGFRILLLKVAGFNLLMTLRLWSS

SEQ ID NO: 13188 - protein, 896 aa, synthetic construct
MALPVTALLLPLALLLHAARPEVQLVESGGGLVQPGGSLRLSCAASGFSFSDFWMSWVRQAPGKGLEWVATISQAGSEKDYVDSVKGRFTISRDNAKKSLYLQMNSLRAEDTAVYYCASGVYSFDYRGQGTLVTVSSGTGGGGSGGGGSGGGGSEFDDVVMTQTPLSLPVTPGEPASISCRSSQSLVHRNGNTYLHWYLQKPGQSPKLLIHKVSNRFSGVPDRFSGSGSGTDFTLKISRVEAEDLGVYFCSQSTHVPPLTFGAGTKLELKLEIQNPDPAVYQLRDSKSSDKSVCLFTDFDSQTNVSQSKDSDVYITDKCVLDMRSMDFKSNSAVAWSNKSDFACANAFNNSIIPEDTFFPSPESSCGFTSESYQQGVLSATILYEILLGKATLYAVLVSALVLMAMVKRKDSRGRAKRSGSGVKQTLNFDLLKLAGDVESNPGPTSMDWIWRILFLVGAATGAHSGPQLQLQESGPGLVKPSETLSLTCTVSGDSISSGDYYWGWIRQPPGKGLEWIGHIYYSGVTYYNPSLKSRVTISVDTSRNQFSLKLSSVTAADTAVYYCTREDSSNWRSRGQGTLVTVSSGSGGGGSGGGGSGGGGSFEEVQLVQSGAEVEKPGASVKISCKASGSSFTGYNMNWVRQNIGKSLEWIGAIDPYYGGTSYNQKFKGRATLTVDKSTSTAYMHLKSLRSEDTAVYYCVSGMEYWGQGTSVTVSSTREDLKNVFPPEVAVFEPSEAEISHTQKATLVCLATGFYPDHVELSWWVNGKEVHSGVCTDPQPLKEQPALNDSRYCLSSRLRVSATFWQNPRNHFRCQVQFYGLSENDEWTQDRAKPVTQIVSAEAWGRADCDVKLVEKSFETDTNLNFQNLSVIGFRILLLKVAGFNLLMTLRLWSS

SEQ ID NO: 13189 - protein, 894 aa, synthetic construct
MALPVTALLLPLALLLHAARPEVQLVESGGGLVQPGGSLRLSCAASGFSFSDFWMSWVRQAPGKGLEWVATISQAGSEKDYVDSVKGRFTISRDNAKKSLYLQMNSLRAEDTAVYYCASGVYSFDYRGQGTLVTVSSGTGGGGSGGGGSGGGGSEFDEIVMTQTPATLSVSAGERVTITCKASQSVSNDVTWYQQKPGQAPRLLIYSASNRYSGVPARFSGSGYGTEFTFTISSVQSEDFAVYFCQQDYSSFGQGTKLEIKRLEIQNPDPAVYQLRDSKSSDKSVCLFTDFDSQTNVSQSKDSDVYITDKCVLDMRSMDFKSNSAVAWSNKSDFACANAFNNSIIPEDTFFPSPESSCGFTSESYQQGVLSATILYEILLGKATLYAVLVSALVLMAMVKRKDSRGRAKRSGSGVKQTLNFDLLKLAGDVESNPGPTSMDWIWRILFLVGAATGAHSGPQLQLQESGPGLVKPSETLSLTCTVSGDSISSGDYYWGWIRQPPGKGLEWIGHIYYSGVTYYNPSLKSRVTISVDTSRNQFSLKLSSVTAADTAVYYCTREDSSNWRSRGQGTLVTVSSGSGGGGSGGGGSGGGGSFEQVQLVESGPGVVQPGRSLRISCAVSGFSVTNYGVHWVRQPPGKGLEWLGVIWAGGITNYNSAFMSRLTISKDNSKNTVYLQMNSLRAEDTAMYYCASRGGHYGYALDYWGQGTLVTVSSTREDLKNVFPPEVAVFEPSEAEISHTQKATLVCLATGFYPDHVELSWWVNGKEVHSGVCTDPQPLKEQPALNDSRYCLSSRLRVSATFWQNPRNHFRCQVQFYGLSENDEWTQDRAKPVTQIVSAEAWGRADCDVKLVEKSFETDTNLNFQNLSVIGFRILLLKVAGFNLLMTLRLWSS

SEQ ID NO: 13190 - protein, 896 aa, synthetic construct
MALPVTALLLPLALLLHAARPEVQLVESGGGLVQPGGSLRLSCAASGFSFSDFWMSWVRQAPGKGLEWVATISQAGSEKDYVDSVKGRFTISRDNAKKSLYLQMNSLRAEDTAVYYCASGVYSFDYRGQGTLVTVSSGTGGGGSGGGGSGGGGSEFDIQMTQTASSLPASLGDRVTISCSASQDISNYLNWYQQKPDGTVKLLIFYSSNLHSGVPSRFSGGGSGTDYSLTISNLEPEDIATYFCHQYSKLPWTFGGGTKLEIKRLEIQNPDPAVYQLRDSKSSDKSVCLFTDFDSQTNVSQSKDSDVYITDKCVLDMRSMDFKSNSAVAWSNKSDFACANAFNNSIIPEDTFFPSPESSCGFTSESYQQGVLSATILYEILLGKATLYAVLVSALVLMAMVKRKDSRGRAKRSGSGVKQTLNFDLLKLAGDVESNPGPTSMDWIWRILFLVGAATGAHSGPQLQLQESGPGLVKPSETLSLTCTVSGDSISSGDYYWGWIRQPPGKGLEWIGHIYYSGVTYYNPSLKSRVTISVDTSRNQFSLKLSSVTAADTAVYYCTREDSSNWRSRGQGTLVTVSSGSGGGGSGGGGSGGGGSFEEVTLVESGGDFVKPGGSLKVSCAASGFAFSHYAMSWVRQTPAKRLEWVAYISSGGSGTYYSDSVKGRFTISRDNAKNTLYLQMRSLRSEDSAMYFCTRVKLGTYYFDSWGQGTTLTVSSTREDLKNVFPPEVAVFEPSEAEISHTQKATLVCLATGFYPDHVELSWWVNGKEVHSGVCTDPQPLKEQPALNDSRYCLSSRLRVSATFWQNPRNHFRCQVQFYGLSENDEWTQDRAKPVTQIVSAEAWGRADCDVKLVEKSFETDTNLNFQNLSVIGFRILLLKVAGFNLLMTLRLWSS

SEQ ID NO: 13191 - protein, 898 aa, synthetic construct
MALPVTALLLPLALLLHAARPEVQLVESGGGLVQPGGSLRLSCAASGFSFSDFWMSWVRQAPGKGLEWVATISQAGSEKDYVDSVKGRFTISRDNAKKSLYLQMNSLRAEDTAVYYCASGVYSFDYRGQGTLVTVSSGTGGGGSGGGGSGGGGSEFQFVLTQSPSASAALGASAKLTCTLSSAHKTYTIDWYQQQKGKAPRYLIQVKSDGTYTKATGVPDRFSGSSSGADRYLIIPSVQADDEADYYCGTDYTGGYVFGGGTQLTVTLEIQNPDPAVYQLRDSKSSDKSVCLFTDFDSQTNVSQSKDSDVYITDKCVLDMRSMDFKSNSAVAWSNKSDFACANAFNNSIIPEDTFFPSPESSCGFTSESYQQGVLSATILYEILLGKATLYAVLVSALVLMAMVKRKDSRGRAKRSGSGVKQTLNFDLLKLAGDVESNPGPTSMDWIWRILFLVGAATGAHSGPQLQLQESGPGLVKPSETLSLTCTVSGDSISSGDYYWGWIRQPPGKGLEWIGHIYYSGVTYYNPSLKSRVTISVDTSRNQFSLKLSSVTAADTAVYYCTREDSSNWRSRGQGTLVTVSSGSGGGGSGGGGSGGGGSFEEQLKESGGGLFKPTDTLTLTCTVSGFSLSYYGVNWVRQAPGNGLEWIGTIGGSGDTYYASWAKSRSTIIRNTNENTVTLKMTSLTAADTATYFCVRYANIGYEYFNVWGPGTLVTVSSTREDLKNVFPPEVAVFEPSEAEISHTQKATLVCLATGFYPDHVELSWWVNGKEVHSGVCTDPQPLKEQPALNDSRYCLSSRLRVSATFWQNPRNHFRCQVQFYGLSENDEWTQDRAKPVTQIVSAEAWGRADCDVKLVEKSFETDTNLNFQNLSVIGFRILLLKVAGFNLLMTLRLWSS

SEQ ID NO: 13192 - protein, 903 aa, synthetic construct
MALPVTALLLPLALLLHAARPEVQLVESGGGLVQPGGSLRLSCAASGFSFSDFWMSWVRQAPGKGLEWVATISQAGSEKDYVDSVKGRFTISRDNAKKSLYLQMNSLRAEDTAVYYCASGVYSFDYRGQGTLVTVSSGTGGGGSGGGGSGGGGSEFQFVLTQSPSVSAALGASAKLTCTLSSAHKTYTIDWYQQQQGEAPRYLMQVKSDGSYTKGTGVPDRFSGSSSGADRYLIIPSVQADDEAGYVCGADDNGGYVFGGGTQLTVTLEIQNPDPAVYQLRDSKSSDKSVCLFTDFDSQTNVSQSKDSDVYITDKCVLDMRSMDFKSNSAVAWSNKSDFACANAFNNSIIPEDTFFPSPESSCGFTSESYQQGVLSATILYEILLGKATLYAVLVSALVLMAMVKRKDSRGRAKRSGSGVKQTLNFDLLKLAGDVESNPGPTSMDWIWRILFLVGAATGAHSGPQLQLQESGPGLVKPSETLSLTCTVSGDSISSGDYYWGWIRQPPGKGLEWIGHIYYSGVTYYNPSLKSRVTISVDTSRNQFSLKLSSVTAADTAVYYCTREDSSNWRSRGQGTLVTVSSGSGGGGSGGGGSGGGGSFEQSVKESEGGLFKPTDTLTLTCTVSGFSLSRHALTWVRQAPGNGLEWIGAIDNAGTTYYASWAKSRSTITRNTDLHTVTLKMTSLTASDTATYFCARVFYDINSGYYLDGMDLWGPGTLVTVSSTREDLKNVFPPEVAVFEPSEAEISHTQKATLVCLATGFYPDHVELSWWVNGKEVHSGVCTDPQPLKEQPALNDSRYCLSSRLRVSATFWQNPRNHFRCQVQFYGLSENDEWTQDRAKPVTQIVSAEAWGRADCDVKLVEKSFETDTNLNFQNLSVIGFRILLLKVAGFNLLMTLRLWSS

SEQ ID NO: 13193 - protein, 897 aa, synthetic construct
MALPVTALLLPLALLLHAARPEVQLVESGGGLVQPGGSLRLSCAASGFSFSDFWMSWVRQAPGKGLEWVATISQAGSEKDYVDSVKGRFTISRDNAKKSLYLQMNSLRAEDTAVYYCASGVYSFDYRGQGTLVTVSSGTGGGGSGGGGSGGGGSEFDIQMTQSPSSLSASVGDRVTITCRASQGISSWLAWYQQKPEKAPKSLIYAASSLQSGVPSRFSGSGSGTDFTLTISSLQPEDFATYYCQQYNSYPPTFGGGTKVEIKLEIQNPDPAVYQLRDSKSSDKSVCLFTDFDSQTNVSQSKDSDVYITDKCVLDMRSMDFKSNSAVAWSNKSDFACANAFNNSIIPEDTFFPSPESSCGFTSESYQQGVLSATILYEILLGKATLYAVLVSALVLMAMVKRKDSRGRAKRSGSGVKQTLNFDLLKLAGDVESNPGPTSMDWIWRILFLVGAATGAHSGPQLQLQESGPGLVKPSETLSLTCTVSGDSISSGDYYWGWIRQPPGKGLEWIGHIYYSGVTYYNPSLKSRVTISVDTSRNQFSLKLSSVTAADTAVYYCTREDSSNWRSRGQGTLVTVSSGSGGGGSGGGGSGGGGSFEEVQLVESGGGLVQPGESLRLSCVASGFTFSRYKMNWVRQAPGKGLEWVSYISRSGRDIYYADSVKGRFTISRDNAKNSLYLQMNSLRDEDTAVYYCAGTVTTYYYFGMDVWGHGTTVTVSSTREDLKNVFPPEVAVFEPSEAEISHTQKATLVCLATGFYPDHVELSWWVNGKEVHSGVCTDPQPLKEQPALNDSRYCLSSRLRVSATFWQNPRNHFRCQVQFYGLSENDEWTQDRAKPVTQIVSAEAWGRADCDVKLVEKSFETDTNLNFQNLSVIGFRILLLKVAGFNLLMTLRLWSS

SEQ ID NO: 13194 - protein, 898 aa, synthetic construct
MALPVTALLLPLALLLHAARPEVQLVESGGGLVQPGGSLRLSCAASGFSFSDFWMSWVRQAPGKGLEWVATISQAGSEKDYVDSVKGRFTISRDNAKKSLYLQMNSLRAEDTAVYYCASGVYSFDYRGQGTLVTVSSGTGGGGSGGGGSGGGGSEFDIQMTQSPSSLSASVGDRVTITCRASQGISSWLAWYQQKPEKAPKSLIYAASSLQSGVPSRFSGSGSGTDFTLTISSLQPEDFATYYCQQYNSYPPTFGGGTKVEIKLEIQNPDPAVYQLRDSKSSDKSVCLFTDFDSQTNVSQSKDSDVYITDKCVLDMRSMDFKSNSAVAWSNKSDFACANAFNNSIIPEDTFFPSPESSCGFTSESYQQGVLSATILYEILLGKATLYAVLVSALVLMAMVKRKDSRGRAKRSGSGVKQTLNFDLLKLAGDVESNPGPTSMDWIWRILFLVGAATGAHSGPQLQLQESGPGLVKPSETLSLTCTVSGDSISSGDYYWGWIRQPPGKGLEWIGHIYYSGVTYYNPSLKSRVTISVDTSRNQFSLKLSSVTAADTAVYYCTREDSSNWRSRGQGTLVTVSSGSGGGGSGGGGSGGGGSFEEVQLVESGGGSVQPGESLRLSCVASGFTFSRYKMNWVRQAPGKGLEWVSYISRSGRDIYYADSVKGRFTISRDNAKNSLYLQMNSLRDEDTAVYYCAGTVTTYYYDFGMDVWGQGTTVTVSSTREDLKNVFPPEVAVFEPSEAEISHTQKATLVCLATGFYPDHVELSWWVNGKEVHSGVCTDPQPLKEQPALNDSRYCLSSRLRVSATFWQNPRNHFRCQVQFYGLSENDEWTQDRAKPVTQIVSAEAWGRADCDVKLVEKSFETDTNLNFQNLSVIGFRILLLKVAGFNLLMTLRLWSS

SEQ ID NO: 13195 - protein, 896 aa, synthetic construct
MALPVTALLLPLALLLHAARPEVQLVESGGGLVQPGGSLRLSCAASGFSFSDFWMSWVRQAPGKGLEWVATISQAGSEKDYVDSVKGRFTISRDNAKKSLYLQMNSLRAEDTAVYYCASGVYSFDYRGQGTLVTVSSGTGGGGSGGGGSGGGGSEFQSVLTQPPSASGTPGQRVTISCSGSRSNVGGNYVFWYQQVPGATPKLLIYRSNQRPSGVPDRFAGSKSGSSASLAISGLRSEDEADYYCATWDDSLSGFVFGTGTKVTVLGLEIQNPDPAVYQLRDSKSSDKSVCLFTDFDSQTNVSQSKDSDVYITDKCVLDMRSMDFKSNSAVAWSNKSDFACANAFNNSIIPEDTFFPSPESSCGFTSESYQQGVLSATILYEILLGKATLYAVLVSALVLMAMVKRKDSRGRAKRSGSGVKQTLNFDLLKLAGDVESNPGPTSMDWIWRILFLVGAATGAHSGPQLQLQESGPGLVKPSETLSLTCTVSGDSISSGDYYWGWIRQPPGKGLEWIGHIYYSGVTYYNPSLKSRVTISVDTSRNQFSLKLSSVTAADTAVYYCTREDSSNWRSRGQGTLVTVSSGSGGGGSGGGGSGGGGSFEVQLVESGGGLVKPGGSLRLSCAASGFTFSDYYMSWIRQAPGKGLEWVSYISSSGSTIYYADSVKGRFTISRDNAKNSLYLQMNSLRAEDTAVYYCARGYGKAYDQWGQGTLVTVSSTREDLKNVFPPEVAVFEPSEAEISHTQKATLVCLATGFYPDHVELSWWVNGKEVHSGVCTDPQPLKEQPALNDSRYCLSSRLRVSATFWQNPRNHFRCQVQFYGLSENDEWTQDRAKPVTQIVSAEAWGRADCDVKLVEKSFETDTNLNFQNLSVIGFRILLLKVAGFNLLMTLRLWSS

SEQ ID NO: 13196 - protein, 895 aa, synthetic construct
MALPVTALLLPLALLLHAARPEVQLVESGGGLVQPGGSLRLSCAASGFSFSDFWMSWVRQAPGKGLEWVATISQAGSEKDYVDSVKGRFTISRDNAKKSLYLQMNSLRAEDTAVYYCASGVYSFDYRGQGTLVTVSSGTGGGGSGGGGSGGGGSEFQSVVTQPPSMSAAPGQQVTISCSGGNSNIERNYVSWYLQLPGTAPKLVIFDNDRRPSGIPDRFSGSKSGTSATLGITGLQTGDEADYYCGTWDSSLRGWVFGGGTKLTVLGLEIQNPDPAVYQLRDSKSSDKSVCLFTDFDSQTNVSQSKDSDVYITDKCVLDMRSMDFKSNSAVAWSNKSDFACANAFNNSIIPEDTFFPSPESSCGFTSESYQQGVLSATILYEILLGKATLYAVLVSALVLMAMVKRKDSRGRAKRSGSGVKQTLNFDLLKLAGDVESNPGPTSMDWIWRILFLVGAATGAHSGPQLQLQESGPGLVKPSETLSLTCTVSGDSISSGDYYWGWIRQPPGKGLEWIGHIYYSGVTYYNPSLKSRVTISVDTSRNQFSLKLSSVTAADTAVYYCTREDSSNWRSRGQGTLVTVSSGSGGGGSGGGGSGGGGSFEVQLVESGGGLIQPGGSLRLSCAASGFTFSNYAMNWVRQAPGKGLEWVSTINGRGSSTIYADSVKGRFTISRDNSKNTLYLQMNSLRAEDTATYYCARYISRGLGDSWGQGTLVTVTREDLKNVFPPEVAVFEPSEAEISHTQKATLVCLATGFYPDHVELSWWVNGKEVHSGVCTDPQPLKEQPALNDSRYCLSSRLRVSATFWQNPRNHFRCQVQFYGLSENDEWTQDRAKPVTQIVSAEAWGRADCDVKLVEKSFETDTNLNFQNLSVIGFRILLLKVAGFNLLMTLRLWSS

SEQ ID NO: 13197 - protein, 896 aa, synthetic construct
MALPVTALLLPLALLLHAARPEVQLVESGGGLVQPGGSLRLSCAASGFSFSDFWMSWVRQAPGKGLEWVATISQAGSEKDYVDSVKGRFTISRDNAKKSLYLQMNSLRAEDTAVYYCASGVYSFDYRGQGTLVTVSSGTGGGGSGGGGSGGGGSEFDVVMTQTPLSLPVSLGDQASISCRSSQSLVHSNGNTYLHWYLQKPGQSPKLLIYKVSNRFSGVPDRFSGSGSGTDFTLKISRVEAEDLGVYFCSQNTPVPPKFGSGTKLEIKLEIQNPDPAVYQLRDSKSSDKSVCLFTDFDSQTNVSQSKDSDVYITDKCVLDMRSMDFKSNSAVAWSNKSDFACANAFNNSIIPEDTFFPSPESSCGFTSESYQQGVLSATILYEILLGKATLYAVLVSALVLMAMVKRKDSRGRAKRSGSGVKQTLNFDLLKLAGDVESNPGPTSMDWIWRILFLVGAATGAHSGPQLQLQESGPGLVKPSETLSLTCTVSGDSISSGDYYWGWIRQPPGKGLEWIGHIYYSGVTYYNPSLKSRVTISVDTSRNQFSLKLSSVTAADTAVYYCTREDSSNWRSRGQGTLVTVSSGSGGGGSGGGGSGGGGSFEQVQLQQSGAELVRPGASVKLSCKASGYTFNDYEMHWVKQTPVHGLKWIGALEPKTGDTAYSQKFKGKATLTADKSSSTAYMELRSLTSEDSAVYYCTSCYYYTYSGQGTLVTVSATREDLKNVFPPEVAVFEPSEAEISHTQKATLVCLATGFYPDHVELSWWVNGKEVHSGVCTDPQPLKEQPALNDSRYCLSSRLRVSATFWQNPRNHFRCQVQFYGLSENDEWTQDRAKPVTQIVSAEAWGRADCDVKLVEKSFETDTNLNFQNLSVIGFRILLLKVAGFNLLMTLRLWSS

SEQ ID NO: 13198 - protein, 895 aa, synthetic construct
MALPVTALLLPLALLLHAARPEVQLVESGGGLVQPGGSLRLSCAASGFSFSDFWMSWVRQAPGKGLEWVATISQAGSEKDYVDSVKGRFTISRDNAKKSLYLQMNSLRAEDTAVYYCASGVYSFDYRGQGTLVTVSSGTGGGGSGGGGSGGGGSEFDIQLTQSPSSLSASVGDRVTITCRASQGIRNDLGWYQQKPGKAPKRLIYAASSLQNGVPSRFSGSGSGTEFTLTISSLQPEDFATYYCLQHNTYPAFGQGTKVEIKRLEIQNPDPAVYQLRDSKSSDKSVCLFTDFDSQTNVSQSKDSDVYITDKCVLDMRSMDFKSNSAVAWSNKSDFACANAFNNSIIPEDTFFPSPESSCGFTSESYQQGVLSATILYEILLGKATLYAVLVSALVLMAMVKRKDSRGRAKRSGSGVKQTLNFDLLKLAGDVESNPGPTSMDWIWRILFLVGAATGAHSGPQLQLQESGPGLVKPSETLSLTCTVSGDSISSGDYYWGWIRQPPGKGLEWIGHIYYSGVTYYNPSLKSRVTISVDTSRNQFSLKLSSVTAADTAVYYCTREDSSNWRSRGQGTLVTVSSGSGGGGSGGGGSGGGGSFEQVQLQESGPGLVKPSQTLSLTCTVSGGSISSFNYYWSWIRHHPGKGLEWIGYIYYSGSTYSNPSLKSRVTISVDTSKNQFSLTLSSVTAADTAVYYCARGYNWNYFDYWGQGTLVTVSSTREDLKNVFPPEVAVFEPSEAEISHTQKATLVCLATGFYPDHVELSWWVNGKEVHSGVCTDPQPLKEQPALNDSRYCLSSRLRVSATFWQNPRNHFRCQVQFYGLSENDEWTQDRAKPVTQIVSAEAWGRADCDVKLVEKSFETDTNLNFQNLSVIGFRILLLKVAGFNLLMTLRLWSS

SEQ ID NO: 13199 - protein, 897 aa, synthetic construct
MALPVTALLLPLALLLHAARPEVQLVESGGGLVQPGGSLRLSCAASGFSFSDFWMSWVRQAPGKGLEWVATISQAGSEKDYVDSVKGRFTISRDNAKKSLYLQMNSLRAEDTAVYYCASGVYSFDYRGQGTLVTVSSGTGGGGSGGGGSGGGGSEFDDIVLTQSPASLAVSLGQSVTISCRASESVEYYGTSLMQWYQQKPGQPPKLLIYATSNVESGVPARFSGSGSGTDFSLNIHPVEEDDIAMYFCQQSRKLPSTFGGGTKLEIKLEIQNPDPAVYQLRDSKSSDKSVCLFTDFDSQTNVSQSKDSDVYITDKCVLDMRSMDFKSNSAVAWSNKSDFACANAFNNSIIPEDTFFPSPESSCGFTSESYQQGVLSATILYEILLGKATLYAVLVSALVLMAMVKRKDSRGRAKRSGSGVKQTLNFDLLKLAGDVESNPGPTSMDWIWRILFLVGAATGAHSGPQLQLQESGPGLVKPSETLSLTCTVSGDSISSGDYYWGWIRQPPGKGLEWIGHIYYSGVTYYNPSLKSRVTISVDTSRNQFSLKLSSVTAADTAVYYCTREDSSNWRSRGQGTLVTVSSGSGGGGSGGGGSGGGGSFEDVRLQESGPGQVKPSQTVSLTCSVTGYSITNGNHWWNWIRQVSGSKLEWIGYISSSGSTDSNPSLKSRISITRDTSKNQLFLQLNSVTTEDIATYYCARGYYFDYWGQGTTLTVSSTREDLKNVFPPEVAVFEPSEAEISHTQKATLVCLATGFYPDHVELSWWVNGKEVHSGVCTDPQPLKEQPALNDSRYCLSSRLRVSATFWQNPRNHFRCQVQFYGLSENDEWTQDRAKPVTQIVSAEAWGRADCDVKLVEKSFETDTNLNFQNLSVIGFRILLLKVAGFNLLMTLRLWSS

SEQ ID NO: 13200 - protein, 896 aa, synthetic construct
MALPVTALLLPLALLLHAARPEVQLVESGGGLVQPGGSLRLSCAASGFSFSDFWMSWVRQAPGKGLEWVATISQAGSEKDYVDSVKGRFTISRDNAKKSLYLQMNSLRAEDTAVYYCASGVYSFDYRGQGTLVTVSSGTGGGGSGGGGSGGGGSEFDIQMTQSPSSLSASVGDRVTITCRASQDVNTAVAWYQQKPGKAPKLLIYSASFLESGVPSRFSGSRSGTDFTLTISSLQPEDFATYYCQQHYTTPPTFGQTKVEIKRLEIQNPDPAVYQLRDSKSSDKSVCLFTDFDSQTNVSQSKDSDVYITDKCVLDMRSMDFKSNSAVAWSNKSDFACANAFNNSIIPEDTFFPSPESSCGFTSESYQQGVLSATILYEILLGKATLYAVLVSALVLMAMVKRKDSRGRAKRSGSGVKQTLNFDLLKLAGDVESNPGPTSMDWIWRILFLVGAATGAHSGPQLQLQESGPGLVKPSETLSLTCTVSGDSISSGDYYWGWIRQPPGKGLEWIGHIYYSGVTYYNPSLKSRVTISVDTSRNQFSLKLSSVTAADTAVYYCTREDSSNWRSRGQGTLVTVSSGSGGGGSGGGGSGGGGSFEEVQLVESGGGLVQPGGSLRLSCAASGFNIKDTYIHWVRQAPGKGLEWVARIYPTNGYTRYADSVKGRFTISADTSKNTAYLQMNSLRAEDTAVYYCSRWGGDGFYAMDVWGQGTLVTVSSTREDLKNVFPPEVAVFEPSEAEISHTQKATLVCLATGFYPDHVELSWWVNGKEVHSGVCTDPQPLKEQPALNDSRYCLSSRLRVSATFWQNPRNHFRCQVQFYGLSENDEWTQDRAKPVTQIVSAEAWGRADCDVKLVEKSFETDTNLNFQNLSVIGFRILLLKVAGFNLLMTLRLWSS

SEQ ID NO: 13201 - protein, 895 aa, synthetic construct
MALPVTALLLPLALLLHAARPEVQLVESGGGLVQPGGSLRLSCAASGFSFSDFWMSWVRQAPGKGLEWVATISQAGSEKDYVDSVKGRFTISRDNAKKSLYLQMNSLRAEDTAVYYCASGVYSFDYRGQGTLVTVSSGTGGGGSGGGGSGGGGSEFDQSVLTQPPSVSVAPGKTARIPCEGNYIGSSNVHWYQQKPGQAPVLVIHFDSDRPSGIPDRFSGSNSGNMATLTISRVEAGDEADYYCQVWENHGWVFGGGTKLTVLSLEIQNPDPAVYQLRDSKSSDKSVCLFTDFDSQTNVSQSKDSDVYITDKCVLDMRSMDFKSNSAVAWSNKSDFACANAFNNSIIPEDTFFPSPESSCGFTSESYQQGVLSATILYEILLGKATLYAVLVSALVLMAMVKRKDSRGRAKRSGSGVKQTLNFDLLKLAGDVESNPGPTSMDWIWRILFLVGAATGAHSGPQLQLQESGPGLVKPSETLSLTCTVSGDSISSGDYYWGWIRQPPGKGLEWIGHIYYSGVTYYNPSLKSRVTISVDTSRNQFSLKLSSVTAADTAVYYCTREDSSNWRSRGQGTLVTVSSGSGGGGSGGGGSGGGGSFEEVQLVETGGGLVQPGESLRLSCAASGFTFSDYEMNWVRQAPGKGLEWVSYISSSGSTIYYADSVKGRFTIYRDNAKNSLYLQMNSLRAEDTALYYCARAWGVGPPDYWGQGTLVTVSSTREDLKNVFPPEVAVFEPSEAEISHTQKATLVCLATGFYPDHVELSWWVNGKEVHSGVCTDPQPLKEQPALNDSRYCLSSRLRVSATFWQNPRNHFRCQVQFYGLSENDEWTQDRAKPVTQIVSAEAWGRADCDVKLVEKSFETDTNLNFQNLSVIGFRILLLKVAGFNLLMTLRLWSS

SEQ ID NO: 13202 - protein, 903 aa, synthetic construct
MALPVTALLLPLALLLHAARPEVQLVESGGGLVQPGGSLRLSCAASGFSFSDFWMSWVRQAPGKGLEWVATISQAGSEKDYVDSVKGRFTISRDNAKKSLYLQMNSLRAEDTAVYYCASGVYSFDYRGQGTLVTVSSGTGGGGSGGGGSGGGGSEFDIQMTQSPSSLSASVGDTVTITCQANGYLNWYQQRRGKAPKLLIYDGSKLERGVPSRFSGRRWGQEYNLTINNLQPEDIATYFCQVYEFVVPGTRLDLKRTVAAPLEIQNPDPAVYQLRDSKSSDKSVCLFTDFDSQTNVSQSKDSDVYITDKCVLDMRSMDFKSNSAVAWSNKSDFACANAFNNSIIPEDTFFPSPESSCGFTSESYQQGVLSATILYEILLGKATLYAVLVSALVLMAMVKRKDSRGRAKRSGSGVKQTLNFDLLKLAGDVESNPGPTSMDWIWRILFLVGAATGAHSGPQLQLQESGPGLVKPSETLSLTCTVSGDSISSGDYYWGWIRQPPGKGLEWIGHIYYSGVTYYNPSLKSRVTISVDTSRNQFSLKLSSVTAADTAVYYCTREDSSNWRSRGQGTLVTVSSGSGGGGSGGGGSGGGGSFEQVQLLQSGAAVTKPGASVRVSCEASGYNIRDYFIHWWRQAPGQGLQWVGWINPKTGQPNNPRQFQGRVSLTRHASWDFDTFSFYMDLKALRSDDTAVYFCARQRSDYWDFDVWGSGTQVTVSSASTKGPTREDLKNVFPPEVAVFEPSEAEISHTQKATLVCLATGFYPDHVELSWWVNGKEVHSGVCTDPQPLKEQPALNDSRYCLSSRLRVSATFWQNPRNHFRCQVQFYGLSENDEWTQDRAKPVTQIVSAEAWGRADCDVKLVEKSFETDTNLNFQNLSVIGFRILLLKVAGFNLLMTLRLWSS

SEQ ID NO: 13203 - protein, 909 aa, synthetic construct
MALPVTALLLPLALLLHAARPEVQLVESGGGLVQPGGSLRLSCAASGFSFSDFWMSWVRQAPGKGLEWVATISQAGSEKDYVDSVKGRFTISRDNAKKSLYLQMNSLRAEDTAVYYCASGVYSFDYRGQGTLVTVSSGTGGGGSGGGGSGGGGSEFQSALTQPPSASGSPGQSITISCTGTSNNFVSWYQQHAGKAPKLVIYDVNKRPSGVPDRFSGSKSGNTASLTVSGLQTDDEAVYYCGSLVGNWDVIFGGGTKLTVLLEIQNPDPAVYQLRDSKSSDKSVCLFTDFDSQTNVSQSKDSDVYITDKCVLDMRSMDFKSNSAVAWSNKSDFACANAFNNSIIPEDTFFPSPESSCGFTSESYQQGVLSATILYEILLGKATLYAVLVSALVLMAMVKRKDSRGRAKRSGSGVKQTLNFDLLKLAGDVESNPGPTSMDWIWRILFLVGAATGAHSGPQLQLQESGPGLVKPSETLSLTCTVSGDSISSGDYYWGWIRQPPGKGLEWIGHIYYSGVTYYNPSLKSRVTISVDTSRNQFSLKLSSVTAADTAVYYCTREDSSNWRSRGQGTLVTVSSGSGGGGSGGGGSGGGGSFEQPQLQESGPTLVEASETLSLTCAVSGDSTAACNSFWGWVRQPPGKGLEWVGSLSHCASYWNRGWTYHNPSLKSRLTLALDTPKNLVFLKLNSVTAADTATYYCARFGGEVLRYTDWPKPAWVDLWGRGTLVTVSSTREDLKNVFPPEVAVFEPSEAEISHTQKATLVCLATGFYPDHVELSWWVNGKEVHSGVCTDPQPLKEQPALNDSRYCLSSRLRVSATFWQNPRNHFRCQVQFYGLSENDEWTQDRAKPVTQIVSAEAWGRADCDVKLVEKSFETDTNLNFQNLSVIGFRILLLKVAGFNLLMTLRLWSS

SEQ ID NO: 13204 - protein, 894 aa, synthetic construct
MALPVTALLLPLALLLHAARPEVQLVESGGGLVQPGGSLRLSCAASGFSFSDFWMSWVRQAPGKGLEWVATISQAGSEKDYVDSVKGRFTISRDNAKKSLYLQMNSLRAEDTAVYYCASGVYSFDYRGQGTLVTVSSGTGGGGSGGGGSGGGGSEFEIVLTQSPGTLSLSPGETAIISCRTSQYGSLAWYQQRPGQAPRLVIYSGSTRAAGIPDRFSGSRWGPDYNLTISNLESGDFGVYYCQQYEFFGQGTKVQVDIKRLEIQNPDPAVYQLRDSKSSDKSVCLFTDFDSQTNVSQSKDSDVYITDKCVLDMRSMDFKSNSAVAWSNKSDFACANAFNNSIIPEDTFFPSPESSCGFTSESYQQGVLSATILYEILLGKATLYAVLVSALVLMAMVKRKDSRGRAKRSGSGVKQTLNFDLLKLAGDVESNPGPTSMDWIWRILFLVGAATGAHSGPQLQLQESGPGLVKPSETLSLTCTVSGDSISSGDYYWGWIRQPPGKGLEWIGHIYYSGVTYYNPSLKSRVTISVDTSRNQFSLKLSSVTAADTAVYYCTREDSSNWRSRGQGTLVTVSSGSGGGGSGGGGSGGGGSFEQVQLVQSGGQMKKPGESMRISCRASGYEFIDCTLNWIRLAPGKRPEWMGWLKPRGGAVNYARPLQGRVTMTRDVYSDTAFLELRSLTVDDTAVYFCTRGKNCDYNWDFEHWGRGTPVIVSSTREDLKNVFPPEVAVFEPSEAEISHTQKATLVCLATGFYPDHVELSWWVNGKEVHSGVCTDPQPLKEQPALNDSRYCLSSRLRVSATFWQNPRNHFRCQVQFYGLSENDEWTQDRAKPVTQIVSAEAWGRADCDVKLVEKSFETDTNLNFQNLSVIGFRILLLKVAGFNLLMTLRLWSS

SEQ ID NO: 13205 - protein, 904 aa, synthetic construct
MALPVTALLLPLALLLHAARPEVQLVESGGGLVQPGGSLRLSCAASGFSFSDFWMSWVRQAPGKGLEWVATISQAGSEKDYVDSVKGRFTISRDNAKKSLYLQMNSLRAEDTAVYYCASGVYSFDYRGQGTLVTVSSGTGGGGSGGGGSGGGGSEFELVLTQSPGTLSLSAGERATLSCRASQSVSSGSLAWYQQKPGQAPRLLIYGASTRATGIPDRFSGSGSGTDFTLTIGRLEPEDLAVYYCQQYGTSPYTFGQGTKLEILEIQNPDPAVYQLRDSKSSDKSVCLFTDFDSQTNVSQSKDSDVYITDKCVLDMRSMDFKSNSAVAWSNKSDFACANAFNNSIIPEDTFFPSPESSCGFTSESYQQGVLSATILYEILLGKATLYAVLVSALVLMAMVKRKDSRGRAKRSGSGVKQTLNFDLLKLAGDVESNPGPTSMDWIWRILFLVGAATGAHSGPQLQLQESGPGLVKPSETLSLTCTVSGDSISSGDYYWGWIRQPPGKGLEWIGHIYYSGVTYYNPSLKSRVTISVDTSRNQFSLKLSSVTAADTAVYYCTREDSSNWRSRGQGTLVTVSSGSGGGGSGGGGSGGGGSFELEQSGAEVKKPGSSVQVSCKASGGTFSMYGFNWVRQAPGHGLEWMGGIIPIFGTSNYAQKFRGRVTFTADQATSTAYMELTNLRSDDTAVYYCARDFGPDWEDGDSYDGSGRGFFDFWGQGTLVTVSSTREDLKNVFPPEVAVFEPSEAEISHTQKATLVCLATGFYPDHVELSWWVNGKEVHSGVCTDPQPLKEQPALNDSRYCLSSRLRVSATFWQNPRNHFRCQVQFYGLSENDEWTQDRAKPVTQIVSAEAWGRADCDVKLVEKSFETDTNLNFQNLSVIGFRILLLKVAGFNLLMTLRLWSS

SEQ ID NO: 13206 - protein, 884 aa, synthetic construct
MALPVTALLLPLALLLHAARPEVQLVESGGGLVQPGGSLRLSCAASGFSFSDFWMSWVRQAPGKGLEWVATISQAGSEKDYVDSVKGRFTISRDNAKKSLYLQMNSLRAEDTAVYYCASGVYSFDYRGQGTLVTVSSGTGGGGSGGGGSGGGGSEFDIQMTQSPSSLSASVGDRVTITCQASQDINNYLNWYQQKPGKAPKLLIYDASNLQTGVPSRFSGSGSGTDFTFTIEDIATYYCQQYTFGPGTKVDIKLEIQNPDPAVYQLRDSKSSDKSVCLFTDFDSQTNVSQSKDSDVYITDKCVLDMRSMDFKSNSAVAWSNKSDFACANAFNNSIIPEDTFFPSPESSCGFTSESYQQGVLSATILYEILLGKATLYAVLVSALVLMAMVKRKDSRGRAKRSGSGVKQTLNFDLLKLAGDVESNPGPTSMDWIWRILFLVGAATGAHSGPQLQLQESGPGLVKPSETLSLTCTVSGDSISSGDYYWGWIRQPPGKGLEWIGHIYYSGVTYYNPSLKSRVTISVDTSRNQFSLKLSSVTAADTAVYYCTREDSSNWRSRGQGTLVTVSSGSGGGGSGGGGSGGGGSFEEVQLLESGGGLVQPGGSLRLSCAASGFTFSWYSMTWVRQAPGKGLEWVSSIVPWGDFTQYADSVKGRFTISRDNSKNTLYLQMNSLRAEDTAVYYCAKGPGWGSFDLWGRGTLVTVSSTREDLKNVFPPEVAVFEPSEAEISHTQKATLVCLATGFYPDHVELSWWVNGKEVHSGVCTDPQPLKEQPALNDSRYCLSSRLRVSATFWQNPRNHFRCQVQFYGLSENDEWTQDRAKPVTQIVSAEAWGRADCDVKLVEKSFETDTNLNFQNLSVIGFRILLLKVAGFNLLMTLRLWSS

SEQ ID NO: 13207 - protein, 894 aa, synthetic construct
MALPVTALLLPLALLLHAARPEVQLVESGGGLVQPGGSLRLSCAASGFSFSDFWMSWVRQAPGKGLEWVATISQAGSEKDYVDSVKGRFTISRDNAKKSLYLQMNSLRAEDTAVYYCASGVYSFDYRGQGTLVTVSSGTGGGGSGGGGSGGGGSEFDIQMTQSPSSLSASVGDRVTITCTASLSVSSTYLHWYQQKPGSSPKLWIYSTSNLASGVPSRFSGSGSGTSYTLTISSLQPEDFATYYCHQYHRSPLTFGGGTKVEIKRLEIQNPDPAVYQLRDSKSSDKSVCLFTDFDSQTNVSQSKDSDVYITDKCVLDMRSMDFKSNSAVAWSNKSDFACANAFNNSIIPEDTFFPSPESSCGFTSESYQQGVLSATILYEILLGKATLYAVLVSALVLMAMVKRKDSRGRAKRSGSGVKQTLNFDLLKLAGDVESNPGPTSMDWIWRILFLVGAATGAHSGPQLQLQESGPGLVKPSETLSLTCTVSGDSISSGDYYWGWIRQPPGKGLEWIGHIYYSGVTYYNPSLKSRVTISVDTSRNQFSLKLSSVTAADTAVYYCTREDSSNWRSRGQGTLVTVSSGSGGGGSGGGGSGGGGSFEEVQLVESGGGLVQPGGSLRLSCAASGFSLTKYGVHWVRQAPGKGLEWVGVKWAGGSTDYNSALMSRFTISKDNAKNSLYLQMNSLRAEDTAVYYCARDHRDAMDYWGQGTLVTVSSTREDLKNVFPPEVAVFEPSEAEISHTQKATLVCLATGFYPDHVELSWWVNGKEVHSGVCTDPQPLKEQPALNDSRYCLSSRLRVSATFWQNPRNHFRCQVQFYGLSENDEWTQDRAKPVTQIVSAEAWGRADCDVKLVEKSFETDTNLNFQNLSVIGFRILLLKVAGFNLLMTLRLWSS

SEQ ID NO: 13208 - protein, 898 aa, synthetic construct
MALPVTALLLPLALLLHAARPEVQLVESGGGLVQPGGSLRLSCAASGFSFSDFWMSWVRQAPGKGLEWVATISQAGSEKDYVDSVKGRFTISRDNAKKSLYLQMNSLRAEDTAVYYCASGVYSFDYRGQGTLVTVSSGTGGGGSGGGGSGGGGSEFDIQMTQSPSSLSASVGDRVTITCKASQDVGTAVAWYQQKPGKAPKLLIYSASYRSTGVPSRFSGSGSGTDFTLTISSLQPEDFATYYCQHHYSAPWTFGGGTKVEIKLEIQNPDPAVYQLRDSKSSDKSVCLFTDFDSQTNVSQSKDSDVYITDKCVLDMRSMDFKSNSAVAWSNKSDFACANAFNNSIIPEDTFFPSPESSCGFTSESYQQGVLSATILYEILLGKATLYAVLVSALVLMAMVKRKDSRGRAKRSGSGVKQTLNFDLLKLAGDVESNPGPTSMDWIWRILFLVGAATGAHSGPQLQLQESGPGLVKPSETLSLTCTVSGDSISSGDYYWGWIRQPPGKGLEWIGHIYYSGVTYYNPSLKSRVTISVDTSRNQFSLKLSSVTAADTAVYYCTREDSSNWRSRGQGTLVTVSSGSGGGGSGGGGSGGGGSFEEVQLVESGGGLVQPGGSLRLSCAASGFTFSRNGMSWVRQAPGKGLEWVATVSSGGSYIYYADSVKGRFTISRDNAKNSLYLQMNSLRAEDTAVYYCARQGTTALATRFFDVWGQGTLVTVSSTREDLKNVFPPEVAVFEPSEAEISHTQKATLVCLATGFYPDHVELSWWVNGKEVHSGVCTDPQPLKEQPALNDSRYCLSSRLRVSATFWQNPRNHFRCQVQFYGLSENDEWTQDRAKPVTQIVSAEAWGRADCDVKLVEKSFETDTNLNFQNLSVIGFRILLLKVAGFNLLMTLRLWSS

SEQ ID NO: 13209 - protein, 894 aa, synthetic construct
MALPVTALLLPLALLLHAARPEVQLVESGGGLVQPGGSLRLSCAASGFSFSDFWMSWVRQAPGKGLEWVATISQAGSEKDYVDSVKGRFTISRDNAKKSLYLQMNSLRAEDTAVYYCASGVYSFDYRGQGTLVTVSSGTGGGGSGGGGSGGGGSEFDIQMTQSPPSLSASVGGKVTITCKASQDIDRYMAWYQDKPGKGPKLLIHDTSTLQPGIPSRFSGSGSGRDYSFSISNLEPEDIATYYCLQYDNLWTFGGGTKLEIKRLEIQNPDPAVYQLRDSKSSDKSVCLFTDFDSQTNVSQSKDSDVYITDKCVLDMRSMDFKSNSAVAWSNKSDFACANAFNNSIIPEDTFFPSPESSCGFTSESYQQGVLSATILYEILLGKATLYAVLVSALVLMAMVKRKDSRGRAKRSGSGVKQTLNFDLLKLAGDVESNPGPTSMDWIWRILFLVGAATGAHSGPQLQLQESGPGLVKPSETLSLTCTVSGDSISSGDYYWGWIRQPPGKGLEWIGHIYYSGVTYYNPSLKSRVTISVDTSRNQFSLKLSSVTAADTAVYYCTREDSSNWRSRGQGTLVTVSSGSGGGGSGGGGSGGGGSFEQVQLVQSGAELVKPGASVKMSCKASGYIFTNYNIHWVKKSPGQGLEWIGAIYPGNGDAPYSQKFQDRATLTADTSSSTTYMELSSLTSEDSAVYYCVRANWDVAFAYWGQGTLVSVSSTREDLKNVFPPEVAVFEPSEAEISHTQKATLVCLATGFYPDHVELSWWVNGKEVHSGVCTDPQPLKEQPALNDSRYCLSSRLRVSATFWQNPRNHFRCQVQFYGLSENDEWTQDRAKPVTQIVSAEAWGRADCDVKLVEKSFETDTNLNFQNLSVIGFRILLLKVAGFNLLMTLRLWSS

SEQ ID NO: 13210 - protein, 895 aa, synthetic construct
MALPVTALLLPLALLLHAARPEVQLVESGGGLVQPGGSLRLSCAASGFSFSDFWMSWVRQAPGKGLEWVATISQAGSEKDYVDSVKGRFTISRDNAKKSLYLQMNSLRAEDTAVYYCASGVYSFDYRGQGTLVTVSSGTGGGGSGGGGSGGGGSEFDIQMTQSPASLSASVGETVTITCRVSGNIHNYLAWYQQKQGKSPQLLVYNAKTLADGVPSRFSGSGSGTQYSLKINSLQPEDFGSYYCQHFWSNPYTFGGGTKLEIKLEIQNPDPAVYQLRDSKSSDKSVCLFTDFDSQTNVSQSKDSDVYITDKCVLDMRSMDFKSNSAVAWSNKSDFACANAFNNSIIPEDTFFPSPESSCGFTSESYQQGVLSATILYEILLGKATLYAVLVSALVLMAMVKRKDSRGRAKRSGSGVKQTLNFDLLKLAGDVESNPGPTSMDWIWRILFLVGAATGAHSGPQLQLQESGPGLVKPSETLSLTCTVSGDSISSGDYYWGWIRQPPGKGLEWIGHIYYSGVTYYNPSLKSRVTISVDTSRNQFSLKLSSVTAADTAVYYCTREDSSNWRSRGQGTLVTVSSGSGGGGSGGGGSGGGGSFEQVQLQQSGASVKVSCKASELVRPGTGYAFTNYLIEWVKQRPGQGLEWIGVINPGSGGTNYNEKFKGKATLTADKSSSTAYMQLSSLTSDDSAVYFCARYRSYDWYFDVWGAGTTVTVSSTREDLKNVFPPEVAVFEPSEAEISHTQKATLVCLATGFYPDHVELSWWVNGKEVHSGVCTDPQPLKEQPALNDSRYCLSSRLRVSATFWQNPRNHFRCQVQFYGLSENDEWTQDRAKPVTQIVSAEAWGRADCDVKLVEKSFETDTNLNFQNLSVIGFRILLLKVAGFNLLMTLRLWSS

SEQ ID NO: 13211 - protein, 894 aa, synthetic construct
MALPVTALLLPLALLLHAARPEVQLVESGGGLVQPGGSLRLSCAASGFSFSDFWMSWVRQAPGKGLEWVATISQAGSEKDYVDSVKGRFTISRDNAKKSLYLQMNSLRAEDTAVYYCASGVYSFDYRGQGTLVTVSSGTGGGGSGGGGSGGGGSEFDIQMTQSFSSLSASVGDRVTITCRASQDISNYLNWYQQKPGKAPKLLIYYTSRLHSGVPSRFSGSGSGTDYTLTISSLQPEDFATYFCQQGNTLPWTFGGGTKLEIKRLEIQNPDPAVYQLRDSKSSDKSVCLFTDFDSQTNVSQSKDSDVYITDKCVLDMRSMDFKSNSAVAWSNKSDFACANAFNNSIIPEDTFFPSPESSCGFTSESYQQGVLSATILYEILLGKATLYAVLVSALVLMAMVKRKDSRGRAKRSGSGVKQTLNFDLLKLAGDVESNPGPTSMDWIWRILFLVGAATGAHSGPQLQLQESGPGLVKPSETLSLTCTVSGDSISSGDYYWGWIRQPPGKGLEWIGHIYYSGVTYYNPSLKSRVTISVDTSRNQFSLKLSSVTAADTAVYYCTREDSSNWRSRGQGTLVTVSSGSGGGGSGGGGSGGGGSFEEVQLVQSGGGLVQSGGSLRLSCRASGYTFTRYWMLWVRQRPGKGLEWVAEINPRNDRTNYNEKFKTRFTISVDRSKNTLYLQMDSLRAEDTAVYFCALGGGYAMDYWGQGTLVTVSSTREDLKNVFPPEVAVFEPSEAEISHTQKATLVCLATGFYPDHVELSWWVNGKEVHSGVCTDPQPLKEQPALNDSRYCLSSRLRVSATFWQNPRNHFRCQVQFYGLSENDEWTQDRAKPVTQIVSAEAWGRADCDVKLVEKSFETDTNLNFQNLSVIGFRILLLKVAGFNLLMTLRLWSS

SEQ ID NO: 13212 - protein, 895 aa, synthetic construct
MALPVTALLLPLALLLHAARPEVQLVESGGGLVQPGGSLRLSCAASGFSFSDFWMSWVRQAPGKGLEWVATISQAGSEKDYVDSVKGRFTISRDNAKKSLYLQMNSLRAEDTAVYYCASGVYSFDYRGQGTLVTVSSGTGGGGSGGGGSGGGGSEFDIQMTQSPASLSASVGETVTIICRASVNIYSYLAWYQQKQGKSPQLLVYNAKILAEGVPSRFSGSGSGTQFSLKINSLQPEDFGSYYCQHHYGTFTFGSGTKLEIKRLEIQNPDPAVYQLRDSKSSDKSVCLFTDFDSQTNVSQSKDSDVYITDKCVLDMRSMDFKSNSAVAWSNKSDFACANAFNNSIIPEDTFFPSPESSCGFTSESYQQGVLSATILYEILLGKATLYAVLVSALVLMAMVKRKDSRGRAKRSGSGVKQTLNFDLLKLAGDVESNPGPTSMDWIWRILFLVGAATGAHSGPQLQLQESGPGLVKPSETLSLTCTVSGDSISSGDYYWGWIRQPPGKGLEWIGHIYYSGVTYYNPSLKSRVTISVDTSRNQFSLKLSSVTAADTAVYYCTREDSSNWRSRGQGTLVTVSSGSGGGGSGGGGSGGGGSFEQVQLKESGPGLVAPSQSLSITCTISGFSLTSYGVHWVRQPPGKGLEWLVVIWSDGSTTYNSALKSRLSISKDNSKSQVFLKMNSLQTDDTAIYYCASHYGSTLAFASWGHGTLVTVSAATREDLKNVFPPEVAVFEPSEAEISHTQKATLVCLATGFYPDHVELSWWVNGKEVHSGVCTDPQPLKEQPALNDSRYCLSSRLRVSATFWQNPRNHFRCQVQFYGLSENDEWTQDRAKPVTQIVSAEAWGRADCDVKLVEKSFETDTNLNFQNLSVIGFRILLLKVAGFNLLMTLRLWSS

SEQ ID NO: 13213 - protein, 903 aa, synthetic construct
MALPVTALLLPLALLLHAARPEVQLVESGGGLVQPGGSLRLSCAASGFSFSDFWMSWVRQAPGKGLEWVATISQAGSEKDYVDSVKGRFTISRDNAKKSLYLQMNSLRAEDTAVYYCASGVYSFDYRGQGTLVTVSSGTGGGGSGGGGSGGGGSEFDIVMTQSHKFMSTSVGDRVSVTCKASQNVGNNVAWYQQKPGQSPKVLIYSASYRYSGVPDRFTGSGSGTDFTLTISNVQSEDLAEYFCQQYNTYPFTFGSGTKLEIKLEIQNPDPAVYQLRDSKSSDKSVCLFTDFDSQTNVSQSKDSDVYITDKCVLDMRSMDFKSNSAVAWSNKSDFACANAFNNSIIPEDTFFPSPESSCGFTSESYQQGVLSATILYEILLGKATLYAVLVSALVLMAMVKRKDSRGRAKRSGSGVKQTLNFDLLKLAGDVESNPGPTSMDWIWRILFLVGAATGAHSGPQLQLQESGPGLVKPSETLSLTCTVSGDSISSGDYYWGWIRQPPGKGLEWIGHIYYSGVTYYNPSLKSRVTISVDTSRNQFSLKLSSVTAADTAVYYCTREDSSNWRSRGQGTLVTVSSGSGGGGSGGGGSGGGGSFEEVQLEESGGGLVQPGGSMKLSCVASGFTFSNYWMNWVRQSPEKGLEWVAEIRFKSHNYATHFAESVKGRFTISRDDSKSSVYLQMNNLRAEDTGIYYCTRRIGNSDYDWWYFDVWGAGTSVTVSSASTREDLKNVFPPEVAVFEPSEAEISHTQKATLVCLATGFYPDHVELSWWVNGKEVHSGVCTDPQPLKEQPALNDSRYCLSSRLRVSATFWQNPRNHFRCQVQFYGLSENDEWTQDRAKPVTQIVSAEAWGRADCDVKLVEKSFETDTNLNFQNLSVIGFRILLLKVAGFNLLMTLRLWSS

SEQ ID NO: 13214 - protein, 896 aa, synthetic construct
MALPVTALLLPLALLLHAARPEVQLVESGGGLVQPGGSLRLSCAASGFSFSDFWMSWVRQAPGKGLEWVATISQAGSEKDYVDSVKGRFTISRDNAKKSLYLQMNSLRAEDTAVYYCASGVYSFDYRGQGTLVTVSSGTGGGGSGGGGSGGGGSEFDQIVLTQSPAIMSASPGEKVTISCSASSSVSYMYWYQQKPGSSPKPWIYRTSNLASGVPARFSGSGSGTSYSLTISNMEAEDAAAYYCQQYHSYPTTFGGGTKLEVKLEIQNPDPAVYQLRDSKSSDKSVCLFTDFDSQTNVSQSKDSDVYITDKCVLDMRSMDFKSNSAVAWSNKSDFACANAFNNSIIPEDTFFPSPESSCGFTSESYQQGVLSATILYEILLGKATLYAVLVSALVLMAMVKRKDSRGRAKRSGSGVKQTLNFDLLKLAGDVESNPGPTSMDWIWRILFLVGAATGAHSGPQLQLQESGPGLVKPSETLSLTCTVSGDSISSGDYYWGWIRQPPGKGLEWIGHIYYSGVTYYNPSLKSRVTISVDTSRNQFSLKLSSVTAADTAVYYCTREDSSNWRSRGQGTLVTVSSGSGGGGSGGGGSGGGGSFEEVQLVESGGGLVQPKGSLKLSCAASGFSFNTYAMNWVRQAPGKGLEWIAHIRSKSNNFATYYADSVKDRFSISRDASENILFLQMNNLKTEDTAMYYCVRQGGDFPMDYWGQGTSVTVSSTREDLKNVFPPEVAVFEPSEAEISHTQKATLVCLATGFYPDHVELSWWVNGKEVHSGVCTDPQPLKEQPALNDSRYCLSSRLRVSATFWQNPRNHFRCQVQFYGLSENDEWTQDRAKPVTQIVSAEAWGRADCDVKLVEKSFETDTNLNFQNLSVIGFRILLLKVAGFNLLMTLRLWSS

SEQ ID NO: 13215 - protein, 895 aa, synthetic construct
MALPVTALLLPLALLLHAARPEVQLVESGGGLVQPGGSLRLSCAASGFSFSDFWMSWVRQAPGKGLEWVATISQAGSEKDYVDSVKGRFTISRDNAKKSLYLQMNSLRAEDTAVYYCASGVYSFDYRGQGTLVTVSSGTGGGGSGGGGSGGGGSEFDDIQMTQSSSSFSVSLGDRVTITCMASEDIYIRLAWYQQKPGNAPRLLISAATSLETGVPSRFSGSGSGKDYTLSITSLQTEDVGTYYCQQYWSSPWTFGGGTKLEINLEIQNPDPAVYQLRDSKSSDKSVCLFTDFDSQTNVSQSKDSDVYITDKCVLDMRSMDFKSNSAVAWSNKSDFACANAFNNSIIPEDTFFPSPESSCGFTSESYQQGVLSATILYEILLGKATLYAVLVSALVLMAMVKRKDSRGRAKRSGSGVKQTLNFDLLKLAGDVESNPGPTSMDWIWRILFLVGAATGAHSGPQLQLQESGPGLVKPSETLSLTCTVSGDSISSGDYYWGWIRQPPGKGLEWIGHIYYSGVTYYNPSLKSRVTISVDTSRNQFSLKLSSVTAADTAVYYCTREDSSNWRSRGQGTLVTVSSGSGGGGSGGGGSGGGGSFEDVQLQESGPGLVKPSQSLSLTCTVTGYSITSDYTWNWIRQFPGNKLEWMGYITYSGSTSYNPSLKSRNSITRDTSKNQFFLQLNSVTTEDTATYYCARLGRRYTMDYWGQGTSVTVSSTREDLKNVFPPEVAVFEPSEAEISHTQKATLVCLATGFYPDHVELSWWVNGKEVHSGVCTDPQPLKEQPALNDSRYCLSSRLRVSATFWQNPRNHFRCQVQFYGLSENDEWTQDRAKPVTQIVSAEAWGRADCDVKLVEKSFETDTNLNFQNLSVIGFRILLLKVAGFNLLMTLRLWSS

SEQ ID NO: 13216 - protein, 898 aa, synthetic construct
MALPVTALLLPLALLLHAARPEVQLVESGGGLVQPGGSLRLSCAASGFSFSDFWMSWVRQAPGKGLEWVATISQAGSEKDYVDSVKGRFTISRDNAKKSLYLQMNSLRAEDTAVYYCASGVYSFDYRGQGTLVTVSSGTGGGGSGGGGSGGGGSEFDDIQMTQSPSSLSASVGDRVTITCRASQSISSYLNWYQQKPGKAPKLLIYDASNLETGVPSRFSGSGSGTDFTFTISSLQPEDIATYYCQQYDNLPLTFGGGTKVDIKRLEIQNPDPAVYQLRDSKSSDKSVCLFTDFDSQTNVSQSKDSDVYITDKCVLDMRSMDFKSNSAVAWSNKSDFACANAFNNSIIPEDTFFPSPESSCGFTSESYQQGVLSATILYEILLGKATLYAVLVSALVLMAMVKRKDSRGRAKRSGSGVKQTLNFDLLKLAGDVESNPGPTSMDWIWRILFLVGAATGAHSGPQLQLQESGPGLVKPSETLSLTCTVSGDSISSGDYYWGWIRQPPGKGLEWIGHIYYSGVTYYNPSLKSRVTISVDTSRNQFSLKLSSVTAADTAVYYCTREDSSNWRSRGQGTLVTVSSGSGGGGSGGGGSGGGGSFEQVQLVESGGGVVQPGRSLRLSCAASGFTFSSYAMHWVRQAPGKGLEWVAVISYDGSNKYYADSVKGRFTISRDNSKNTLYLQMNSLRAEDTAVYYCARAHNSSSWSFDYWGQGTLVTVSSTREDLKNVFPPEVAVFEPSEAEISHTQKATLVCLATGFYPDHVELSWWVNGKEVHSGVCTDPQPLKEQPALNDSRYCLSSRLRVSATFWQNPRNHFRCQVQFYGLSENDEWTQDRAKPVTQIVSAEAWGRADCDVKLVEKSFETDTNLNFQNLSVIGFRILLLKVAGFNLLMTLRLWSS

SEQ ID NO: 13217 - protein, 907 aa, synthetic construct
MALPVTALLLPLALLLHAARPEVQLVESGGGLVQPGGSLRLSCAASGFSFSDFWMSWVRQAPGKGLEWVATISQAGSEKDYVDSVKGRFTISRDNAKKSLYLQMNSLRAEDTAVYYCASGVYSFDYRGQGTLVTVSSGTGGGGSGGGGSGGGGSEFDDVVMTQSPLSLPVSLGDQASISCRSSQRLVHSNGNTYLHWYLQKPGQSPKLLIYRVSNRFPGVPDRFSGSGSGTDFTLKISRVEAEDLGIYFCSQSTHVPYTFGGGTKLEIKRLEIQNPDPAVYQLRDSKSSDKSVCLFTDFDSQTNVSQSKDSDVYITDKCVLDMRSMDFKSNSAVAWSNKSDFACANAFNNSIIPEDTFFPSPESSCGFTSESYQQGVLSATILYEILLGKATLYAVLVSALVLMAMVKRKDSRGRAKRSGSGVKQTLNFDLLKLAGDVESNPGPTSMDWIWRILFLVGAATGAHSGPQLQLQESGPGLVKPSETLSLTCTVSGDSISSGDYYWGWIRQPPGKGLEWIGHIYYSGVTYYNPSLKSRVTISVDTSRNQFSLKLSSVTAADTAVYYCTREDSSNWRSRGQGTLVTVSSGSGGGGSGGGGSGGGGSFEEVRLQQSGPDLIKPGASVKMSCKASGYTFTGYVMHWVKQRPGQGLEWIGFINPYNDDIQSNERFRGKATLTSDKSSTTAYMELSSLTSEDSAVYYCARGAGYNFDGAYRFFDFWGQGTTLTVSSTREDLKNVFPPEVAVFEPSEAEISHTQKATLVCLATGFYPDHVELSWWVNGKEVHSGVCTDPQPLKEQPALNDSRYCLSSRLRVSATFWQNPRNHFRCQVQFYGLSENDEWTQDRAKPVTQIVSAEAWGRADCDVKLVEKSFETDTNLNFQNLSVIGFRILLLKVAGFNLLMTLRLWSS

SEQ ID NO: 13218 - protein, 898 aa, synthetic construct
MALPVTALLLPLALLLHAARPEVQLVESGGGLVQPGGSLRLSCAASGFSFSDFWMSWVRQAPGKGLEWVATISQAGSEKDYVDSVKGRFTISRDNAKKSLYLQMNSLRAEDTAVYYCASGVYSFDYRGQGTLVTVSSGTGGGGSGGGGSGGGGSEFDSYELTQPPSVSVSPGQTATISCSGDQLGGKYGHWYQKKPGQSPVLVLYQDRKRPAGIPERFSGSSSGNTITLTISGTQAVDEADYYCQAWDTNLGGVFGGGTKVTVLGQLEIQNPDPAVYQLRDSKSSDKSVCLFTDFDSQTNVSQSKDSDVYITDKCVLDMRSMDFKSNSAVAWSNKSDFACANAFNNSIIPEDTFFPSPESSCGFTSESYQQGVLSATILYEILLGKATLYAVLVSALVLMAMVKRKDSRGRAKRSGSGVKQTLNFDLLKLAGDVESNPGPTSMDWIWRILFLVGAATGAHSGPQLQLQESGPGLVKPSETLSLTCTVSGDSISSGDYYWGWIRQPPGKGLEWIGHIYYSGVTYYNPSLKSRVTISVDTSRNQFSLKLSSVTAADTAVYYCTREDSSNWRSRGQGTLVTVSSGSGGGGSGGGGSGGGGSFEQVQLVESGAEVKKPGASVKVSCKASGYTFTGYYMHWVRQAPGQGLEWMGRINPNSGGTNYAQKFQGRVTMTRDTSISTAYMELSRLRSDDTAVYYCASPRGRGSAFDIWGQGTLVTVSSTREDLKNVFPPEVAVFEPSEAEISHTQKATLVCLATGFYPDHVELSWWVNGKEVHSGVCTDPQPLKEQPALNDSRYCLSSRLRVSATFWQNPRNHFRCQVQFYGLSENDEWTQDRAKPVTQIVSAEAWGRADCDVKLVEKSFETDTNLNFQNLSVIGFRILLLKVAGFNLLMTLRLWSS

SEQ ID NO: 13219 - protein, 901 aa, synthetic construct
MALPVTALLLPLALLLHAARPEVQLVESGGGLVQPGGSLRLSCAASGFSFSDFWMSWVRQAPGKGLEWVATISQAGSEKDYVDSVKGRFTISRDNAKKSLYLQMNSLRAEDTAVYYCASGVYSFDYRGQGTLVTVSSGTGGGGSGGGGSGGGGSEFDNFMLTQPHSVSESPGKTVTISCTRSSGSIASKYVQWYQQRPGSSPTTVIYEDNQRPSGVPDRFSGSIDTSSNSASLTISGLRTEDEADYYCHSYDSNNHSVFGGGTKVTVLGQLEIQNPDPAVYQLRDSKSSDKSVCLFTDFDSQTNVSQSKDSDVYITDKCVLDMRSMDFKSNSAVAWSNKSDFACANAFNNSIIPEDTFFPSPESSCGFTSESYQQGVLSATILYEILLGKATLYAVLVSALVLMAMVKRKDSRGRAKRSGSGVKQTLNFDLLKLAGDVESNPGPTSMDWIWRILFLVGAATGAHSGPQLQLQESGPGLVKPSETLSLTCTVSGDSISSGDYYWGWIRQPPGKGLEWIGHIYYSGVTYYNPSLKSRVTISVDTSRNQFSLKLSSVTAADTAVYYCTREDSSNWRSRGQGTLVTVSSGSGGGGSGGGGSGGGGSFEEVQLVESGGGVVQPGGSLRLSCAASGFTFSSYAMSWVRQAPGKGLEWVSAISGSGGSTYYADSVKGRFSISRDNSKNTLYLQMNSLRAEDTAVYYCARTRSSGAFDIWGQGTLVTVSSTREDLKNVFPPEVAVFEPSEAEISHTQKATLVCLATGFYPDHVELSWWVNGKEVHSGVCTDPQPLKEQPALNDSRYCLSSRLRVSATFWQNPRNHFRCQVQFYGLSENDEWTQDRAKPVTQIVSAEAWGRADCDVKLVEKSFETDTNLNFQNLSVIGFRILLLKVAGFNLLMTLRLWSS

SEQ ID NO: 13220 - protein, 896 aa, synthetic construct
MALPVTALLLPLALLLHAARPEVQLVESGGGLVQPGGSLRLSCAASGFSFSDFWMSWVRQAPGKGLEWVATISQAGSEKDYVDSVKGRFTISRDNAKKSLYLQMNSLRAEDTAVYYCASGVYSFDYRGQGTLVTVSSGTGGGGSGGGGSGGGGSEFDIQMNQSPSSLSASLGDTITITCHASQNINVWLSWYQQKPGNIPKLLIYKASNLHTGVPSRFSGSGSGTGFTITISSLQPEDIATYYCQQGQSYPWTFGGGTKLEIKRLEIQNPDPAVYQLRDSKSSDKSVCLFTDFDSQTNVSQSKDSDVYITDKCVLDMRSMDFKSNSAVAWSNKSDFACANAFNNSIIPEDTFFPSPESSCGFTSESYQQGVLSATILYEILLGKATLYAVLVSALVLMAMVKRKDSRGRAKRSGSGVKQTLNFDLLKLAGDVESNPGPTSMDWIWRILFLVGAATGAHSGPQLQLQESGPGLVKPSETLSLTCTVSGDSISSGDYYWGWIRQPPGKGLEWIGHIYYSGVTYYNPSLKSRVTISVDTSRNQFSLKLSSVTAADTAVYYCTREDSSNWRSRGQGTLVTVSSGSGGGGSGGGGSGGGGSFEEVQLQQSGPELVKPGASVKISCKASGYSFTGYFMNWVKQSHGKSLEYIGRFNPYNGETLYNQKFKGKATLTVDKSSSTVHMELLSVTSEDSAVYYCGRSGNDDAMDYWGQGTSVTVSSATREDLKNVFPPEVAVFEPSEAEISHTQKATLVCLATGFYPDHVELSWWVNGKEVHSGVCTDPQPLKEQPALNDSRYCLSSRLRVSATFWQNPRNHFRCQVQFYGLSENDEWTQDRAKPVTQIVSAEAWGRADCDVKLVEKSFETDTNLNFQNLSVIGFRILLLKVAGFNLLMTLRLWSS

SEQ ID NO: 13221 - protein, 897 aa, synthetic construct
MALPVTALLLPLALLLHAARPEVQLVESGGGLVQPGGSLRLSCAASGFSFSDFWMSWVRQAPGKGLEWVATISQAGSEKDYVDSVKGRFTISRDNAKKSLYLQMNSLRAEDTAVYYCASGVYSFDYRGQGTLVTVSSGTGGGGSGGGGSGGGGSEFEIVLTQSPATLSLSPGERATLSCRASQSVRSYLAWYQQKPGQAPRLLIYDASNRATGIPARFSGSGSGTDFTLTISSLEPEDFAVYYCQQRSNWPPTFGQGTKVEIKLEIQNPDPAVYQLRDSKSSDKSVCLFTDFDSQTNVSQSKDSDVYITDKCVLDMRSMDFKSNSAVAWSNKSDFACANAFNNSIIPEDTFFPSPESSCGFTSESYQQGVLSATILYEILLGKATLYAVLVSALVLMAMVKRKDSRGRAKRSGSGVKQTLNFDLLKLAGDVESNPGPTSMDWIWRILFLVGAATGAHSGPQLQLQESGPGLVKPSETLSLTCTVSGDSISSGDYYWGWIRQPPGKGLEWIGHIYYSGVTYYNPSLKSRVTISVDTSRNQFSLKLSSVTAADTAVYYCTREDSSNWRSRGQGTLVTVSSGSGGGGSGGGGSGGGGSFEQLQVQESGPGLVKPSETLSLTCTVSGGSISNSYFSWGWIRQPPGKGLEWIGSFYYGEKTYYNPSLKSRATISIDTSKSQFSLKLSSVTAADTAVYYCPRGPTMIRGVIDSWGQGTLVTVSSTREDLKNVFPPEVAVFEPSEAEISHTQKATLVCLATGFYPDHVELSWWVNGKEVHSGVCTDPQPLKEQPALNDSRYCLSSRLRVSATFWQNPRNHFRCQVQFYGLSENDEWTQDRAKPVTQIVSAEAWGRADCDVKLVEKSFETDTNLNFQNLSVIGFRILLLKVAGFNLLMTLRLWSS

SEQ ID NO: 13222 - protein, 906 aa, synthetic construct
MALPVTALLLPLALLLHAARPEVQLVESGGGLVQPGGSLRLSCAASGFSFSDFWMSWVRQAPGKGLEWVATISQAGSEKDYVDSVKGRFTISRDNAKKSLYLQMNSLRAEDTAVYYCASGVYSFDYRGQGTLVTVSSGTGGGGSGGGGSGGGGSEFDIVMTQTPLSLPVTPGEPASISCRSSRSLLDSDDGNTYLDWYLQKPGQSPQLLIYTLSYRASGVPDRFSGSGSGTDFTLKISRVEAEDVGVYYCMQRVEFPITFGQGTRLEIKRLEIQNPDPAVYQLRDSKSSDKSVCLFTDFDSQTNVSQSKDSDVYITDKCVLDMRSMDFKSNSAVAWSNKSDFACANAFNNSIIPEDTFFPSPESSCGFTSESYQQGVLSATILYEILLGKATLYAVLVSALVLMAMVKRKDSRGRAKRSGSGVKQTLNFDLLKLAGDVESNPGPTSMDWIWRILFLVGAATGAHSGPQLQLQESGPGLVKPSETLSLTCTVSGDSISSGDYYWGWIRQPPGKGLEWIGHIYYSGVTYYNPSLKSRVTISVDTSRNQFSLKLSSVTAADTAVYYCTREDSSNWRSRGQGTLVTVSSGSGGGGSGGGGSGGGGSFEQVQLVESGGGVVQPGRSLRLSCAASGFIFSRYGMHWVRQAPGKGLKWVAVIWYDGSNKLYADSVKGRFTISRDNSKNTLYLQMNSLRAEDTAVYYCARDYYDNSRHHWGFDYWGQGTLVTVSSTREDLKNVFPPEVAVFEPSEAEISHTQKATLVCLATGFYPDHVELSWWVNGKEVHSGVCTDPQPLKEQPALNDSRYCLSSRLRVSATFWQNPRNHFRCQVQFYGLSENDEWTQDRAKPVTQIVSAEAWGRADCDVKLVEKSFETDTNLNFQNLSVIGFRILLLKVAGFNLLMTLRLWSS

SEQ ID NO: 13223 - protein, 896 aa, synthetic construct
MALPVTALLLPLALLLHAARPEVQLVESGGGLVQPGGSLRLSCAASGFSFSDFWMSWVRQAPGKGLEWVATISQAGSEKDYVDSVKGRFTISRDNAKKSLYLQMNSLRAEDTAVYYCASGVYSFDYRGQGTLVTVSSGTGGGGSGGGGSGGGGSEFEIQMTQSPSSMSASLGDTITITCQATQDIFKNLNWYQQKPGKPPSLLIYYATELAEGVPSRFSGSGSGSDYSLTISNLESEDFAAYYCLQFFEFPFTFGSGTKLEMKLEIQNPDPAVYQLRDSKSSDKSVCLFTDFDSQTNVSQSKDSDVYITDKCVLDMRSMDFKSNSAVAWSNKSDFACANAFNNSIIPEDTFFPSPESSCGFTSESYQQGVLSATILYEILLGKATLYAVLVSALVLMAMVKRKDSRGRAKRSGSGVKQTLNFDLLKLAGDVESNPGPTSMDWIWRILFLVGAATGAHSGPQLQLQESGPGLVKPSETLSLTCTVSGDSISSGDYYWGWIRQPPGKGLEWIGHIYYSGVTYYNPSLKSRVTISVDTSRNQFSLKLSSVTAADTAVYYCTREDSSNWRSRGQGTLVTVSSGSGGGGSGGGGSGGGGSFEQVQLQQSGAELVRPGTSVKVSCKASGYVFTNYWIEWIKQRPGQGLEWIGVMNPGSGETTYNEKFKGKATLTADKSSSTAYMQLSSLTSVDSAVYFCARDHDRDYYAMDYWGQGTSVTVSSTREDLKNVFPPEVAVFEPSEAEISHTQKATLVCLATGFYPDHVELSWWVNGKEVHSGVCTDPQPLKEQPALNDSRYCLSSRLRVSATFWQNPRNHFRCQVQFYGLSENDEWTQDRAKPVTQIVSAEAWGRADCDVKLVEKSFETDTNLNFQNLSVIGFRILLLKVAGFNLLMTLRLWSS

SEQ ID NO: 13224 - protein, 893 aa, synthetic construct
MALPVTALLLPLALLLHAARPEVQLVESGGGLVQPGGSLRLSCAASGFSFSDFWMSWVRQAPGKGLEWVATISQAGSEKDYVDSVKGRFTISRDNAKKSLYLQMNSLRAEDTAVYYCASGVYSFDYRGQGTLVTVSSGTGGGGSGGGGSGGGGSEFDILLTQSPAILSVSPGERVSFSCRASQNIGTSIHWYQQRTNGSPRLLIKYASESVSGIPSRFSGSGSGTDFTLSINSVESEDIADYYCQHTNSWPTTFGGGTKLEIKRLEIQNPDPAVYQLRDSKSSDKSVCLFTDFDSQTNVSQSKDSDVYITDKCVLDMRSMDFKSNSAVAWSNKSDFACANAFNNSIIPEDTFFPSPESSCGFTSESYQQGVLSATILYEILLGKATLYAVLVSALVLMAMVKRKDSRGRAKRSGSGVKQTLNFDLLKLAGDVESNPGPTSMDWIWRILFLVGAATGAHSGPQLQLQESGPGLVKPSETLSLTCTVSGDSISSGDYYWGWIRQPPGKGLEWIGHIYYSGVTYYNPSLKSRVTISVDTSRNQFSLKLSSVTAADTAVYYCTREDSSNWRSRGQGTLVTVSSGSGGGGSGGGGSGGGGSFEQVQLQQSDAELVKPGASVKISCKASGYTFTDHAIHWVKQKPEQGLEWIGYFSPGNGDIKYNEKFKGKATLTADKSSSTAYMQLNSLTSEDSAVYFCKRSYGNYDYWGQGTTLTVSSTREDLKNVFPPEVAVFEPSEAEISHTQKATLVCLATGFYPDHVELSWWVNGKEVHSGVCTDPQPLKEQPALNDSRYCLSSRLRVSATFWQNPRNHFRCQVQFYGLSENDEWTQDRAKPVTQIVSAEAWGRADCDVKLVEKSFETDTNLNFQNLSVIGFRILLLKVAGFNLLMTLRLWSS

SEQ ID NO: 13225 - protein, 898 aa, synthetic construct
MALPVTALLLPLALLLHAARPEVQLVESGGGLVQPGGSLRLSCAASGFSFSDFWMSWVRQAPGKGLEWVATISQAGSEKDYVDSVKGRFTISRDNAKKSLYLQMNSLRAEDTAVYYCASGVYSFDYRGQGTLVTVSSGTGGGGSGGGGSGGGGSEFDIVMTQSPDSLAVSLGERATINCKSSQSLLNSGDQKNYLTWYQQKPGQPPKLLIYWASTRESGVPDRFSGSGSGTDFTLTISSLQAEDVAVYYCQNDYSYPLTFGQGTKVEIKLEIQNPDPAVYQLRDSKSSDKSVCLFTDFDSQTNVSQSKDSDVYITDKCVLDMRSMDFKSNSAVAWSNKSDFACANAFNNSIIPEDTFFPSPESSCGFTSESYQQGVLSATILYEILLGKATLYAVLVSALVLMAMVKRKDSRGRAKRSGSGVKQTLNFDLLKLAGDVESNPGPTSMDWIWRILFLVGAATGAHSGPQLQLQESGPGLVKPSETLSLTCTVSGDSISSGDYYWGWIRQPPGKGLEWIGHIYYSGVTYYNPSLKSRVTISVDTSRNQFSLKLSSVTAADTAVYYCTREDSSNWRSRGQGTLVTVSSGSGGGGSGGGGSGGGGSFEQVQLVQSGAEVKKTGSSVKVSCKASGYTFTDHAIHVWRQAPGQALEWMGHFSPGNTDIKYNDKFKGRVTLTVDRSMSTAYMELSSLRSEDTAMYYCKTSTFFFDYWGQGTMVTVSSTREDLKNVFPPEVAVFEPSEAEISHTQKATLVCLATGFYPDHVELSWWVNGKEVHSGVCTDPQPLKEQPALNDSRYCLSSRLRVSATFWQNPRNHFRCQVQFYGLSENDEWTQDRAKPVTQIVSAEAWGRADCDVKLVEKSFETDTNLNFQNLSVIGFRILLLKVAGFNLLMTLRLWSS

SEQ ID NO: 13226 - protein, 897 aa, synthetic construct
MALPVTALLLPLALLLHAARPEVQLVESGGGLVQPGGSLRLSCAASGFSFSDFWMSWVRQAPGKGLEWVATISQAGSEKDYVDSVKGRFTISRDNAKKSLYLQMNSLRAEDTAVYYCASGVYSFDYRGQGTLVTVSSGTGGGGSGGGGSGGGGSEFDIQMTQSPSSLSASVGDRVTITCKASQDVSIAVAWYQQKPGKAPKVLIYSASYRYTGVPDRFSGSGSGTDFTFTISSLQPEDIAVYYCQQHYITPLTFGGGTKVEIKLEIQNPDPAVYQLRDSKSSDKSVCLFTDFDSQTNVSQSKDSDVYITDKCVLDMRSMDFKSNSAVAWSNKSDFACANAFNNSIIPEDTFFPSPESSCGFTSESYQQGVLSATILYEILLGKATLYAVLVSALVLMAMVKRKDSRGRAKRSGSGVKQTLNFDLLKLAGDVESNPGPTSMDWIWRILFLVGAATGAHSGPQLQLQESGPGLVKPSETLSLTCTVSGDSISSGDYYWGWIRQPPGKGLEWIGHIYYSGVTYYNPSLKSRVTISVDTSRNQFSLKLSSVTAADTAVYYCTREDSSNWRSRGQGTLVTVSSGSGGGGSGGGGSGGGGSFEQIQLVQSGHEVKKPGASVKVSCKASGYTFTNYGMNWVRQAPGQGLEWMGWINTKTGEPTYAEEFKGRFVFSLETSASTAYLQISSLKAEDTAMYFCGRGGYGSSYWYFDVWGQGTTVTVSSTREDLKNVFPPEVAVFEPSEAEISHTQKATLVCLATGFYPDHVELSWWVNGKEVHSGVCTDPQPLKEQPALNDSRYCLSSRLRVSATFWQNPRNHFRCQVQFYGLSENDEWTQDRAKPVTQIVSAEAWGRADCDVKLVEKSFETDTNLNFQNLSVIGFRILLLKVAGFNLLMTLRLWSS

SEQ ID NO: 13227 - protein, 899 aa, synthetic construct
MALPVTALLLPLALLLHAARPEVQLVESGGGLVQPGGSLRLSCAASGFSFSDFWMSWVRQAPGKGLEWVATISQAGSEKDYVDSVKGRFTISRDNAKKSLYLQMNSLRAEDTAVYYCASGVYSFDYRGQGTLVTVSSGTGGGGSGGGGSGGGGSEFDIVMTQSPDSLAVSLGERATINCRASKSVSTSGYSYMHWYQQKPGQPPKLLIYLASNLESGVPDRFSGSGSGTDFTLTISSLQAEDVAVYYCQHSRELPYTFGQGTKLEIKLEIQNPDPAVYQLRDSKSSDKSVCLFTDFDSQTNVSQSKDSDVYITDKCVLDMRSMDFKSNSAVAWSNKSDFACANAFNNSIIPEDTFFPSPESSCGFTSESYQQGVLSATILYEILLGKATLYAVLVSALVLMAMVKRKDSRGRAKRSGSGVKQTLNFDLLKLAGDVESNPGPTSMDWIWRILFLVGAATGAHSGPQLQLQESGPGLVKPSETLSLTCTVSGDSISSGDYYWGWIRQPPGKGLEWIGHIYYSGVTYYNPSLKSRVTISVDTSRNQFSLKLSSVTAADTAVYYCTREDSSNWRSRGQGTLVTVSSGSGGGGSGGGGSGGGGSFEQVQLQESGPGLVKPSETLSLTCTVSGGSISSYGVHWIRQPPGKGLEWIGVIWTSGVTDYNSALMGRVTISVDTSKNQFSLKLSSVTAADTAVYYCARDGDYDRYTMDYWGQGTLVTVSSTREDLKNVFPPEVAVFEPSEAEISHTQKATLVCLATGFYPDHVELSWWVNGKEVHSGVCTDPQPLKEQPALNDSRYCLSSRLRVSATFWQNPRNHFRCQVQFYGLSENDEWTQDRAKPVTQIVSAEAWGRADCDVKLVEKSFETDTNLNFQNLSVIGFRILLLKVAGFNLLMTLRLWSS

SEQ ID NO: 13228 - protein, 899 aa, synthetic construct
MALPVTALLLPLALLLHAARPEVQLVESGGGLVQPGGSLRLSCAASGFSFSDFWMSWVRQAPGKGLEWVATISQAGSEKDYVDSVKGRFTISRDNAKKSLYLQMNSLRAEDTAVYYCASGVYSFDYRGQGTLVTVSSGTGGGGSGGGGSGGGGSEFDIQMTQSPSSLSASVGDRVTITCRASQSIGTSLHWYQQKPGKAPKLLIKFASRLQSGVPSRFSGSGSGTDFTLTISSLQPEDFATYYCQQSPGFPPTFGQGTKLEIKRLEIQNPDPAVYQLRDSKSSDKSVCLFTDFDSQTNVSQSKDSDVYITDKCVLDMRSMDFKSNSAVAWSNKSDFACANAFNNSIIPEDTFFPSPESSCGFTSESYQQGVLSATILYEILLGKATLYAVLVSALVLMAMVKRKDSRGRAKRSGSGVKQTLNFDLLKLAGDVESNPGPTSMDWIWRILFLVGAATGAHSGPQLQLQESGPGLVKPSETLSLTCTVSGDSISSGDYYWGWIRQPPGKGLEWIGHIYYSGVTYYNPSLKSRVTISVDTSRNQFSLKLSSVTAADTAVYYCTREDSSNWRSRGQGTLVTVSSGSGGGGSGGGGSGGGGSFEQVQLVESGGGLVKPGGSLRLSCAASGFSITTSGYYWTWIRQFPGKGLEWMGYIGYNSKTYYNPALKSRITISRDNAKNSLYLQMNSLRAEDTAVYYCARSLYGGYKDAFDSWGQGTLVTVSSTREDLKNVFPPEVAVFEPSEAEISHTQKATLVCLATGFYPDHVELSWWVNGKEVHSGVCTDPQPLKEQPALNDSRYCLSSRLRVSATFWQNPRNHFRCQVQFYGLSENDEWTQDRAKPVTQIVSAEAWGRADCDVKLVEKSFETDTNLNFQNLSVIGFRILLLKVAGFNLLMTLRLWSS

SEQ ID NO: 13229 - protein, 904 aa, synthetic construct
MALPVTALLLPLALLLHAARPEVQLVESGGGLVQPGGSLRLSCAASGFSFSDFWMSWVRQAPGKGLEWVATISQAGSEKDYVDSVKGRFTISRDNAKKSLYLQMNSLRAEDTAVYYCASGVYSFDYRGQGTLVTVSSGTGGGGSGGGGSGGGGSEFDEIVLTQSPLSLPVTPGEPASISCRSSQSLLHSIGYNYLDWYLQKPGQSPQLLIYLGSNRASGVPDRFSGSGSGTDFTLKISRVEAEDVGVYYCMQALQTPLTFGGGTKVEIKRLEIQNPDPAVYQLRDSKSSDKSVCLFTDFDSQTNVSQSKDSDVYITDKCVLDMRSMDFKSNSAVAWSNKSDFACANAFNNSIIPEDTFFPSPESSCGFTSESYQQGVLSATILYEILLGKATLYAVLVSALVLMAMVKRKDSRGRAKRSGSGVKQTLNFDLLKLAGDVESNPGPTSMDWIWRILFLVGAATGAHSGPQLQLQESGPGLVKPSETLSLTCTVSGDSISSGDYYWGWIRQPPGKGLEWIGHIYYSGVTYYNPSLKSRVTISVDTSRNQFSLKLSSVTAADTAVYYCTREDSSNWRSRGQGTLVTVSSGSGGGGSGGGGSGGGGSFEEVQLVESGGGVVQPGRSLRLSCAASGFTFRSYGMHWVRQAPGKGLEWVAVISYDGSNKYYTDSVNGRFTISRDNSKNTLYLQMNSLRAEDTAVYYCARGGGYYETSGPDYWGQGTLVTVSSTREDLKNVFPPEVAVFEPSEAEISHTQKATLVCLATGFYPDHVELSWWVNGKEVHSGVCTDPQPLKEQPALNDSRYCLSSRLRVSATFWQNPRNHFRCQVQFYGLSENDEWTQDRAKPVTQIVSAEAWGRADCDVKLVEKSFETDTNLNFQNLSVIGFRILLLKVAGFNLLMTLRLWSS

SEQ ID NO: 13230 - protein, 902 aa, synthetic construct
MALPVTALLLPLALLLHAARPEVQLVESGGGLVQPGGSLRLSCAASGFSFSDFWMSWVRQAPGKGLEWVATISQAGSEKDYVDSVKGRFTISRDNAKKSLYLQMNSLRAEDTAVYYCASGVYSFDYRGQGTLVTVSSGTGGGGSGGGGSGGGGSEFDDVVMTQSPLSLPVTPGEPASISCRSSQSLLHSIGYNYLHWFLQKPGQSPQLLIYLGSNRASGVPDRFSGSGSGTDFTLKISRVEAEDVGVYYCMQALQTPPTFGQGTRLEIKRLEIQNPDPAVYQLRDSKSSDKSVCLFTDFDSQTNVSQSKDSDVYITDKCVLDMRSMDFKSNSAVAWSNKSDFACANAFNNSIIPEDTFFPSPESSCGFTSESYQQGVLSATILYEILLGKATLYAVLVSALVLMAMVKRKDSRGRAKRSGSGVKQTLNFDLLKLAGDVESNPGPTSMDWIWRILFLVGAATGAHSGPQLQLQESGPGLVKPSETLSLTCTVSGDSISSGDYYWGWIRQPPGKGLEWIGHIYYSGVTYYNPSLKSRVTISVDTSRNQFSLKLSSVTAADTAVYYCTREDSSNWRSRGQGTLVTVSSGSGGGGSGGGGSGGGGSFEQLQLQESGPGLVKPSGTLSLTCAVSGGSISSSNWWSWVRQPPGKGLEWIGEIYHSGSTNYNPSLKSRVTISVDKSKNQFSLKLSSVTAADTAVYYCVGSPYGDYVLDYWGQGTLVTVSSTREDLKNVFPPEVAVFEPSEAEISHTQKATLVCLATGFYPDHVELSWWVNGKEVHSGVCTDPQPLKEQPALNDSRYCLSSRLRVSATFWQNPRNHFRCQVQFYGLSENDEWTQDRAKPVTQIVSAEAWGRADCDVKLVEKSFETDTNLNFQNLSVIGFRILLLKVAGFNLLMTLRLWSS

SEQ ID NO: 13231 - protein, 900 aa, synthetic construct
MALPVTALLLPLALLLHAARPEVQLVESGGGLVQPGGSLRLSCAASGFSFSDFWMSWVRQAPGKGLEWVATISQAGSEKDYVDSVKGRFTISRDNAKKSLYLQMNSLRAEDTAVYYCASGVYSFDYRGQGTLVTVSSGTGGGGSGGGGSGGGGSEFDEIVLTQSPGTLSLSLGERATLSCRASQSISSSFLAWYQQKPGQAPKLLIYAASTRATGIPDRFSGSGSGTDFTLTISRLEPEDFAVYYCQQYGRSLSFGGGTKVEVKLEIQNPDPAVYQLRDSKSSDKSVCLFTDFDSQTNVSQSKDSDVYITDKCVLDMRSMDFKSNSAVAWSNKSDFACANAFNNSIIPEDTFFPSPESSCGFTSESYQQGVLSATILYEILLGKATLYAVLVSALVLMAMVKRKDSRGRAKRSGSGVKQTLNFDLLKLAGDVESNPGPTSMDWIWRILFLVGAATGAHSGPQLQLQESGPGLVKPSETLSLTCTVSGDSISSGDYYWGWIRQPPGKGLEWIGHIYYSGVTYYNPSLKSRVTISVDTSRNQFSLKLSSVTAADTAVYYCTREDSSNWRSRGQGTLVTVSSGSGGGGSGGGGSGGGGSFEQVQLQQSGPGLVKPSQTLSLTCAISGDSVSGNSATWNWIRQSPSRGLEWLGRTYYRSKWNHDYAESVKSRITINPDTSKNQFSLQLNSVTPEDTAVYYCARGDSSSWYAFDYWGQGTLVTVSSTREDLKNVFPPEVAVFEPSEAEISHTQKATLVCLATGFYPDHVELSWWVNGKEVHSGVCTDPQPLKEQPALNDSRYCLSSRLRVSATFWQNPRNHFRCQVQFYGLSENDEWTQDRAKPVTQIVSAEAWGRADCDVKLVEKSFETDTNLNFQNLSVIGFRILLLKVAGFNLLMTLRLWSS

SEQ ID NO: 13232 - protein, 899 aa, synthetic construct
MALPVTALLLPLALLLHAARPEVQLVESGGGLVQPGGSLRLSCAASGFSFSDFWMSWVRQAPGKGLEWVATISQAGSEKDYVDSVKGRFTISRDNAKKSLYLQMNSLRAEDTAVYYCASGVYSFDYRGQGTLVTVSSGTGGGGSGGGGSGGGGSEFDQSVVTQPPSVSVAPGKTARITCGRNNIGSKSVHWYQQKPGQAPVLVVYDDSDRPSGIPERFSGSNSGNTATLTISRVEAGDEADYYCQVWDSSSDHVVFGGGTKLTVLGLEIQNPDPAVYQLRDSKSSDKSVCLFTDFDSQTNVSQSKDSDVYITDKCVLDMRSMDFKSNSAVAWSNKSDFACANAFNNSIIPEDTFFPSPESSCGFTSESYQQGVLSATILYEILLGKATLYAVLVSALVLMAMVKRKDSRGRAKRSGSGVKQTLNFDLLKLAGDVESNPGPTSMDWIWRILFLVGAATGAHSGPQLQLQESGPGLVKPSETLSLTCTVSGDSISSGDYYWGWIRQPPGKGLEWIGHIYYSGVTYYNPSLKSRVTISVDTSRNQFSLKLSSVTAADTAVYYCTREDSSNWRSRGQGTLVTVSSGSGGGGSGGGGSGGGGSFEVQLVQSGGGVMRPGGSLRLSCAASGFTFDDYGMSWVRQAPGKGLEWVSGINWNGGSTGYADSVRGRFTISRDNAKNSLYLQMNSLRAEDTALYYCARERGYGYHDPHDYWGQGTLVTVSSTREDLKNVFPPEVAVFEPSEAEISHTQKATLVCLATGFYPDHVELSWWVNGKEVHSGVCTDPQPLKEQPALNDSRYCLSSRLRVSATFWQNPRNHFRCQVQFYGLSENDEWTQDRAKPVTQIVSAEAWGRADCDVKLVEKSFETDTNLNFQNLSVIGFRILLLKVAGFNLLMTLRLWSS

SEQ ID NO: 13233 - protein, 912 aa, synthetic construct
MALPVTALLLPLALLLHAARPEVQLVESGGGLVQPGGSLRLSCAASGFSFSDFWMSWVRQAPGKGLEWVATISQAGSEKDYVDSVKGRFTISRDNAKKSLYLQMNSLRAEDTAVYYCASGVYSFDYRGQGTLVTVSSGTGGGGSGGGGSGGGGSEFEQKLISEEDLEFQAVVTQPPSASGTPGQRVTISCSGSSSNIGSNTVNWYQQVPGTAPKLLIYSNNQRPSGVPDRFSGSKSGTSASLAISGLQSEDEADYYCAAWDDSLNGWVFGGGTKLTVLLEIQNPDPAVYQLRDSKSSDKSVCLFTDFDSQTNVSQSKDSDVYITDKCVLDMRSMDFKSNSAVAWSNKSDFACANAFNNSIIPEDTFFPSPESSCGFTSESYQQGVLSATILYEILLGKATLYAVLVSALVLMAMVKRKDSRGRAKRSGSGVKQTLNFDLLKLAGDVESNPGPTSMDWIWRILFLVGAATGAHSGPQLQLQESGPGLVKPSETLSLTCTVSGDSISSGDYYWGWIRQPPGKGLEWIGHIYYSGVTYYNPSLKSRVTISVDTSRNQFSLKLSSVTAADTAVYYCTREDSSNWRSRGQGTLVTVSSGSGGGGSGGGGSGGGGSFEQMQLVQSGAEVKEPGESLRISCKGSGYSFTNFWISWVRQMPGKGLEWMGRVDPGYSYSTYSPSFQGHVTISADKSTSTAYLQWNSLKASDTAMYYCARVQYSGYYDWFDPWGQGTLVTVSSTREDLKNVFPPEVAVFEPSEAEISHTQKATLVCLATGFYPDHVELSWWVNGKEVHSGVCTDPQPLKEQPALNDSRYCLSSRLRVSATFWQNPRNHFRCQVQFYGLSENDEWTQDRAKPVTQIVSAEAWGRADCDVKLVEKSFETDTNLNFQNLSVIGFRILLLKVAGFNLLMTLRLWSS

SEQ ID NO: 13234 - protein, 906 aa, synthetic construct
MALPVTALLLPLALLLHAARPEVQLVESGGGLVQPGGSLRLSCAASGFSFSDFWMSWVRQAPGKGLEWVATISQAGSEKDYVDSVKGRFTISRDNAKKSLYLQMNSLRAEDTAVYYCASGVYSFDYRGQGTLVTVSSGTGGGGSGGGGSGGGGSEFEQKLISEEDLEFDIQMTQSPSTLSASVGDRVTITCRASQNINKWLAWYQQRPGKAPQLLIYKASSLESGVPSRFSGSGSGTEYTLTISSLQPDDFATYYCQQYNSYATFGQGTKVEIKRLEIQNPDPAVYQLRDSKSSDKSVCLFTDFDSQTNVSQSKDSDVYITDKCVLDMRSMDFKSNSAVAWSNKSDFACANAFNNSIIPEDTFFPSPESSCGFTSESYQQGVLSATILYEILLGKATLYAVLVSALVLMAMVKRKDSRGRAKRSGSGVKQTLNFDLLKLAGDVESNPGPTSMDWIWRILFLVGAATGAHSGPQLQLQESGPGLVKPSETLSLTCTVSGDSISSGDYYWGWIRQPPGKGLEWIGHIYYSGVTYYNPSLKSRVTISVDTSRNQFSLKLSSVTAADTAVYYCTREDSSNWRSRGQGTLVTVSSGSGGGGSGGGGSGGGGSFEQVQLVQSGAEVKKPGESLKISCKGSGYNFSNKWIGWVRQLPGRGLEWIAIIYPGYSDITYSPSFQGRVTISADTSINTAYLHWHSLKASDTAMYYCVRHTALAGFDYWGLGTLVTVSSTREDLKNVFPPEVAVFEPSEAEISHTQKATLVCLATGFYPDHVELSWWVNGKEVHSGVCTDPQPLKEQPALNDSRYCLSSRLRVSATFWQNPRNHFRCQVQFYGLSENDEWTQDRAKPVTQIVSAEAWGRADCDVKLVEKSFETDTNLNFQNLSVIGFRILLLKVAGFNLLMTLRLWSS

SEQ ID NO: 13235 - protein, 898 aa, synthetic construct
MALPVTALLLPLALLLHAARPEVQLVESGGGLVQPGGSLRLSCAASGFSFSDFWMSWVRQAPGKGLEWVATISQAGSEKDYVDSVKGRFTISRDNAKKSLYLQMNSLRAEDTAVYYCASGVYSFDYRGQGTLVTVSSGTGGGGSGGGGSGGGGSEFDIVLTQSPASLAVSLGQRATISCRASESVDNYGNTFMHWYQQKPGQPPKLLIYRASNLESGIPARFSGSGSRTDFTLTINPVEADDVATYYCQQSNEDPPTFGAGTKLELKLEIQNPDPAVYQLRDSKSSDKSVCLFTDFDSQTNVSQSKDSDVYITDKCVLDMRSMDFKSNSAVAWSNKSDFACANAFNNSIIPEDTFFPSPESSCGFTSESYQQGVLSATILYEILLGKATLYAVLVSALVLMAMVKRKDSRGRAKRSGSGVKQTLNFDLLKLAGDVESNPGPTSMDWIWRILFLVGAATGAHSGPQLQLQESGPGLVKPSETLSLTCTVSGDSISSGDYYWGWIRQPPGKGLEWIGHIYYSGVTYYNPSLKSRVTISVDTSRNQFSLKLSSVTAADTAVYYCTREDSSNWRSRGQGTLVTVSSGSGGGGSGGGGSGGGGSFEQIQLVQSGPELKKPGETVKISCKASGYIFTNYGMNWVKQAPGKSFKWMGWINTYTGESTYSADFKGRFAFSLETSASTAYLHINDLKNEDTATYFCARSGGYDPMDYWGQGTSVTVSSTREDLKNVFPPEVAVFEPSEAEISHTQKATLVCLATGFYPDHVELSWWVNGKEVHSGVCTDPQPLKEQPALNDSRYCLSSRLRVSATFWQNPRNHFRCQVQFYGLSENDEWTQDRAKPVTQIVSAEAWGRADCDVKLVEKSFETDTNLNFQNLSVIGFRILLLKVAGFNLLMTLRLWSS

SEQ ID NO: 13236 - protein, 897 aa, synthetic construct
MALPVTALLLPLALLLHAARPEVQLVESGGGLVQPGGSLRLSCAASGFSFSDFWMSWVRQAPGKGLEWVATISQAGSEKDYVDSVKGRFTISRDNAKKSLYLQMNSLRAEDTAVYYCASGVYSFDYRGQGTLVTVSSGTGGGGSGGGGSGGGGSEFDEIVLTQSPGTLSLSPGERATLSCRASQSVSNTYLAWYHQRPGQAPRLLIYGASSRATGIPDRFSGSGSGTDFALTISSLEPEDFAVYYCQQYSNSWTFGQGTKVEIKRLEIQNPDPAVYQLRDSKSSDKSVCLFTDFDSQTNVSQSKDSDVYITDKCVLDMRSMDFKSNSAVAWSNKSDFACANAFNNSIIPEDTFFPSPESSCGFTSESYQQGVLSATILYEILLGKATLYAVLVSALVLMAMVKRKDSRGRAKRSGSGVKQTLNFDLLKLAGDVESNPGPTSMDWIWRILFLVGAATGAHSGPQLQLQESGPGLVKPSETLSLTCTVSGDSISSGDYYWGWIRQPPGKGLEWIGHIYYSGVTYYNPSLKSRVTISVDTSRNQFSLKLSSVTAADTAVYYCTREDSSNWRSRGQGTLVTVSSGSGGGGSGGGGSGGGGSFEQVQLVESGGGVVQPGRSLRLSCAASGFTFSSYDMHWVRQAPGKGLEWVAVISYDGTNEYYADSVKGRFTISRDTSKNTLYLQMNSLRAEDTAVYYCARERYFDWSFDYWGQGTLVSVSSTREDLKNVFPPEVAVFEPSEAEISHTQKATLVCLATGFYPDHVELSWWVNGKEVHSGVCTDPQPLKEQPALNDSRYCLSSRLRVSATFWQNPRNHFRCQVQFYGLSENDEWTQDRAKPVTQIVSAEAWGRADCDVKLVEKSFETDTNLNFQNLSVIGFRILLLKVAGFNLLMTLRLWSS

SEQ ID NO: 13237 - protein, 896 aa, synthetic construct
MALPVTALLLPLALLLHAARPEVQLVESGGGLVQPGGSLRLSCAASGFSFSDFWMSWVRQAPGKGLEWVATISQAGSEKDYVDSVKGRFTISRDNAKKSLYLQMNSLRAEDTAVYYCASGVYSFDYRGQGTLVTVSSGTGGGGSGGGGSGGGGSEFDELTQDPAVSVALGQTVRITCQGDSLRSNYANWYQQKPGQAPVLVIYGQNNRPSGIPDRFSGSSSGNTASLTITGAQAADEADYYCDSRVSTGNHVVFGGGTKLTVLGQLEIQNPDPAVYQLRDSKSSDKSVCLFTDFDSQTNVSQSKDSDVYITDKCVLDMRSMDFKSNSAVAWSNKSDFACANAFNNSIIPEDTFFPSPESSCGFTSESYQQGVLSATILYEILLGKATLYAVLVSALVLMAMVKRKDSRGRAKRSGSGVKQTLNFDLLKLAGDVESNPGPTSMDWIWRILFLVGAATGAHSGPQLQLQESGPGLVKPSETLSLTCTVSGDSISSGDYYWGWIRQPPGKGLEWIGHIYYSGVTYYNPSLKSRVTISVDTSRNQFSLKLSSVTAADTAVYYCTREDSSNWRSRGQGTLVTVSSGSGGGGSGGGGSGGGGSFEEVQLVQSGAEVKKPGASVKVSCKASGYTFTSYAMHWVRQAPGQRLEWMGWINAGNGNTKYSQKFQGRVTITRDTSASTAYMELSSLRSEDTAVYYCARDISYGSFDYWGQGTLVTVSSTREDLKNVFPPEVAVFEPSEAEISHTQKATLVCLATGFYPDHVELSWWVNGKEVHSGVCTDPQPLKEQPALNDSRYCLSSRLRVSATFWQNPRNHFRCQVQFYGLSENDEWTQDRAKPVTQIVSAEAWGRADCDVKLVEKSFETDTNLNFQNLSVIGFRILLLKVAGFNLLMTLRLWSS

SEQ ID NO: 13238 - protein, 898 aa, synthetic construct
MALPVTALLLPLALLLHAARPEVQLVESGGGLVQPGGSLRLSCAASGFSFSDFWMSWVRQAPGKGLEWVATISQAGSEKDYVDSVKGRFTISRDNAKKSLYLQMNSLRAEDTAVYYCASGVYSFDYRGQGTLVTVSSGTGGGGSGGGGSGGGGSEFDDIVLTQTPATLSVTPGDSVSLSCRASQSISNNLHWYQQKSHESPRLLIKNASQSISGIPSKFSGSGSGTDFTLRINSVETEDFGMYFCQQSNSWPYTFGSGTKLEIKLEIQNPDPAVYQLRDSKSSDKSVCLFTDFDSQTNVSQSKDSDVYITDKCVLDMRSMDFKSNSAVAWSNKSDFACANAFNNSIIPEDTFFPSPESSCGFTSESYQQGVLSATILYEILLGKATLYAVLVSALVLMAMVKRKDSRGRAKRSGSGVKQTLNFDLLKLAGDVESNPGPTSMDWIWRILFLVGAATGAHSGPQLQLQESGPGLVKPSETLSLTCTVSGDSISSGDYYWGWIRQPPGKGLEWIGHIYYSGVTYYNPSLKSRVTISVDTSRNQFSLKLSSVTAADTAVYYCTREDSSNWRSRGQGTLVTVSSGSGGGGSGGGGSGGGGSFEQVKLQQSGPELVKPGASVKISCKASGYSFTGYYMHWVKQSHGNILDWIGYIYPYNGVSSYNQKFKGKATLTVDKSSSTAYMELRSLTSEDSAVYYCARERGLYQLRAMDYWGQGTSVTVSSTREDLKNVFPPEVAVFEPSEAEISHTQKATLVCLATGFYPDHVELSWWVNGKEVHSGVCTDPQPLKEQPALNDSRYCLSSRLRVSATFWQNPRNHFRCQVQFYGLSENDEWTQDRAKPVTQIVSAEAWGRADCDVKLVEKSFETDTNLNFQNLSVIGFRILLLKVAGFNLLMTLRLWSS

SEQ ID NO: 13239 - protein, 889 aa, synthetic construct
MALPVTALLLPLALLLHAARPEVQLVESGGGLVQPGGSLRLSCAASGFSFSDFWMSWVRQAPGKGLEWVATISQAGSEKDYVDSVKGRFTISRDNAKKSLYLQMNSLRAEDTAVYYCASGVYSFDYRGQGTLVTVSSGTGGGGSGGGGSGGGGSEFDDIVMTQTPAIMSASPGQKVTITCSASSSVNYMHWYQQKLGSSPKLWIYDTSKLAPGVPARFSGSGSGTSYSLTISSMEAEDAASYFCHQWSSYPYTFGSGTKLEIKLEIQNPDPAVYQLRDSKSSDKSVCLFTDFDSQTNVSQSKDSDVYITDKCVLDMRSMDFKSNSAVAWSNKSDFACANAFNNSIIPEDTFFPSPESSCGFTSESYQQGVLSATILYEILLGKATLYAVLVSALVLMAMVKRKDSRGRAKRSGSGVKQTLNFDLLKLAGDVESNPGPTSMDWIWRILFLVGAATGAHSGPQLQLQESGPGLVKPSETLSLTCTVSGDSISSGDYYWGWIRQPPGKGLEWIGHIYYSGVTYYNPSLKSRVTISVDTSRNQFSLKLSSVTAADTAVYYCTREDSSNWRSRGQGTLVTVSSGSGGGGSGGGGSGGGGSFEEVQLQESGPDLVKPSQSLSLTCTVTGYSITSGYGWHWIRQFPGNKLEWMGYIHYSGSTTYNPSLKSRISISRDTSKNQFFLQLNSVTTEDTATYYCARSLRYWGQGTTLTVSSTREDLKNVFPPEVAVFEPSEAEISHTQKATLVCLATGFYPDHVELSWWVNGKEVHSGVCTDPQPLKEQPALNDSRYCLSSRLRVSATFWQNPRNHFRCQVQFYGLSENDEWTQDRAKPVTQIVSAEAWGRADCDVKLVEKSFETDTNLNFQNLSVIGFRILLLKVAGFNLLMTLRLWSS

SEQ ID NO: 13240 - protein, 892 aa, synthetic construct
MALPVTALLLPLALLLHAARPEVQLVESGGGLVQPGGSLRLSCAASGFSFSDFWMSWVRQAPGKGLEWVATISQAGSEKDYVDSVKGRFTISRDNAKKSLYLQMNSLRAEDTAVYYCASGVYSFDYRGQGTLVTVSSGTGGGGSGGGGSGGGGSEFDDIQMTQSPSSLSASVGDRVTITCSATSSISYMHWYQQKPGKAPKGWIYDTSKLAHGVPSRFSGSGSGTDFTLTISSLQPEDFATYYCHQRRSYPFTFGQGTKVEIKLEIQNPDPAVYQLRDSKSSDKSVCLFTDFDSQTNVSQSKDSDVYITDKCVLDMRSMDFKSNSAVAWSNKSDFACANAFNNSIIPEDTFFPSPESSCGFTSESYQQGVLSATILYEILLGKATLYAVLVSALVLMAMVKRKDSRGRAKRSGSGVKQTLNFDLLKLAGDVESNPGPTSMDWIWRILFLVGAATGAHSGPQLQLQESGPGLVKPSETLSLTCTVSGDSISSGDYYWGWIRQPPGKGLEWIGHIYYSGVTYYNPSLKSRVTISVDTSRNQFSLKLSSVTAADTAVYYCTREDSSNWRSRGQGTLVTVSSGSGGGGSGGGGSGGGGSFEEVQLVQSGAEVKKPGASVKVSCKASGYTFTNFWIHWVRQAPGQGLEWIGEIDPSDSYTNYNQKFKGRVTITRDTSTSTAYLELSSLRSEDTAVYYCAREITTVDYWGQGTLVTVSSTREDLKNVFPPEVAVFEPSEAEISHTQKATLVCLATGFYPDHVELSWWVNGKEVHSGVCTDPQPLKEQPALNDSRYCLSSRLRVSATFWQNPRNHFRCQVQFYGLSENDEWTQDRAKPVTQIVSAEAWGRADCDVKLVEKSFETDTNLNFQNLSVIGFRILLLKVAGFNLLMTLRLWSS

SEQ ID NO: 13241 - protein, 899 aa, synthetic construct
MALPVTALLLPLALLLHAARPEVQLVESGGGLVQPGGSLRLSCAASGFSFSDFWMSWVRQAPGKGLEWVATISQAGSEKDYVDSVKGRFTISRDNAKKSLYLQMNSLRAEDTAVYYCASGVYSFDYRGQGTLVTVSSGTGGGGSGGGGSGGGGSEFDDIQMTQSPSSLSASVGDRVTITCKASQGFNKYVAWYQQKPGKAPKLLIYYTSTLQPGVPSRFSGSGSGRDYTLTISSLQPEDFATYYCLQYGNLLYAFGQGTKVEIKRLEIQNPDPAVYQLRDSKSSDKSVCLFTDFDSQTNVSQSKDSDVYITDKCVLDMRSMDFKSNSAVAWSNKSDFACANAFNNSIIPEDTFFPSPESSCGFTSESYQQGVLSATILYEILLGKATLYAVLVSALVLMAMVKRKDSRGRAKRSGSGVKQTLNFDLLKLAGDVESNPGPTSMDWIWRILFLVGAATGAHSGPQLQLQESGPGLVKPSETLSLTCTVSGDSISSGDYYWGWIRQPPGKGLEWIGHIYYSGVTYYNPSLKSRVTISVDTSRNQFSLKLSSVTAADTAVYYCTREDSSNWRSRGQGTLVTVSSGSGGGGSGGGGSGGGGSFEEVQLVQSGAEVKKPGASVKVSCKASGYTFTSYWIGWVRQAPGQGLEWIGDIYPGGGYTNYNEKFKGRVTITRDTSTSTAYLELSSLRSEDTAVYYCARLDGSSYRGAMDSWGQGTLVTVSSTREDLKNVFPPEVAVFEPSEAEISHTQKATLVCLATGFYPDHVELSWWVNGKEVHSGVCTDPQPLKEQPALNDSRYCLSSRLRVSATFWQNPRNHFRCQVQFYGLSENDEWTQDRAKPVTQIVSAEAWGRADCDVKLVEKSFETDTNLNFQNLSVIGFRILLLKVAGFNLLMTLRLWSS

SEQ ID NO: 13242 - protein, 895 aa, synthetic construct
MALPVTALLLPLALLLHAARPEVQLVESGGGLVQPGGSLRLSCAASGFSFSDFWMSWVRQAPGKGLEWVATISQAGSEKDYVDSVKGRFTISRDNAKKSLYLQMNSLRAEDTAVYYCASGVYSFDYRGQGTLVTVSSGTGGGGSGGGGSGGGGSEFDDIQMTQSPSSLSASVGDRVTITCRASQDIRYYLNWYQQKPGKAPKLLIYVASSLQSGVPSRFSGSGSGTEFTLTVSSLQPEDFATYYCLQVYSTPRTFGQGTKVEIKLEIQNPDPAVYQLRDSKSSDKSVCLFTDFDSQTNVSQSKDSDVYITDKCVLDMRSMDFKSNSAVAWSNKSDFACANAFNNSIIPEDTFFPSPESSCGFTSESYQQGVLSATILYEILLGKATLYAVLVSALVLMAMVKRKDSRGRAKRSGSGVKQTLNFDLLKLAGDVESNPGPTSMDWIWRILFLVGAATGAHSGPQLQLQESGPGLVKPSETLSLTCTVSGDSISSGDYYWGWIRQPPGKGLEWIGHIYYSGVTYYNPSLKSRVTISVDTSRNQFSLKLSSVTAADTAVYYCTREDSSNWRSRGQGTLVTVSSGSGGGGSGGGGSGGGGSFEEVQLVESGGGLAKPGGSLRLSCAASGFRFTFNNYYMDWVRQAPGQGLEWVSRISSSGDPTWYADSVKGRFTISRENAKNTLFLQMNSLRAEDTAVYYCASLTTGSDSWGQGVLVTVSSTREDLKNVFPPEVAVFEPSEAEISHTQKATLVCLATGFYPDHVELSWWVNGKEVHSGVCTDPQPLKEQPALNDSRYCLSSRLRVSATFWQNPRNHFRCQVQFYGLSENDEWTQDRAKPVTQIVSAEAWGRADCDVKLVEKSFETDTNLNFQNLSVIGFRILLLKVAGFNLLMTLRLWSS

SEQ ID NO: 13243 - protein, 895 aa, synthetic construct
MALPVTALLLPLALLLHAARPEVQLVESGGGLVQPGGSLRLSCAASGFSFSDFWMSWVRQAPGKGLEWVATISQAGSEKDYVDSVKGRFTISRDNAKKSLYLQMNSLRAEDTAVYYCASGVYSFDYRGQGTLVTVSSGTGGGGSGGGGSGGGGSEFEIVMTQSPATLSVSPGERATLSCRASQSVSRNLAWYQQKPGQAPRLLIYGASTRATGIPARFSGSGSGTEFTLTIGSLQSEDFAVYYCQQYKTWPRTFGQGTNVEIKLEIQNPDPAVYQLRDSKSSDKSVCLFTDFDSQTNVSQSKDSDVYITDKCVLDMRSMDFKSNSAVAWSNKSDFACANAFNNSIIPEDTFFPSPESSCGFTSESYQQGVLSATILYEILLGKATLYAVLVSALVLMAMVKRKDSRGRAKRSGSGVKQTLNFDLLKLAGDVESNPGPTSMDWIWRILFLVGAATGAHSGPQLQLQESGPGLVKPSETLSLTCTVSGDSISSGDYYWGWIRQPPGKGLEWIGHIYYSGVTYYNPSLKSRVTISVDTSRNQFSLKLSSVTAADTAVYYCTREDSSNWRSRGQGTLVTVSSGSGGGGSGGGGSGGGGSFEQVQLQQWGAGLLKPSETLSLTCAVFGGSFSGYYWSWIRQPPGKGLEWIGEINHRGNTNDNPSLKSRVTISVDTSKNQFALKLSSVTAADTAVYYCARERGYTYGNFDHWGQGTLVTVSSTREDLKNVFPPEVAVFEPSEAEISHTQKATLVCLATGFYPDHVELSWWVNGKEVHSGVCTDPQPLKEQPALNDSRYCLSSRLRVSATFWQNPRNHFRCQVQFYGLSENDEWTQDRAKPVTQIVSAEAWGRADCDVKLVEKSFETDTNLNFQNLSVIGFRILLLKVAGFNLLMTLRLWSS

SEQ ID NO: 13244 - protein, 896 aa, synthetic construct
MALPVTALLLPLALLLHAARPEVQLVESGGGLVQPGGSLRLSCAASGFSFSDFWMSWVRQAPGKGLEWVATISQAGSEKDYVDSVKGRFTISRDNAKKSLYLQMNSLRAEDTAVYYCASGVYSFDYRGQGTLVTVSSGTGGGGSGGGGSGGGGSEFEIVMTPSSATLSVSPGERATLSCRASQSVSRNLAWYQQKPGQAPRLLIYGASTRATGIPARFSGSGSGTEFTLTISSLQSEDFAVYYCHQYSNWMCSFGQGTKLEIKLEIQNPDPAVYQLRDSKSSDKSVCLFTDFDSQTNVSQSKDSDVYITDKCVLDMRSMDFKSNSAVAWSNKSDFACANAFNNSIIPEDTFFPSPESSCGFTSESYQQGVLSATILYEILLGKATLYAVLVSALVLMAMVKRKDSRGRAKRSGSGVKQTLNFDLLKLAGDVESNPGPTSMDWIWRILFLVGAATGAHSGPQLQLQESGPGLVKPSETLSLTCTVSGDSISSGDYYWGWIRQPPGKGLEWIGHIYYSGVTYYNPSLKSRVTISVDTSRNQFSLKLSSVTAADTAVYYCTREDSSNWRSRGQGTLVTVSSGSGGGGSGGGGSGGGGSFEEVQLLESGGGLVQPGGSLRLSCAASGFTFSRYAMNWVRQAPGKGLEWVSGISGSGGRTYYADSVKGRFTISRDNSKNTLYLQMNSLRAEDTAVYYCAKDRDFWSGPFDYWGQGTLVTVSSTREDLKNVFPPEVAVFEPSEAEISHTQKATLVCLATGFYPDHVELSWWVNGKEVHSGVCTDPQPLKEQPALNDSRYCLSSRLRVSATFWQNPRNHFRCQVQFYGLSENDEWTQDRAKPVTQIVSAEAWGRADCDVKLVEKSFETDTNLNFQNLSVIGFRILLLKVAGFNLLMTLRLWSS

SEQ ID NO: 13245 - protein, 901 aa, synthetic construct
MALPVTALLLPLALLLHAARPEVQLVESGGGLVQPGGSLRLSCAASGFSFSDFWMSWVRQAPGKGLEWVATISQAGSEKDYVDSVKGRFTISRDNAKKSLYLQMNSLRAEDTAVYYCASGVYSFDYRGQGTLVTVSSGTGGGGSGGGGSGGGGSEFDIQMTQSPSSLSASVGDRVTITCKASKNIRSYLAWYQQKPGKAPKLLIYSGSTLHSGVPSRFSGSGSGTDFTLTISSLQPEDFATYYCQQHHEYPLTFGQGTKVEIKRLEIQNPDPAVYQLRDSKSSDKSVCLFTDFDSQTNVSQSKDSDVYITDKCVLDMRSMDFKSNSAVAWSNKSDFACANAFNNSIIPEDTFFPSPESSCGFTSESYQQGVLSATILYEILLGKATLYAVLVSALVLMAMVKRKDSRGRAKRSGSGVKQTLNFDLLKLAGDVESNPGPTSMDWIWRILFLVGAATGAHSGPQLQLQESGPGLVKPSETLSLTCTVSGDSISSGDYYWGWIRQPPGKGLEWIGHIYYSGVTYYNPSLKSRVTISVDTSRNQFSLKLSSVTAADTAVYYCTREDSSNWRSRGQGTLVTVSSGSGGGGSGGGGSGGGGSFEQVQLQESGPGLVKPSETLSLTCTVSGYTITSGYDWSWIRQPPGKGLEWIGYINYGGSTNYKPSLGSRVTISVDTSKNQFSLKLSSVTAADTAVYYCARYNEYKSYIYDWYFDFWGQGTLVTVSSTREDLKNVFPPEVAVFEPSEAEISHTQKATLVCLATGFYPDHVELSWWVNGKEVHSGVCTDPQPLKEQPALNDSRYCLSSRLRVSATFWQNPRNHFRCQVQFYGLSENDEWTQDRAKPVTQIVSAEAWGRADCDVKLVEKSFETDTNLNFQNLSVIGFRILLLKVAGFNLLMTLRLWSS

SEQ ID NO: 13246 - protein, 903 aa, synthetic construct
MALPVTALLLPLALLLHAARPEVQLVESGGGLVQPGGSLRLSCAASGFSFSDFWMSWVRQAPGKGLEWVATISQAGSEKDYVDSVKGRFTISRDNAKKSLYLQMNSLRAEDTAVYYCASGVYSFDYRGQGTLVTVSSGTGGGGSGGGGSGGGGSEFQSVVTQPPSVSAAPGQKVTISCSGSSSNIGNNYVSWYQQLPGTAPKLLIYDNNKRPSGIPDRFSGSKSGTSATLGITGLQTGDEADYYCGTWDGSLYTMLFGGGTKLTVLLEIQNPDPAVYQLRDSKSSDKSVCLFTDFDSQTNVSQSKDSDVYITDKCVLDMRSMDFKSNSAVAWSNKSDFACANAFNNSIIPEDTFFPSPESSCGFTSESYQQGVLSATILYEILLGKATLYAVLVSALVLMAMVKRKDSRGRAKRSGSGVKQTLNFDLLKLAGDVESNPGPTSMDWIWRILFLVGAATGAHSGPQLQLQESGPGLVKPSETLSLTCTVSGDSISSGDYYWGWIRQPPGKGLEWIGHIYYSGVTYYNPSLKSRVTISVDTSRNQFSLKLSSVTAADTAVYYCTREDSSNWRSRGQGTLVTVSSGSGGGGSGGGGSGGGGSFEEVQLVESGGGLVKPGGSLRLSCAASGFTFSNAWMSWVRQAPGKGLEWVGFIRSKAYGGTTEYAASVKGRFTISRDDSKSIAYLQMNNLKTEDTAVYYCARDGLYSSSWYDSDYWGQGTLVTVSSTREDLKNVFPPEVAVFEPSEAEISHTQKATLVCLATGFYPDHVELSWWVNGKEVHSGVCTDPQPLKEQPALNDSRYCLSSRLRVSATFWQNPRNHFRCQVQFYGLSENDEWTQDRAKPVTQIVSAEAWGRADCDVKLVEKSFETDTNLNFQNLSVIGFRILLLKVAGFNLLMTLRLWSS

SEQ ID NO: 13247 - protein, 908 aa, synthetic construct
MALPVTALLLPLALLLHAARPEVQLVESGGGLVQPGGSLRLSCAASGFSFSDFWMSWVRQAPGKGLEWVATISQAGSEKDYVDSVKGRFTISRDNAKKSLYLQMNSLRAEDTAVYYCASGVYSFDYRGQGTLVTVSSGTGGGGSGGGGSGGGGSEFQSVLTQPPSVSGAPGQRVTISCTGSSSNIGAGYDVHWYQQLPGTAPKLLIFGNSNRPSGVPDRFSGFKSGTSASLAITGLQAEDEADYFCQSYDSSLSGSGVFGTGTKVTVLGLEIQNPDPAVYQLRDSKSSDKSVCLFTDFDSQTNVSQSKDSDVYITDKCVLDMRSMDFKSNSAVAWSNKSDFACANAFNNSIIPEDTFFPSPESSCGFTSESYQQGVLSATILYEILLGKATLYAVLVSALVLMAMVKRKDSRGRAKRSGSGVKQTLNFDLLKLAGDVESNPGPTSMDWIWRILFLVGAATGAHSGPQLQLQESGPGLVKPSETLSLTCTVSGDSISSGDYYWGWIRQPPGKGLEWIGHIYYSGVTYYNPSLKSRVTISVDTSRNQFSLKLSSVTAADTAVYYCTREDSSNWRSRGQGTLVTVSSGSGGGGSGGGGSGGGGSFEQMQLVQSGGGLVQPGRSLRLSCAASGFTFDDYAMHWVRQAPGKGLEWVSGISWNSGSIGYADSVKGRFTISRDNAKNSLYLQMNSLRAEDTALYYCAKDIHSGSYYGLLYYAMDVWGQGTTVTVSSTREDLKNVFPPEVAVFEPSEAEISHTQKATLVCLATGFYPDHVELSWWVNGKEVHSGVCTDPQPLKEQPALNDSRYCLSSRLRVSATFWQNPRNHFRCQVQFYGLSENDEWTQDRAKPVTQIVSAEAWGRADCDVKLVEKSFETDTNLNFQNLSVIGFRILLLKVAGFNLLMTLRLWSS

SEQ ID NO: 13248 - protein, 908 aa, synthetic construct
MALPVTALLLPLALLLHAARPEVQLVESGGGLVQPGGSLRLSCAASGFSFSDFWMSWVRQAPGKGLEWVATISQAGSEKDYVDSVKGRFTISRDNAKKSLYLQMNSLRAEDTAVYYCASGVYSFDYRGQGTLVTVSSGTGGGGSGGGGSGGGGSEFLPVLTQPPSASGTPGQRVTISCSGRSSNIGSNSVNWYRQLPGAAPKLLIYSNNQRPPGVPVRFSGSKSGTSASLAISGLQSEDEATYYCATWDDNLNVHYVFGTGTKVTVLGSRLEIQNPDPAVYQLRDSKSSDKSVCLFTDFDSQTNVSQSKDSDVYITDKCVLDMRSMDFKSNSAVAWSNKSDFACANAFNNSIIPEDTFFPSPESSCGFTSESYQQGVLSATILYEILLGKATLYAVLVSALVLMAMVKRKDSRGRAKRSGSGVKQTLNFDLLKLAGDVESNPGPTSMDWIWRILFLVGAATGAHSGPQLQLQESGPGLVKPSETLSLTCTVSGDSISSGDYYWGWIRQPPGKGLEWIGHIYYSGVTYYNPSLKSRVTISVDTSRNQFSLKLSSVTAADTAVYYCTREDSSNWRSRGQGTLVTVSSGSGGGGSGGGGSGGGGSFELEMAQVQLVQSGAEVKKPGSSVKVSCKASGGTFSSYAISWVRQAPGQGLEWMGRIIPILGIANYAQKFQGRVTITADKSTSTAYMELSSLRSEDTAVYYCARGGYYSHDMWSEDWGQGTLVTVSSTREDLKNVFPPEVAVFEPSEAEISHTQKATLVCLATGFYPDHVELSWWVNGKEVHSGVCTDPQPLKEQPALNDSRYCLSSRLRVSATFWQNPRNHFRCQVQFYGLSENDEWTQDRAKPVTQIVSAEAWGRADCDVKLVEKSFETDTNLNFQNLSVIGFRILLLKVAGFNLLMTLRLWSS

SEQ ID NO: 13249 - protein, 902 aa, synthetic construct
MALPVTALLLPLALLLHAARPEVQLVESGGGLVQPGGSLRLSCAASGFSFSDFWMSWVRQAPGKGLEWVATISQAGSEKDYVDSVKGRFTISRDNAKKSLYLQMNSLRAEDTAVYYCASGVYSFDYRGQGTLVTVSSGTGGGGSGGGGSGGGGSEFDFVMTQSPDSLAVSLGERVTMSCKSSQSLLNSGNQKNYLTWYQQKPGQPPKLLIYWASTRESGVPDRFSGSGSGTDFTLTISSLQAEDVAVYYCQNDYSYPYTFGQGTKLEIKLEIQNPDPAVYQLRDSKSSDKSVCLFTDFDSQTNVSQSKDSDVYITDKCVLDMRSMDFKSNSAVAWSNKSDFACANAFNNSIIPEDTFFPSPESSCGFTSESYQQGVLSATILYEILLGKATLYAVLVSALVLMAMVKRKDSRGRAKRSGSGVKQTLNFDLLKLAGDVESNPGPTSMDWIWRILFLVGAATGAHSGPQLQLQESGPGLVKPSETLSLTCTVSGDSISSGDYYWGWIRQPPGKGLEWIGHIYYSGVTYYNPSLKSRVTISVDTSRNQFSLKLSSVTAADTAVYYCTREDSSNWRSRGQGTLVTVSSGSGGGGSGGGGSGGGGSFEEVQLVQSGAELKKPGASVKVSCKASGYTFTDYYMKWVRQAPGQGLEWIGDIIPSNGATFYNQKFKGRVTITVDKSTSTAYMELSSLRSEDTAVYYCARSHLLRASWFAYWGQGTLVTVSSTREDLKNVFPPEVAVFEPSEAEISHTQKATLVCLATGFYPDHVELSWWVNGKEVHSGVCTDPQPLKEQPALNDSRYCLSSRLRVSATFWQNPRNHFRCQVQFYGLSENDEWTQDRAKPVTQIVSAEAWGRADCDVKLVEKSFETDTNLNFQNLSVIGFRILLLKVAGFNLLMTLRLWSS

SEQ ID NO: 13250 - protein, 902 aa, synthetic construct
MALPVTALLLPLALLLHAARPEVQLVESGGGLVQPGGSLRLSCAASGFSFSDFWMSWVRQAPGKGLEWVATISQAGSEKDYVDSVKGRFTISRDNAKKSLYLQMNSLRAEDTAVYYCASGVYSFDYRGQGTLVTVSSGTGGGGSGGGGSGGGGSEFDFVMTQSPDSLAVSLGERVTMSCKSSQSLLNSGNQKNYLTWYQQKPGQPPKLLIYWASTRESGVPDRFSGSGSGTDFTLTISSLQAEDVAVYYCQNDYSYPYTFGQGTKLEIKLEIQNPDPAVYQLRDSKSSDKSVCLFTDFDSQTNVSQSKDSDVYITDKCVLDMRSMDFKSNSAVAWSNKSDFACANAFNNSIIPEDTFFPSPESSCGFTSESYQQGVLSATILYEILLGKATLYAVLVSALVLMAMVKRKDSRGRAKRSGSGVKQTLNFDLLKLAGDVESNPGPTSMDWIWRILFLVGAATGAHSGPQLQLQESGPGLVKPSETLSLTCTVSGDSISSGDYYWGWIRQPPGKGLEWIGHIYYSGVTYYNPSLKSRVTISVDTSRNQFSLKLSSVTAADTAVYYCTREDSSNWRSRGQGTLVTVSSGSGGGGSGGGGSGGGGSFEQVQLVQSGAELKKPGASVKVSCKASGYTFTDYYMKWVRQAPGQGLEWIGDIIPSNGATFYNQKFKGRVTITVDKSTSTAYMELSSLRSEDTAVYYCARSHLLRASWFAYWGQGTLVTVSSTREDLKNVFPPEVAVFEPSEAEISHTQKATLVCLATGFYPDHVELSWWVNGKEVHSGVCTDPQPLKEQPALNDSRYCLSSRLRVSATFWQNPRNHFRCQVQFYGLSENDEWTQDRAKPVTQIVSAEAWGRADCDVKLVEKSFETDTNLNFQNLSVIGFRILLLKVAGFNLLMTLRLWSS

SEQ ID NO: 13251 - protein, 892 aa, synthetic construct
MALPVTALLLPLALLLHAARPEVQLVESGGGLVQPGGSLRLSCAASGFSFSDFWMSWVRQAPGKGLEWVATISQAGSEKDYVDSVKGRFTISRDNAKKSLYLQMNSLRAEDTAVYYCASGVYSFDYRGQGTLVTVSSGTGGGGSGGGGSGGGGSEFDVQITQSPSYLAASPGETITINCRASKSISKDLAWYQEKPGKTNKLLIYSGSTLQSGIPSRFSGSGSGTDFTLTISSLEPEDFAMYYCQQHNKYPYTFGGGTKLEIKRLEIQNPDPAVYQLRDSKSSDKSVCLFTDFDSQTNVSQSKDSDVYITDKCVLDMRSMDFKSNSAVAWSNKSDFACANAFNNSIIPEDTFFPSPESSCGFTSESYQQGVLSATILYEILLGKATLYAVLVSALVLMAMVKRKDSRGRAKRSGSGVKQTLNFDLLKLAGDVESNPGPTSMDWIWRILFLVGAATGAHSGPQLQLQESGPGLVKPSETLSLTCTVSGDSISSGDYYWGWIRQPPGKGLEWIGHIYYSGVTYYNPSLKSRVTISVDTSRNQFSLKLSSVTAADTAVYYCTREDSSNWRSRGQGTLVTVSSGSGGGGSGGGGSGGGGSFEQVQLQQPGAELVRPGASVKLSCKASGYTFTSYWMNWVKQRPDQGLEWIGRIDPYDSETHYNQKFKDKAILTVDKSSSTAYMQLSSLTSEDSAVYYCARGNWDDYWGQGTTLTVSSTREDLKNVFPPEVAVFEPSEAEISHTQKATLVCLATGFYPDHVELSWWVNGKEVHSGVCTDPQPLKEQPALNDSRYCLSSRLRVSATFWQNPRNHFRCQVQFYGLSENDEWTQDRAKPVTQIVSAEAWGRADCDVKLVEKSFETDTNLNFQNLSVIGFRILLLKVAGFNLLMTLRLWSS

SEQ ID NO: 13252 - protein, 894 aa, synthetic construct
MALPVTALLLPLALLLHAARPEVQLVESGGGLVQPGGSLRLSCAASGFSFSDFWMSWVRQAPGKGLEWVATISQAGSEKDYVDSVKGRFTISRDNAKKSLYLQMNSLRAEDTAVYYCASGVYSFDYRGQGTLVTVSSGTGGGGSGGGGSGGGGSEFEIVLTQSPTSMTASPGEQVTITCRASSSINYMHWYQQKPGASPRPWIYETSKLASGVPDRFSGSASGTSYSLTINNMEAEDAATYYCQQWNYPSWTFGGGTKLELKLEIQNPDPAVYQLRDSKSSDKSVCLFTDFDSQTNVSQSKDSDVYITDKCVLDMRSMDFKSNSAVAWSNKSDFACANAFNNSIIPEDTFFPSPESSCGFTSESYQQGVLSATILYEILLGKATLYAVLVSALVLMAMVKRKDSRGRAKRSGSGVKQTLNFDLLKLAGDVESNPGPTSMDWIWRILFLVGAATGAHSGPQLQLQESGPGLVKPSETLSLTCTVSGDSISSGDYYWGWIRQPPGKGLEWIGHIYYSGVTYYNPSLKSRVTISVDTSRNQFSLKLSSVTAADTAVYYCTREDSSNWRSRGQGTLVTVSSGSGGGGSGGGGSGGGGSFEEVQLVESGGGLVQPGRSLKLSCAASGFTFSDYNMAWVRQAPKKGLEWVATILYDGGRTYYRGSVKGRFTISRDNAKSTLYLRMDSLRSEDTATYYCATHSRGTDYFDYWGQGVMVTVSSTREDLKNVFPPEVAVFEPSEAEISHTQKATLVCLATGFYPDHVELSWWVNGKEVHSGVCTDPQPLKEQPALNDSRYCLSSRLRVSATFWQNPRNHFRCQVQFYGLSENDEWTQDRAKPVTQIVSAEAWGRADCDVKLVEKSFETDTNLNFQNLSVIGFRILLLKVAGFNLLMTLRLWSS

SEQ ID NO: 13253 - protein, 903 aa, synthetic construct
MALPVTALLLPLALLLHAARPEVQLVESGGGLVQPGGSLRLSCAASGFSFSDFWMSWVRQAPGKGLEWVATISQAGSEKDYVDSVKGRFTISRDNAKKSLYLQMNSLRAEDTAVYYCASGVYSFDYRGQGTLVTVSSGTGGGGSGGGGSGGGGSEFDIVMTQSPSSLAVSEGETVTINCKSSQSFLSSGDGKNYVAWYQYKPGQSPKLLIYWASTRQSGVPDRFIGSGSGTDFTLTISTVQAEDLAIYYCQQYYDTPLTFGSGTKLEIKLEIQNPDPAVYQLRDSKSSDKSVCLFTDFDSQTNVSQSKDSDVYITDKCVLDMRSMDFKSNSAVAWSNKSDFACANAFNNSIIPEDTFFPSPESSCGFTSESYQQGVLSATILYEILLGKATLYAVLVSALVLMAMVKRKDSRGRAKRSGSGVKQTLNFDLLKLAGDVESNPGPTSMDWIWRILFLVGAATGAHSGPQLQLQESGPGLVKPSETLSLTCTVSGDSISSGDYYWGWIRQPPGKGLEWIGHIYYSGVTYYNPSLKSRVTISVDTSRNQFSLKLSSVTAADTAVYYCTREDSSNWRSRGQGTLVTVSSGSGGGGSGGGGSGGGGSFEEVKLQESGPSLVQSSQTLSLTCTVSGFSLTSYHIHWVRQTPGKGLEWMGVMWSDGDTSYNSALKSRLSISRDTSQSQVFLKMNSLQTEDTATYYCARGYYSSYLYLWFAYWGQGTLVTVSSTREDLKNVFPPEVAVFEPSEAEISHTQKATLVCLATGFYPDHVELSWWVNGKEVHSGVCTDPQPLKEQPALNDSRYCLSSRLRVSATFWQNPRNHFRCQVQFYGLSENDEWTQDRAKPVTQIVSAEAWGRADCDVKLVEKSFETDTNLNFQNLSVIGFRILLLKVAGFNLLMTLRLWSS

SEQ ID NO: 13254 - protein, 907 aa, synthetic construct
MALPVTALLLPLALLLHAARPEVQLVESGGGLVQPGGSLRLSCAASGFSFSDFWMSWVRQAPGKGLEWVATISQAGSEKDYVDSVKGRFTISRDNAKKSLYLQMNSLRAEDTAVYYCASGVYSFDYRGQGTLVTVSSGTGGGGSGGGGSGGGGSEFDVLMTQTPVSLPVSLGGQVSISCRSSQSLVHSDGDTYLHWYLQKPGQSPQLLIYRVSNRFSGVPDRFSGSGSGTDFTLKISRVEPEDLGLYYCLQTTHFPPWTFGGGTKLEMKLEIQNPDPAVYQLRDSKSSDKSVCLFTDFDSQTNVSQSKDSDVYITDKCVLDMRSMDFKSNSAVAWSNKSDFACANAFNNSIIPEDTFFPSPESSCGFTSESYQQGVLSATILYEILLGKATLYAVLVSALVLMAMVKRKDSRGRAKRSGSGVKQTLNFDLLKLAGDVESNPGPTSMDWIWRILFLVGAATGAHSGPQLQLQESGPGLVKPSETLSLTCTVSGDSISSGDYYWGWIRQPPGKGLEWIGHIYYSGVTYYNPSLKSRVTISVDTSRNQFSLKLSSVTAADTAVYYCTREDSSNWRSRGQGTLVTVSSGSGGGGSGGGGSGGGGSFEQVQLQQSGPELRRPGSSVRLSCKASGYRIKDFLIHWIKNRPEHGLEWIGWIDPEDGETKYAQKFQTKATLTADTSSNTAYMQLSSLTSEDTATYFCARWGDVYYGLMRGHVMDAWGQGTSVTVSSTREDLKNVFPPEVAVFEPSEAEISHTQKATLVCLATGFYPDHVELSWWVNGKEVHSGVCTDPQPLKEQPALNDSRYCLSSRLRVSATFWQNPRNHFRCQVQFYGLSENDEWTQDRAKPVTQIVSAEAWGRADCDVKLVEKSFETDTNLNFQNLSVIGFRILLLKVAGFNLLMTLRLWSS

SEQ ID NO: 13255 - protein, 902 aa, synthetic construct
MALPVTALLLPLALLLHAARPEVQLVESGGGLVQPGGSLRLSCAASGFSFSDFWMSWVRQAPGKGLEWVATISQAGSEKDYVDSVKGRFTISRDNAKKSLYLQMNSLRAEDTAVYYCASGVYSFDYRGQGTLVTVSSGTGGGGSGGGGSGGGGSEFDIVMTQSPATLSLSPGERATLSCRSSKSLQNVNGNTYLYWFQQKPGQSPQLLIYRMSNLNSGVPDRFSGSGSGTEFTLTISSLEPEDFAVYYCMQHLEYPITFGAGTKLEIKLEIQNPDPAVYQLRDSKSSDKSVCLFTDFDSQTNVSQSKDSDVYITDKCVLDMRSMDFKSNSAVAWSNKSDFACANAFNNSIIPEDTFFPSPESSCGFTSESYQQGVLSATILYEILLGKATLYAVLVSALVLMAMVKRKDSRGRAKRSGSGVKQTLNFDLLKLAGDVESNPGPTSMDWIWRILFLVGAATGAHSGPQLQLQESGPGLVKPSETLSLTCTVSGDSISSGDYYWGWIRQPPGKGLEWIGHIYYSGVTYYNPSLKSRVTISVDTSRNQFSLKLSSVTAADTAVYYCTREDSSNWRSRGQGTLVTVSSGSGGGGSGGGGSGGGGSFEEVQLVESGGGLVKPGGSLKLSCAASGYTFTSYVMHWVRQAPGKGLEWIGYINPYNDGTKYNEKFQGRVTISSDKSISTAYMELSSLRSEDTAMYYCARGTYYYGTRVFDYWGQGTLVTVSSTREDLKNVFPPEVAVFEPSEAEISHTQKATLVCLATGFYPDHVELSWWVNGKEVHSGVCTDPQPLKEQPALNDSRYCLSSRLRVSATFWQNPRNHFRCQVQFYGLSENDEWTQDRAKPVTQIVSAEAWGRADCDVKLVEKSFETDTNLNFQNLSVIGFRILLLKVAGFNLLMTLRLWSS

SEQ ID NO: 13256 - protein, 898 aa, synthetic construct
MALPVTALLLPLALLLHAARPEVQLVESGGGLVQPGGSLRLSCAASGFSFSDFWMSWVRQAPGKGLEWVATISQAGSEKDYVDSVKGRFTISRDNAKKSLYLQMNSLRAEDTAVYYCASGVYSFDYRGQGTLVTVSSGTGGGGSGGGGSGGGGSEFDIQMTQSPSSLSASVGDRVTITCKASDHINNWLAWYQQKPGQAPKLLIYGATTLETGVPSRFSGSGSGTDYTLTISSLQPEDFATYYCQQSWNTPWTFGQGTKLEIKRLEIQNPDPAVYQLRDSKSSDKSVCLFTDFDSQTNVSQSKDSDVYITDKCVLDMRSMDFKSNSAVAWSNKSDFACANAFNNSIIPEDTFFPSPESSCGFTSESYQQGVLSATILYEILLGKATLYAVLVSALVLMAMVKRKDSRGRAKRSGSGVKQTLNFDLLKLAGDVESNPGPTSMDWIWRILFLVGAATGAHSGPQLQLQESGPGLVKPSETLSLTCTVSGDSISSGDYYWGWIRQPPGKGLEWIGHIYYSGVTYYNPSLKSRVTISVDTSRNQFSLKLSSVTAADTAVYYCTREDSSNWRSRGQGTLVTVSSGSGGGGSGGGGSGGGGSFEQVQLQQPGAELVKPGASVKMSCKASGYAFSSYWINWMKQKPGQGLEWIGQIYPGDGDTNYNGKFKGRATLTADTSSSTAYMQLSSLTSEDSAVYFCARSITTVVGCAMDYWGQGTSVTVSSTREDLKNVFPPEVAVFEPSEAEISHTQKATLVCLATGFYPDHVELSWWVNGKEVHSGVCTDPQPLKEQPALNDSRYCLSSRLRVSATFWQNPRNHFRCQVQFYGLSENDEWTQDRAKPVTQIVSAEAWGRADCDVKLVEKSFETDTNLNFQNLSVIGFRILLLKVAGFNLLMTLRLWSS

SEQ ID NO: 13257 - protein, 900 aa, synthetic construct
MALPVTALLLPLALLLHAARPEVQLVESGGGLVQPGGSLRLSCAASGFSFSDFWMSWVRQAPGKGLEWVATISQAGSEKDYVDSVKGRFTISRDNAKKSLYLQMNSLRAEDTAVYYCASGVYSFDYRGQGTLVTVSSGTGGGGSGGGGSGGGGSEFQIVLSQSPAILSASPGEKVTMTCRASSSVSYMHWYQQKPGSSPKPWIYATSNLASGVPARFSGSGSGTSYSFTISRVEAEDAATYYCQQWTFNPPTFGGGTRLEIKRTVAALEIQNPDPAVYQLRDSKSSDKSVCLFTDFDSQTNVSQSKDSDVYITDKCVLDMRSMDFKSNSAVAWSNKSDFACANAFNNSIIPEDTFFPSPESSCGFTSESYQQGVLSATILYEILLGKATLYAVLVSALVLMAMVKRKDSRGRAKRSGSGVKQTLNFDLLKLAGDVESNPGPTSMDWIWRILFLVGAATGAHSGPQLQLQESGPGLVKPSETLSLTCTVSGDSISSGDYYWGWIRQPPGKGLEWIGHIYYSGVTYYNPSLKSRVTISVDTSRNQFSLKLSSVTAADTAVYYCTREDSSNWRSRGQGTLVTVSSGSGGGGSGGGGSGGGGSFEQAYLQQSGAELVRPGASVKMSCKASGYTFTSYNMHWVKQTPRQGLEWIGGIYPGNGDTSYNQKFKGKATLTVGKSSSTAYMQLSSLTSEDSAVYFCARYDYNYAMDYWGQGTSVTVSSASTREDLKNVFPPEVAVFEPSEAEISHTQKATLVCLATGFYPDHVELSWWVNGKEVHSGVCTDPQPLKEQPALNDSRYCLSSRLRVSATFWQNPRNHFRCQVQFYGLSENDEWTQDRAKPVTQIVSAEAWGRADCDVKLVEKSFETDTNLNFQNLSVIGFRILLLKVAGFNLLMTLRLWSS

SEQ ID NO: 13258 - protein, 898 aa, synthetic construct
MALPVTALLLPLALLLHAARPEVQLVESGGGLVQPGGSLRLSCAASGFSFSDFWMSWVRQAPGKGLEWVATISQAGSEKDYVDSVKGRFTISRDNAKKSLYLQMNSLRAEDTAVYYCASGVYSFDYRGQGTLVTVSSGTGGGGSGGGGSGGGGSEFEIVLTQSPATLSLSPGERATLSCRASQSVSSYLAWYQQKPGQAPRLLIYDASNRATGIPARFSGSGSGTDFTLTISSLEPEDFAVYYCQQRSNWPITFGQGTRLEIKLEIQNPDPAVYQLRDSKSSDKSVCLFTDFDSQTNVSQSKDSDVYITDKCVLDMRSMDFKSNSAVAWSNKSDFACANAFNNSIIPEDTFFPSPESSCGFTSESYQQGVLSATILYEILLGKATLYAVLVSALVLMAMVKRKDSRGRAKRSGSGVKQTLNFDLLKLAGDVESNPGPTSMDWIWRILFLVGAATGAHSGPQLQLQESGPGLVKPSETLSLTCTVSGDSISSGDYYWGWIRQPPGKGLEWIGHIYYSGVTYYNPSLKSRVTISVDTSRNQFSLKLSSVTAADTAVYYCTREDSSNWRSRGQGTLVTVSSGSGGGGSGGGGSGGGGSFEEVQLVESGGGLVQPDRSLRLSCAASGFTFHDYAMHWVRQAPGKGLEWVSTISWNSGTIGYADSVKGRFTISRDNAKNSLYLQMNSLRAEDTALYYCAKDIQYGNYYYGMDVWGQGTTVTVSSTREDLKNVFPPEVAVFEPSEAEISHTQKATLVCLATGFYPDHVELSWWVNGKEVHSGVCTDPQPLKEQPALNDSRYCLSSRLRVSATFWQNPRNHFRCQVQFYGLSENDEWTQDRAKPVTQIVSAEAWGRADCDVKLVEKSFETDTNLNFQNLSVIGFRILLLKVAGFNLLMTLRLWSS

SEQ ID NO: 13259 - protein, 893 aa, synthetic construct
MALPVTALLLPLALLLHAARPEVQLVESGGGLVQPGGSLRLSCAASGFSFSDFWMSWVRQAPGKGLEWVATISQAGSEKDYVDSVKGRFTISRDNAKKSLYLQMNSLRAEDTAVYYCASGVYSFDYRGQGTLVTVSSGTGGGGSGGGGSGGGGSEFDIQMTQSPSSLSASVGDRVTINCKASQDINSYLSWFQQKPGKAPKTLIYRANRLVDGVPSRFSGSGSGQDYTLTISSLQPEDFATYYCLQYDEFPLTFGGGTKVEIKLEIQNPDPAVYQLRDSKSSDKSVCLFTDFDSQTNVSQSKDSDVYITDKCVLDMRSMDFKSNSAVAWSNKSDFACANAFNNSIIPEDTFFPSPESSCGFTSESYQQGVLSATILYEILLGKATLYAVLVSALVLMAMVKRKDSRGRAKRSGSGVKQTLNFDLLKLAGDVESNPGPTSMDWIWRILFLVGAATGAHSGPQLQLQESGPGLVKPSETLSLTCTVSGDSISSGDYYWGWIRQPPGKGLEWIGHIYYSGVTYYNPSLKSRVTISVDTSRNQFSLKLSSVTAADTAVYYCTREDSSNWRSRGQGTLVTVSSGSGGGGSGGGGSGGGGSFEQVQLVQSGAEVKKPGASVKVSCKASGYTFTNYDINWVRQAPGQGLEWIGWIYPGDGSTKYNEKFKAKATLTADTSTSTAYMELRSLRSDDTAVYYCASGYEDAMDYWGQGTTVTVSSTREDLKNVFPPEVAVFEPSEAEISHTQKATLVCLATGFYPDHVELSWWVNGKEVHSGVCTDPQPLKEQPALNDSRYCLSSRLRVSATFWQNPRNHFRCQVQFYGLSENDEWTQDRAKPVTQIVSAEAWGRADCDVKLVEKSFETDTNLNFQNLSVIGFRILLLKVAGFNLLMTLRLWSS

SEQ ID NO: 13260 - protein, 895 aa, synthetic construct
MALPVTALLLPLALLLHAARPEVQLVESGGGLVQPGGSLRLSCAASGFSFSDFWMSWVRQAPGKGLEWVATISQAGSEKDYVDSVKGRFTISRDNAKKSLYLQMNSLRAEDTAVYYCASGVYSFDYRGQGTLVTVSSGTGGGGSGGGGSGGGGSEFDIVMTQTPLSLSVTPGQPASISCKSSQSLLDGDGKTYLNWLLQKPGQSPQRLIYLVSKLDSGVPDRFSGSGSGTDFTLKISRVEAEDVGVYYCWQGTHFPRTFGQGTKLEIKLEIQNPDPAVYQLRDSKSSDKSVCLFTDFDSQTNVSQSKDSDVYITDKCVLDMRSMDFKSNSAVAWSNKSDFACANAFNNSIIPEDTFFPSPESSCGFTSESYQQGVLSATILYEILLGKATLYAVLVSALVLMAMVKRKDSRGRAKRSGSGVKQTLNFDLLKLAGDVESNPGPTSMDWIWRILFLVGAATGAHSGPQLQLQESGPGLVKPSETLSLTCTVSGDSISSGDYYWGWIRQPPGKGLEWIGHIYYSGVTYYNPSLKSRVTISVDTSRNQFSLKLSSVTAADTAVYYCTREDSSNWRSRGQGTLVTVSSGSGGGGSGGGGSGGGGSFEQVQLVQSGAEVKKPGASVKVSCKASGYTFKDTYIHWVRQAPGQGLEWMGRIDPANGNTKYDPKFQGRVTMTRDTSISTAYMELSRLRSDDTAVYYCARRGGVDWGQGTLVTVSSTREDLKNVFPPEVAVFEPSEAEISHTQKATLVCLATGFYPDHVELSWWVNGKEVHSGVCTDPQPLKEQPALNDSRYCLSSRLRVSATFWQNPRNHFRCQVQFYGLSENDEWTQDRAKPVTQIVSAEAWGRADCDVKLVEKSFETDTNLNFQNLSVIGFRILLLKVAGFNLLMTLRLWSS

SEQ ID NO: 13261 - protein, 896 aa, synthetic construct
MALPVTALLLPLALLLHAARPEVQLVESGGGLVQPGGSLRLSCAASGFSFSDFWMSWVRQAPGKGLEWVATISQAGSEKDYVDSVKGRFTISRDNAKKSLYLQMNSLRAEDTAVYYCASGVYSFDYRGQGTLVTVSSGTGGGGSGGGGSGGGGSEFDIQMTQSPSSLSASVGDRVTITCKASQDVSTAVAWFQQKPGKAPKLLIYSPSYRYTGVPSRFSGSGSGTDFTLTISSLQPEDFTYYCQQLYSTPYTFGQGTKVEIKLEIQNPDPAVYQLRDSKSSDKSVCLFTDFDSQTNVSQSKDSDVYITDKCVLDMRSMDFKSNSAVAWSNKSDFACANAFNNSIIPEDTFFPSPESSCGFTSESYQQGVLSATILYEILLGKATLYAVLVSALVLMAMVKRKDSRGRAKRSGSGVKQTLNFDLLKLAGDVESNPGPTSMDWIWRILFLVGAATGAHSGPQLQLQESGPGLVKPSETLSLTCTVSGDSISSGDYYWGWIRQPPGKGLEWIGHIYYSGVTYYNPSLKSRVTISVDTSRNQFSLKLSSVTAADTAVYYCTREDSSNWRSRGQGTLVTVSSGSGGGGSGGGGSGGGGSFEEVQLVQSGAEVKKPGASVKVSCKASGYTFTDYYLDVVVRQAPGQGLEWIGRVNPYNGGTIYNQKFKGRVTLTRDTSTSTAYLELSSLRSEDTAVYYCARDHYRYDPLLDYWGQGTLVTVSSTREDLKNVFPPEVAVFEPSEAEISHTQKATLVCLATGFYPDHVELSWWVNGKEVHSGVCTDPQPLKEQPALNDSRYCLSSRLRVSATFWQNPRNHFRCQVQFYGLSENDEWTQDRAKPVTQIVSAEAWGRADCDVKLVEKSFETDTNLNFQNLSVIGFRILLLKVAGFNLLMTLRLWSS

SEQ ID NO: 13262 - protein, 902 aa, synthetic construct
MALPVTALLLPLALLLHAARPEVQLVESGGGLVQPGGSLRLSCAASGFSFSDFWMSWVRQAPGKGLEWVATISQAGSEKDYVDSVKGRFTISRDNAKKSLYLQMNSLRAEDTAVYYCASGVYSFDYRGQGTLVTVSSGTGGGGSGGGGSGGGGSEFDIQMTQSPSSLSASVGDRVTITCRASQSVSTSSYNYMHWYQQKPGKPPKLLIKYASNLESGVPSRFSGSGSGTDFTLTISSLQPEDFATYYCQHSWEIPLTFGQGTKVEIKLEIQNPDPAVYQLRDSKSSDKSVCLFTDFDSQTNVSQSKDSDVYITDKCVLDMRSMDFKSNSAVAWSNKSDFACANAFNNSIIPEDTFFPSPESSCGFTSESYQQGVLSATILYEILLGKATLYAVLVSALVLMAMVKRKDSRGRAKRSGSGVKQTLNFDLLKLAGDVESNPGPTSMDWIWRILFLVGAATGAHSGPQLQLQESGPGLVKPSETLSLTCTVSGDSISSGDYYWGWIRQPPGKGLEWIGHIYYSGVTYYNPSLKSRVTISVDTSRNQFSLKLSSVTAADTAVYYCTREDSSNWRSRGQGTLVTVSSGSGGGGSGGGGSGGGGSFEEVQLVQSGAEVKKPGASVKVSCKASGYSFTDYYMHWVRQAPGQGLEWIGRINPYNGAAFYSQNFKDRVTLTVDTSTSTAYLELSSLRSEDTAVYYCAIERGADLEGYAMDYWGQGTLVTVSSTREDLKNVFPPEVAVFEPSEAEISHTQKATLVCLATGFYPDHVELSWWVNGKEVHSGVCTDPQPLKEQPALNDSRYCLSSRLRVSATFWQNPRNHFRCQVQFYGLSENDEWTQDRAKPVTQIVSAEAWGRADCDVKLVEKSFETDTNLNFQNLSVIGFRILLLKVAGFNLLMTLRLWSS

SEQ ID NO: 13263 - protein, 900 aa, synthetic construct
MALPVTALLLPLALLLHAARPEVQLVESGGGLVQPGGSLRLSCAASGFSFSDFWMSWVRQAPGKGLEWVATISQAGSEKDYVDSVKGRFTISRDNAKKSLYLQMNSLRAEDTAVYYCASGVYSFDYRGQGTLVTVSSGTGGGGSGGGGSGGGGSEFEIVLTQSPATLSASPGERVTLTCRASSNVISSYVHWYQQKPGSSPRLFLYSTSNLASGVPSRFSGSGSGTDFTFTISSLEAEDAATYYCQQYSGYPLTFGQGTRLEIKLEIQNPDPAVYQLRDSKSSDKSVCLFTDFDSQTNVSQSKDSDVYITDKCVLDMRSMDFKSNSAVAWSNKSDFACANAFNNSIIPEDTFFPSPESSCGFTSESYQQGVLSATILYEILLGKATLYAVLVSALVLMAMVKRKDSRGRAKRSGSGVKQTLNFDLLKLAGDVESNPGPTSMDWIWRILFLVGAATGAHSGPQLQLQESGPGLVKPSETLSLTCTVSGDSISSGDYYWGWIRQPPGKGLEWIGHIYYSGVTYYNPSLKSRVTISVDTSRNQFSLKLSSVTAADTAVYYCTREDSSNWRSRGQGTLVTVSSGSGGGGSGGGGSGGGGSFEQVQLQESGPGLVKPSETLSLTCAVSGYSITSAYYWNWIRQPPGKGLEWIGYISYDGRNNYNPSLKNRITINPDTSKNQFSLQLNSVTPEDTAVYYCAREGDYDVGNYYAMDYWGQGTLVTVSSTREDLKNVFPPEVAVFEPSEAEISHTQKATLVCLATGFYPDHVELSWWVNGKEVHSGVCTDPQPLKEQPALNDSRYCLSSRLRVSATFWQNPRNHFRCQVQFYGLSENDEWTQDRAKPVTQIVSAEAWGRADCDVKLVEKSFETDTNLNFQNLSVIGFRILLLKVAGFNLLMTLRLWSS

SEQ ID NO: 13264 - protein, 900 aa, synthetic construct
MALPVTALLLPLALLLHAARPEVQLVESGGGLVQPGGSLRLSCAASGFSFSDFWMSWVRQAPGKGLEWVATISQAGSEKDYVDSVKGRFTISRDNAKKSLYLQMNSLRAEDTAVYYCASGVYSFDYRGQGTLVTVSSGTGGGGSGGGGSGGGGSEFEIVLTQSPATLSLSPGERATLSCRASSNVISSYVHWYQQKPGQAPRLLIYSTSNLASGIPARFSGSGSGTDFTLTISSLEPEDFAVYYCQQYSGYPLTFGQGTRLEIKLEIQNPDPAVYQLRDSKSSDKSVCLFTDFDSQTNVSQSKDSDVYITDKCVLDMRSMDFKSNSAVAWSNKSDFACANAFNNSIIPEDTFFPSPESSCGFTSESYQQGVLSATILYEILLGKATLYAVLVSALVLMAMVKRKDSRGRAKRSGSGVKQTLNFDLLKLAGDVESNPGPTSMDWIWRILFLVGAATGAHSGPQLQLQESGPGLVKPSETLSLTCTVSGDSISSGDYYWGWIRQPPGKGLEWIGHIYYSGVTYYNPSLKSRVTISVDTSRNQFSLKLSSVTAADTAVYYCTREDSSNWRSRGQGTLVTVSSGSGGGGSGGGGSGGGGSFEEVQLVESGGGLVQPGRSLRLSCAASGYSITSAYYWNWVRQAPGKGLEWVSYISYDGRNNYNPSLKNRFTISRDNAKKSLYLQMNSLRAEDTALYYCAKEGDYDVGNYYAMDYWGQGTTVTVSSTREDLKNVFPPEVAVFEPSEAEISHTQKATLVCLATGFYPDHVELSWWVNGKEVHSGVCTDPQPLKEQPALNDSRYCLSSRLRVSATFWQNPRNHFRCQVQFYGLSENDEWTQDRAKPVTQIVSAEAWGRADCDVKLVEKSFETDTNLNFQNLSVIGFRILLLKVAGFNLLMTLRLWSS

SEQ ID NO: 13265 - protein, 899 aa, synthetic construct
MALPVTALLLPLALLLHAARPEVQLVESGGGLVQPGGSLRLSCAASGFSFSDFWMSWVRQAPGKGLEWVATISQAGSEKDYVDSVKGRFTISRDNAKKSLYLQMNSLRAEDTAVYYCASGVYSFDYRGQGTLVTVSSGTGGGGSGGGGSGGGGSEFDVVMTQTPLSLPVSLGDQASISCRSSQSLVHSNGNTYLRWYLQKPGQSPKVLIYKVSNRVSGVPDRFSGSGSGTDFTLKINRVEAEDLGVYFCSQSTHVPWTFGGGTKLEIKLEIQNPDPAVYQLRDSKSSDKSVCLFTDFDSQTNVSQSKDSDVYITDKCVLDMRSMDFKSNSAVAWSNKSDFACANAFNNSIIPEDTFFPSPESSCGFTSESYQQGVLSATILYEILLGKATLYAVLVSALVLMAMVKRKDSRGRAKRSGSGVKQTLNFDLLKLAGDVESNPGPTSMDWIWRILFLVGAATGAHSGPQLQLQESGPGLVKPSETLSLTCTVSGDSISSGDYYWGWIRQPPGKGLEWIGHIYYSGVTYYNPSLKSRVTISVDTSRNQFSLKLSSVTAADTAVYYCTREDSSNWRSRGQGTLVTVSSGSGGGGSGGGGSGGGGSFEGVKLDETGGGLVQPGGAMKLSCVTSGFTFGHYWMNWVRQSPEKGLEWVAQFRNKPYNYETYYSDSVKGRFTISRDDSKSSVYLQMNNLRVEDTGIYYCTGASYGMEYLGQGTSVTVSTTREDLKNVFPPEVAVFEPSEAEISHTQKATLVCLATGFYPDHVELSWWVNGKEVHSGVCTDPQPLKEQPALNDSRYCLSSRLRVSATFWQNPRNHFRCQVQFYGLSENDEWTQDRAKPVTQIVSAEAWGRADCDVKLVEKSFETDTNLNFQNLSVIGFRILLLKVAGFNLLMTLRLWSS

SEQ ID NO: 13266 - protein, 905 aa, synthetic construct
MALPVTALLLPLALLLHAARPEVQLVESGGGLVQPGGSLRLSCAASGFSFSDFWMSWVRQAPGKGLEWVATISQAGSEKDYVDSVKGRFTISRDNAKKSLYLQMNSLRAEDTAVYYCASGVYSFDYRGQGTLVTVSSGTGGGGSGGGGSGGGGSEFQVQLVESGGNLVQPGGSLRLSCAASGFTFGSFSMSWVRQAPGGGLEWVAGLSARSSLTHYADSVKGRFTISRDNAKNSVYLQMNSLRVEDTAVYYCARRSYDSSGYWGHFYSYMDVWGQGTLVTVSLEIQNPDPAVYQLRDSKSSDKSVCLFTDFDSQTNVSQSKDSDVYITDKCVLDMRSMDFKSNSAVAWSNKSDFACANAFNNSIIPEDTFFPSPESSCGFTSESYQQGVLSATILYEILLGKATLYAVLVSALVLMAMVKRKDSRGRAKRSGSGVKQTLNFDLLKLAGDVESNPGPTSMDWIWRILFLVGAATGAHSGPQLQLQESGPGLVKPSETLSLTCTVSGDSISSGDYYWGWIRQPPGKGLEWIGHIYYSGVTYYNPSLKSRVTISVDTSRNQFSLKLSSVTAADTAVYYCTREDSSNWRSRGQGTLVTVSSGSGGGGSGGGGSGGGGSFESVLTQPSSVSAAPGQKVTISCSGSTSNIGNNYVSWYQQHPGKAPKLMIYDVSKRPSGVPDRFSGSKSGNSASLDISGLQSEDEADYYCAAWDDSLSEFLFGTGTKLTVLGTREDLKNVFPPEVAVFEPSEAEISHTQKATLVCLATGFYPDHVELSWWVNGKEVHSGVCTDPQPLKEQPALNDSRYCLSSRLRVSATFWQNPRNHFRCQVQFYGLSENDEWTQDRAKPVTQIVSAEAWGRADCDVKLVEKSFETDTNLNFQNLSVIGFRILLLKVAGFNLLMTLRLWSS

SEQ ID NO: 13267 - protein, 900 aa, synthetic construct
MALPVTALLLPLALLLHAARPEVQLVESGGGLVQPGGSLRLSCAASGFSFSDFWMSWVRQAPGKGLEWVATISQAGSEKDYVDSVKGRFTISRDNAKKSLYLQMNSLRAEDTAVYYCASGVYSFDYRGQGTLVTVSSGTGGGGSGGGGSGGGGSEFDVVMTQSPSSLSASVGDRVTITCQSSLDISHYLNWYQQKPGKAPKLLIYDASNLETGVPSRFSGSGSGTHFTFTISSLQPEDFATYYCQQYDNLPLTFGGGTKLEIKRLEIQNPDPAVYQLRDSKSSDKSVCLFTDFDSQTNVSQSKDSDVYITDKCVLDMRSMDFKSNSAVAWSNKSDFACANAFNNSIIPEDTFFPSPESSCGFTSESYQQGVLSATILYEILLGKATLYAVLVSALVLMAMVKRKDSRGRAKRSGSGVKQTLNFDLLKLAGDVESNPGPTSMDWIWRILFLVGAATGAHSGPQLQLQESGPGLVKPSETLSLTCTVSGDSISSGDYYWGWIRQPPGKGLEWIGHIYYSGVTYYNPSLKSRVTISVDTSRNQFSLKLSSVTAADTAVYYCTREDSSNWRSRGQGTLVTVSSGSGGGGSGGGGSGGGGSFEQVQLVQSGGGVVQPGGSLRVSCAASGVTLSDYGMHWVRQAPGKGLEWVAFIRNDGSDKYYADSVKGRFTISRDNSEKTVSLQMSSLRAEDTAVYYCAKNGESGPLDYWYLDLWGRGTLVTVSSTREDLKNVFPPEVAVFEPSEAEISHTQKATLVCLATGFYPDHVELSWWVNGKEVHSGVCTDPQPLKEQPALNDSRYCLSSRLRVSATFWQNPRNHFRCQVQFYGLSENDEWTQDRAKPVTQIVSAEAWGRADCDVKLVEKSFETDTNLNFQNLSVIGFRILLLKVAGFNLLMTLRLWSS

SEQ ID NO: 13268 - protein, 904 aa, synthetic construct
MALPVTALLLPLALLLHAARPEVQLVESGGGLVQPGGSLRLSCAASGFSFSDFWMSWVRQAPGKGLEWVATISQAGSEKDYVDSVKGRFTISRDNAKKSLYLQMNSLRAEDTAVYYCASGVYSFDYRGQGTLVTVSSGTGGGGSGGGGSGGGGSEFSYELTQPPSVSGTPGQRVAISCSGSSSNIGTRMVTWYQHVPGTAPKLLIFNNNQRPSGVPDRFSASKSGTSASLAIIGLQSDDEADYYCATWDDNVKSYVFGTGTKVTVLGSRLEIQNPDPAVYQLRDSKSSDKSVCLFTDFDSQTNVSQSKDSDVYITDKCVLDMRSMDFKSNSAVAWSNKSDFACANAFNNSIIPEDTFFPSPESSCGFTSESYQQGVLSATILYEILLGKATLYAVLVSALVLMAMVKRKDSRGRAKRSGSGVKQTLNFDLLKLAGDVESNPGPTSMDWIWRILFLVGAATGAHSGPQLQLQESGPGLVKPSETLSLTCTVSGDSISSGDYYWGWIRQPPGKGLEWIGHIYYSGVTYYNPSLKSRVTISVDTSRNQFSLKLSSVTAADTAVYYCTREDSSNWRSRGQGTLVTVSSGSGGGGSGGGGSGGGGSFELEMAQVQLQQWGAGLLKPSETLSLTCAVYGGSFSGYYWSWIRQPPGKGLEWIGEINHSGSTNYNPSLKSRVTISVDTSKNQFSLKLSSVTAADTAVYYCARAPQSWYVGDVWGQGTLVTVSSTREDLKNVFPPEVAVFEPSEAEISHTQKATLVCLATGFYPDHVELSWWVNGKEVHSGVCTDPQPLKEQPALNDSRYCLSSRLRVSATFWQNPRNHFRCQVQFYGLSENDEWTQDRAKPVTQIVSAEAWGRADCDVKLVEKSFETDTNLNFQNLSVIGFRILLLKVAGFNLLMTLRLWSS

SEQ ID NO: 13269 - protein, 901 aa, synthetic construct
MALPVTALLLPLALLLHAARPEVQLVESGGGLVQPGGSLRLSCAASGFSFSDFWMSWVRQAPGKGLEWVATISQAGSEKDYVDSVKGRFTISRDNAKKSLYLQMNSLRAEDTAVYYCASGVYSFDYRGQGTLVTVSSGTGGGGSGGGGSGGGGSEFQSVLTQPPSLSVAPGKTASITCGGNNIGMKSVHWYQQRPGQAPVLVIYYDSDRPSGIPGRFSGSNSGNTATLTISRVEAGDEADYYCQVWDTTGDHPGYVFGTGTKVTVLLEIQNPDPAVYQLRDSKSSDKSVCLFTDFDSQTNVSQSKDSDVYITDKCVLDMRSMDFKSNSAVAWSNKSDFACANAFNNSIIPEDTFFPSPESSCGFTSESYQQGVLSATILYEILLGKATLYAVLVSALVLMAMVKRKDSRGRAKRSGSGVKQTLNFDLLKLAGDVESNPGPTSMDWIWRILFLVGAATGAHSGPQLQLQESGPGLVKPSETLSLTCTVSGDSISSGDYYWGWIRQPPGKGLEWIGHIYYSGVTYYNPSLKSRVTISVDTSRNQFSLKLSSVTAADTAVYYCTREDSSNWRSRGQGTLVTVSSGSGGGGSGGGGSGGGGSFEQVQLVQSGAEVKKPGSSVKVSCKASGGTFSSYAISWVRQAPGQGLEWMGGIIPIFGTANYAQKFQGRVTITADESTSTAYMELSSLRSEDTAVYYCARGVYGYSGSAPYDEWGQGTLVTVSSTREDLKNVFPPEVAVFEPSEAEISHTQKATLVCLATGFYPDHVELSWWVNGKEVHSGVCTDPQPLKEQPALNDSRYCLSSRLRVSATFWQNPRNHFRCQVQFYGLSENDEWTQDRAKPVTQIVSAEAWGRADCDVKLVEKSFETDTNLNFQNLSVIGFRILLLKVAGFNLLMTLRLWSS

SEQ ID NO: 13270 - protein, 899 aa, synthetic construct
MALPVTALLLPLALLLHAARPEVQLVESGGGLVQPGGSLRLSCAASGFSFSDFWMSWVRQAPGKGLEWVATISQAGSEKDYVDSVKGRFTISRDNAKKSLYLQMNSLRAEDTAVYYCASGVYSFDYRGQGTLVTVSSGTGGGGSGGGGSGGGGSEFEVQLVESGGGLVQPGRSLRLSCAASGFTFDDYAMHWVRQAPGKGLEWVSGISWNSGSIGYADSVKGRFTISRDNAKNSLYLQMNSLRAEDTALYYCAKDKGGGYYDFWSGSDYWGQGTLVTVSSLEIQNPDPAVYQLRDSKSSDKSVCLFTDFDSQTNVSQSKDSDVYITDKCVLDMRSMDFKSNSAVAWSNKSDFACANAFNNSIIPEDTFFPSPESSCGFTSESYQQGVLSATILYEILLGKATLYAVLVSALVLMAMVKRKDSRGRAKRSGSGVKQTLNFDLLKLAGDVESNPGPTSMDWIWRILFLVGAATGAHSGPQLQLQESGPGLVKPSETLSLTCTVSGDSISSGDYYWGWIRQPPGKGLEWIGHIYYSGVTYYNPSLKSRVTISVDTSRNQFSLKLSSVTAADTAVYYCTREDSSNWRSRGQGTLVTVSSGSGGGGSGGGGSGGGGSFESSELTQDPAVSVALGQTVRITCQGDSLRSYYASWYQQKPGQAPVLVIYGKNNRPSGIPDRFSGSSSGNTASLTITGAQAEDEADYYCNSRDSSGWVFGGGTKLTVLTREDLKNVFPPEVAVFEPSEAEISHTQKATLVCLATGFYPDHVELSWWVNGKEVHSGVCTDPQPLKEQPALNDSRYCLSSRLRVSATFWQNPRNHFRCQVQFYGLSENDEWTQDRAKPVTQIVSAEAWGRADCDVKLVEKSFETDTNLNFQNLSVIGFRILLLKVAGFNLLMTLRLWSS

SEQ ID NO: 13271 - protein, 908 aa, synthetic construct
MALPVTALLLPLALLLHAARPEVQLVESGGGLVQPGGSLRLSCAASGFSFSDFWMSWVRQAPGKGLEWVATISQAGSEKDYVDSVKGRFTISRDNAKKSLYLQMNSLRAEDTAVYYCASGVYSFDYRGQGTLVTVSSGTGGGGSGGGGSGGGGSEFEVQLQQSGPGLVKPSQTLSLTCAISGDSVLSNSDTWNWIRQSPSRGLEWLGRTYHRSTWYDDYASSVRGRVSINVDTSKNQYSLQLNAVTPEDTGVYYCARDRLQDGNSWSDAFDVWGQGTMVTVSSLEIQNPDPAVYQLRDSKSSDKSVCLFTDFDSQTNVSQSKDSDVYITDKCVLDMRSMDFKSNSAVAWSNKSDFACANAFNNSIIPEDTFFPSPESSCGFTSESYQQGVLSATILYEILLGKATLYAVLVSALVLMAMVKRKDSRGRAKRSGSGVKQTLNFDLLKLAGDVESNPGPTSMDWIWRILFLVGAATGAHSGPQLQLQESGPGLVKPSETLSLTCTVSGDSISSGDYYWGWIRQPPGKGLEWIGHIYYSGVTYYNPSLKSRVTISVDTSRNQFSLKLSSVTAADTAVYYCTREDSSNWRSRGQGTLVTVSSGSGGGGSGGGGSGGGGSFEQSALTQPASVSGSPGQSITISCTGTSSDVGGYNYVSWYQQHPGKAPKLMIYDVSNRPSGVSNRFSGSKSGNTASLTISGLQAEDEADYYCSSYTSSSTLVYVFGTGTKVTVLTREDLKNVFPPEVAVFEPSEAEISHTQKATLVCLATGFYPDHVELSWWVNGKEVHSGVCTDPQPLKEQPALNDSRYCLSSRLRVSATFWQNPRNHFRCQVQFYGLSENDEWTQDRAKPVTQIVSAEAWGRADCDVKLVEKSFETDTNLNFQNLSVIGFRILLLKVAGFNLLMTLRLWSS

SEQ ID NO: 13272 - protein, 886 aa, synthetic construct
MALPVTALLLPLALLLHAARPEVQLVESGGGLVQPGGSLRLSCAASGFSFSDFWMSWVRQAPGKGLEWVATISQAGSEKDYVDSVKGRFTISRDNAKKSLYLQMNSLRAEDTAVYYCASGVYSFDYRGQGTLVTVSSGTGGGGSGGGGSGGGGSEFQVQLVQSGAEVKKPGASVKVSCKASGYTFTSYDINWVRQATGQGLEWMGWMNPNSGNTGYAQKFQGRVTMTRNTSISTAYMELSSLRSEDTAVYYCARGDSTKVEIKLEIQNPDPAVYQLRDSKSSDKSVCLFTDFDSQTNVSQSKDSDVYITDKCVLDMRSMDFKSNSAVAWSNKSDFACANAFNNSIIPEDTFFPSPESSCGFTSESYQQGVLSATILYEILLGKATLYAVLVSALVLMAMVKRKDSRGRAKRSGSGVKQTLNFDLLKLAGDVESNPGPTSMDWIWRILFLVGAATGAHSGPQLQLQESGPGLVKPSETLSLTCTVSGDSISSGDYYWGWIRQPPGKGLEWIGHIYYSGVTYYNPSLKSRVTISVDTSRNQFSLKLSSVTAADTAVYYCTREDSSNWRSRGQGTLVTVSSGSGGGGSGGGGSGGGGSFEQSVLTQPRSVSGSPGQSVTISCTGTSSDVGGYNYVSWYQQHPGEAPKLIIYDADKRPSGISNRFSSGKSGNTASLTISGLQVEDEADYYCCSYAGGSTWVFGGGTKVTVLTREDLKNVFPPEVAVFEPSEAEISHTQKATLVCLATGFYPDHVELSWWVNGKEVHSGVCTDPQPLKEQPALNDSRYCLSSRLRVSATFWQNPRNHFRCQVQFYGLSENDEWTQDRAKPVTQIVSAEAWGRADCDVKLVEKSFETDTNLNFQNLSVIGFRILLLKVAGFNLLMTLRLWSS

SEQ ID NO: 13273 - protein, 908 aa, synthetic construct
MALPVTALLLPLALLLHAARPEVQLVESGGGLVQPGGSLRLSCAASGFSFSDFWMSWVRQAPGKGLEWVATISQAGSEKDYVDSVKGRFTISRDNAKKSLYLQMNSLRAEDTAVYYCASGVYSFDYRGQGTLVTVSSGTGGGGSGGGGSGGGGSEFEVQLQQSGPGLVKPSQTLSLTCAISGDSVSSNSAAWNWIRQSPSRGLEWLGRTYYRSKWYSDYAVSVKSRITINPDTSKNQFSLQLNSVTPEDTAVYYCARDPYDFWSGYPDAFDIWGQGTMVTVSSLEIQNPDPAVYQLRDSKSSDKSVCLFTDFDSQTNVSQSKDSDVYITDKCVLDMRSMDFKSNSAVAWSNKSDFACANAFNNSIIPEDTFFPSPESSCGFTSESYQQGVLSATILYEILLGKATLYAVLVSALVLMAMVKRKDSRGRAKRSGSGVKQTLNFDLLKLAGDVESNPGPTSMDWIWRILFLVGAATGAHSGPQLQLQESGPGLVKPSETLSLTCTVSGDSISSGDYYWGWIRQPPGKGLEWIGHIYYSGVTYYNPSLKSRVTISVDTSRNQFSLKLSSVTAADTAVYYCTREDSSNWRSRGQGTLVTVSSGSGGGGSGGGGSGGGGSFEQSALTQPASVSGSPGQSITISCTGTSSDVGGYNYVSWYQQHPGKAPKVIISEVNNRPSGVSHRFSGSKSGNTASLTISGLQAEDEADYFCSSYTSGRTLYVFGTGSKVTVLGTREDLKNVFPPEVAVFEPSEAEISHTQKATLVCLATGFYPDHVELSWWVNGKEVHSGVCTDPQPLKEQPALNDSRYCLSSRLRVSATFWQNPRNHFRCQVQFYGLSENDEWTQDRAKPVTQIVSAEAWGRADCDVKLVEKSFETDTNLNFQNLSVIGFRILLLKVAGFNLLMTLRLWSS

SEQ ID NO: 13274 - protein, 907 aa, synthetic construct
MALPVTALLLPLALLLHAARPEVQLVESGGGLVQPGGSLRLSCAASGFSFSDFWMSWVRQAPGKGLEWVATISQAGSEKDYVDSVKGRFTISRDNAKKSLYLQMNSLRAEDTAVYYCASGVYSFDYRGQGTLVTVSSGTGGGGSGGGGSGGGGSEFQSALTQPASASGSPGQSVTISCTGTSSDVGGYNYVSWYQQHPGKAPKLMIYDVSNRPSGVSNRFSGSKSGNTASLTISGLQAEDEADYYCSSYTSSSTLYVFGTGTQLTVLLEIQNPDPAVYQLRDSKSSDKSVCLFTDFDSQTNVSQSKDSDVYITDKCVLDMRSMDFKSNSAVAWSNKSDFACANAFNNSIIPEDTFFPSPESSCGFTSESYQQGVLSATILYEILLGKATLYAVLVSALVLMAMVKRKDSRGRAKRSGSGVKQTLNFDLLKLAGDVESNPGPTSMDWIWRILFLVGAATGAHSGPQLQLQESGPGLVKPSETLSLTCTVSGDSISSGDYYWGWIRQPPGKGLEWIGHIYYSGVTYYNPSLKSRVTISVDTSRNQFSLKLSSVTAADTAVYYCTREDSSNWRSRGQGTLVTVSSGSGGGGSGGGGSGGGGSFEEVQLQQSGPGLVKPSQTLSLTCAISGDSMLSNSDTWNWIRQSPSRGLEWLGRTYHRSTWYDDYASSVRGRVSINVDTSKNQYSLQLNAVTPEDTGVYYCARVRLQDGNSWSDAFDVWGQGTMVTVSSTREDLKNVFPPEVAVFEPSEAEISHTQKATLVCLATGFYPDHVELSWWVNGKEVHSGVCTDPQPLKEQPALNDSRYCLSSRLRVSATFWQNPRNHFRCQVQFYGLSENDEWTQDRAKPVTQIVSAEAWGRADCDVKLVEKSFETDTNLNFQNLSVIGFRILLLKVAGFNLLMTLRLWSS

SEQ ID NO: 13275 - protein, 907 aa, synthetic construct
MALPVTALLLPLALLLHAARPEVQLVESGGGLVQPGGSLRLSCAASGFSFSDFWMSWVRQAPGKGLEWVATISQAGSEKDYVDSVKGRFTISRDNAKKSLYLQMNSLRAEDTAVYYCASGVYSFDYRGQGTLVTVSSGTGGGGSGGGGSGGGGSEFDVMLTQTPLSLPVSLGDQASISCRSSQSILHSTGDTYLEWYLQKPGQSPKLLINKVSNRLSGVPDRFSGSGSGTDFTLKISRVEAEDLGVYYCFQGSHVPWTFGGGTKLEIKRADAAPTVSIFPLEIQNPDPAVYQLRDSKSSDKSVCLFTDFDSQTNVSQSKDSDVYITDKCVLDMRSMDFKSNSAVAWSNKSDFACANAFNNSIIPEDTFFPSPESSCGFTSESYQQGVLSATILYEILLGKATLYAVLVSALVLMAMVKRKDSRGRAKRSGSGVKQTLNFDLLKLAGDVESNPGPTSMDWIWRILFLVGAATGAHSGPQLQLQESGPGLVKPSETLSLTCTVSGDSISSGDYYWGWIRQPPGKGLEWIGHIYYSGVTYYNPSLKSRVTISVDTSRNQFSLKLSSVTAADTAVYYCTREDSSNWRSRGQGTLVTVSSGSGGGGSGGGGSGGGGSFEQVKLQQSGPSLVKPGASVKMSCKASGYTFTDFYMKWVKQSHGKSLEWIGDINPNIGDTFYNQKFKGKATLTVDKSSSTAYMQLNSLTSEDSAVYFCSVGYFDVWGAGTTVTVSSTREDLKNVFPPEVAVFEPSEAEISHTQKATLVCLATGFYPDHVELSWWVNGKEVHSGVCTDPQPLKEQPALNDSRYCLSSRLRVSATFWQNPRNHFRCQVQFYGLSENDEWTQDRAKPVTQIVSAEAWGRADCDVKLVEKSFETDTNLNFQNLSVIGFRILLLKVAGFNLLMTLRLWSS

SEQ ID NO: 13276 - protein, 903 aa, synthetic construct
MALPVTALLLPLALLLHAARPEVQLVESGGGLVQPGGSLRLSCAASGFSFSDFWMSWVRQAPGKGLEWVATISQAGSEKDYVDSVKGRFTISRDNAKKSLYLQMNSLRAEDTAVYYCASGVYSFDYRGQGTLVTVSSGTGGGGSGGGGSGGGGSEFEIVLTQSPATLSLSPGERATLSCRASQSVSIYLAWYQQKPGQAPRLLIYDASNRATGIPARFSGSGSGTDFTLTISSLEPEDFAVYYCQQRSNWPPFTFGPGTKVDIKLEIQNPDPAVYQLRDSKSSDKSVCLFTDFDSQTNVSQSKDSDVYITDKCVLDMRSMDFKSNSAVAWSNKSDFACANAFNNSIIPEDTFFPSPESSCGFTSESYQQGVLSATILYEILLGKATLYAVLVSALVLMAMVKRKDSRGRAKRSGSGVKQTLNFDLLKLAGDVESNPGPTSMDWIWRILFLVGAATGAHSGPQLQLQESGPGLVKPSETLSLTCTVSGDSISSGDYYWGWIRQPPGKGLEWIGHIYYSGVTYYNPSLKSRVTISVDTSRNQFSLKLSSVTAADTAVYYCTREDSSNWRSRGQGTLVTVSSGSGGGGSGGGGSGGGGSFEQVQLVESGGGVVQPGRSLRLSCAASGFTFSSYGMHWVRQAPGKGLEWVAVIWDDGSNKYYVDSVKGRFTISRDNSKNTLYLQMNSLRAEDTAVYYCARDDYYGSGSFNSYYGTDVWGQGTTVTVSSTREDLKNVFPPEVAVFEPSEAEISHTQKATLVCLATGFYPDHVELSWWVNGKEVHSGVCTDPQPLKEQPALNDSRYCLSSRLRVSATFWQNPRNHFRCQVQFYGLSENDEWTQDRAKPVTQIVSAEAWGRADCDVKLVEKSFETDTNLNFQNLSVIGFRILLLKVAGFNLLMTLRLWSS

SEQ ID NO: 13277 - protein, 888 aa, synthetic construct
MALPVTALLLPLALLLHAARPEVQLVESGGGLVQPGGSLRLSCAASGFSFSDFWMSWVRQAPGKGLEWVATISQAGSEKDYVDSVKGRFTISRDNAKKSLYLQMNSLRAEDTAVYYCASGVYSFDYRGQGTLVTVSSGTGGGGSGGGGSGGGGSEFDIQMTQSPSSLSASVGDRVTITCRASQGISSWLAWYQQKPEKAPKSLIYAASSLQSGVPSRFSGSGSGTDFTLTISSLQPEDFATYYCQQYNSYPYTFGQGTKLEIKLEIQNPDPAVYQLRDSKSSDKSVCLFTDFDSQTNVSQSKDSDVYITDKCVLDMRSMDFKSNSAVAWSNKSDFACANAFNNSIIPEDTFFPSPESSCGFTSESYQQGVLSATILYEILLGKATLYAVLVSALVLMAMVKRKDSRGRAKRSGSGVKQTLNFDLLKLAGDVESNPGPTSMDWIWRILFLVGAATGAHSGPQLQLQESGPGLVKPSETLSLTCTVSGDSISSGDYYWGWIRQPPGKGLEWIGHIYYSGVTYYNPSLKSRVTISVDTSRNQFSLKLSSVTAADTAVYYCTREDSSNWRSRGQGTLVTVSSGSGGGGSGGGGSGGGGSFEEVQLVQSGGGLVHPGGSLRLSCAGSGFTFSTYLMYWVRQAPGKTLEWVSAIGSGGDTYYADSVKGRFTISRDNAKNSLYLQMNSLRAEDMAVYYCARGLGYWGQGTLVTVSSTREDLKNVFPPEVAVFEPSEAEISHTQKATLVCLATGFYPDHVELSWWVNGKEVHSGVCTDPQPLKEQPALNDSRYCLSSRLRVSATFWQNPRNHFRCQVQFYGLSENDEWTQDRAKPVTQIVSAEAWGRADCDVKLVEKSFETDTNLNFQNLSVIGFRILLLKVAGFNLLMTLRLWSS

SEQ ID NO: 13278 - protein, 907 aa, synthetic construct
MALPVTALLLPLALLLHAARPEVQLVESGGGLVQPGGSLRLSCAASGFSFSDFWMSWVRQAPGKGLEWVATISQAGSEKDYVDSVKGRFTISRDNAKKSLYLQMNSLRAEDTAVYYCASGVYSFDYRGQGTLVTVSSGTGGGGSGGGGSGGGGSEFLPVLTQPPSVSVAPGKTARITCGGNNIGSKSVHWYQQKPGQAPVLVVYDDSDRPSGIPERFSGSNSGNTATLTISRVEAGDEADYYCQVWDSSSDYVVFGGGTKLTVLLEIQNPDPAVYQLRDSKSSDKSVCLFTDFDSQTNVSQSKDSDVYITDKCVLDMRSMDFKSNSAVAWSNKSDFACANAFNNSIIPEDTFFPSPESSCGFTSESYQQGVLSATILYEILLGKATLYAVLVSALVLMAMVKRKDSRGRAKRSGSGVKQTLNFDLLKLAGDVESNPGPTSMDWIWRILFLVGAATGAHSGPQLQLQESGPGLVKPSETLSLTCTVSGDSISSGDYYWGWIRQPPGKGLEWIGHIYYSGVTYYNPSLKSRVTISVDTSRNQFSLKLSSVTAADTAVYYCTREDSSNWRSRGQGTLVTVSSGSGGGGSGGGGSGGGGSFEEVQLVQSGAEVKKPGESLKISCKGSGYSFTSYWIGWVRQMPGKGLEWMGIIYPGDSDTRYSPSFQGQVTISADKSISTAYLQWSSLKASDTAMYYCARQVWGWQGGMYPRSNWWYNLDSWGQGTLVTVSSTREDLKNVFPPEVAVFEPSEAEISHTQKATLVCLATGFYPDHVELSWWVNGKEVHSGVCTDPQPLKEQPALNDSRYCLSSRLRVSATFWQNPRNHFRCQVQFYGLSENDEWTQDRAKPVTQIVSAEAWGRADCDVKLVEKSFETDTNLNFQNLSVIGFRILLLKVAGFNLLMTLRLWSS

SEQ ID NO: 13279 - protein, 900 aa, synthetic construct
MALPVTALLLPLALLLHAARPEVQLVESGGGLVQPGGSLRLSCAASGFSFSDFWMSWVRQAPGKGLEWVATISQAGSEKDYVDSVKGRFTISRDNAKKSLYLQMNSLRAEDTAVYYCASGVYSFDYRGQGTLVTVSSGTGGGGSGGGGSGGGGSEFELVMTQSPASLAVSLGQRATISCRASESVDSYGKSFMHWYQLKPGQPPKLLIYRASNLESGVPARFSGSGSRTDFTLTIDPVEADDAATYYCQQNNEDPWTFGGGTKLEIKLEIQNPDPAVYQLRDSKSSDKSVCLFTDFDSQTNVSQSKDSDVYITDKCVLDMRSMDFKSNSAVAWSNKSDFACANAFNNSIIPEDTFFPSPESSCGFTSESYQQGVLSATILYEILLGKATLYAVLVSALVLMAMVKRKDSRGRAKRSGSGVKQTLNFDLLKLAGDVESNPGPTSMDWIWRILFLVGAATGAHSGPQLQLQESGPGLVKPSETLSLTCTVSGDSISSGDYYWGWIRQPPGKGLEWIGHIYYSGVTYYNPSLKSRVTISVDTSRNQFSLKLSSVTAADTAVYYCTREDSSNWRSRGQGTLVTVSSGSGGGGSGGGGSGGGGSFEEVQLEQSGPELVKPGASVKMSCKASGYTFTNYYMKWVKQSHGKSLEWIGDLNPNNGDTFYNQKFKGKATLTVDKSSNTAYMQLNSLTSEDSAVYYCARTGRYEENAMDYWGQGTSVTVSSTREDLKNVFPPEVAVFEPSEAEISHTQKATLVCLATGFYPDHVELSWWVNGKEVHSGVCTDPQPLKEQPALNDSRYCLSSRLRVSATFWQNPRNHFRCQVQFYGLSENDEWTQDRAKPVTQIVSAEAWGRADCDVKLVEKSFETDTNLNFQNLSVIGFRILLLKVAGFNLLMTLRLWSS

SEQ ID NO: 13280 - protein, 894 aa, synthetic construct
MALPVTALLLPLALLLHAARPEVQLVESGGGLVQPGGSLRLSCAASGFSFSDFWMSWVRQAPGKGLEWVATISQAGSEKDYVDSVKGRFTISRDNAKKSLYLQMNSLRAEDTAVYYCASGVYSFDYRGQGTLVTVSSGTGGGGSGGGGSGGGGSEFDVVMTQSPSSLSASVGDRVTITCMASEDIYIRLAWYQQKPGNAPKLLIYAATSLETGVPSRFSGSGSGTDFTLTISSLQPEDFATYYCQQYWSSPWTFGGGTKVEIKLEIQNPDPAVYQLRDSKSSDKSVCLFTDFDSQTNVSQSKDSDVYITDKCVLDMRSMDFKSNSAVAWSNKSDFACANAFNNSIIPEDTFFPSPESSCGFTSESYQQGVLSATILYEILLGKATLYAVLVSALVLMAMVKRKDSRGRAKRSGSGVKQTLNFDLLKLAGDVESNPGPTSMDWIWRILFLVGAATGAHSGPQLQLQESGPGLVKPSETLSLTCTVSGDSISSGDYYWGWIRQPPGKGLEWIGHIYYSGVTYYNPSLKSRVTISVDTSRNQFSLKLSSVTAADTAVYYCTREDSSNWRSRGQGTLVTVSSGSGGGGSGGGGSGGGGSFEQVQLQESGPGLVKPSQTLSLTCTVSGYSITSDYTWNWIRQPPGNGLEWIGYITYSGSTSYNPSLKSRVLISVDTSKNQVSLKLSSVTAADTAVYYCARLGRRYTMDYWGQGTTVTVSSTREDLKNVFPPEVAVFEPSEAEISHTQKATLVCLATGFYPDHVELSWWVNGKEVHSGVCTDPQPLKEQPALNDSRYCLSSRLRVSATFWQNPRNHFRCQVQFYGLSENDEWTQDRAKPVTQIVSAEAWGRADCDVKLVEKSFETDTNLNFQNLSVIGFRILLLKVAGFNLLMTLRLWSS

SEQ ID NO: 13281 - protein, 898 aa, synthetic construct; identical to SEQ ID NO: 13144

SEQ ID NO: 13282 - protein, 898 aa, synthetic construct
MALPVTALLLPLALLLHAARPEVQLVESGGGLVQPGGSLRLSCAASGFSFSDFWMSWVRQAPGKGLEWVATISQAGSEKDYVDSVKGRFTISRDNAKKSLYLQMNSLRAEDTAVYYCASGVYSFDYRGQGTLVTVSSGTGGGGSGGGGSGGGGSEFDIVLTQSPATLSLSPGDRATLSCRASESVTILGSHLIYWYQQKPGQAPRLLIQLASNVQTGIPARFSGSGSRTDFTLTISSLEPEDFAVYYCLQSRTIPRTFGQGTKLEIKRLEIQNPDPAVYQLRDSKSSDKSVCLFTDFDSQTNVSQSKDSDVYITDKCVLDMRSMDFKSNSAVAWSNKSDFACANAFNNSIIPEDTFFPSPESSCGFTSESYQQGVLSATILYEILLGKATLYAVLVSALVLMAMVKRKDSRGRAKRSGSGVKQTLNFDLLKLAGDVESNPGPTSMDWIWRILFLVGAATGAHSGPQLQLQESGPGLVKPSETLSLTCTVSGDSISSGDYYWGWIRQPPGKGLEWIGHIYYSGVTYYNPSLKSRVTISVDTSRNQFSLKLSSVTAADTAVYYCTREDSSNWRSRGQGTLVTVSSGSGGGGSGGGGSGGGGSFEQVQLVQSGSELKKPGESVKISCKASGYTFTHYSMNWVRQAPGQGLEWMGRINTETGEPLYADDFKGRFVFSLDTSASTAYLQISSLKAEDTAVYYCSNDYLYSLDYWGQGTLVTVSSTREDLKNVFPPEVAVFEPSEAEISHTQKATLVCLATGFYPDHVELSWWVNGKEVHSGVCTDPQPLKEQPALNDSRYCLSSRLRVSATFWQNPRNHFRCQVQFYGLSENDEWTQDRAKPVTQIVSAEAWGRADCDVKLVEKSFETDTNLNFQNLSVIGFRILLLKVAGFNLLMTLRLWSS

SEQ ID NO: 13283 - protein, 899 aa, synthetic construct
MALPVTALLLPLALLLHAARPEVQLVESGGGLVQPGGSLRLSCAASGFSFSDFWMSWVRQAPGKGLEWVATISQAGSEKDYVDSVKGRFTISRDNAKKSLYLQMNSLRAEDTAVYYCASGVYSFDYRGQGTLVTVSSGTGGGGSGGGGSGGGGSEFDIQLTQSPSFLSASVGDRVTITCRASQGISTDLNWYQQKPGKAPKLLIYAASNLESGVPSRFSGSGSGTEFTLTISSLQPEDFATYYCQQSYNWPYTFGGGTKVEIKRLEIQNPDPAVYQLRDSKSSDKSVCLFTDFDSQTNVSQSKDSDVYITDKCVLDMRSMDFKSNSAVAWSNKSDFACANAFNNSIIPEDTFFPSPESSCGFTSESYQQGVLSATILYEILLGKATLYAVLVSALVLMAMVKRKDSRGRAKRSGSGVKQTLNFDLLKLAGDVESNPGPTSMDWIWRILFLVGAATGAHSGPQLQLQESGPGLVKPSETLSLTCTVSGDSISSGDYYWGWIRQPPGKGLEWIGHIYYSGVTYYNPSLKSRVTISVDTSRNQFSLKLSSVTAADTAVYYCTREDSSNWRSRGQGTLVTVSSGSGGGGSGGGGSGGGGSFEEVQLVESGGGLVKPGGSLRLSCAASGFTFSNFEMNWVRQAPGKGLEWVSGISSNGRYINYADSVKGRFTISRDNAKNSLYLQMNSLRAEDTAVYYCARVVDFDQDYNGFDYWGQGTLVTVSSTREDLKNVFPPEVAVFEPSEAEISHTQKATLVCLATGFYPDHVELSWWVNGKEVHSGVCTDPQPLKEQPALNDSRYCLSSRLRVSATFWQNPRNHFRCQVQFYGLSENDEWTQDRAKPVTQIVSAEAWGRADCDVKLVEKSFETDTNLNFQNLSVIGFRILLLKVAGFNLLMTLRLWSS

SEQ ID NO: 13284 - protein, 897 aa, synthetic construct
MALPVTALLLPLALLLHAARPEVQLVESGGGLVQPGGSLRLSCAASGFSFSDFWMSWVRQAPGKGLEWVATISQAGSEKDYVDSVKGRFTISRDNAKKSLYLQMNSLRAEDTAVYYCASGVYSFDYRGQGTLVTVSSGTGGGGSGGGGSGGGGSEFDIQLTQSPSFLSASVGDRVTITCSLSLGISTWRDWFPPRLGRGLEPLTYAASTLQSGVPSRFSGSGSGTEFTLTISSLQPEDFATYYCQQLNSYPLTFGGGTKVEIKRLEIQNPDPAVYQLRDSKSSDKSVCLFTDFDSQTNVSQSKDSDVYITDKCVLDMRSMDFKSNSAVAWSNKSDFACANAFNNSIIPEDTFFPSPESSCGFTSESYQQGVLSATILYEILLGKATLYAVLVSALVLMAMVKRKDSRGRAKRSGSGVKQTLNFDLLKLAGDVESNPGPTSMDWIWRILFLVGAATGAHSGPQLQLQESGPGLVKPSETLSLTCTVSGDSISSGDYYWGWIRQPPGKGLEWIGHIYYSGVTYYNPSLKSRVTISVDTSRNQFSLKLSSVTAADTAVYYCTREDSSNWRSRGQGTLVTVSSGSGGGGSGGGGSGGGGSFEEVQLVESGGGLVKPGGSLRLSCAASGFTFSTYGMSWVRQAPGKGLEWVAYINNGSGYIYYADSVKGRFTISRDNAKNSLYLQMNSLRAEDTAVYYCARGQWWSGGDFDYWGQGTLVTVSSTREDLKNVFPPEVAVFEPSEAEISHTQKATLVCLATGFYPDHVELSWWVNGKEVHSGVCTDPQPLKEQPALNDSRYCLSSRLRVSATFWQNPRNHFRCQVQFYGLSENDEWTQDRAKPVTQIVSAEAWGRADCDVKLVEKSFETDTNLNFQNLSVIGFRILLLKVAGFNLLMTLRLWSS

SEQ ID NO: 13285 - protein, 898 aa, synthetic construct
MALPVTALLLPLALLLHAARPEVQLVESGGGLVQPGGSLRLSCAASGFSFSDFWMSWVRQAPGKGLEWVATISQAGSEKDYVDSVKGRFTISRDNAKKSLYLQMNSLRAEDTAVYYCASGVYSFDYRGQGTLVTVSSGTGGGGSGGGGSGGGGSEFEIVLTQSPATLSLSPGERATLSCSASSSVSYMYWYQQKPGQAPRLLIYRTSNLASGIPARFSGSGSGTDFTLTISSLEPEDFAVYYCQQYHSYPTTFGQGTKVEIKRTVLEIQNPDPAVYQLRDSKSSDKSVCLFTDFDSQTNVSQSKDSDVYITDKCVLDMRSMDFKSNSAVAWSNKSDFACANAFNNSIIPEDTFFPSPESSCGFTSESYQQGVLSATILYEILLGKATLYAVLVSALVLMAMVKRKDSRGRAKRSGSGVKQTLNFDLLKLAGDVESNPGPTSMDWIWRILFLVGAATGAHSGPQLQLQESGPGLVKPSETLSLTCTVSGDSISSGDYYWGWIRQPPGKGLEWIGHIYYSGVTYYNPSLKSRVTISVDTSRNQFSLKLSSVTAADTAVYYCTREDSSNWRSRGQGTLVTVSSGSGGGGSGGGGSGGGGSFEEVQLVESGGGLVQPGGSLRLSCAASGFSFNTYAMNWVRQAPGKGLEWVSHIRSKSNNFATYYADSVKDRFTISRDNAKNSLYLQMNSLRAEDTAVYYCARQGGDFPMDYWGQGTLVTVSSTREDLKNVFPPEVAVFEPSEAEISHTQKATLVCLATGFYPDHVELSWWVNGKEVHSGVCTDPQPLKEQPALNDSRYCLSSRLRVSATFWQNPRNHFRCQVQFYGLSENDEWTQDRAKPVTQIVSAEAWGRADCDVKLVEKSFETDTNLNFQNLSVIGFRILLLKVAGFNLLMTLRLWSS

SEQ ID NO: 13286 - protein, 894 aa, synthetic construct
MALPVTALLLPLALLLHAARPEVQLVESGGGLVQPGGSLRLSCAASGFSFSDFWMSWVRQAPGKGLEWVATISQAGSEKDYVDSVKGRFTISRDNAKKSLYLQMNSLRAEDTAVYYCASGVYSFDYRGQGTLVTVSSGTGGGGSGGGGSGGGGSEFDVVMTQSPSSLSASVGDRVTITCKASEDIYIRLAWYQQKPGKAPKLLIYAATSLETGVPSRFSGSGSGTDFTLTISSLQPEDFATYYCQQYWTTPWTFGGGTKVEIKLEIQNPDPAVYQLRDSKSSDKSVCLFTDFDSQTNVSQSKDSDVYITDKCVLDMRSMDFKSNSAVAWSNKSDFACANAFNNSIIPEDTFFPSPESSCGFTSESYQQGVLSATILYEILLGKATLYAVLVSALVLMAMVKRKDSRGRAKRSGSGVKQTLNFDLLKLAGDVESNPGPTSMDWIWRILFLVGAATGAHSGPQLQLQESGPGLVKPSETLSLTCTVSGDSISSGDYYWGWIRQPPGKGLEWIGHIYYSGVTYYNPSLKSRVTISVDTSRNQFSLKLSSVTAADTAVYYCTREDSSNWRSRGQGTLVTVSSGSGGGGSGGGGSGGGGSFEQVQLQESGPGLVKPSQTLSLTCTVSGYSITIDYTWNWIRQPPGKGLEWIGYITYSGSTDYNPSLKSRVLISVDTSKNQVSLKLSSVTAADTAVYYCARLGRRYALDYWGQGTTVTVSSTREDLKNVFPPEVAVFEPSEAEISHTQKATLVCLATGFYPDHVELSWWVNGKEVHSGVCTDPQPLKEQPALNDSRYCLSSRLRVSATFWQNPRNHFRCQVQFYGLSENDEWTQDRAKPVTQIVSAEAWGRADCDVKLVEKSFETDTNLNFQNLSVIGFRILLLKVAGFNLLMTLRLWSS

SEQ ID NO: 13287 - protein, 898 aa, synthetic construct
MALPVTALLLPLALLLHAARPEVQLVESGGGLVQPGGSLRLSCAASGFSFSDFWMSWVRQAPGKGLEWVATISQAGSEKDYVDSVKGRFTISRDNAKKSLYLQMNSLRAEDTAVYYCASGVYSFDYRGQGTLVTVSSGTGGGGSGGGGSGGGGSEFDIQMTQTTSSLSASLGDRVTISCRASQDISNYLNWYQQKPDGTVKLLIYYTSILHSGVPSRFSGSGSGTDYSLTISNLEQEDFATYFCQQGNTLPWTFGGGTKLEIKALEIQNPDPAVYQLRDSKSSDKSVCLFTDFDSQTNVSQSKDSDVYITDKCVLDMRSMDFKSNSAVAWSNKSDFACANAFNNSIIPEDTFFPSPESSCGFTSESYQQGVLSATILYEILLGKATLYAVLVSALVLMAMVKRKDSRGRAKRSGSGVKQTLNFDLLKLAGDVESNPGPTSMDWIWRILFLVGAATGAHSGPQLQLQESGPGLVKPSETLSLTCTVSGDSISSGDYYWGWIRQPPGKGLEWIGHIYYSGVTYYNPSLKSRVTISVDTSRNQFSLKLSSVTAADTAVYYCTREDSSNWRSRGQGTLVTVSSGSGGGGSGGGGSGGGGSFEVQLVESGGGLVKPGGSLKLSCAASGFAFSIYDMSWVRQTPEKRLEWVAYISSGGGTYYPDTVKGRFTISRDNAKNTLYLQMSSLKSEDTAMYYCARHSGYGTHWGVLFAYWGQGTLVTVSATREDLKNVFPPEVAVFEPSEAEISHTQKATLVCLATGFYPDHVELSWWVNGKEVHSGVCTDPQPLKEQPALNDSRYCLSSRLRVSATFWQNPRNHFRCQVQFYGLSENDEWTQDRAKPVTQIVSAEAWGRADCDVKLVEKSFETDTNLNFQNLSVIGFRILLLKVAGFNLLMTLRLWSS

SEQ ID NO: 13288 - protein, 909 aa, synthetic construct
MALPVTALLLPLALLLHAARPEVQLVESGGGLVQPGGSLRLSCAASGFSFSDFWMSWVRQAPGKGLEWVATISQAGSEKDYVDSVKGRFTISRDNAKKSLYLQMNSLRAEDTAVYYCASGVYSFDYRGQGTLVTVSSGTGGGGSGGGGSGGGGSEFDIVMTQSPDSLAVSLGERATINCKSSQSLLYRSNQKNYLAWYQQKPGQPPKLLIYWASTRESGVPDRFSGSGSGTDFTLTISSLQAEDVAVYYCQQYYNYPRTFGQGTKVEIKRTVLEIQNPDPAVYQLRDSKSSDKSVCLFTDFDSQTNVSQSKDSDVYITDKCVLDMRSMDFKSNSAVAWSNKSDFACANAFNNSIIPEDTFFPSPESSCGFTSESYQQGVLSATILYEILLGKATLYAVLVSALVLMAMVKRKDSRGRAKRSGSGVKQTLNFDLLKLAGDVESNPGPTSMDWIWRILFLVGAATGAHSGPQLQLQESGPGLVKPSETLSLTCTVSGDSISSGDYYWGWIRQPPGKGLEWIGHIYYSGVTYYNPSLKSRVTISVDTSRNQFSLKLSSVTAADTAVYYCTREDSSNWRSRGQGTLVTVSSGSGGGGSGGGGSGGGGSFEEVQLLESGGGLVQPGGSLRLSCAASGYSITSDYAWNWVRQAPGKGLEWVSYISNSGSTSYNPSLKSRFTISRDNSKNTLYLQMNSLRAEDTAVYYCAKERNYDYDDYYYAMDYWGQGTLVTVSSTREDLKNVFPPEVAVFEPSEAEISHTQKATLVCLATGFYPDHVELSWWVNGKEVHSGVCTDPQPLKEQPALNDSRYCLSSRLRVSATFWQNPRNHFRCQVQFYGLSENDEWTQDRAKPVTQIVSAEAWGRADCDVKLVEKSFETDTNLNFQNLSVIGFRILLLKVAGFNLLMTLRLWSS

SEQ ID NO: 13289 - protein, 902 aa, synthetic construct
MALPVTALLLPLALLLHAARPEVQLVESGGGLVQPGGSLRLSCAASGFSFSDFWMSWVRQAPGKGLEWVATISQAGSEKDYVDSVKGRFTISRDNAKKSLYLQMNSLRAEDTAVYYCASGVYSFDYRGQGTLVTVSSGTGGGGSGGGGSGGGGSEFDVVMTQSPLSLPVTLGQPASISCRSSQSLLHSSGNTYLEWYQQRPGQSPRPLIYKISTRFSGVPDRFSGSGSGTDFTLKISRVEAEDVGVYYCFQGSHVPYTFGGGTKVEIKRLEIQNPDPAVYQLRDSKSSDKSVCLFTDFDSQTNVSQSKDSDVYITDKCVLDMRSMDFKSNSAVAWSNKSDFACANAFNNSIIPEDTFFPSPESSCGFTSESYQQGVLSATILYEILLGKATLYAVLVSALVLMAMVKRKDSRGRAKRSGSGVKQTLNFDLLKLAGDVESNPGPTSMDWIWRILFLVGAATGAHSGPQLQLQESGPGLVKPSETLSLTCTVSGDSISSGDYYWGWIRQPPGKGLEWIGHIYYSGVTYYNPSLKSRVTISVDTSRNQFSLKLSSVTAADTAVYYCTREDSSNWRSRGQGTLVTVSSGSGGGGSGGGGSGGGGSFEQVQLVQSGAEVKKPGASVKVSCKASGLTIEDYYMHWVRQAPGQGLEWMGWIDPENGDTEYGPKFQGRVTMTRDTSINTAYMELSRLRSDDTAVYYCAVHNAHYGTWFAYWGQGTLVTVSSTREDLKNVFPPEVAVFEPSEAEISHTQKATLVCLATGFYPDHVELSWWVNGKEVHSGVCTDPQPLKEQPALNDSRYCLSSRLRVSATFWQNPRNHFRCQVQFYGLSENDEWTQDRAKPVTQIVSAEAWGRADCDVKLVEKSFETDTNLNFQNLSVIGFRILLLKVAGFNLLMTLRLWSS

SEQ ID NO: 13290 - protein, 894 aa, synthetic construct
MALPVTALLLPLALLLHAARPEVQLVESGGGLVQPGGSLRLSCAASGFSFSDFWMSWVRQAPGKGLEWVATISQAGSEKDYVDSVKGRFTISRDNAKKSLYLQMNSLRAEDTAVYYCASGVYSFDYRGQGTLVTVSSGTGGGGSGGGGSGGGGSEFDIQMTQSPSSLSASVGDRVTITCRASENIYSNLAWYQQKPGKAPKLLIYAATNLADGVPSRFSGSGSGTDFTLTISSLQPEDFATYYCQHFWGTPTFGQGTKVEIKRTVLEIQNPDPAVYQLRDSKSSDKSVCLFTDFDSQTNVSQSKDSDVYITDKCVLDMRSMDFKSNSAVAWSNKSDFACANAFNNSIIPEDTFFPSPESSCGFTSESYQQGVLSATILYEILLGKATLYAVLVSALVLMAMVKRKDSRGRAKRSGSGVKQTLNFDLLKLAGDVESNPGPTSMDWIWRILFLVGAATGAHSGPQLQLQESGPGLVKPSETLSLTCTVSGDSISSGDYYWGWIRQPPGKGLEWIGHIYYSGVTYYNPSLKSRVTISVDTSRNQFSLKLSSVTAADTAVYYCTREDSSNWRSRGQGTLVTVSSGSGGGGSGGGGSGGGGSFEEVQLVESGGGLVQPGGSLRLSCAASGFSLTNYGVHWVRQAPGKGLEWVSVIWSGGSTDYNAAFISRFTISADTSKNTAYLQMNSLRAEDTAVYYCARELIHAMDNWGQGTLVTVSSTREDLKNVFPPEVAVFEPSEAEISHTQKATLVCLATGFYPDHVELSWWVNGKEVHSGVCTDPQPLKEQPALNDSRYCLSSRLRVSATFWQNPRNHFRCQVQFYGLSENDEWTQDRAKPVTQIVSAEAWGRADCDVKLVEKSFETDTNLNFQNLSVIGFRILLLKVAGFNLLMTLRLWSS

SEQ ID NO: 13291 - protein, 901 aa, synthetic construct
MALPVTALLLPLALLLHAARPEVQLVESGGGLVQPGGSLRLSCAASGFSFSDFWMSWVRQAPGKGLEWVATISQAGSEKDYVDSVKGRFTISRDNAKKSLYLQMNSLRAEDTAVYYCASGVYSFDYRGQGTLVTVSSGTGGGGSGGGGSGGGGSEFDFVMTQSPLSLPVTPGEPASISCRSSQSIVHSNGNTYLEWYLQKPGQSPQLLIYKVSNRFSGVPDRFSGSGSGTDFTLKISRVEAEDVGVYYCFQGSHVPLTFGQGTKLEIKRLEIQNPDPAVYQLRDSKSSDKSVCLFTDFDSQTNVSQSKDSDVYITDKCVLDMRSMDFKSNSAVAWSNKSDFACANAFNNSIIPEDTFFPSPESSCGFTSESYQQGVLSATILYEILLGKATLYAVLVSALVLMAMVKRKDSRGRAKRSGSGVKQTLNFDLLKLAGDVESNPGPTSMDWIWRILFLVGAATGAHSGPQLQLQESGPGLVKPSETLSLTCTVSGDSISSGDYYWGWIRQPPGKGLEWIGHIYYSGVTYYNPSLKSRVTISVDTSRNQFSLKLSSVTAADTAVYYCTREDSSNWRSRGQGTLVTVSSGSGGGGSGGGGSGGGGSFEEVQLVESGAEVKKPGASVKVSCKASGYTFTSYWIHWVRQAPGQGLEWMGENDPSNGRTNYNEKFKNRVTLTVDTSISTAYMELSRLRSDDTAVYYCARGPNYFYSMDYWGQGTMVTVSSTREDLKNVFPPEVAVFEPSEAEISHTQKATLVCLATGFYPDHVELSWWVNGKEVHSGVCTDPQPLKEQPALNDSRYCLSSRLRVSATFWQNPRNHFRCQVQFYGLSENDEWTQDRAKPVTQIVSAEAWGRADCDVKLVEKSFETDTNLNFQNLSVIGFRILLLKVAGFNLLMTLRLWSS

SEQ ID NO: 13292 - protein, 894 aa, synthetic construct
MALPVTALLLPLALLLHAARPEVQLVESGGGLVQPGGSLRLSCAASGFSFSDFWMSWVRQAPGKGLEWVATISQAGSEKDYVDSVKGRFTISRDNAKKSLYLQMNSLRAEDTAVYYCASGVYSFDYRGQGTLVTVSSGTGGGGSGGGGSGGGGSEFDIQLTQSPSFLSASVGDRVTITCSARSSISFMYWYQQKPGKAPKLLIYDTSNLASGVPSRFSGSGSGTEFTLTISSLEAEDAATYYCQQWSSYPLTFGQGTKLEIKLEIQNPDPAVYQLRDSKSSDKSVCLFTDFDSQTNVSQSKDSDVYITDKCVLDMRSMDFKSNSAVAWSNKSDFACANAFNNSIIPEDTFFPSPESSCGFTSESYQQGVLSATILYEILLGKATLYAVLVSALVLMAMVKRKDSRGRAKRSGSGVKQTLNFDLLKLAGDVESNPGPTSMDWIWRILFLVGAATGAHSGPQLQLQESGPGLVKPSETLSLTCTVSGDSISSGDYYWGWIRQPPGKGLEWIGHIYYSGVTYYNPSLKSRVTISVDTSRNQFSLKLSSVTAADTAVYYCTREDSSNWRSRGQGTLVTVSSGSGGGGSGGGGSGGGGSFEQVQLVQSGAEVKKPGASVKVSCKASGYTFTGSWMNWVRQAPGQGLEWIGRIYPGDGETNYNGKFKDRVTITADKSTSTAYMELSSLRSEDTAVYYCARIYGNNVYFDVWGQGTTVTVSSTREDLKNVFPPEVAVFEPSEAEISHTQKATLVCLATGFYPDHVELSWWVNGKEVHSGVCTDPQPLKEQPALNDSRYCLSSRLRVSATFWQNPRNHFRCQVQFYGLSENDEWTQDRAKPVTQIVSAEAWGRADCDVKLVEKSFETDTNLNFQNLSVIGFRILLLKVAGFNLLMTLRLWSS

SEQ ID NO: 13293 - protein, 902 aa, synthetic construct
MALPVTALLLPLALLLHAARPEVQLVESGGGLVQPGGSLRLSCAASGFSFSDFWMSWVRQAPGKGLEWVATISQAGSEKDYVDSVKGRFTISRDNAKKSLYLQMNSLRAEDTAVYYCASGVYSFDYRGQGTLVTVSSGTGGGGSGGGGSGGGGSEFQLVLTQSPSASASLGSSVKLTCTLSSGHKTDTIDWYQQQPGKAPRYLMKLEGSGSYNKGSGVPDRFSGSSSGADWYLTISSLQSEDEADYYCGTDYPGNYLFGGGTQLTVLGLEIQNPDPAVYQLRDSKSSDKSVCLFTDFDSQTNVSQSKDSDVYITDKCVLDMRSMDFKSNSAVAWSNKSDFACANAFNNSIIPEDTFFPSPESSCGFTSESYQQGVLSATILYEILLGKATLYAVLVSALVLMAMVKRKDSRGRAKRSGSGVKQTLNFDLLKLAGDVESNPGPTSMDWIWRILFLVGAATGAHSGPQLQLQESGPGLVKPSETLSLTCTVSGDSISSGDYYWGWIRQPPGKGLEWIGHIYYSGVTYYNPSLKSRVTISVDTSRNQFSLKLSSVTAADTAVYYCTREDSSNWRSRGQGTLVTVSSGSGGGGSGGGGSGGGGSFEQEQLVESGGGLVQPGGSLRLSCAASGFTFSDYYMSWIRQAPGKGLEWVATIYPSSGKTYYADSAKGRLTISSDNAKDSLYLQMNSLRAEDTAVYYCTRDSYADDAALFDIWGQGTTVTVSSTREDLKNVFPPEVAVFEPSEAEISHTQKATLVCLATGFYPDHVELSWWVNGKEVHSGVCTDPQPLKEQPALNDSRYCLSSRLRVSATFWQNPRNHFRCQVQFYGLSENDEWTQDRAKPVTQIVSAEAWGRADCDVKLVEKSFETDTNLNFQNLSVIGFRILLLKVAGFNLLMTLRLWSS

SEQ ID NO: 13294 - protein, 894 aa, synthetic construct; identical to SEQ ID NO: 13290

SEQ ID NO: 13295 - protein, 901 aa, synthetic construct; identical to SEQ ID NO: 13291

SEQ ID NO: 13296 - protein, 894 aa, synthetic construct; identical to SEQ ID NO: 13292

SEQ ID NO: 13297 - protein, 902 aa, synthetic construct; identical to SEQ ID NO: 13293

SEQ ID NO: 13298 - protein, 901 aa, synthetic construct
MALPVTALLLPLALLLHAARPEVQLVESGGGLVQPGGSLRLSCAASGFSFSDFWMSWVRQAPGKGLEWVATISQAGSEKDYVDSVKGRFTISRDNAKKSLYLQMNSLRAEDTAVYYCASGVYSFDYRGQGTLVTVSSGTGGGGSGGGGSGGGGSEFDIQLTQSPSSLSASVGDRVSFTCQASQDINNFLNWYQQKPGKAPKLLIYDASNLETGVPSRFSGSGSGTDFTFTISSLQPEDIATYYCQQYGNLPFTFGGGTKVEIKRLEIQNPDPAVYQLRDSKSSDKSVCLFTDFDSQTNVSQSKDSDVYITDKCVLDMRSMDFKSNSAVAWSNKSDFACANAFNNSIIPEDTFFPSPESSCGFTSESYQQGVLSATILYEILLGKATLYAVLVSALVLMAMVKRKDSRGRAKRSGSGVKQTLNFDLLKLAGDVESNPGPTSMDWIWRILFLVGAATGAHSGPQLQLQESGPGLVKPSETLSLTCTVSGDSISSGDYYWGWIRQPPGKGLEWIGHIYYSGVTYYNPSLKSRVTISVDTSRNQFSLKLSSVTAADTAVYYCTREDSSNWRSRGQGTLVTVSSGSGGGGSGGGGSGGGGSFEQVQLQESGPGLVKPSQTLSLTCTVSGGSISSGGFYWSWIRQHPGKGLEWIGYIHHSGSTHYNPSLKSRVTISIDTSKNLFSLRLSSVTAADTAVYYCASLVYCGGDCYSGFDYWGQGTLVTVSSTREDLKNVFPPEVAVFEPSEAEISHTQKATLVCLATGFYPDHVELSWWVNGKEVHSGVCTDPQPLKEQPALNDSRYCLSSRLRVSATFWQNPRNHFRCQVQFYGLSENDEWTQDRAKPVTQIVSAEAWGRADCDVKLVEKSFETDTNLNFQNLSVIGFRILLLKVAGFNLLMTLRLWSS

SEQ ID NO: 13299 - protein, 897 aa, synthetic construct
MALPVTALLLPLALLLHAARPEVQLVESGGGLVQPGGSLRLSCAASGFSFSDFWMSWVRQAPGKGLEWVATISQAGSEKDYVDSVKGRFTISRDNAKKSLYLQMNSLRAEDTAVYYCASGVYSFDYRGQGTLVTVSSGTGGGGSGGGGSGGGGSEFDIQMTQSPSSLSASVGDRVTITCKSSQSVLYSSNQKNYLAWFQQKPGKAPKLLIYWASTRESGVPSRFSGSGSGTDFTLTISSLQPEDFATYFCHQYLSSYTFGQGTKVEIKRLEIQNPDPAVYQLRDSKSSDKSVCLFTDFDSQTNVSQSKDSDVYITDKCVLDMRSMDFKSNSAVAWSNKSDFACANAFNNSIIPEDTFFPSPESSCGFTSESYQQGVLSATILYEILLGKATLYAVLVSALVLMAMVKRKDSRGRAKRSGSGVKQTLNFDLLKLAGDVESNPGPTSMDWIWRILFLVGAATGAHSGPQLQLQESGPGLVKPSETLSLTCTVSGDSISSGDYYWGWIRQPPGKGLEWIGHIYYSGVTYYNPSLKSRVTISVDTSRNQFSLKLSSVTAADTAVYYCTREDSSNWRSRGQGTLVTVSSGSGGGGSGGGGSGGGGSFEEVQLVESGGGLVQPGGSLRLSCAASGYTFTTYWMHWVRQAPGKGLEWVGYIRPSTGYTEYNQKFKDRFTISADTSKNTAYLQMNSLRAEDTAVYYCARSRWLLDYWGQGTLVTVSTREDLKNVFPPEVAVFEPSEAEISHTQKATLVCLATGFYPDHVELSWWVNGKEVHSGVCTDPQPLKEQPALNDSRYCLSSRLRVSATFWQNPRNHFRCQVQFYGLSENDEWTQDRAKPVTQIVSAEAWGRADCDVKLVEKSFETDTNLNFQNLSVIGFRILLLKVAGFNLLMTLRLWSS

SEQ ID NO: 13300 - protein, 894 aa, synthetic construct
MALPVTALLLPLALLLHAARPEVQLVESGGGLVQPGGSLRLSCAASGFSFSDFWMSWVRQAPGKGLEWVATISQAGSEKDYVDSVKGRFTISRDNAKKSLYLQMNSLRAEDTAVYYCASGVYSFDYRGQGTLVTVSSGTGGGGSGGGGSGGGGSEFDIQMTQSPSSLSASVGDRVTITCRASQDISNYLNWYQQKPGKAPKLLIYYTSRLHSGVPSRFSGSGSGTDFTLTISSLQPEDFATYYCQQGNTLPYTFGQGTKVEIKRLEIQNPDPAVYQLRDSKSSDKSVCLFTDFDSQTNVSQSKDSDVYITDKCVLDMRSMDFKSNSAVAWSNKSDFACANAFNNSIIPEDTFFPSPESSCGFTSESYQQGVLSATILYEILLGKATLYAVLVSALVLMAMVKRKDSRGRAKRSGSGVKQTLNFDLLKLAGDVESNPGPTSMDWIWRILFLVGAATGAHSGPQLQLQESGPGLVKPSETLSLTCTVSGDSISSGDYYWGWIRQPPGKGLEWIGHIYYSGVTYYNPSLKSRVTISVDTSRNQFSLKLSSVTAADTAVYYCTREDSSNWRSRGQGTLVTVSSGSGGGGSGGGGSGGGGSFEEVQLVESGGGLVQPGGSLRLSCAASGFTFSDYFMSWVRQAPGKGLEWVATISNGGTYTYYPDSVKGRFTISRDNSKNTLYLQMNSLRAEDTAVYYCARFDGYIFDYWGQGTLVTVSSTREDLKNVFPPEVAVFEPSEAEISHTQKATLVCLATGFYPDHVELSWWVNGKEVHSGVCTDPQPLKEQPALNDSRYCLSSRLRVSATFWQNPRNHFRCQVQFYGLSENDEWTQDRAKPVTQIVSAEAWGRADCDVKLVEKSFETDTNLNFQNLSVIGFRILLLKVAGFNLLMTLRLWSS

SEQ ID NO: 13301 - protein, 692 aa, synthetic construct
MALPVTALLLPLALLLHAARPDIQMTQSPSSLSASVGDRVTITCKASDHINNWLAWYQQKPGQAPKLLIYGATTLETGVPSRFSGSGSGTDYTLTISSLQPEDFATYYCQQSWNTPWTFGQGTKLEIKRLEDLKNVFPPEVAVFEPSEAEISHTQKATLVCLATGFYPDHVELSWWVNGKEVHSGVCTDPQPLKEQPALNDSRYCLSSRLRVSATFWQNPRNHFRCQVQFYGLSENDEWTQDRAKPVTQIVSAEAWGRADCDVKLVEKSFETDTNLNFQNLSVIGFRILLLKVAGFNLLMTLRLWSSRAKRSGSGATNFSLLKQAGDVEENPGPTSMDWIWRILFLVGAATGAHSGPMDPDLEIRAAFLRQRNTALRTEVAELEQEVQRLENEVSQYETRYGPLGGGKGSGGGGSGGGGSGGGGSFEQVQLQQPGAELVKPGASVKMSCKASGYAFSSYWINWMKQKPGQGLEWIGQIYPGDGDTNYNGKFKGRATLTADTSSSTAYMQLSSLTSEDSAVYFCARSITTVVGCAMDYWGQGTSVTVSSTRIQNPDPAVYQLRDSKSSDKSVCLFTDFDSQTNVSQSKDSDVYITDKCVLDMRSMDFKSNSAVAWSNKSDFACANAFNNSIIPEDTFFPSPESSCGFTSESYQQGVLSATILYEILLGKATLYAVLVSALVLMAMVKRKDSRG

SEQ ID NO: 13302 - protein, 696 aa, synthetic construct
MALPVTALLLPLALLLHAARPDIQMTQSPSSLSASVGDRVTITCKASDHINNWLAWYQQKPGQAPKLLIYGATTLETGVPSRFSGSGSGTDYTLTISSLQPEDFATYYCQQSWNTPWTFGQGTKLEIKRLEIQNPDPAVYQLRDSKSSDKSVCLFTDFDSQTNVSQSKDSDVYITDKCVLDMRSMDFKSNSAVAWSNKSDFACANAFNNSIIPEDTFFPSPESSCGFTSESYQQGVLSATILYEILLGKATLYAVLVSALVLMAMVKRKDSRGRAKRSGSGVKQTLNFDLLKLAGDVESNPGPTSMDWIWRILFLVGAATGAHSGPMDPDLEIRAAFLRQRNTALRTEVAELEQEVQRLENEVSQYETRYGPLGGGKGSGGGGSGGGGSGGGGSFEQVQLQQPGAELVKPGASVKMSCKASGYAFSSYWINWMKQKPGQGLEWIGQIYPGDGDTNYNGKFKGRATLTADTSSSTAYMQLSSLTSEDSAVYFCARSITTVVGCAMDYWGQGTSVTVSSTREDLKNVFPPEVAVFEPSEAEISHTQKATLVCLATGFYPDHVELSWWVNGKEVHSGVCTDPQPLKEQPALNDSRYCLSSRLRVSATFWQNPRNHFRCQVQFYGLSENDEWTQDRAKPVTQIVSAEAWGRADCDVKLVEKSFETDTNLNFQNLSVIGFRILLLKVAGFNLLMTLRLWSS

SEQ ID NO: 13303 - protein, 669 aa, synthetic construct
MALPVTALLLPLALLLHAARPDIQMTQSPSSLSASVGDRVTITCKASDHINNWLAWYQQKPGQAPKLLIYGATTLETGVPSRFSGSGSGTDYTLTISSLQPEDFATYYCQQSWNTPWTFGQGTKLEIKRLEDLKNVFPPEVAVFEPSEAEISHTQKATLVCLATGFYPDHVELSWWVNGKEVHSGVCTDPQPLKEQPALNDSRYCLSSRLRVSATFWQNPRNHFRCQVQFYGLSENDEWTQDRAKPVTQIVSAEAWGRADCDVKLVEKSFETDTNLNFQNLSVIGFRILLLKVAGFNLLMTLRLWSSRAKRSGSGATNFSLLKQAGDVEENPGPTSMDWIWRILFLVGAATGAHSGPEVAALEKEVAALEKEVAALEKEVAALEKGSGGGGSGGGGSGGGGSFEQVQLQQPGAELVKPGASVKMSCKASGYAFSSYWINWMKQKPGQGLEWIGQIYPGDGDTNYNGKFKGRATLTADTSSSTAYMQLSSLTSEDSAVYFCARSITTVVGCAMDYWGQGTSVTVSSTRIQNPDPAVYQLRDSKSSDKSVCLFTDFDSQTNVSQSKDSDVYITDKCVLDMRSMDFKSNSAVAWSNKSDFACANAFNNSIIPEDTFFPSPESSCGFTSESYQQGVLSATILYEILLGKATLYAVLVSALVLMAMVKRKDSRG

SEQ ID NO: 13304 - protein, 673 aa, synthetic construct
MALPVTALLLPLALLLHAARPDIQMTQSPSSLSASVGDRVTITCKASDHINNWLAWYQQKPGQAPKLLIYGATTLETGVPSRFSGSGSGTDYTLTISSLQPEDFATYYCQQSWNTPWTFGQGTKLEIKRLEIQNPDPAVYQLRDSKSSDKSVCLFTDFDSQTNVSQSKDSDVYITDKCVLDMRSMDFKSNSAVAWSNKSDFACANAFNNSIIPEDTFFPSPESSCGFTSESYQQGVLSATILYEILLGKATLYAVLVSALVLMAMVKRKDSRGRAKRSGSGVKQTLNFDLLKLAGDVESNPGPTSMDWIWRILFLVGAATGAHSGPEVAALEKEVAALEKEVAALEKEVAALEKGSGGGGSGGGGSGGGGSFEQVQLQQPGAELVKPGASVKMSCKASGYAFSSYWINWMKQKPGQGLEWIGQIYPGDGDTNYNGKFKGRATLTADTSSSTAYMQLSSLTSEDSAVYFCARSITTVVGCAMDYWGQGTSVTVSSTREDLKNVFPPEVAVFEPSEAEISHTQKATLVCLATGFYPDHVELSWWVNGKEVHSGVCTDPQPLKEQPALNDSRYCLSSRLRVSATFWQNPRNHFRCQVQFYGLSENDEWTQDRAKPVTQIVSAEAWGRADCDVKLVEKSFETDTNLNFQNLSVIGFRILLLKVAGFNLLMTLRLWSS

SEQ ID NO: 13305 - protein, 669 aa, synthetic construct; identical to SEQ ID NO: 13303

SEQ ID NO: 13306 - protein, 673 aa, synthetic construct; identical to SEQ ID NO: 13304

SEQ ID NO: 13307 - protein, 759 aa, synthetic construct
MALPVTALLLPLALLLHAARPDIQMTQSPSSLSASVGDRVTITCKASDHINNWLAWYQQKPGQAPKLLIYGATTLETGVPSRFSGSGSGTDYTLTISSLQPEDFATYYCQQSWNTPWTFGQGTKLEIKRLEDLKNVFPPEVAVFEPSEAEISHTQKATLVCLATGFYPDHVELSWWVNGKEVHSGVCTDPQPLKEQPALNDSRYCLSSRLRVSATFWQNPRNHFRCQVQFYGLSENDEWTQDRAKPVTQIVSAEAWGRADCDVKLVEKSFETDTNLNFQNLSVIGFRILLLKVAGFNLLMTLRLWSSRAKRSGSGATNFSLLKQAGDVEENPGPTSMDWIWRILFLVGAATGAHSGPQVQLQESGGGLAQAGGSLRLSCAASGRTFSMGWFRQAPGKEREFVAAITYSGGSPYYASSVRGRFTISRDNAKNTVYLQMNSLKPEDTAVYYCAANPTYGSDWNAENWGQGTQVTVSSGSGGGGSGGGGSGGGGSFEQVQLQQPGAELVKPGASVKMSCKASGYAFSSYWINWMKQKPGQGLEWIGQIYPGDGDTNYNGKFKGRATLTADTSSSTAYMQLSSLTSEDSAVYFCARSITTVVGCAMDYWGQGTSVTVSSTRIQNPDPAVYQLRDSKSSDKSVCLFTDFDSQTNVSQSKDSDVYITDKCVLDMRSMDFKSNSAVAWSNKSDFACANAFNNSIIPEDTFFPSPESSCGFTSESYQQGVLSATILYEILLGKATLYAVLVSALVLMAMVKRKDSRG

SEQ ID NO: 13308 - protein, 763 aa, synthetic construct
MALPVTALLLPLALLLHAARPDIQMTQSPSSLSASVGDRVTITCKASDHINNWLAWYQQKPGQAPKLLIYGATTLETGVPSRFSGSGSGTDYTLTISSLQPEDFATYYCQQSWNTPWTFGQGTKLEIKRLEIQNPDPAVYQLRDSKSSDKSVCLFTDFDSQTNVSQSKDSDVYITDKCVLDMRSMDFKSNSAVAWSNKSDFACANAFNNSIIPEDTFFPSPESSCGFTSESYQQGVLSATILYEILLGKATLYAVLVSALVLMAMVKRKDSRGRAKRSGSGVKQTLNFDLLKLAGDVESNPGPTSMDWIWRILFLVGAATGAHSGPQVQLQESGGGLAQAGGSLRLSCAASGRTFSMGWFRQAPGKEREFVAAITYSGGSPYYASSVRGRFTISRDNAKNTVYLQMNSLKPEDTAVYYCAANPTYGSDWNAENWGQGTQVTVSSGSGGGGSGGGGSGGGGSFEQVQLQQPGAELVKPGASVKMSCKASGYAFSSYWINWMKQKPGQGLEWIGQIYPGDGDTNYNGKFKGRATLTADTSSSTAYMQLSSLTSEDSAVYFCARSITTVVGCAMDYWGQGTSVTVSSTREDLKNVFPPEVAVFEPSEAEISHTQKATLVCLATGFYPDHVELSWWVNGKEVHSGVCTDPQPLKEQPALNDSRYCLSSRLRVSATFWQNPRNHFRCQVQFYGLSENDEWTQDRAKPVTQIVSAEAWGRADCDVKLVEKSFETDTNLNFQNLSVIGFRILLLKVAGFNLLMTLRLWSS

SEQ ID NO: 13309 - protein, 765 aa, synthetic construct
MALPVTALLLPLALLLHAARPEVQLVESGGSLVQPGGSLRLSCAASGFTFDDYAMSWVRQVPGKGLEWVSSINWSGTHTDYADSVKGRFTISRNNANNTLYLQMNSLKSEDTAVYYCAKNWRDAGTTWFEKSGSAGQGTQVTVSSGTGGGGSGGGGSGGGGSEFDIQMTQSPSSLSASVGDRVTITCKASDHINNWLAWYQQKPGQAPKLLIYGATTLETGVPSRFSGSGSGTDYTLTISSLQPEDFATYYCQQSWNTPWTFGQGTKLEIKRLEDLKNVFPPEVAVFEPSEAEISHTQKATLVCLATGFYPDHVELSWWVNGKEVHSGVCTDPQPLKEQPALNDSRYCLSSRLRVSATFWQNPRNHFRCQVQFYGLSENDEWTQDRAKPVTQIVSAEAWGRADCDVKLVEKSFETDTNLNFQNLSVIGFRILLLKVAGFNLLMTLRLWSSRAKRSGSGATNFSLLKQAGDVEENPGPTSMDWIWRILFLVGAATGAHSFEQVQLQQPGAELVKPGASVKMSCKASGYAFSSYWINWMKQKPGQGLEWIGQIYPGDGDTNYNGKFKGRATLTADTSSSTAYMQLSSLTSEDSAVYFCARSITTVVGCAMDYWGQGTSVTVSSTRIQNPDPAVYQLRDSKSSDKSVCLFTDFDSQTNVSQSKDSDVYITDKCVLDMRSMDFKSNSAVAWSNKSDFACANAFNNSIIPEDTFFPSPESSCGFTSESYQQGVLSATILYEILLGKATLYAVLVSALVLMAMVKRKDSRG

SEQ ID NO: 13310 - protein, 769 aa, synthetic construct
MALPVTALLLPLALLLHAARPEVQLVESGGSLVQPGGSLRLSCAASGFTFDDYAMSWVRQVPGKGLEWVSSINWSGTHTDYADSVKGRFTISRNNANNTLYLQMNSLKSEDTAVYYCAKNWRDAGTTWFEKSGSAGQGTQVTVSSGTGGGGSGGGGSGGGGSEFDIQMTQSPSSLSASVGDRVTITCKASDHINNWLAWYQQKPGQAPKLLIYGATTLETGVPSRFSGSGSGTDYTLTISSLQPEDFATYYCQQSWNTPWTFGQGTKLEIKRLEIQNPDPAVYQLRDSKSSDKSVCLFTDFDSQTNVSQSKDSDVYITDKCVLDMRSMDFKSNSAVAWSNKSDFACANAFNNSIIPEDTFFPSPESSCGFTSESYQQGVLSATILYEILLGKATLYAVLVSALVLMAMVKRKDSRGRAKRSGSGVKQTLNFDLLKLAGDVESNPGPTSMDWIWRILFLVGAATGAHSFEQVQLQQPGAELVKPGASVKMSCKASGYAFSSYWINWMKQKPGQGLEWIGQIYPGDGDTNYNGKFKGRATLTADTSSSTAYMQLSSLTSEDSAVYFCARSITTVVGCAMDYWGQGTSVTVSSTREDLKNVFPPEVAVFEPSEAEISHTQKATLVCLATGFYPDHVELSWWVNGKEVHSGVCTDPQPLKEQPALNDSRYCLSSRLRVSATFWQNPRNHFRCQVQFYGLSENDEWTQDRAKPVTQIVSAEAWGRADCDVKLVEKSFETDTNLNFQNLSVIGFRILLLKVAGFNLLMTLRLWSS

SEQ ID NO: 13311 - protein, 763 aa, synthetic construct
MALPVTALLLPLALLLHAARPEVQLLESGGGLVQPGGSLRLSCAASGFIFSSYAMSWVRQAPGKGQEWVSGVSGTGVNTYYADSVKGRFTISRDNSKNTLYLQMNSLRAEDTAVYYCASGKGWDSGSWYEDYRGQGTLVTVSSGTGGGGSGGGGSGGGGSEFDIQMTQSPSSLSASVGDRVTITCKASDHINNWLAWYQQKPGQAPKLLIYGATTLETGVPSRFSGSGSGTDYTLTISSLQPEDFATYYCQQSWNTPWTFGQGTKLEIKRLEDLKNVFPPEVAVFEPSEAEISHTQKATLVCLATGFYPDHVELSWWVNGKEVHSGVCTDPQPLKEQPALNDSRYCLSSRLRVSATFWQNPRNHFRCQVQFYGLSENDEWTQDRAKPVTQIVSAEAWGRADCDVKLVEKSFETDTNLNFQNLSVIGFRILLLKVAGFNLLMTLRLWSSRAKRSGSGATNFSLLKQAGDVEENPGPTSMDWIWRILFLVGAATGAHSFEQVQLQQPGAELVKPGASVKMSCKASGYAFSSYWINWMKQKPGQGLEWIGQIYPGDGDTNYNGKFKGRATLTADTSSSTAYMQLSSLTSEDSAVYFCARSITTVVGCAMDYWGQGTSVTVSSTRIQNPDPAVYQLRDSKSSDKSVCLFTDFDSQTNVSQSKDSDVYITDKCVLDMRSMDFKSNSAVAWSNKSDFACANAFNNSIIPEDTFFPSPESSCGFTSESYQQGVLSATILYEILLGKATLYAVLVSALVLMAMVKRKDSRG

SEQ ID NO: 13312 - protein, 767 aa, synthetic construct
MALPVTALLLPLALLLHAARPEVQLLESGGGLVQPGGSLRLSCAASGFIFSSYAMSWVRQAPGKGQEWVSGVSGTGVNTYYADSVKGRFTISRDNSKNTLYLQMNSLRAEDTAVYYCASGKGWDSGSWYEDYRGQGTLVTVSSGTGGGGSGGGGSGGGGSEFDIQMTQSPSSLSASVGDRVTITCKASDHINNWLAWYQQKPGQAPKLLIYGATTLETGVPSRFSGSGSGTDYTLTISSLQPEDFATYYCQQSWNTPWTFGQGTKLEIKRLEIQNPDPAVYQLRDSKSSDKSVCLFTDFDSQTNVSQSKDSDVYITDKCVLDMRSMDFKSNSAVAWSNKSDFACANAFNNSIIPEDTFFPSPESSCGFTSESYQQGVLSATILYEILLGKATLYAVLVSALVLMAMVKRKDSRGRAKRSGSGVKQTLNFDLLKLAGDVESNPGPTSMDWIWRILFLVGAATGAHSFEQVQLQQPGAELVKPGASVKMSCKASGYAFSSYWINWMKQKPGQGLEWIGQIYPGDGDTNYNGKFKGRATLTADTSSSTAYMQLSSLTSEDSAVYFCARSITTVVGCAMDYWGQGTSVTVSSTREDLKNVFPPEVAVFEPSEAEISHTQKATLVCLATGFYPDHVELSWWVNGKEVHSGVCTDPQPLKEQPALNDSRYCLSSRLRVSATFWQNPRNHFRCQVQFYGLSENDEWTQDRAKPVTQIVSAEAWGRADCDVKLVEKSFETDTNLNFQNLSVIGFRILLLKVAGFNLLMTLRLWSS

SEQ ID NO: 13313 - protein, 731 aa, synthetic construct
MALPVTALLLPLALLLHAARPMLPAPKNLVVSRITEDSARLSWTAPDAAFDSFPIRYIETLIWGEAIWLDVPGSERSYDLTGLKPGTEYAVVITGVKGGRFSSPLVASFTTGTGGGGSGGGGSGGGGSEFDIQMTQSPSSLSASVGDRVTITCKASDHINNWLAWYQQKPGQAPKLLIYGATTLETGVPSRFSGSGSGTDYTLTISSLQPEDFATYYCQQSWNTPWTFGQGTKLEIKRLEDLKNVFPPEVAVFEPSEAEISHTQKATLVCLATGFYPDHVELSWWVNGKEVHSGVCTDPQPLKEQPALNDSRYCLSSRLRVSATFWQNPRNHFRCQVQFYGLSENDEWTQDRAKPVTQIVSAEAWGRADCDVKLVEKSFETDTNLNFQNLSVIGFRILLLKVAGFNLLMTLRLWSSRAKRSGSGATNFSLLKQAGDVEENPGPTSMDWIWRILFLVGAATGAHSFEQVQLQQPGAELVKPGASVKMSCKASGYAFSSYWINWMKQKPGQGLEWIGQIYPGDGDTNYNGKFKGRATLTADTSSSTAYMQLSSLTSEDSAVYFCARSITTVVGCAMDYWGQGTSVTVSSTRIQNPDPAVYQLRDSKSSDKSVCLFTDFDSQTNVSQSKDSDVYITDKCVLDMRSMDFKSNSAVAWSNKSDFACANAFNNSIIPEDTFFPSPESSCGFTSESYQQGVLSATILYEILLGKATLYAVLVSALVLMAMVKRKDSRG

SEQ ID NO: 13314 - protein, 735 aa, synthetic construct
MALPVTALLLPLALLLHAARPMLPAPKNLVVSRITEDSARLSWTAPDAAFDSFPIRYIETLIWGEAIWLDVPGSERSYDLTGLKPGTEYAVVITGVKGGRFSSPLVASFTTGTGGGGSGGGGSGGGGSEFDIQMTQSPSSLSASVGDRVTITCKASDHINNWLAWYQQKPGQAPKLLIYGATTLETGVPSRFSGSGSGTDYTLTISSLQPEDFATYYCQQSWNTPWTFGQGTKLEIKRLEIQNPDPAVYQLRDSKSSDKSVCLFTDFDSQTNVSQSKDSDVYITDKCVLDMRSMDFKSNSAVAWSNKSDFACANAFNNSIIPEDTFFPSPESSCGFTSESYQQGVLSATILYEILLGKATLYAVLVSALVLMAMVKRKDSRGRAKRSGSGVKQTLNFDLLKLAGDVESNPGPTSMDWIWRILFLVGAATGAHSFEQVQLQQPGAELVKPGASVKMSCKASGYAFSSYWINWMKQKPGQGLEWIGQIYPGDGDTNYNGKFKGRATLTADTSSSTAYMQLSSLTSEDSAVYFCARSITTVVGCAMDYWGQGTSVTVSSTREDLKNVFPPEVAVFEPSEAEISHTQKATLVCLATGFYPDHVELSWWVNGKEVHSGVCTDPQPLKEQPALNDSRYCLSSRLRVSATFWQNPRNHFRCQVQFYGLSENDEWTQDRAKPVTQIVSAEAWGRADCDVKLVEKSFETDTNLNFQNLSVIGFRILLLKVAGFNLLMTLRLWSS

SEQ ID NO: 13315 - protein, 760 aa, synthetic construct
MALPVTALLLPLALLLHAARPEVQLVESGGGLVQPGGSLRLSCAASGFNIKDTCIGWVRRAPGKEEELVAKICKYSGHTRYADSVKGRFTISADTSKNTAYLQMNSLRAEDTAVYYCAAVSVRDGHYNYWGQGTTVTVSSGTGGGGSGGGGSGGGGSEFDIQMTQSPSSLSASVGDRVTITCKASDHINNWLAWYQQKPGQAPKLLIYGATTLETGVPSRFSGSGSGTDYTLTISSLQPEDFATYYCQQSWNTPWTFGQGTKLEIKRLEDLKNVFPPEVAVFEPSEAEISHTQKATLVCLATGFYPDHVELSWWVNGKEVHSGVCTDPQPLKEQPALNDSRYCLSSRLRVSATFWQNPRNHFRCQVQFYGLSENDEWTQDRAKPVTQIVSAEAWGRADCDVKLVEKSFETDTNLNFQNLSVIGFRILLLKVAGFNLLMTLRLWSSRAKRSGSGATNFSLLKQAGDVEENPGPTSMDWIWRILFLVGAATGAHSFEQVQLQQPGAELVKPGASVKMSCKASGYAFSSYWINWMKQKPGQGLEWIGQIYPGDGDTNYNGKFKGRATLTADTSSSTAYMQLSSLTSEDSAVYFCARSITTVVGCAMDYWGQGTSVTVSSTRIQNPDPAVYQLRDSKSSDKSVCLFTDFDSQTNVSQSKDSDVYITDKCVLDMRSMDFKSNSAVAWSNKSDFACANAFNNSIIPEDTFFPSPESSCGFTSESYQQGVLSATILYEILLGKATLYAVLVSALVLMAMVKRKDSRG

SEQ ID NO: 13316 - protein, 764 aa, synthetic construct
MALPVTALLLPLALLLHAARPEVQLVESGGGLVQPGGSLRLSCAASGFNIKDTCIGWVRRAPGKEEELVAKICKYSGHTRYADSVKGRFTISADTSKNTAYLQMNSLRAEDTAVYYCAAVSVRDGHYNYWGQGTTVTVSSGTGGGGSGGGGSGGGGSEFDIQMTQSPSSLSASVGDRVTITCKASDHINNWLAWYQQKPGQAPKLLIYGATTLETGVPSRFSGSGSGTDYTLTISSLQPEDFATYYCQQSWNTPWTFGQGTKLEIKRLEIQNPDPAVYQLRDSKSSDKSVCLFTDFDSQTNVSQSKDSDVYITDKCVLDMRSMDFKSNSAVAWSNKSDFACANAFNNSIIPEDTFFPSPESSCGFTSESYQQGVLSATILYEILLGKATLYAVLVSALVLMAMVKRKDSRGRAKRSGSGVKQTLNFDLLKLAGDVESNPGPTSMDWIWRILFLVGAATGAHSFEQVQLQQPGAELVKPGASVKMSCKASGYAFSSYWINWMKQKPGQGLEWIGQIYPGDGDTNYNGKFKGRATLTADTSSSTAYMQLSSLTSEDSAVYFCARSITTVVGCAMDYWGQGTSVTVSSTREDLKNVFPPEVAVFEPSEAEISHTQKATLVCLATGFYPDHVELSWWVNGKEVHSGVCTDPQPLKEQPALNDSRYCLSSRLRVSATFWQNPRNHFRCQVQFYGLSENDEWTQDRAKPVTQIVSAEAWGRADCDVKLVEKSFETDTNLNFQNLSVIGFRILLLKVAGFNLLMTLRLWSS

SEQ ID NO: 13317 - protein, 637 aa, synthetic construct
MALPVTALLLPLALLLHAARPQLQLQESGPGLVKPSETLSLTCTVSGDSISSGDYYWGWIRQPPGKGLEWIGHIYYSGVTYYNPSLKSRVTISVDTSRNQFSLKLSSVTAADTAVYYCTREDSSNWRSRGQGTLVTVSSLEDLKNVFPPEVAVFEPSEAEISHTQKATLVCLATGFYPDHVELSWWVNGKEVHSGVCTDPQPLKEQPALNDSRYCLSSRLRVSATFWQNPRNHFRCQVQFYGLSENDEWTQDRAKPVTQIVSAEAWGRADCDVKLVEKSFETDTNLNFQNLSVIGFRILLLKVAGFNLLMTLRLWSSRAKRSGSGATNFSLLKQAGDVEENPGPTSMDWIWRILFLVGAATGAHSFEVQLVESGGGVVQPGRSLRLSCAASGFSFSGYGMHWVRQAPGKGLEWVAYISYDGSNKYYADSVKGRFTISRDNSKNTLYLQMNSLRAEDTAVYYCAKDPAWGLRLGESSSYDFDIWGQGTMVTVSSTRIQNPDPAVYQLRDSKSSDKSVCLFTDFDSQTNVSQSKDSDVYITDKCVLDMRSMDFKSNSAVAWSNKSDFACANAFNNSIIPEDTFFPSPESSCGFTSESYQQGVLSATILYEILLGKATLYAVLVSALVLMAMVKRKDSRG

SEQ ID NO: 13318 - protein, 641 aa, synthetic construct
MALPVTALLLPLALLLHAARPQLQLQESGPGLVKPSETLSLTCTVSGDSISSGDYYWGWIRQPPGKGLEWIGHIYYSGVTYYNPSLKSRVTISVDTSRNQFSLKLSSVTAADTAVYYCTREDSSNWRSRGQGTLVTVSSLEIQNPDPAVYQLRDSKSSDKSVCLFTDFDSQTNVSQSKDSDVYITDKCVLDMRSMDFKSNSAVAWSNKSDFACANAFNNSIIPEDTFFPSPESSCGFTSESYQQGVLSATILYEILLGKATLYAVLVSALVLMAMVKRKDSRGRAKRSGSGVKQTLNFDLLKLAGDVESNPGPTSMDWIWRILFLVGAATGAHSFEVQLVESGGGVVQPGRSLRLSCAASGFSFSGYGMHWVRQAPGKGLEWVAYISYDGSNKYYADSVKGRFTISRDNSKNTLYLQMNSLRAEDTAVYYCAKDPAWGLRLGESSSYDFDIWGQGTMVTVSSTREDLKNVFPPEVAVFEPSEAEISHTQKATLVCLATGFYPDHVELSWWVNGKEVHSGVCTDPQPLKEQPALNDSRYCLSSRLRVSATFWQNPRNHFRCQVQFYGLSENDEWTQDRAKPVTQIVSAEAWGRADCDVKLVEKSFETDTNLNFQNLSVIGFRILLLKVAGFNLLMTLRLWSS

SEQ ID NO: 13319 - protein, 626 aa, synthetic construct
MALPVTALLLPLALLLHAARPQLQLQESGPGLVKPSETLSLTCTVSGDSISSGDYYWGWIRQPPGKGLEWIGHIYYSGVTYYNPSLKSRVTISVDTSRNQFSLKLSSVTAADTAVYYCTREDSSNWRSRGQGTLVTVSSLEDLKNVFPPEVAVFEPSEAEISHTQKATLVCLATGFYPDHVELSWWVNGKEVHSGVCTDPQPLKEQPALNDSRYCLSSRLRVSATFWQNPRNHFRCQVQFYGLSENDEWTQDRAKPVTQIVSAEAWGRADCDVKLVEKSFETDTNLNFQNLSVIGFRILLLKVAGFNLLMTLRLWSSRAKRSGSGATNFSLLKQAGDVEENPGPTSMDWIWRILFLVGAATGAHSFEVQLVESGGGLVQPGGSLRLSCAASGFSFSDFWMSWVRQAPGKGLEWVATISQAGSEKDYVDSVKGRFTISRDNAKKSLYLQMNSLRAEDTAVYYCASGVYSFDYRGQGTLVTVSSTRIQNPDPAVYQLRDSKSSDKSVCLFTDFDSQTNVSQSKDSDVYITDKCVLDMRSMDFKSNSAVAWSNKSDFACANAFNNSIIPEDTFFPSPESSCGFTSESYQQGVLSATILYEILLGKATLYAVLVSALVLMAMVKRKDSRG

SEQ ID NO: 13320 - protein, 630 aa, synthetic construct
MALPVTALLLPLALLLHAARPQLQLQESGPGLVKPSETLSLTCTVSGDSISSGDYYWGWIRQPPGKGLEWIGHIYYSGVTYYNPSLKSRVTISVDTSRNQFSLKLSSVTAADTAVYYCTREDSSNWRSRGQGTLVTVSSLEIQNPDPAVYQLRDSKSSDKSVCLFTDFDSQTNVSQSKDSDVYITDKCVLDMRSMDFKSNSAVAWSNKSDFACANAFNNSIIPEDTFFPSPESSCGFTSESYQQGVLSATILYEILLGKATLYAVLVSALVLMAMVKRKDSRGRAKRSGSGVKQTLNFDLLKLAGDVESNPGPTSMDWIWRILFLVGAATGAHSFEVQLVESGGGLVQPGGSLRLSCAASGFSFSDFWMSWVRQAPGKGLEWVATISQAGSEKDYVDSVKGRFTISRDNAKKSLYLQMNSLRAEDTAVYYCASGVYSFDYRGQGTLVTVSSTREDLKNVFPPEVAVFEPSEAEISHTQKATLVCLATGFYPDHVELSWWVNGKEVHSGVCTDPQPLKEQPALNDSRYCLSSRLRVSATFWQNPRNHFRCQVQFYGLSENDEWTQDRAKPVTQIVSAEAWGRADCDVKLVEKSFETDTNLNFQNLSVIGFRILLLKVAGFNLLMTLRLWSS

SEQ ID NO: 13321 - protein, 628 aa, synthetic construct
MALPVTALLLPLALLLHAARPQLQLQESGPGLVKPSETLSLTCTVSGDSISSGDYYWGWIRQPPGKGLEWIGHIYYSGVTYYNPSLKSRVTISVDTSRNQFSLKLSSVTAADTAVYYCTREDSSNWRSRGQGTLVTVSSLEDLKNVFPPEVAVFEPSEAEISHTQKATLVCLATGFYPDHVELSWWVNGKEVHSGVCTDPQPLKEQPALNDSRYCLSSRLRVSATFWQNPRNHFRCQVQFYGLSENDEWTQDRAKPVTQIVSAEAWGRADCDVKLVEKSFETDTNLNFQNLSVIGFRILLLKVAGFNLLMTLRLWSSRAKRSGSGATNFSLLKQAGDVEENPGPTSMDWIWRILFLVGAATGAHSFQVQLVESGGGLVQPGGSLRLSCAASGFTFTNHAMSWVRQAPGKGLELVSSISGNGRTTYYADSVKGRFTISRDISKNTLDLQMNSLRAEDTAVYYCAKDGGETLVDSRGQGTLVTVSSTRIQNPDPAVYQLRDSKSSDKSVCLFTDFDSQTNVSQSKDSDVYITDKCVLDMRSMDFKSNSAVAWSNKSDFACANAFNNSIIPEDTFFPSPESSCGFTSESYQQGVLSATILYEILLGKATLYAVLVSALVLMAMVKRKDSRG

SEQ ID NO: 13322 - protein, 632 aa, synthetic construct
MALPVTALLLPLALLLHAARPQLQLQESGPGLVKPSETLSLTCTVSGDSISSGDYYWGWIRQPPGKGLEWIGHIYYSGVTYYNPSLKSRVTISVDTSRNQFSLKLSSVTAADTAVYYCTREDSSNWRSRGQGTLVTVSSLEIQNPDPAVYQLRDSKSSDKSVCLFTDFDSQTNVSQSKDSDVYITDKCVLDMRSMDFKSNSAVAWSNKSDFACANAFNNSIIPEDTFFPSPESSCGFTSESYQQGVLSATILYEILLGKATLYAVLVSALVLMAMVKRKDSRGRAKRSGSGVKQTLNFDLLKLAGDVESNPGPTSMDWIWRILFLVGAATGAHSFQVQLVESGGGLVQPGGSLRLSCAASGFTFTNHAMSWVRQAPGKGLELVSSISGNGRTTYYADSVKGRFTISRDISKNTLDLQMNSLRAEDTAVYYCAKDGGETLVDSRGQGTLVTVSSTREDLKNVFPPEVAVFEPSEAEISHTQKATLVCLATGFYPDHVELSWWVNGKEVHSGVCTDPQPLKEQPALNDSRYCLSSRLRVSATFWQNPRNHFRCQVQFYGLSENDEWTQDRAKPVTQIVSAEAWGRADCDVKLVEKSFETDTNLNFQNLSVIGFRILLLKVAGFNLLMTLRLWSS

SEQ ID NO: 13323 - protein, 627 aa, synthetic construct
MALPVTALLLPLALLLHAARPEVQLLESGGGLIQPGGSLRLSCAASGFTFSSHAMTWVRQAPGKGLEWVSAISGSGDYTHYADSVKGRFTISRDNSKNTVYLQMNSLRAEDSAVYYCAKDEDGGSLLGHRGQGTLVTVSSLEDLKNVFPPEVAVFEPSEAEISHTQKATLVCLATGFYPDHVELSWWVNGKEVHSGVCTDPQPLKEQPALNDSRYCLSSRLRVSATFWQNPRNHFRCQVQFYGLSENDEWTQDRAKPVTQIVSAEAWGRADCDVKLVEKSFETDTNLNFQNLSVIGFRILLLKVAGFNLLMTLRLWSSRAKRSGSGATNFSLLKQAGDVEENPGPTSMDWIWRILFLVGAATGAHSFEVQLVESGGGLVQPGGSLRLSCAASGFSFSDFWMSWVRQAPGKGLEWVATISQAGSEKDYVDSVKGRFTISRDNAKKSLYLQMNSLRAEDTAVYYCASGVYSFDYRGQGTLVTVSSTRIQNPDPAVYQLRDSKSSDKSVCLFTDFDSQTNVSQSKDSDVYITDKCVLDMRSMDFKSNSAVAWSNKSDFACANAFNNSIIPEDTFFPSPESSCGFTSESYQQGVLSATILYEILLGKATLYAVLVSALVLMAMVKRKDSRG

SEQ ID NO: 13324 - protein, 631 aa, synthetic construct
MALPVTALLLPLALLLHAARPEVQLLESGGGLIQPGGSLRLSCAASGFTFSSHAMTWVRQAPGKGLEWVSAISGSGDYTHYADSVKGRFTISRDNSKNTVYLQMNSLRAEDSAVYYCAKDEDGGSLLGHRGQGTLVTVSSLEIQNPDPAVYQLRDSKSSDKSVCLFTDFDSQTNVSQSKDSDVYITDKCVLDMRSMDFKSNSAVAWSNKSDFACANAFNNSIIPEDTFFPSPESSCGFTSESYQQGVLSATILYEILLGKATLYAVLVSALVLMAMVKRKDSRGRAKRSGSGVKQTLNFDLLKLAGDVESNPGPTSMDWIWRILFLVGAATGAHSFEVQLVESGGGLVQPGGSLRLSCAASGFSFSDFWMSWVRQAPGKGLEWVATISQAGSEKDYVDSVKGRFTISRDNAKKSLYLQMNSLRAEDTAVYYCASGVYSFDYRGQGTLVTVSSTREDLKNVFPPEVAVFEPSEAEISHTQKATLVCLATGFYPDHVELSWWVNGKEVHSGVCTDPQPLKEQPALNDSRYCLSSRLRVSATFWQNPRNHFRCQVQFYGLSENDEWTQDRAKPVTQIVSAEAWGRADCDVKLVEKSFETDTNLNFQNLSVIGFRILLLKVAGFNLLMTLRLWSS

SEQ ID NO: 13325 - protein, 633 aa, synthetic construct
MALPVTALLLPLALLLHAARPQVQLVESGGGLVQPGGSLRLSCAASGFTFTNHAMSWVRQAPGKGLELVSSISGNGRTTYYADSVKGRFTISRDISKNTLDLQMNSLRAEDTAVYYCAKDGGETLVDSRGQGTLVTVSSLEDLKNVFPPEVAVFEPSEAEISHTQKATLVCLATGFYPDHVELSWWVNGKEVHSGVCTDPQPLKEQPALNDSRYCLSSRLRVSATFWQNPRNHFRCQVQFYGLSENDEWTQDRAKPVTQIVSAEAWGRADCDVKLVEKSFETDTNLNFQNLSVIGFRILLLKVAGFNLLMTLRLWSSRAKRSGSGATNFSLLKQAGDVEENPGPTSMDWIWRILFLVGAATGAHSFEEVQLLESGGGLVQPGGSLRLSCAASGFIFSSYAMSWVRQAPGKGQEWVSGVSGTGVNTYYADSVKGRFTISRDNSKNTLYLQMNSLRAEDTAVYYCASGKGWDSGSWYEDYRGQGTLVTVSSTRIQNPDPAVYQLRDSKSSDKSVCLFTDFDSQTNVSQSKDSDVYITDKCVLDMRSMDFKSNSAVAWSNKSDFACANAFNNSIIPEDTFFPSPESSCGFTSESYQQGVLSATILYEILLGKATLYAVLVSALVLMAMVKRKDSRG

SEQ ID NO: 13326 - protein, 637 aa, synthetic construct
MALPVTALLLPLALLLHAARPQVQLVESGGGLVQPGGSLRLSCAASGFTFTNHAMSWVRQAPGKGLELVSSISGNGRTTYYADSVKGRFTISRDISKNTLDLQMNSLRAEDTAVYYCAKDGGETLVDSRGQGTLVTVSSLEIQNPDPAVYQLRDSKSSDKSVCLFTDFDSQTNVSQSKDSDVYITDKCVLDMRSMDFKSNSAVAWSNKSDFACANAFNNSIIPEDTFFPSPESSCGFTSESYQQGVLSATILYEILLGKATLYAVLVSALVLMAMVKRKDSRGRAKRSGSGVKQTLNFDLLKLAGDVESNPGPTSMDWIWRILFLVGAATGAHSFEEVQLLESGGGLVQPGGSLRLSCAASGFIFSSYAMSWVRQAPGKGQEWVSGVSGTGVNTYYADSVKGRFTISRDNSKNTLYLQMNSLRAEDTAVYYCASGKGWDSGSWYEDYRGQGTLVTVSSTREDLKNVFPPEVAVFEPSEAEISHTQKATLVCLATGFYPDHVELSWWVNGKEVHSGVCTDPQPLKEQPALNDSRYCLSSRLRVSATFWQNPRNHFRCQVQFYGLSENDEWTQDRAKPVTQIVSAEAWGRADCDVKLVEKSFETDTNLNFQNLSVIGFRILLLKVAGFNLLMTLRLWSS

SEQ ID NO: 13327 - protein, 629 aa, synthetic construct
MALPVTALLLPLALLLHAARPEVQLVESGGGLVQAGGSLRLSCAASGRTFSMGWFRQAPGKEREFVAAITYSGGSPYYADSVKGRFTISRDNAKNTVYLQMNSLKPEDTAVYYCAANPTYGSDWNAENWGQGTQVTVSSLEDLKNVFPPEVAVFEPSEAEISHTQKATLVCLATGFYPDHVELSWWVNGKEVHSGVCTDPQPLKEQPALNDSRYCLSSRLRVSATFWQNPRNHFRCQVQFYGLSENDEWTQDRAKPVTQIVSAEAWGRADCDVKLVEKSFETDTNLNFQNLSVIGFRILLLKVAGFNLLMTLRLWSSRAKRSGSGATNFSLLKQAGDVEENPGPTSMDWIWRILFLVGAATGAHSFEQLQLQESGPGLVKPSETLSLTCTVSGGSISSGDYYWGWIRQPPGKGLEWIGSISYSGSTYYNPSLKSRVTISVDTSRNQFSLKLSSVTAADTAVYYCTREDSSNWRSRGQGTLVTVSSTRIQNPDPAVYQLRDSKSSDKSVCLFTDFDSQTNVSQSKDSDVYITDKCVLDMRSMDFKSNSAVAWSNKSDFACANAFNNSIIPEDTFFPSPESSCGFTSESYQQGVLSATILYEILLGKATLYAVLVSALVLMAMVKRKDSRG

SEQ ID NO: 13328 - protein, 633 aa, synthetic construct
MALPVTALLLPLALLLHAARPEVQLVESGGGLVQAGGSLRLSCAASGRTFSMGWFRQAPGKEREFVAAITYSGGSPYYADSVKGRFTISRDNAKNTVYLQMNSLKPEDTAVYYCAANPTYGSDWNAENWGQGTQVTVSSLEIQNPDPAVYQLRDSKSSDKSVCLFTDFDSQTNVSQSKDSDVYITDKCVLDMRSMDFKSNSAVAWSNKSDFACANAFNNSIIPEDTFFPSPESSCGFTSESYQQGVLSATILYEILLGKATLYAVLVSALVLMAMVKRKDSRGRAKRSGSGVKQTLNFDLLKLAGDVESNPGPTSMDWIWRILFLVGAATGAHSFEQLQLQESGPGLVKPSETLSLTCTVSGGSISSGDYYWGWIRQPPGKGLEWIGSISYSGSTYYNPSLKSRVTISVDTSRNQFSLKLSSVTAADTAVYYCTREDSSNWRSRGQGTLVTVSSTREDLKNVFPPEVAVFEPSEAEISHTQKATLVCLATGFYPDHVELSWWVNGKEVHSGVCTDPQPLKEQPALNDSRYCLSSRLRVSATFWQNPRNHFRCQVQFYGLSENDEWTQDRAKPVTQIVSAEAWGRADCDVKLVEKSFETDTNLNFQNLSVIGFRILLLKVAGFNLLMTLRLWSS

SEQ ID NO: 13329 - protein, 1131 aa, synthetic construct
MALPVTALLLPLALLLHAARPEVQLVESGGGLVQAGGSLRLSCAASGRTFSMGWFRQAPGKEREFVAAITYSGGSPYYADSVKGRFTISRDNAKNTVYLQMNSLKPEDTAVYYCAANPTYGSDWNAENWGQGTQVTVSSGTGGGGSGGGGSGGGGSEFDIQMTQSPSSLSASVGDRVTITCKASDHINNWLAWYQQKPGQAPKLLIYGATTLETGVPSRFSGSGSGTDYTLTISSLQPEDFATYYCQQSWNTPWTFGQGTKLEIKRLEDLKNVFPPEVAVFEPSEAEISHTQKATLVCLATGFYPDHVELSWWVNGKEVHSGVCTDPQPLKEQPALNDSRYCLSSRLRVSATFWQNPRNHFRCQVQFYGLSENDEWTQDRAKPVTQIVSAEAWGRADCDVKLVEKSFETDTNLNFQNLSVIGFRILLLKVAGFNLLMTLRLWSSRAKRSGSGATNFSLLKQAGDVEENPGPTSATMDWIWRILFLVGAATGAHSGPEVQLVESGGGLVQAGGSLRLSCAASGRTFTMGWFRQAPGKEREFVAAISLSPTLAYYADSVKGRFTISRDNAKNTVVLQMNSLKPEDTALYYCAADRKSVMSIRPDYWGQGTQVTVSSGSGGGGSGGGGSGGGGSFEQVQLQQPGAELVKPGASVKMSCKASGYAFSSYWINWMKQKPGQGLEWIGQIYPGDGDTNYNGKFKGRATLTADTSSSTAYMQLSSLTSEDSAVYFCARSITTVVGCAMDYWGQGTSVTVSSTRIQNPDPAVYQLRDSKSSDKSVCLFTDFDSQTNVSQSKDSDVYITDKCVLDMRSMDFKSNSAVAWSNKSDFACANAFNNSIIPEDTFFPSPESSCGFTSESYQQGVLSATILYEILLGKATLYAVLVSALVLMAMVKRKDSRGRAKRSGSGVKQTLNFDLLKLAGDVESNPGPSRGHMTEYKPTVRLATRDDVPRAVRTLAAAFADYPATRHTVDPDRHIERVTELQELFLTRVGLDIGKVWVADDGAAVAVWTTPESVEAGAVFAEIGPRMAELSGSRLAAQQQMEGLLAPHRPKEPAWFLATVGVSPDHQGKGLGSAVVLPGVEAAERAGVPAFLETSAPRNLPFYERLGFTVTADVEVPEGPRTWCMTRKPGA

SEQ ID NO: 13330 - protein, 769 aa, synthetic construct
MALPVTALLLPLALLLHAARPEVQLVESGGGLVQPGGSLRLSCAASGFASDYYIIGWFRQAPGKEREGVSCISSRYANTNYADSVKGRFTISRDNAKNTVYLQMNSLKPEDTAVYYCAADTRRYTCPDIATMHRNFDSWGQGTLVTVSSGTGGGGSGGGGSGGGGSEFDIQMTQSPSSLSASVGDRVTITCKASDHINNWLAWYQQKPGQAPKLLIYGATTLETGVPSRFSGSGSGTDYTLTISSLQPEDFATYYCQQSWNTPWTFGQGTKLEIKRLEDLKNVFPPEVAVFEPSEAEISHTQKATLVCLATGFYPDHVELSWWVNGKEVHSGVCTDPQPLKEQPALNDSRYCLSSRLRVSATFWQNPRNHFRCQVQFYGLSENDEWTQDRAKPVTQIVSAEAWGRADCDVKLVEKSFETDTNLNFQNLSVIGFRILLLKVAGFNLLMTLRLWSSRAKRSGSGATNFSLLKQAGDVEENPGPTSMDWIWRILFLVGAATGAHSFEQVQLQQPGAELVKPGASVKMSCKASGYAFSSYWINWMKQKPGQGLEWIGQIYPGDGDTNYNGKFKGRATLTADTSSSTAYMQLSSLTSEDSAVYFCARSITTVVGCAMDYWGQGTSVTVSSTRIQNPDPAVYQLRDSKSSDKSVCLFTDFDSQTNVSQSKDSDVYITDKCVLDMRSMDFKSNSAVAWSNKSDFACANAFNNSIIPEDTFFPSPESSCGFTSESYQQGVLSATILYEILLGKATLYAVLVSALVLMAMVKRKDSRG

SEQ ID NO: 13331 - protein, 769 aa, synthetic construct
MALPVTALLLPLALLLHAARPEVQLVESGGGLVQPGGSLRLSCEASGFASDDYIIGWFRQAPGKEREGVSCISSKYANTVYTDSVKGRFRLSRGTAKNTVYLQMSALKPEDTAVYYCAMDSRRVTCPEISTMHRNFDSWGQGTLVTVSSGTGGGGSGGGGSGGGGSEFDIQMTQSPSSLSASVGDRVTITCKASDHINNWLAWYQQKPGQAPKLLIYGATTLETGVPSRFSGSGSGTDYTLTISSLQPEDFATYYCQQSWNTPWTFGQGTKLEIKRLEDLKNVFPPEVAVFEPSEAEISHTQKATLVCLATGFYPDHVELSWWVNGKEVHSGVCTDPQPLKEQPALNDSRYCLSSRLRVSATFWQNPRNHFRCQVQFYGLSENDEWTQDRAKPVTQIVSAEAWGRADCDVKLVEKSFETDTNLNFQNLSVIGFRILLLKVAGFNLLMTLRLWSSRAKRSGSGATNFSLLKQAGDVEENPGPTSMDWIWRILFLVGAATGAHSFEQVQLQQPGAELVKPGASVKMSCKASGYAFSSYWINWMKQKPGQGLEWIGQIYPGDGDTNYNGKFKGRATLTADTSSSTAYMQLSSLTSEDSAVYFCARSITTVVGCAMDYWGQGTSVTVSSTRIQNPDPAVYQLRDSKSSDKSVCLFTDFDSQTNVSQSKDSDVYITDKCVLDMRSMDFKSNSAVAWSNKSDFACANAFNNSIIPEDTFFPSPESSCGFTSESYQQGVLSATILYEILLGKATLYAVLVSALVLMAMVKRKDSRG

SEQ ID NO: 13332 - protein, 769 aa, synthetic construct
MALPVTALLLPLALLLHAARPEVQLVESGGGLVQPGGSLRLSCAASGFASDYYIIGWFRQAPGKEREGVSCISSRYANTNYADSVKGRFTISRDNAKNTVYLQMNSLKPEDTAVYYCAADTRRYTCPDIATMHRNFDSWGQGTLVTVSSGTGGGGSGGGGSGGGGSEFDIQMTQSPSSLSASVGDRVTITCKASDHINNWLAWYQQKPGQAPKLLIYGATTLETGVPSRFSGSGSGTDYTLTISSLQPEDFATYYCQQSWNTPWTFGQGTKLEIKRLEIQNPDPAVYQLRDSKSSDKSVCLFTDFDSQTNVSQSKDSDVYITDKCVLDMRSMDFKSNSAVAWSNKSDFACANAFNNSIIPEDTFFPSPESSCGFTSESYQQGVLSATILYEILLGKATLYAVLVSALVLMAMVKRKDSRGRAKRSGSGATNFSLLKQAGDVEENPGPTSMDWIWRILFLVGAATGAHSFEQVQLQQPGAELVKPGASVKMSCKASGYAFSSYWINWMKQKPGQGLEWIGQIYPGDGDTNYNGKFKGRATLTADTSSSTAYMQLSSLTSEDSAVYFCARSITTVVGCAMDYWGQGTSVTVSSTRDLKNVFPPEVAVFEPSEAEISHTQKATLVCLATGFYPDHVELSWWVNGKEVHSGVCTDPQPLKEQPALNDSRYCLSSRLRVSATFWQNPRNHFRCQVQFYGLSENDEWTQDRAKPVTQIVSAEAWGRADCDVKLVEKSFETDTNLNFQNLSVIGFRILLLKVAGFNLLMTLRLWSS

SEQ ID NO: 13333 - protein, 769 aa, synthetic construct
MALPVTALLLPLALLLHAARPEVQLVESGGGLVQPGGSLRLSCEASGFASDDYIIGWFRQAPGKEREGVSCISSKYANTVYTDSVKGRFRLSRGTAKNTVYLQMSALKPEDTAVYYCAMDSRRVTCPEISTMHRNFDSWGQGTLVTVSSGTGGGGSGGGGSGGGGSEFDIQMTQSPSSLSASVGDRVTITCKASDHINNWLAWYQQKPGQAPKLLIYGATTLETGVPSRFSGSGSGTDYTLTISSLQPEDFATYYCQQSWNTPWTFGQGTKLEIKRLEIQNPDPAVYQLRDSKSSDKSVCLFTDFDSQTNVSQSKDSDVYITDKCVLDMRSMDFKSNSAVAWSNKSDFACANAFNNSIIPEDTFFPSPESSCGFTSESYQQGVLSATILYEILLGKATLYAVLVSALVLMAMVKRKDSRGRAKRSGSGATNFSLLKQAGDVEENPGPTSMDWIWRILFLVGAATGAHSFEQVQLQQPGAELVKPGASVKMSCKASGYAFSSYWINWMKQKPGQGLEWIGQIYPGDGDTNYNGKFKGRATLTADTSSSTAYMQLSSLTSEDSAVYFCARSITTVVGCAMDYWGQGTSVTVSSTRDLKNVFPPEVAVFEPSEAEISHTQKATLVCLATGFYPDHVELSWWVNGKEVHSGVCTDPQPLKEQPALNDSRYCLSSRLRVSATFWQNPRNHFRCQVQFYGLSENDEWTQDRAKPVTQIVSAEAWGRADCDVKLVEKSFETDTNLNFQNLSVIGFRILLLKVAGFNLLMTLRLWSS

SEQ ID NO: 13334 - protein, 760 aa, synthetic construct
MALPVTALLLPLALLLHAARPQVKLEESGGGLVQPGESLRLSCSASGSIFKVFRVFAMSWYRQGPGKQRELVASISSGETTTYAESVKGRFTISRDNAKNTAYLQMDSLKPEDTAVYYCNADHTFTGDFWGQGTQVTVSSGTGGGGSGGGGSGGGGSEFDIQMTQSPSSLSASVGDRVTITCKASDHINNWLAWYQQKPGQAPKLLIYGATTLETGVPSRFSGSGSGTDYTLTISSLQPEDFATYYCQQSWNTPWTFGQGTKLEIKRLEIQNPDPAVYQLRDSKSSDKSVCLFTDFDSQTNVSQSKDSDVYITDKCVLDMRSMDFKSNSAVAWSNKSDFACANAFNNSIIPEDTFFPSPESSCGFTSESYQQGVLSATILYEILLGKATLYAVLVSALVLMAMVKRKDSRGRAKRSGSGATNFSLLKQAGDVEENPGPTSMDWIWRILFLVGAATGAHSFEQVQLQQPGAELVKPGASVKMSCKASGYAFSSYWINWMKQKPGQGLEWIGQIYPGDGDTNYNGKFKGRATLTADTSSSTAYMQLSSLTSEDSAVYFCARSITTVVGCAMDYWGQGTSVTVSSTRDLKNVFPPEVAVFEPSEAEISHTQKATLVCLATGFYPDHVELSWWVNGKEVHSGVCTDPQPLKEQPALNDSRYCLSSRLRVSATFWQNPRNHFRCQVQFYGLSENDEWTQDRAKPVTQIVSAEAWGRADCDVKLVEKSFETDTNLNFQNLSVIGFRILLLKVAGFNLLMTLRLWSS

SEQ ID NO: 13335 - protein, 761 aa, synthetic construct
MALPVTALLLPLALLLHAARPDIQMTQSPSSLSASVGDRVTITCKASDHINNWLAWYQQKPGQAPKLLIYGATTLETGVPSRFSGSGSGTDYTLTISSLQPEDFATYYCQQSWNTPWTFGQGTKLEIKRLEDLKNVFPPEVAVFEPSEAEISHTQKATLVCLATGFYPDHVELSWWVNGKEVHSGVCTDPQPLKEQPALNDSRYCLSSRLRVSATFWQNPRNHFRCQVQFYGLSENDEWTQDRAKPVTQIVSAEAWGRADCDVKLVEKSFETDTNLNFQNLSVIGFRILLLKVAGFNLLMTLRLWSSRAKRSGSGATNFSLLKQAGDVEENPGPTSATMDWIWRILFLVGAATGAHSGPEVQLVESGGGLVQAGGSLRLSCAASGRTFSMGWFRQAPGKEREFVAAITYSGGSPYYADSVKGRFTISRDNAKNTVYLQMNSLKPEDTAVYYCAANPTYGSDWNAENWGQGTQVTVSSGSGGGGSGGGGSGGGGSFEQVQLQQPGAELVKPGASVKMSCKASGYAFSSYWINWMKQKPGQGLEWIGQIYPGDGDTNYNGKFKGRATLTADTSSSTAYMQLSSLTSEDSAVYFCARSITTVVGCAMDYWGQGTSVTVSSTRIQNPDPAVYQLRDSKSSDKSVCLFTDFDSQTNVSQSKDSDVYITDKCVLDMRSMDFKSNSAVAWSNKSDFACANAFNNSIIPEDTFFPSPESSCGFTSESYQQGVLSATILYEILLGKATLYAVLVSALVLMAMVKRKDSRG

SEQ ID NO: 13336 - protein, 762 aa, synthetic construct
MALPVTALLLPLALLLHAARPDIQMTQSPSSLSASVGDRVTITCKASDHINNWLAWYQQKPGQAPKLLIYGATTLETGVPSRFSGSGSGTDYTLTISSLQPEDFATYYCQQSWNTPWTFGQGTKLEIKRLEDLKNVFPPEVAVFEPSEAEISHTQKATLVCLATGFYPDHVELSWWVNGKEVHSGVCTDPQPLKEQPALNDSRYCLSSRLRVSATFWQNPRNHFRCQVQFYGLSENDEWTQDRAKPVTQIVSAEAWGRADCDVKLVEKSFETDTNLNFQNLSVIGFRILLLKVAGFNLLMTLRLWSSRAKRSGSGATNFSLLKQAGDVEENPGPTSATMDWIWRILFLVGAATGAHSGPEVQLVESGGGLVQPGGSLRLSCAASGSIFGFNDMAWYRQAPGKQRELVALISRVGVTSSADSVKGRFTISRVNAKDTVYLQMNSLKPEDTAVYYCYMDQRLDGSTLAYWGQGTQVTVSSGSGGGGSGGGGSGGGGSFEQVQLQQPGAELVKPGASVKMSCKASGYAFSSYWINWMKQKPGQGLEWIGQIYPGDGDTNYNGKFKGRATLTADTSSSTAYMQLSSLTSEDSAVYFCARSITTVVGCAMDYWGQGTSVTVSSTRIQNPDPAVYQLRDSKSSDKSVCLFTDFDSQTNVSQSKDSDVYITDKCVLDMRSMDFKSNSAVAWSNKSDFACANAFNNSIIPEDTFFPSPESSCGFTSESYQQGVLSATILYEILLGKATLYAVLVSALVLMAMVKRKDSRG

SEQ ID NO: 13337 - protein, 758 aa, synthetic construct
MALPVTALLLPLALLLHAARPDIQMTQSPSSLSASVGDRVTITCKASDHINNWLAWYQQKPGQAPKLLIYGATTLETGVPSRFSGSGSGTDYTLTISSLQPEDFATYYCQQSWNTPWTFGQGTKLEIKRLEDLKNVFPPEVAVFEPSEAEISHTQKATLVCLATGFYPDHVELSWWVNGKEVHSGVCTDPQPLKEQPALNDSRYCLSSRLRVSATFWQNPRNHFRCQVQFYGLSENDEWTQDRAKPVTQIVSAEAWGRADCDVKLVEKSFETDTNLNFQNLSVIGFRILLLKVAGFNLLMTLRLWSSRAKRSGSGATNFSLLKQAGDVEENPGPTSATMDWIWRILFLVGAATGAHSGPEVQLVESGGGLVQAGGSLRLSCAASGSVFSGNVMGWYRQAPGKEREWVAAIASGGSIYYRDSVKGRFTISRDNAKNTVYLQMNSLKPEDTAVYYCNSHPPTLPYWGLGTQVTVSSGSGGGGSGGGGSGGGGSFEQVQLQQPGAELVKPGASVKMSCKASGYAFSSYWINWMKQKPGQGLEWIGQIYPGDGDTNYNGKFKGRATLTADTSSSTAYMQLSSLTSEDSAVYFCARSITTVVGCAMDYWGQGTSVTVSSTRIQNPDPAVYQLRDSKSSDKSVCLFTDFDSQTNVSQSKDSDVYITDKCVLDMRSMDFKSNSAVAWSNKSDFACANAFNNSIIPEDTFFPSPESSCGFTSESYQQGVLSATILYEILLGKATLYAVLVSALVLMAMVKRKDSRG

SEQ ID NO: 13338 - protein, 756 aa, synthetic construct
MALPVTALLLPLALLLHAARPDIQMTQSPSSLSASVGDRVTITCKASDHINNWLAWYQQKPGQAPKLLIYGATTLETGVPSRFSGSGSGTDYTLTISSLQPEDFATYYCQQSWNTPWTFGQGTKLEIKRLEDLKNVFPPEVAVFEPSEAEISHTQKATLVCLATGFYPDHVELSWWVNGKEVHSGVCTDPQPLKEQPALNDSRYCLSSRLRVSATFWQNPRNHFRCQVQFYGLSENDEWTQDRAKPVTQIVSAEAWGRADCDVKLVEKSFETDTNLNFQNLSVIGFRILLLKVAGFNLLMTLRLWSSRAKRSGSGATNFSLLKQAGDVEENPGPTSATMDWIWRILFLVGAATGAHSGPEVQLLESGGGLVQPGGSLRLSCAASGFSFSSYALSWVRQAPGKGLEWVSSIGENDGTTDYADAVKGRFTISRDNSKNTLYLQMNSLRVEDTAVYYCVKDGIHWGQGTLVTVSSGSGGGGSGGGGSGGGGSFEQVQLQQPGAELVKPGASVKMSCKASGYAFSSYWINWMKQKPGQGLEWIGQIYPGDGDTNYNGKFKGRATLTADTSSSTAYMQLSSLTSEDSAVYFCARSITTVVGCAMDYWGQGTSVTVSSTRIQNPDPAVYQLRDSKSSDKSVCLFTDFDSQTNVSQSKDSDVYITDKCVLDMRSMDFKSNSAVAWSNKSDFACANAFNNSIIPEDTFFPSPESSCGFTSESYQQGVLSATILYEILLGKATLYAVLVSALVLMAMVKRKDSRG

SEQ ID NO: 13339 - protein, 1125 aa, synthetic construct
MGPRLLFWALLCLLGTGPVEAGVTQSPTHLIKTRGQQATLRCSPISGHTSVYWYQQALGLGLQFLLWYDEGEERNRGNFPPRFSGRQFPNYSSELNVNALELEDSALYLCASSLGGPRGLAGLRGDEQFFGPGTRLTVLEGTGGGGSGGGEFDIQMTQSPSSLSASVGDRVTITCKASDHINNWLAWYQQKPGQAPKLLIYGATTLETGVPSRFSGSGSGTDYTLTISSLQPEDFATYYCQQSWNTPWTFGQGTKLEIKRLEDLKNVFPPEVAVFEPSEAEISHTQKATLVCLATGFYPDHVELSWWVNGKEVHSGVCTDPQPLKEQPALNDSRYCLSSRLRVSATFWQNPRNHFRCQVQFYGLSENDEWTQDRAKPVTQIVSAEAWGRADCDVKLVEKSFETDTNLNFQNLSVIGFRILLLKVAGFNLLMTLRLWSSRAKRSGSGATNFSLLKQAGDVEENPGPTSATMDWIWRILFLVGAATGAHSGPEVQLVESGGGLVQAGGSLRLSCAASGRTFSMGWFRQAPGKEREFVAAITYSGGSPYYADSVKGRFTISRDNAKNTVYLQMNSLKPEDTAVYYCAANPTYGSDWNAENWGQGTQVTVSSGSGGGGSGGGGSGGGGSFEQVQLQQPGAELVKPGASVKMSCKASGYAFSSYWINWMKQKPGQGLEWIGQIYPGDGDTNYNGKFKGRATLTADTSSSTAYMQLSSLTSEDSAVYFCARSITTVVGCAMDYWGQGTSVTVSSTRIQNPDPAVYQLRDSKSSDKSVCLFTDFDSQTNVSQSKDSDVYITDKCVLDMRSMDFKSNSAVAWSNKSDFACANAFNNSIIPEDTFFPSPESSCGFTSESYQQGVLSATILYEILLGKATLYAVLVSALVLMAMVKRKDSRGRAKRSGSGVKQTLNFDLLKLAGDVESNPGPSRGHMTEYKPTVRLATRDDVPRAVRTLAAAFADYPATRHTVDPDRHIERVTELQELFLTRVGLDIGKVWVADDGAAVAVWTTPESVEAGAVFAEIGPRMAELSGSRLAAQQQMEGLLAPHRPKEPAWFLATVGVSPDHQGKGLGSAVVLPGVEAAERAGVPAFLETSAPRNLPFYERLGFTVTADVEVPEGPRTWCMTRKPGA

SEQ ID NO: 13340 - protein, 1124 aa, synthetic construct
MGPRLLFWALLCLLGTGPVEAGVTQSPTHLIKTRGQQATLRCSPISGHTSVYWYQQALGLGLQFLLWYDEGEERNRGNFPPRFSGRQFPNYSSELNVNALELEDSALYLCASSLGGDELGADGNEQFFGPGTRLTVLEGTGGGGSGGGSEFDIQMTQSPSSLSASVGDRVTITCKASDHINNWLAWYQQKPGQAPKLLIYGATTLETGVPSRFSGSGSGTDYTLTISSLQPEDFATYYCQQSWNTPWTFGQGTKLEIKRLEDLKNVFPPEVAVFEPSEAEISHTQKATLVCLATGFYPDHVELSWWVNGKEVHSGVCTDPQPLKEQPALNDSRYCLSSRLRVSATFWQNPRNHFRCQVQFYGLSENDEWTQDRAKPVTQIVSAEAWGRADCDVKLVEKSFETDTNLNFQNLSVIGFRILLLKVAGFNLLMTLRLWSSRAKRSGSGATNFSLLKQAGDVEENPGPTSATMDWIWRILFLVGAATGAHSGPEVQLVESGGGLVQAGGSLRLSCAASGRTFSMGWFRQAPGKEREFVAAITYSGGSPYYADSVKGRFTISRDNAKNTVYLQMNSLKPEDTAVYYCAANPTYGSDWNAENWGQGTQVTVSSGSGGGGSGGGGSGGGGSFEQVQLQQPGAELVKPGASVKMSCKASGYAFSSYWINWMKQKPGQGLEWIGQIYPGDGDTNYNGKFKGRATLTADTSSSTAYMQLSSLTSEDSAVYFCARSITTVVGCAMDYWGQGTSVTVSSTRIQNPDPAVYQLRDSKSSDKSVCLFTDFDSQTNVSQSKDSDVYITDKCVLDMRSMDFKSNSAVAWSNKSDFACANAFNNSIIPEDTFFPSPESSCGFTSESYQQGVLSATILYEILLGKATLYAVLVSALVLMAMVKRKDSRGRAKRSGSGVKQTLNFDLLKLAGDVESNPGPSRGHMTEYKPTVRLATRDDVPRAVRTLAAAFADYPATRHTVDPDRHIERVTELQELFLTRVGLDIGKVWVADDGAAVAVWTTPESVEAGAVFAEIGPRMAELSGSRLAAQQQMEGLLAPHRPKEPAWFLATVGVSPDHQGKGLGSAVVLPGVEAAERAGVPAFLETSAPRNLPFYERLGFTVTADVEVPEGPRTWCMTRKPGA

SEQ ID NO: 13341 - protein, 899 aa, synthetic construct
MALPVTALLLPLALLLHAARPACLFNQEVQIPLTESYCGPCPKNWICYKNNCYQFFDESKNWYESQASCMSQNASLLKVYSKEDQDLLKLVKSAHWMGLVHIPTNGSWQWEDGSILSPNLLTIIEMQKGDCALYASSFKGYIENCSTPNTYICMQRTVLEDLKNVFPPEVAVFEPSEAEISHTQKATLVCLATGFYPDHVELSWWVNGKEVHSGVCTDPQPLKEQPALNDSRYCLSSRLRVSATFWQNPRNHFRCQVQFYGLSENDEWTQDRAKPVTQIVSAEAWGRADCDVKLVEKSFETDTNLNFQNLSVIGFRILLLKVAGFNLLMTLRLWSSRAKRSGSGATNFSLLKQAGDVEENPGPTSMDWIWRILFLVGAATGAHSFEDLFNQEVQIPLTESYCGPCPKNWICYKNNCYQFFDESKNWYESQASCMSQNASLLKVYSKEDQDLLKLVKSAHWMGLVHIPTNGSWQWEDGSILSPNLLTIIEMQKGDCALYASSFKGFIENCSTPNTYICMQRTVTRIQNPDPAVYQLRDSKSSDKSVCLFTDFDSQTNVSQSKDSDVYITDKCVLDMRSMDFKSNSAVAWSNKSDFACANAFNNSIIPEDTFFPSPESSCGFTSESYQQGVLSATILYEILLGKATLYAVLVSALVLMAMVKRKDSRGRAKRSGSGVKQTLNFDLLKLAGDVESNPGPSRGHMTEYKPTVRLATRDDVPRAVRTLAAAFADYPATRHTVDPDRHIERVTELQELFLTRVGLDIGKVWVADDGAAVAVWTTPESVEAGAVFAEIGPRMAELSGSRLAAQQQMEGLLAPHRPKEPAWFLATVGVSPDHQGKGLGSAVVLPGVEAAERAGVPAFLETSAPRNLPFYERLGFTVTADVEVPEGPRTWCMTRKPGA

SEQ ID NO: 13342 - protein, 949 aa, synthetic construct
MALPVTALLLPLALLLHAARPDIQMTQSPSSLSASVGDRVTITCKASDHINNWLAWYQQKPGQAPKLLIYGATTLETGVPSRFSGSGSGTDYTLTISSLQPEDFATYYCQQSWNTPWTFGQGTKLEIKRLEDLKNVFPPEVAVFEPSEAEISHTQKATLVCLATGFYPDHVELSWWVNGKEVHSGVCTDPQPLKEQPALNDSRYCLSSRLRVSATFWQNPRNHFRCQVQFYGLSENDEWTQDRAKPVTQIVSAEAWGRADCDVKLVEKSFETDTNLNFQNLSVIGFRILLLKVAGFNLLMTLRLWSSRAKRSGSGATNFSLLKQAGDVEENPGPTSATMDWIWRILFLVGAATGAHSGPMGSWLEFYHRLNAIDSRLWALGGSEAELAAFEKEIAAFESELQAYKGKGNPEVESLRDHAAHIREWLQAYRHNGSGGGGSGGGGSGGGGSFEQVQLQQPGAELVKPGASVKMSCKASGYAFSSYWINWMKQKPGQGLEWIGQIYPGDGDTNYNGKFKGRATLTADTSSSTAYMQLSSLTSEDSAVYFCARSITTVVGCAMDYWGQGTSVTVSSTRIQNPDPAVYQLRDSKSSDKSVCLFTDFDSQTNVSQSKDSDVYITDKCVLDMRSMDFKSNSAVAWSNKSDFACANAFNNSIIPEDTFFPSPESSCGFTSESYQQGVLSATILYEILLGKATLYAVLVSALVLMAMVKRKDSRGRAKRSGSGVKQTLNFDLLKLAGDVESNPGPSRGHMTEYKPTVRLATRDDVPRAVRTLAAAFADYPATRHTVDPDRHIERVTELQELFLTRVGLDIGKVWVADDGAAVAVWTTPESVEAGAVFAEIGPRMAELSGSRLAAQQQMEGLLAPHRPKEPAWFLATVGVSPDHQGKGLGSAVVLPGVEAAERAGVPAFLETSAPRNLPFYERLGFTVTADVEVPEGPRTWCMTRKPGA

SEQ ID NO: 13343 - protein, 949 aa, synthetic construct
MALPVTALLLPLALLLHAARPACMGSWFEFYDRLNAIDARLWALGGSEAELAAFEKEIAAFESELQAYKGKGNPEVENLRVHAAAIREWLQAYRHNGTGGGGSGGGGSGGGGSEFDIQMTQSPSSLSASVGDRVTITCKASDHINNWLAWYQQKPGQAPKLLIYGATTLETGVPSRFSGSGSGTDYTLTISSLQPEDFATYYCQQSWNTPWTFGQGTKLEIKRLEDLKNVFPPEVAVFEPSEAEISHTQKATLVCLATGFYPDHVELSWWVNGKEVHSGVCTDPQPLKEQPALNDSRYCLSSRLRVSATFWQNPRNHFRCQVQFYGLSENDEWTQDRAKPVTQIVSAEAWGRADCDVKLVEKSFETDTNLNFQNLSVIGFRILLLKVAGFNLLMTLRLWSSRAKRSGSGATNFSLLKQAGDVEENPGPTSMDWIWRILFLVGAATGAHSFEQVQLQQPGAELVKPGASVKMSCKASGYAFSSYWINWMKQKPGQGLEWIGQIYPGDGDTNYNGKFKGRATLTADTSSSTAYMQLSSLTSEDSAVYFCARSITTVVGCAMDYWGQGTSVTVSSTRIQNPDPAVYQLRDSKSSDKSVCLFTDFDSQTNVSQSKDSDVYITDKCVLDMRSMDFKSNSAVAWSNKSDFACANAFNNSIIPEDTFFPSPESSCGFTSESYQQGVLSATILYEILLGKATLYAVLVSALVLMAMVKRKDSRGRAKRSGSGVKQTLNFDLLKLAGDVESNPGPSRGHMTEYKPTVRLATRDDVPRAVRTLAAAFADYPATRHTVDPDRHIERVTELQELFLTRVGLDIGKVWVADDGAAVAVWTTPESVEAGAVFAEIGPRMAELSGSRLAAQQQMEGLLAPHRPKEPAWFLATVGVSPDHQGKGLGSAVVLPGVEAAERAGVPAFLETSAPRNLPFYERLGFTVTADVEVPEGPRTWCMTRKPGA

SEQ ID NO: 13344 - protein, 1066 aa, synthetic construct
MALPVTALLLPLALLLHAARPACMDPDLEIRAAFLRQRNTALRTEVAELEQEVQRLENEVSQYETRYGPLGGGKGTGGGGSGGGGSGGGGSEFDIQMTQSPSSLSASVGDRVTITCKASDHINNWLAWYQQKPGQAPKLLIYGATTLETGVPSRFSGSGSGTDYTLTISSLQPEDFATYYCQQSWNTPWTFGQGTKLEIKRLEDLKNVFPPEVAVFEPSEAEISHTQKATLVCLATGFYPDHVELSWWVNGKEVHSGVCTDPQPLKEQPALNDSRYCLSSRLRVSATFWQNPRNHFRCQVQFYGLSENDEWTQDRAKPVTQIVSAEAWGRADCDVKLVEKSFETDTNLNFQNLSVIGFRILLLKVAGFNLLMTLRLWSSRAKRSGSGATNFSLLKQAGDVEENPGPTSATMDWIWRILFLVGAATGAHSGPEVQLVESGGGLVQAGGSLRLSCAASGRTFSMGWFRQAPGKEREFVAAITYSGGSPYYADSVKGRFTISRDNAKNTVYLQMNSLKPEDTAVYYCAANPTYGSDWNAENWGQGTQVTVSSGSGGGGSGGGGSGGGGSFEQVQLQQPGAELVKPGASVKMSCKASGYAFSSYWINWMKQKPGQGLEWIGQIYPGDGDTNYNGKFKGRATLTADTSSSTAYMQLSSLTSEDSAVYFCARSITTVVGCAMDYWGQGTSVTVSSTRIQNPDPAVYQLRDSKSSDKSVCLFTDFDSQTNVSQSKDSDVYITDKCVLDMRSMDFKSNSAVAWSNKSDFACANAFNNSIIPEDTFFPSPESSCGFTSESYQQGVLSATILYEILLGKATLYAVLVSALVLMAMVKRKDSRGRAKRSGSGVKQTLNFDLLKLAGDVESNPGPSRGHMTEYKPTVRLATRDDVPRAVRTLAAAFADYPATRHTVDPDRHIERVTELQELFLTRVGLDIGKVWVADDGAAVAVWTTPESVEAGAVFAEIGPRMAELSGSRLAAQQQMEGLLAPHRPKEPAWFLATVGVSPDHQGKGLGSAVVLPGVEAAERAGVPAFLETSAPRNLPFYERLGFTVTADVEVPEGPRTWCMTRKPGA

SEQ ID NO: 13345 - protein, 949 aa, synthetic construct
MALPVTALLLPLALLLHAARPDIQMTQSPSSLSASVGDRVTITCKASDHINNWLAWYQQKPGQAPKLLIYGATTLETGVPSRFSGSGSGTDYTLTISSLQPEDFATYYCQQSWNTPWTFGQGTKLEIKRLEDLKNVFPPEVAVFEPSEAEISHTQKATLVCLATGFYPDHVELSWWVNGKEVHSGVCTDPQPLKEQPALNDSRYCLSSRLRVSATFWQNPRNHFRCQVQFYGLSENDEWTQDRAKPVTQIVSAEAWGRADCDVKLVEKSFETDTNLNFQNLSVIGFRILLLKVAGFNLLMTLRLWSSRAKRSGSGATNFSLLKQAGDVEENPGPTSATMDWIWRILFLVGAATGAHSGPMGSWSEFYDRLHAIHHRLYALGGSEAELAAFEKEIAAFESELQAYKGKGNPEVEALRDTAAFIRTRLQAYRHNGSGGGGSGGGGSGGGGSFEQVQLQQPGAELVKPGASVKMSCKASGYAFSSYWINWMKQKPGQGLEWIGQIYPGDGDTNYNGKFKGRATLTADTSSSTAYMQLSSLTSEDSAVYFCARSITTVVGCAMDYWGQGTSVTVSSTRIQNPDPAVYQLRDSKSSDKSVCLFTDFDSQTNVSQSKDSDVYITDKCVLDMRSMDFKSNSAVAWSNKSDFACANAFNNSIIPEDTFFPSPESSCGFTSESYQQGVLSATILYEILLGKATLYAVLVSALVLMAMVKRKDSRGRAKRSGSGVKQTLNFDLLKLAGDVESNPGPSRGHMTEYKPTVRLATRDDVPRAVRTLAAAFADYPATRHTVDPDRHIERVTELQELFLTRVGLDIGKVWVADDGAAVAVWTTPESVEAGAVFAEIGPRMAELSGSRLAAQQQMEGLLAPHRPKEPAWFLATVGVSPDHQGKGLGSAVVLPGVEAAERAGVPAFLETSAPRNLPFYERLGFTVTADVEVPEGPRTWCMTRKPGA

SEQ ID NO: 13346 - protein, 1159 aa, synthetic construct
MALPVTALLLPLALLLHAARPDIQMTQSPSSLSASVGDRVTITCKASDHINNWLAWYQQKPGQAPKLLIYGATTLETGVPSRFSGSGSGTDYTLTISSLQPEDFATYYCQQSWNTPWTFGQGTKLEIKRLEDLKNVFPPEVAVFEPSEAEISHTQKATLVCLATGFYPDHVELSWWVNGKEVHSGVCTDPQPLKEQPALNDSRYCLSSRLRVSATFWQNPRNHFRCQVQFYGLSENDEWTQDRAKPVTQIVSAEAWGRADCDVKLVEKSFETDTNLNFQNLSVIGFRILLLKVAGFNLLMTLRLWSSRAKRSGSGATNFSLLKQAGDVEENPGPTSTMDWIWRILFLVGAATGAHSLFNQEVQIPLTESYCGPCPKNWICYKNNCYQFFDESKNWYESQASCMSQNASLLKVYSKEDQDLLKLVKSAHWMGLVHIPTNGSWQWEDGSILSPNLLTIIEMQKGDCALYASSFKGYIENCSTPNTYICMQRTVSGGGGSGGGGSGGGGDLFNQEVQIPLTESYCGPCPKNWICYKNNCYQFFDESKNWYESQASCMSQNASLLKVYSKEDQDLLKLVKSAHWMGLVHIPTNGSWQWEDGSILSPNLLTIIEMQKGDCALYASSFKGYIENCSTPNTYICMQRTVGSGGGGSGGGGSGGGGSFEQVQLQQPGAELVKPGASVKMSCKASGYAFSSYWINWMKQKPGQGLEWIGQIYPGDGDTNYNGKFKGRATLTADTSSSTAYMQLSSLTSEDSAVYFCARSITTVVGCAMDYWGQGTSVTVSSTRIQNPDPAVYQLRDSKSSDKSVCLFTDFDSQTNVSQSKDSDVYITDKCVLDMRSMDFKSNSAVAWSNKSDFACANAFNNSIIPEDTFFPSPESSCGFTSESYQQGVLSATILYEILLGKATLYAVLVSALVLMAMVKRKDSRGRAKRSGSGVKQTLNFDLLKLAGDVESNPGPSRGHMTEYKPTVRLATRDDVPRAVRTLAAAFADYPATRHTVDPDRHIERVTELQELFLTRVGLDIGKVWVADDGAAVAVWTTPESVEAGAVFAEIGPRMAELSGSRLAAQQQMEGLLAPHRPKEPAWFLATVGVSPDHQGKGLGSAVVLPGVEAAERAGVPAFLETSAPRNLPFYERLGFTVTADVEVPEGPRTWCMTRKPGA

SEQ ID NO: 13347 - protein, 619 aa, synthetic construct
MALPVTALLLPLALLLHAARPDIQMTQTTSSLSASLGDRVTISCRASQDISKYLNWYQQKPDGTVKLLIYHTSRLHSGVPSRFSGSGSGTDYSLTISNLEQEDIATYFCQQGNTLPYTFGGGTKLEITLEDLKNVFPPEVAVFEPSEAEISHTQKATLVCLATGFYPDHVELSWWVNGKEVHSGVCTDPQPLKEQPALNDSRYCLSSRLRVSATFWQNPRNHFRCQVQFYGLSENDEWTQDRAKPVTQIVSAEAWGRADCGFTSESYQQGVLSATNLSVIGFRILLLKVAGFNLLMTLRLWSSRAKRSGSGATNFSLLKQAGDVEENPGPTSMDWIWRILFLVGAATGAHSFEVKLQESGPGLVAPSQSLSVTCTVSGVSLPDYGVSWIRQPPRKGLEWLGVIWGSETTYYNSALKSRLTIIKDNSKSQVFLKMNSLQTDDTAIYYCAKHYYYGGSYAMDYWGQGTSVTVSSTRIQNPDPAVYQLRDSKSSDKSVCLFTDFDSQTNVSQSKDSDVYITDKCVLDMRSMDFKSNSAVAWSNKSDFACANAFNNSIIPEDTFFPSPESSCDVKLVEKSFETDTNLNFQILYEILLGKATLYAVLVSALVLMAMVKRKDSRG

SEQ ID NO: 13348 - protein, 620 aa, synthetic construct
MALPVTALLLPLALLLHAARPEIVMTQSPATLSLSPGERATLSCRASQDISKYLNWYQQKPGQAPRLLIYHTSRLHSGIPARFSGSGSGTDYTLTISSLQPEDFAVYFCQQGNTLPYTFGQGTKLEIKLEDLKNVFPPEVAVFEPSEAEISHTQKATLVCLATGFYPDHVELSWWVNGKEVHSGVCTDPQPLKEQPALNDSRYCLSSRLRVSATFWQNPRNHFRCQVQFYGLSENDEWTQDRAKPVTQIVSAEAWGRADCGFTSESYQQGVLSATNLSVIGFRILLLKVAGFNLLMTLRLWSSRAKRSGSGATNFSLLKQAGDVEENPGPTSMDWIWRILFLVGAATGAHSFEQVQLQESGPGLVKPSETLSLTCTVSGVSLPDYGVSWIRQPPGKGLEWIGVIWGSETTYYNSSLKSRVTISKDNSKNQVSLKLSSVTAADTAVYYCAKHYYYGGSYAMDYWGQGTLVTVSSTRIQNPDPAVYQLRDSKSSDKSVCLFTDFDSQTNVSQSKDSDVYITDKCVLDMRSMDFKSNSAVAWSNKSDFACANAFNNSIIPEDTFFPSPESSCDVKLVEKSFETDTNLNFQILYEILLGKATLYAVLVSALVLMAMVKRKDSRG

SEQ ID NO: 13349 - protein, 621 aa, synthetic construct
MALPVTALLLPLALLLHAARPDEIVLTQSPATLSLSPGERATLSCSASSSVSYMHWYQQKPGQAPRLLIYDTSKLASGIPARFSGSGSGTDFTLTISSLEPEDVAVYYCFQGSVYPFTFGQGTKLEIKRLEDLKNVFPPEVAVFEPSEAEISHTQKATLVCLATGFYPDHVELSWWVNGKEVHSGVCTDPQPLKEQPALNDSRYCLSSRLRVSATFWQNPRNHFRCQVQFYGLSENDEWTQDRAKPVTQIVSAEAWGRADCGFTSESYQQGVLSATNLSVIGFRILLLKVAGFNLLMTLRLWSSRAKRSGSGATNFSLLKQAGDVEENPGPTSMDWIWRILFLVGAATGAHSFEQVQLQESGPGLVKPSQTLSLTCTVSGGSISTSGMGVGWIRQHPGKGLEWIGHIWWDDDKRYNPALKSRVTISVDTSKNQFSLKLSSVTAADTAVYYCARMELWSYYFDYWGQGTLVTVSSTRIQNPDPAVYQLRDSKSSDKSVCLFTDFDSQTNVSQSKDSDVYITDKCVLDMRSMDFKSNSAVAWSNKSDFACANAFNNSIIPEDTFFPSPESSCDVKLVEKSFETDTNLNFQILYEILLGKATLYAVLVSALVLMAMVKRKDSRG

SEQ ID NO: 13350 - protein, 619 aa, synthetic construct
MALPVTALLLPLALLLHAARPDYIHVTQSPSSLSVSIGDRVTINCQTSQGVGSDLHWYQHKPGRAPKLLIHHASSVEDGVPSRFSGTGFHTSFNLTINDLQADDIGTYYCQVLQSFGRGSRLDTKLEDLKNVFPPEVAVFEPSEAEISHTQKATLVCLATGFYPDHVELSWWVNGKEVHSGVCTDPQPLKEQPALNDSRYCLSSRLRVSATFWQNPRNHFRCQVQFYGLSENDEWTQDRAKPVTQIVSAEAWGRADCGFTSESYQQGVLSATNLSVIGFRILLLKVAGFNLLMTLRLWSSRAKRSGSGATNFSLLKQAGDVEENPGPTSMDWIWRILFLVGAATGAHSFERAHLVQSGTAMKKPGASVRVSCQTSGYTFTAHILFWFRQAPGRGLEWVGWIKPQYGAVNFGGGFRDRVTLTRDVYREIAYMDIRGLKPDDTAVYYCARDRSYGDSSWALDAWGQGTTVVVSATRIQNPDPAVYQLRDSKSSDKSVCLFTDFDSQTNVSQSKDSDVYITDKCVLDMRSMDFKSNSAVAWSNKSDFACANAFNNSIIPEDTFFPSPESSCDVKLVEKSFETDTNLNFQILYEILLGKATLYAVLVSALVLMAMVKRKDSRG

SEQ ID NO: 13351 - protein, 629 aa, synthetic construct
MALPVTALLLPLALLLHAARPDVQMIQTPDSLAVSLGQRATISCRASESVDNYGISFMHWYQQKPGQSPKLLIYRASNLESGIPARFSGSGSRTDFTLTINPVETDDVATYYCQQNNKDPPTFGGGTKLEIKLEDLKNVFPPEVAVFEPSEAEISHTQKATLVCLATGFYPDHVELSWWVNGKEVHSGVCTDPQPLKEQPALNDSRYCLSSRLRVSATFWQNPRNHFRCQVQFYGLSENDEWTQDRAKPVTQIVSAEAWGRADCGFTSESYQQGVLSATNLSVIGFRILLLKVAGFNLLMTLRLWSSRAKRSGSGATNFSLLKQAGDVEENPGPTSMDWIWRILFLVGAATGAHSFEGGGGSQVQLQQSGAELVKPGASVKISCKASGYAFSSYWMNWVKQRPGKGLEWIGQIYPGDGDTTYNGKFKGKATLTADKSSSTVYMQLNSLTSEDSAVYFCVRYYYGSSGYFDYWGQGTTLTVSSTRIQNPDPAVYQLRDSKSSDKSVCLFTDFDSQTNVSQSKDSDVYITDKCVLDMRSMDFKSNSAVAWSNKSDFACANAFNNSIIPEDTFFPSPESSCDVKLVEKSFETDTNLNFQILYEILLGKATLYAVLVSALVLMAMVKRKDSRG

SEQ ID NO: 13352 - protein, 620 aa, synthetic construct
MALPVTALLLPLALLLHAARPDVQMIQTPSSLSASLGDRVTISCRASQDIGNYLNWYQQKPDGTVKLLIYYTSRLHSGVPSRFSGSGSGTEYSLTISNLEQEDIATYFCQQGSALPPTFGGGTKLEINLEDLKNVFPPEVAVFEPSEAEISHTQKATLVCLATGFYPDHVELSWWVNGKEVHSGVCTDPQPLKEQPALNDSRYCLSSRLRVSATFWQNPRNHFRCQVQFYGLSENDEWTQDRAKPVTQIVSAEAWGRADCGFTSESYQQGVLSATNLSVIGFRILLLKVAGFNLLMTLRLWSSRAKRSGSGATNFSLLKQAGDVEENPGPTSMDWIWRILFLVGAATGAHSFEALQLQQSGAELVRPGASVTLSCKASGYTFTDYEMHWVKQTPVHGLEWIGAIDPETGGTAYNQKFEGKAILTADKSSSTAYMELRSLTSEDSPVYYCARRRYYGSSSFDYWGQGTTLTVSSTRIQNPDPAVYQLRDSKSSDKSVCLFTDFDSQTNVSQSKDSDVYITDKCVLDMRSMDFKSNSAVAWSNKSDFACANAFNNSIIPEDTFFPSPESSCDVKLVEKSFETDTNLNFQILYEILLGKATLYAVLVSALVLMAMVKRKDSRG

SEQ ID NO: 13353 - protein, 624 aa, synthetic construct
MALPVTALLLPLALLLHAARPDIVLTQSPASLAVSLGQRATISCRASKSVSTSGYSYLHWYQQKPGQPPKLLIYLASNLESGVPARFSGSGSGTDFTLNIHPVEEEDAATYYCQHSRELPFTFGSGTKLEIKLEDLKNVFPPEVAVFEPSEAEISHTQKATLVCLATGFYPDHVELSWWVNGKEVHSGVCTDPQPLKEQPALNDSRYCLSSRLRVSATFWQNPRNHFRCQVQFYGLSENDEWTQDRAKPVTQIVSAEAWGRADCGFTSESYQQGVLSATNLSVIGFRILLLKVAGFNLLMTLRLWSSRAKRSGSGATNFSLLKQAGDVEENPGPTSMDWIWRILFLVGAATGAHSFEQVQLVESGGGLVQPGGSLKLSCAASGFDFSRYWMSWVRQAPGKGLEWIGEINPTSSTINFTPSLKDKVFISRDNAKNTLYLQMSKVRSEDTALYYCARGNYYRYGDAMDYWGQGTSVTVSTRIQNPDPAVYQLRDSKSSDKSVCLFTDFDSQTNVSQSKDSDVYITDKCVLDMRSMDFKSNSAVAWSNKSDFACANAFNNSIIPEDTFFPSPESSCDVKLVEKSFETDTNLNFQILYEILLGKATLYAVLVSALVLMAMVKRKDSRG

SEQ ID NO: 13354 - protein, 622 aa, synthetic construct
MALPVTALLLPLALLLHAARPDIQMTQSPSSLSASVGDRVTITCSASQDISNYLNWYQQKPGKAPKLLIYYTSNLHSGVPSRFSGSGSGTDFTLTISSLQPEDFATYYCQQYRKLPWTFGQGTKLEIKRLEDLKNVFPPEVAVFEPSEAEISHTQKATLVCLATGFYPDHVELSWWVNGKEVHSGVCTDPQPLKEQPALNDSRYCLSSRLRVSATFWQNPRNHFRCQVQFYGLSENDEWTQDRAKPVTQIVSAEAWGRADCGFTSESYQQGVLSATNLSVIGFRILLLKVAGFNLLMTLRLWSSRAKRSGSGATNFSLLKQAGDVEENPGPTSMDWIWRILFLVGAATGAHSFEQVQLVQSGAEVKKPGSSVKVSCKASGGTFSNYWMHWVRQAPGQGLEWMGATYRGHSDTYYNQKFKGRVTITADKSTSTAYMELSSLRSEDTAVYYCARGAIYDGYDVLDNWGQGTLVTVSSTRIQNPDPAVYQLRDSKSSDKSVCLFTDFDSQTNVSQSKDSDVYITDKCVLDMRSMDFKSNSAVAWSNKSDFACANAFNNSIIPEDTFFPSPESSCDVKLVEKSFETDTNLNFQILYEILLGKATLYAVLVSALVLMAMVKRKDSRG

SEQ ID NO: 13355 - protein, 622 aa, synthetic construct
MALPVTALLLPLALLLHAARPDIVLTQSPATLSLSPGDRATISCRASESVTILGSHLIYWYQQKPGQPPRLLIQLASNVQTGVPARFSGSGSRTDFTLTISSVEPEDFAVYYCLQSRTIPRTFGQGTKLEIKRLEDLKNVFPPEVAVFEPSEAEISHTQKATLVCLATGFYPDHVELSWWVNGKEVHSGVCTDPQPLKEQPALNDSRYCLSSRLRVSATFWQNPRNHFRCQVQFYGLSENDEWTQDRAKPVTQIVSAEAWGRADCGFTSESYQQGVLSATNLSVIGFRILLLKVAGFNLLMTLRLWSSRAKRSGSGATNFSLLKQAGDVEENPGPTSMDWIWRILFLVGAATGAHSFEQVQLVQSGPEVKKPGESVKISCKASGYTFRHYSMNWVKQAPGQGLKWMGRINTESGVPIYADDFKGRFSFTVDTSASTAYLEISSLTSEDTAVYFCSNDYLYSLDFWGQGTTLTVSSTRIQNPDPAVYQLRDSKSSDKSVCLFTDFDSQTNVSQSKDSDVYITDKCVLDMRSMDFKSNSAVAWSNKSDFACANAFNNSIIPEDTFFPSPESSCDVKLVEKSFETDTNLNFQILYEILLGKATLYAVLVSALVLMAMVKRKDSRG

SEQ ID NO: 13356 - protein, 623 aa, synthetic construct
MALPVTALLLPLALLLHAARPQSVLTQPPSVSGAPGQRVTISCTGSSSNIGAGFDVHWYQQLPGTAPKLLIYGNSNRPSGVPDRFSGSKSGTSASLAITGLQAEDEADYYCQSYDSSLSGYVFGTGTKVTVLGLEDLKNVFPPEVAVFEPSEAEISHTQKATLVCLATGFYPDHVELSWWVNGKEVHSGVCTDPQPLKEQPALNDSRYCLSSRLRVSATFWQNPRNHFRCQVQFYGLSENDEWTQDRAKPVTQIVSAEAWGRADCGFTSESYQQGVLSATNLSVIGFRILLLKVAGFNLLMTLRLWSSRAKRSGSGATNFSLLKQAGDVEENPGPTSMDWIWRILFLVGAATGAHSFEQVQLVQSGAEVKKPGASVKVSCKASGYTFTDYYMHWVRQAPGQRLEWMGWINPNSGGTNYAQKFQDRITVTRDTSSNTGYMELTRLRSDDTAVYYCARSPYSGVLDKWGQGTLVTVSSTRIQNPDPAVYQLRDSKSSDKSVCLFTDFDSQTNVSQSKDSDVYITDKCVLDMRSMDFKSNSAVAWSNKSDFACANAFNNSIIPEDTFFPSPESSCDVKLVEKSFETDTNLNFQILYEILLGKATLYAVLVSALVLMAMVKRKDSRG

SEQ ID NO: 13357 - protein, 620 aa, synthetic construct
MALPVTALLLPLALLLHAARPQAVLTQPPSASGTPGQRVTISCSGSSSNIGSYTVSWYQQLPGTAPKFLIYSNNQRPSGVPDRFSGSKSGTSASLAISGLQSEDEADYYCAAWDDSLNGYVFGTGTKVTVLGLEDLKNVFPPEVAVFEPSEAEISHTQKATLVCLATGFYPDHVELSWWVNGKEVHSGVCTDPQPLKEQPALNDSRYCLSSRLRVSATFWQNPRNHFRCQVQFYGLSENDEWTQDRAKPVTQIVSAEAWGRADCGFTSESYQQGVLSATNLSVIGFRILLLKVAGFNLLMTLRLWSSRAKRSGSGATNFSLLKQAGDVEENPGPTSMDWIWRILFLVGAATGAHSFEVQLVQSGAEVKKPGESLKISCKGSGYDFTTYWIGWVRQMPGKGLEWMGIIYPGDSDTRYSPSVRGRVTISADKSINTAYLQWSSLEASDTAMYYCARMWTFSQDGWGQGTLVTVSSTRIQNPDPAVYQLRDSKSSDKSVCLFTDFDSQTNVSQSKDSDVYITDKCVLDMRSMDFKSNSAVAWSNKSDFACANAFNNSIIPEDTFFPSPESSCDVKLVEKSFETDTNLNFQILYEILLGKATLYAVLVSALVLMAMVKRKDSRG

SEQ ID NO: 13358 - protein, 623 aa, synthetic construct
MALPVTALLLPLALLLHAARPDIVMTQSPDSLAVSLGERATINCKSSQSILYSSNQKNYLAWYQQKPGQSPKLLIYWASTRESGVPDRFSGSGSGTDFTLTISSLQAEDVAVYYCHQYISSYTFGQGTKLEIKLEDLKNVFPPEVAVFEPSEAEISHTQKATLVCLATGFYPDHVELSWWVNGKEVHSGVCTDPQPLKEQPALNDSRYCLSSRLRVSATFWQNPRNHFRCQVQFYGLSENDEWTQDRAKPVTQIVSAEAWGRADCGFTSESYQQGVLSATNLSVIGFRILLLKVAGFNLLMTLRLWSSRAKRSGSGATNFSLLKQAGDVEENPGPTSMDWIWRILFLVGAATGAHSFEQVQLVQSGAEVKKPGASVKVSCKASGYTFASQWMHWMRQAPGQGLEWIGWINPGNVNTKYNEKFKGRATLTVDTSTNTAYMELSSLRSEDTAVYYCARSTWYRPLDYWGQGTLVTVSSTRIQNPDPAVYQLRDSKSSDKSVCLFTDFDSQTNVSQSKDSDVYITDKCVLDMRSMDFKSNSAVAWSNKSDFACANAFNNSIIPEDTFFPSPESSCDVKLVEKSFETDTNLNFQILYEILLGKATLYAVLVSALVLMAMVKRKDSRG

SEQ ID NO: 13359 - protein, 623 aa, synthetic construct
MALPVTALLLPLALLLHAARPDHIVLTQSPSSLSASLGDRVTISCRASQDISTYLNWYQQKPDGTVKLLIFYTSRLHAGVPSRFSGSGSGTHHSLTISNLEQEDIATYFCQQGNSLPFTFGSGTKLEIKRLEDLKNVFPPEVAVFEPSEAEISHTQKATLVCLATGFYPDHVELSWWVNGKEVHSGVCTDPQPLKEQPALNDSRYCLSSRLRVSATFWQNPRNHFRCQVQFYGLSENDEWTQDRAKPVTQIVSAEAWGRADCGFTSESYQQGVLSATNLSVIGFRILLLKVAGFNLLMTLRLWSSRAKRSGSGATNFSLLKQAGDVEENPGPTSMDWIWRILFLVGAATGAHSFEQVQLKESGPELEKPGASVKISCKASGYSFTAYSMNWVKQNNGMSLEWIGSIDPYYGDTKYAQKFKGKATLTVDKASSTAYLQLKSLTSEDSAVYYCARRMITTGDWYFDVWGAGTTVTVSSTRIQNPDPAVYQLRDSKSSDKSVCLFTDFDSQTNVSQSKDSDVYITDKCVLDMRSMDFKSNSAVAWSNKSDFACANAFNNSIIPEDTFFPSPESSCDVKLVEKSFETDTNLNFQILYEILLGKATLYAVLVSALVLMAMVKRKDSRG

SEQ ID NO: 13360 - protein, 623 aa, synthetic construct; identical to SEQ ID NO: 13359

SEQ ID NO: 13361 - protein, 623 aa, synthetic construct
MALPVTALLLPLALLLHAARPDEIVLTQSPATLSLSPGERATLSCRASQSVSSYLAWYQQKPGQAPRLLIYDASNRATGIPARFSGSGSGTDFTLTISSLEPEDFAVYYCQQRSNWPITFGQGTRLEIKLEDLKNVFPPEVAVFEPSEAEISHTQKATLVCLATGFYPDHVELSWWVNGKEVHSGVCTDPQPLKEQPALNDSRYCLSSRLRVSATFWQNPRNHFRCQVQFYGLSENDEWTQDRAKPVTQIVSAEAWGRADCGFTSESYQQGVLSATNLSVIGFRILLLKVAGFNLLMTLRLWSSRAKRSGSGATNFSLLKQAGDVEENPGPTSMDWIWRILFLVGAATGAHSFEEVQLVESGGGLVQPGRSLRLSCAASGFTFNDYAMHWVRQAPGKGLEWVSTISWNSGSIGYADSVKGRFTISRDNAKKSLYLQMNSLRAEDTALYYCAKDIQYGNYYYGMDVWGQGTTVTVSSTRIQNPDPAVYQLRDSKSSDKSVCLFTDFDSQTNVSQSKDSDVYITDKCVLDMRSMDFKSNSAVAWSNKSDFACANAFNNSIIPEDTFFPSPESSCDVKLVEKSFETDTNLNFQILYEILLGKATLYAVLVSALVLMAMVKRKDSRG

SEQ ID NO: 13362 - protein, 625 aa, synthetic construct
MALPVTALLLPLALLLHAARPDIVMTQTPLSLPVTPGEPASISCRSSKSLLHSNGITYLYWYLQKPGQSPQLLIYQMSNLVSGVPDRFSGSGSGTDFTLKISRVEAEDVGVYYCAQNLELPYTFGGGTKVEIKRLEDLKNVFPPEVAVFEPSEAEISHTQKATLVCLATGFYPDHVELSWWVNGKEVHSGVCTDPQPLKEQPALNDSRYCLSSRLRVSATFWQNPRNHFRCQVQFYGLSENDEWTQDRAKPVTQIVSAEAWGRADCGFTSESYQQGVLSATNLSVIGFRILLLKVAGFNLLMTLRLWSSRAKRSGSGATNFSLLKQAGDVEENPGPTSMDWIWRILFLVGAATGAHSFEQVQLVQSGAEVKKPGSSVKVSCKASGYAFSYSWINWVRQAPGQGLEWMGRIFPGDGDTDYNGKFKGRVTITADKSTSTAYMELSSLRSEDTAVYYCARNVFDGYWLVYWGQGTLVTVSSTRIQNPDPAVYQLRDSKSSDKSVCLFTDFDSQTNVSQSKDSDVYITDKCVLDMRSMDFKSNSAVAWSNKSDFACANAFNNSIIPEDTFFPSPESSCDVKLVEKSFETDTNLNFQILYEILLGKATLYAVLVSALVLMAMVKRKDSRG

SEQ ID NO: 13363 - protein, 626 aa, synthetic construct
MALPVTALLLPLALLLHAARPDIQMTQSPSSLSASVGDRVTITCRSSQSIVHSVGNTFLEWYQQKPGKAPKLLIYKVSNRFSGVPSRFSGSGSGTDFTLTISSLQPEDFATYYCFQGSQFPYTFGQGTKVEIKRLEDLKNVFPPEVAVFEPSEAEISHTQKATLVCLATGFYPDHVELSWWVNGKEVHSGVCTDPQPLKEQPALNDSRYCLSSRLRVSATFWQNPRNHFRCQVQFYGLSENDEWTQDRAKPVTQIVSAEAWGRADCGFTSESYQQGVLSATNLSVIGFRILLLKVAGFNLLMTLRLWSSRAKRSGSGATNFSLLKQAGDVEENPGPTSMDWIWRILFLVGAATGAHSFEEVQLVESGGGLVQPGGSLRLSCAASGYEFSRSWMNWVRQAPGKGLEWVGRIYPGDGDTNYSGKFKGRFTISADTSKNTAYLQMNSLRAEDTAVYYCARDGSSWDWYFDVWGQGTLVTVSSTRIQNPDPAVYQLRDSKSSDKSVCLFTDFDSQTNVSQSKDSDVYITDKCVLDMRSMDFKSNSAVAWSNKSDFACANAFNNSIIPEDTFFPSPESSCDVKLVEKSFETDTNLNFQILYEILLGKATLYAVLVSALVLMAMVKRKDSRG

SEQ ID NO: 13364 - protein, 624 aa, synthetic construct
MALPVTALLLPLALLLHAARPDIQMTQSPSSLSASVGDRVTITCRASQTIWSYLNWYQQRPGKAPNLLIYAASSLQSGVPSRFSGRGSGTDFTLTISSLQAEDFATYYCQQSYSIPQIFGQGTKLEIKLEDLKNVFPPEVAVFEPSEAEISHTQKATLVCLATGFYPDHVELSWWVNGKEVHSGVCTDPQPLKEQPALNDSRYCLSSRLRVSATFWQNPRNHFRCQVQFYGLSENDEWTQDRAKPVTQIVSAEAWGRADCGFTSESYQQGVLSATNLSVIGFRILLLKVAGFNLLMTLRLWSSRAKRSGSGATNFSLLKQAGDVEENPGPTSMDWIWRILFLVGAATGAHSFEQVQLQQSGPGLVKPSQTLSLTCAISGDSVSSNSAAWNWIRQSPSRGLEWLGRTYYRSKWYNDYAVSVKSRITINPDTSKNQFSLQLNSVTPEDTAVYYCAREVTGDLEDAFDIWGQGTMVTVSSTRIQNPDPAVYQLRDSKSSDKSVCLFTDFDSQTNVSQSKDSDVYITDKCVLDMRSMDFKSNSAVAWSNKSDFACANAFNNSIIPEDTFFPSPESSCDVKLVEKSFETDTNLNFQILYEILLGKATLYAVLVSALVLMAMVKRKDSRG

SEQ ID NO: 13365 - protein, 617 aa, synthetic construct
MALPVTALLLPLALLLHAARPDIQMTQSPATIENTSLSASVGDRVTITCRASQGISSWLTWYQQKPEKAPKSLIYAASSLQSGVPSRFSGSGSGTDFTLTISSLQPEDFATYYCQQYDSYPITFGQGTRLEIKLEDLKNVFPPEVAVFEPSEAEISHTQKATLVCLATGFYPDHVELSWWVNGKEVHSGVCTDPQPLKEQPALNDSRYCLSSRLRVSATFWQNPRNHFRCQVQFYGLSENDEWTQDRAKPVTQIVSAEAWGRADCGFTSESYQQGVLSATNLSVIGFRILLLKVAGFNLLMTLRLWSSRAKRSGSGATNFSLLKQAGDVEENPGPTSMDWIWRILFLVGAATGAHSFEQVQLQQWGAGLLKPSETLSLTCAVYGGSFSAYYWSWIRQPPGKGLEWIGDINHGGGTNYNPSLKSRVTISVDTSKNQFSLKLNSVTAADTAVYYCASLTAYWGQGSLVTVSSTRIQNPDPAVYQLRDSKSSDKSVCLFTDFDSQTNVSQSKDSDVYITDKCVLDMRSMDFKSNSAVAWSNKSDFACANAFNNSIIPEDTFFPSPESSCDVKLVEKSFETDTNLNFQILYEILLGKATLYAVLVSALVLMAMVKRKDSRG

SEQ ID NO: 13366 - protein, 622 aa, synthetic construct
MALPVTALLLPLALLLHAARPDEIVLTQSPDSLAVSLGERATINCKASQSVDFDGDSYLNWYQQKPGQPPKVLIYAASTLQSGVPSRFSGSGSGTDFTLTINSLEAEDAATYYCQQSNEDPWTFGGGTKVEIKLEDLKNVFPPEVAVFEPSEAEISHTQKATLVCLATGFYPDHVELSWWVNGKEVHSGVCTDPQPLKEQPALNDSRYCLSSRLRVSATFWQNPRNHFRCQVQFYGLSENDEWTQDRAKPVTQIVSAEAWGRADCGFTSESYQQGVLSATNLSVIGFRILLLKVAGFNLLMTLRLWSSRAKRSGSGATNFSLLKQAGDVEENPGPTSMDWIWRILFLVGAATGAHSFEQVQLVQSGAEVKKPGASVKVSCKVSGYTFTDYYITWVRQAPGQALEWMGWIYPGSGNTKYSQKFQGRFVFSVDTSASTAYLQLSSLKAEDTAVYYCANYGNYWFAYWGQGTLVTVSSTRIQNPDPAVYQLRDSKSSDKSVCLFTDFDSQTNVSQSKDSDVYITDKCVLDMRSMDFKSNSAVAWSNKSDFACANAFNNSIIPEDTFFPSPESSCDVKLVEKSFETDTNLNFQILYEILLGKATLYAVLVSALVLMAMVKRKDSRG

SEQ ID NO: 13367 - protein, 619 aa, synthetic construct
MALPVTALLLPLALLLHAARPDIQMTQSPSSLSASVGDRVTITCRASQGISSWLAWYQQKPEKAPKSLIYAASSLQSGVPSRFSGSGSGTDFTLTISSLQPEDFATYYCQQYNSYPPTFGGGTKVEIKLEDLKNVFPPEVAVFEPSEAEISHTQKATLVCLATGFYPDHVELSWWVNGKEVHSGVCTDPQPLKEQPALNDSRYCLSSRLRVSATFWQNPRNHFRCQVQFYGLSENDEWTQDRAKPVTQIVSAEAWGRADCGFTSESYQQGVLSATNLSVIGFRILLLKVAGFNLLMTLRLWSSRAKRSGSGATNFSLLKQAGDVEENPGPTSMDWIWRILFLVGAATGAHSFEEVQLVQSGGGLVHPGGSLRLSCAGSGFAFSSSTMHWIRQAPGKGLEWISLIGSGGGIYYGDSVKGRFTISRDNAKNSLYLQMNSLRAEDMAVYYCVRGYFDWVDYFDYWGQGTLVTVSSTRIQNPDPAVYQLRDSKSSDKSVCLFTDFDSQTNVSQSKDSDVYITDKCVLDMRSMDFKSNSAVAWSNKSDFACANAFNNSIIPEDTFFPSPESSCDVKLVEKSFETDTNLNFQILYEILLGKATLYAVLVSALVLMAMVKRKDSRG

SEQ ID NO: 13368 - protein, 629 aa, synthetic construct
MALPVTALLLPLALLLHAARPDDIVMTQSPDSLTVSLGERTTINCKSSQSVLDSSKNKNSLAWYQQKPGQPPKLLLSWASTRESGIPDRFSGSGSGTDFTLTIDSLQPEDSATYYCQQSAHFPITFGQGTRLEIKLEDLKNVFPPEVAVFEPSEAEISHTQKATLVCLATGFYPDHVELSWWVNGKEVHSGVCTDPQPLKEQPALNDSRYCLSSRLRVSATFWQNPRNHFRCQVQFYGLSENDEWTQDRAKPVTQIVSAEAWGRADCGFTSESYQQGVLSATNLSVIGFRILLLKVAGFNLLMTLRLWSSRAKRSGSGATNFSLLKQAGDVEENPGPTSMDWIWRILFLVGAATGAHSFEQVQLVQSGAEVKKPGASVKVSCKASGYTFTNYGMNWVKQAPGQGLKWMGWINTYTGEPTYADDFKGRVTMTSDTSTSTAYLELHNLRSDDTAVYYCARWSWSDGYYVYFDYWGQGTTVTVSSTRIQNPDPAVYQLRDSKSSDKSVCLFTDFDSQTNVSQSKDSDVYITDKCVLDMRSMDFKSNSAVAWSNKSDFACANAFNNSIIPEDTFFPSPESSCDVKLVEKSFETDTNLNFQILYEILLGKATLYAVLVSALVLMAMVKRKDSRG

SEQ ID NO: 13369 - protein, 625 aa, synthetic construct
MALPVTALLLPLALLLHAARPDEIVLTQSPGSLAVSPGERVTMSCKSSQSVFFSSSQKNYLAWYQQIPGQSPRLLIYWASTRESGVPDRFTGSGSGTDFTLTISSVQPEDLAIYYCHQYLSSRTFGQGTKLEIKRLEDLKNVFPPEVAVFEPSEAEISHTQKATLVCLATGFYPDHVELSWWVNGKEVHSGVCTDPQPLKEQPALNDSRYCLSSRLRVSATFWQNPRNHFRCQVQFYGLSENDEWTQDRAKPVTQIVSAEAWGRADCGFTSESYQQGVLSATNLSVIGFRILLLKVAGFNLLMTLRLWSSRAKRSGSGATNFSLLKQAGDVEENPGPTSMDWIWRILFLVGAATGAHSFEQVQLQQPGAEVVKPGASVKMSCKASGYTFTSYYIHWIKQTPGQGLEWVGVIYPGNDDISYNQKFQGKATLTADKSSTTAYMQLSSLTSEDSAVYYCAREVRLRYFDVWGQGTTVTVSSTRIQNPDPAVYQLRDSKSSDKSVCLFTDFDSQTNVSQSKDSDVYITDKCVLDMRSMDFKSNSAVAWSNKSDFACANAFNNSIIPEDTFFPSPESSCDVKLVEKSFETDTNLNFQILYEILLGKATLYAVLVSALVLMAMVKRKDSRG

SEQ ID NO: 13370 - protein, 629 aa, synthetic construct
MALPVTALLLPLALLLHAARPDVLLTQSPLSLPVTLGQPASISCRSSQTIVHSNGNTYLEWFQQRPGQSPRLLIYQVSNRFSGVPDRFSGSGSGTDFTLKISRVEAEDVGVYYCFQGSHVPRTFGGGTKVEIKRALEDLKNVFPPEVAVFEPSEAEISHTQKATLVCLATGFYPDHVELSWWVNGKEVHSGVCTDPQPLKEQPALNDSRYCLSSRLRVSATFWQNPRNHFRCQVQFYGLSENDEWTQDRAKPVTQIVSAEAWGRADCGFTSESYQQGVLSATNLSVIGFRILLLKVAGFNLLMTLRLWSSRAKRSGSGATNFSLLKQAGDVEENPGPTSMDWIWRILFLVGAATGAHSFEQIQLVQSGSELKKPGASVKVSCKASGYTFTNYGMNWVRQAPGQGLKWMGWINTNTGEPKYAEEFKGRFALSLDTSVSTAYLQINSLKAEDTAVYFCARGYGNYARGAWLAYWGQGTLVTVSSTRIQNPDPAVYQLRDSKSSDKSVCLFTDFDSQTNVSQSKDSDVYITDKCVLDMRSMDFKSNSAVAWSNKSDFACANAFNNSIIPEDTFFPSPESSCDVKLVEKSFETDTNLNFQILYEILLGKATLYAVLVSALVLMAMVKRKDSRG

SEQ ID NO: 13371 - protein, 614 aa, synthetic construct
MALPVTALLLPLALLLHAARPDEIVLTQSPATLSLSPGERATLSCSASSSINYIYWLQQKPGQAPRILIYLTSNLASGVPARFSGSGSGTDFTLTISSLEPEDFAVYYCLQWSSNPLTFGGGTKVEIKLEDLKNVFPPEVAVFEPSEAEISHTQKATLVCLATGFYPDHVELSWWVNGKEVHSGVCTDPQPLKEQPALNDSRYCLSSRLRVSATFWQNPRNHFRCQVQFYGLSENDEWTQDRAKPVTQIVSAEAWGRADCGFTSESYQQGVLSATNLSVIGFRILLLKVAGFNLLMTLRLWSSRAKRSGSGATNFSLLKQAGDVEENPGPTSMDWIWRILFLVGAATGAHSFEEVQLVESGGGLVKPGGSLRLSCAASGFTFSSYDMSWVRQAPGKGLEWVSTISSGGSYTYYLDSIKGRFTISRDNAKNSLYLQMNSLRAEDTAVYYCARQGLDYWGRGTLVTVSSTRIQNPDPAVYQLRDSKSSDKSVCLFTDFDSQTNVSQSKDSDVYITDKCVLDMRSMDFKSNSAVAWSNKSDFACANAFNNSIIPEDTFFPSPESSCDVKLVEKSFETDTNLNFQILYEILLGKATLYAVLVSALVLMAMVKRKDSRG

SEQ ID NO: 13372 - protein, 623 aa, synthetic construct
MALPVTALLLPLALLLHAARPDIVMTQSPDSLAVSLGERATINCRASKSVSTSGYSFMHWYQQKPGQPPKLLIYLASNLESGVPDRFSGSGSGTDFTLTISSLQAEDVAVYYCQHSREVPWTFGQGTKVEIKRLEDLKNVFPPEVAVFEPSEAEISHTQKATLVCLATGFYPDHVELSWWVNGKEVHSGVCTDPQPLKEQPALNDSRYCLSSRLRVSATFWQNPRNHFRCQVQFYGLSENDEWTQDRAKPVTQIVSAEAWGRADCGFTSESYQQGVLSATNLSVIGFRILLLKVAGFNLLMTLRLWSSRAKRSGSGATNFSLLKQAGDVEENPGPTSMDWIWRILFLVGAATGAHSFEQVQLVQSGAEVKKPGASVKVSCKASGYTFTNYGMNWVRQAPGQGLEWMGWINTYTGEPTYADAFKGRFAFSLDTSTSTAYLQINSLRSDDTAVYYCARDYGDYGMDYWGQGTTVTVSSTRIQNPDPAVYQLRDSKSSDKSVCLFTDFDSQTNVSQSKDSDVYITDKCVLDMRSMDFKSNSAVAWSNKSDFACANAFNNSIIPEDTFFPSPESSCDVKLVEKSFETDTNLNFQILYEILLGKATLYAVLVSALVLMAMVKRKDSRG

SEQ ID NO: 13373 - protein, 619 aa, synthetic construct
MALPVTALLLPLALLLHAARPDIVMTQTPLTLSVTIGQPASISCKSSQSLLDSDGKTYLNWLLQRPGQSPERLIYLVSKLDSGVPDRFTGSGSGTDFTLKISRVEAEDLGVYCCWQGTHFPYTFGGGTKVEIKGLEDLKNVFPPEVAVFEPSEAEISHTQKATLVCLATGFYPDHVELSWWVNGKEVHSGVCTDPQPLKEQPALNDSRYCLSSRLRVSATFWQNPRNHFRCQVQFYGLSENDEWTQDRAKPVTQIVSAEAWGRADCGFTSESYQQGVLSATNLSVIGFRILLLKVAGFNLLMTLRLWSSRAKRSGSGATNFSLLKQAGDVEENPGPTSMDWIWRILFLVGAATGAHSFEQVQLQQPGAELVRPGASVKLSCKASGYTFTSYWMNWVKQRPGQGLEWIGMIDPSDSETHYNHIFKDKATLTVDKSSSTAYLQLSSLTSEDSAVYYCARNLYLWGQGTSVTVSSTRIQNPDPAVYQLRDSKSSDKSVCLFTDFDSQTNVSQSKDSDVYITDKCVLDMRSMDFKSNSAVAWSNKSDFACANAFNNSIIPEDTFFPSPESSCDVKLVEKSFETDTNLNFQILYEILLGKATLYAVLVSALVLMAMVKRKDSRG

SEQ ID NO: 13374 - protein, 627 aa, synthetic construct
MALPVTALLLPLALLLHAARPDIVMTQSPDSLAVSLGERATINCESSQSLLNSGNQKNYLTWYQQKPGQPPKPLIYWASTRESGVPDRFSGSGSGTDFTLTISSLQAEDVAVYYCQNDYSYPYTFGQGTKLEIKRLEDLKNVFPPEVAVFEPSEAEISHTQKATLVCLATGFYPDHVELSWWVNGKEVHSGVCTDPQPLKEQPALNDSRYCLSSRLRVSATFWQNPRNHFRCQVQFYGLSENDEWTQDRAKPVTQIVSAEAWGRADCGFTSESYQQGVLSATNLSVIGFRILLLKVAGFNLLMTLRLWSSRAKRSGSGATNFSLLKQAGDVEENPGPTSMDWIWRILFLVGAATGAHSFEEVQLVQSGAEVKKPGESLKISCKGSGYSFTDYYMKWARQMPGKGLEWMGDIIPSNGATFYNQKFKGQVTISADKSISTTYLQWSSLKASDTAMYYCARSHLLRASWFAYWGQGTMVTVSSTRIQNPDPAVYQLRDSKSSDKSVCLFTDFDSQTNVSQSKDSDVYITDKCVLDMRSMDFKSNSAVAWSNKSDFACANAFNNSIIPEDTFFPSPESSCDVKLVEKSFETDTNLNFQILYEILLGKATLYAVLVSALVLMAMVKRKDSRG

SEQ ID NO: 13375 - protein, 622 aa, synthetic construct
MALPVTALLLPLALLLHAARPDIQMTQSTSSLSASLGDRVTISCSASQGINNYLNWYQQKPDGTVELLIYYTSTLQSGVPSRFSGSGSGTDYSLTISNLEPEDIGTYYCQQYSKLPRTFGGGTKLEIKLEDLKNVFPPEVAVFEPSEAEISHTQKATLVCLATGFYPDHVELSWWVNGKEVHSGVCTDPQPLKEQPALNDSRYCLSSRLRVSATFWQNPRNHFRCQVQFYGLSENDEWTQDRAKPVTQIVSAEAWGRADCGFTSESYQQGVLSATNLSVIGFRILLLKVAGFNLLMTLRLWSSRAKRSGSGATNFSLLKQAGDVEENPGPTSMDWIWRILFLVGAATGAHSFEQVQLQQSGSELMMPGASVKISCKATGYTFSNYWIEWVKQRPGHGLEWIGEILPGTGRTIYNEKFKGKATFTADISSNTVQMQLSSLTSEDSAVYYCARRDYYGNFYYAMDYWGQGTSVTVSSTRIQNPDPAVYQLRDSKSSDKSVCLFTDFDSQTNVSQSKDSDVYITDKCVLDMRSMDFKSNSAVAWSNKSDFACANAFNNSIIPEDTFFPSPESSCDVKLVEKSFETDTNLNFQILYEILLGKATLYAVLVSALVLMAMVKRKDSRG

SEQ ID NO: 13376 - protein, 617 aa, synthetic construct
MALPVTALLLPLALLLHAARPDIQMTQSPASLSVSVGETVTITCRASENIYSNLAWYQQKQGKSPQLLVYAATNLADGVPSRFSGSGSGTQYSLKINSLQSEDFGSYYCQHFWGTWTFGGGTTLEIKLEDLKNVFPPEVAVFEPSEAEISHTQKATLVCLATGFYPDHVELSWWVNGKEVHSGVCTDPQPLKEQPALNDSRYCLSSRLRVSATFWQNPRNHFRCQVQFYGLSENDEWTQDRAKPVTQIVSAEAWGRADCGFTSESYQQGVLSATNLSVIGFRILLLKVAGFNLLMTLRLWSSRAKRSGSGATNFSLLKQAGDVEENPGPTSMDWIWRILFLVGAATGAHSFEEVQLQQSGPELVKPGASVKMSCKASGYTFTDYYMKWMKQSHGKSLEWIGDINPNNGGTTYNQKFKGKATLTVDKSSSTAYMQLNSLTSEDSAVYYCARDYGYGYFDYWGQGTTLTVSSTRIQNPDPAVYQLRDSKSSDKSVCLFTDFDSQTNVSQSKDSDVYITDKCVLDMRSMDFKSNSAVAWSNKSDFACANAFNNSIIPEDTFFPSPESSCDVKLVEKSFETDTNLNFQILYEILLGKATLYAVLVSALVLMAMVKRKDSRG

SEQ ID NO: 13377 - protein, 620 aa, synthetic construct
MALPVTALLLPLALLLHAARPEIVLTQSPGTLSLSPGERATLSCRASQSVGGYLAWYQQKPGQAPRLLIYDASNRATGIPARFSGSGSGTDFTLTISSLEPEDFAVYYCQQRNNWPPMYTFGQGTKLEIKRLEDLKNVFPPEVAVFEPSEAEISHTQKATLVCLATGFYPDHVELSWWVNGKEVHSGVCTDPQPLKEQPALNDSRYCLSSRLRVSATFWQNPRNHFRCQVQFYGLSENDEWTQDRAKPVTQIVSAEAWGRADCGFTSESYQQGVLSATNLSVIGFRILLLKVAGFNLLMTLRLWSSRAKRSGSGATNFSLLKQAGDVEENPGPTSMDWIWRILFLVGAATGAHSFEQVQLVQSGAEVKKPGSSVKVSCKASGGTFSSYAISWVRQAPGQGLEWMGGIIPILGTANYAQKFQGRVTITADESTSTAYMELSSLRSEDTAVYYCARWGGGAFDIWGQGTMVTVSSTRIQNPDPAVYQLRDSKSSDKSVCLFTDFDSQTNVSQSKDSDVYITDKCVLDMRSMDFKSNSAVAWSNKSDFACANAFNNSIIPEDTFFPSPESSCDVKLVEKSFETDTNLNFQILYEILLGKATLYAVLVSALVLMAMVKRKDSRG

SEQ ID NO: 13378 - protein, 615 aa, synthetic construct
MALPVTALLLPLALLLHAARPQIVLTQSPALMSASPGEKVTMTCSASSSVRYMYWYQQKPRSSPKPWIHLTSNLASGVPARFSGSGSGTSYSLTISSMEAEDAATYYCQQWSSHPFTFGSGTKLEIKLEDLKNVFPPEVAVFEPSEAEISHTQKATLVCLATGFYPDHVELSWWVNGKEVHSGVCTDPQPLKEQPALNDSRYCLSSRLRVSATFWQNPRNHFRCQVQFYGLSENDEWTQDRAKPVTQIVSAEAWGRADCGFTSESYQQGVLSATNLSVIGFRILLLKVAGFNLLMTLRLWSSRAKRSGSGATNFSLLKQAGDVEENPGPTSMDWIWRILFLVGAATGAHSFEDVQLQESGPGLVKPSQSLSLTCTVTGFSITSDYSWNWIRQFPGNKLEWMGYISYSGHTSYNPSLESRISITRDTSKNQFFLQLNSVTTEDTATYYCTRGNWDVVYWGQGTLVTVSATRIQNPDPAVYQLRDSKSSDKSVCLFTDFDSQTNVSQSKDSDVYITDKCVLDMRSMDFKSNSAVAWSNKSDFACANAFNNSIIPEDTFFPSPESSCDVKLVEKSFETDTNLNFQILYEILLGKATLYAVLVSALVLMAMVKRKDSRG

SEQ ID NO: 13379 - protein, 625 aa, synthetic construct
MALPVTALLLPLALLLHAARPDVVMTQSPLSLPVTLGQPASISCRSSQSIVHSDGNTYLEWYQQRPGQSPRRLIYKVSNRFSGVPDRFSGSGSGTDFTLKISRVEAEDVGVYYCFQGSHAPWTFGGGTKVEIKLEDLKNVFPPEVAVFEPSEAEISHTQKATLVCLATGFYPDHVELSWWVNGKEVHSGVCTDPQPLKEQPALNDSRYCLSSRLRVSATFWQNPRNHFRCQVQFYGLSENDEWTQDRAKPVTQIVSAEAWGRADCGFTSESYQQGVLSATNLSVIGFRILLLKVAGFNLLMTLRLWSSRAKRSGSGATNFSLLKQAGDVEENPGPTSMDWIWRILFLVGAATGAHSFEEVQLVESGGGLVQPGGSLRLSCAASGFTFSSYGMHWVRQAPGKGLEWVAYITTRSSTIYYADSVKGRFTISRDNAKNSLYLQMNSLRAEDTAVYYCTREPLTGYYAMDYWGQGTSVTVSSTRIQNPDPAVYQLRDSKSSDKSVCLFTDFDSQTNVSQSKDSDVYITDKCVLDMRSMDFKSNSAVAWSNKSDFACANAFNNSIIPEDTFFPSPESSCDVKLVEKSFETDTNLNFQILYEILLGKATLYAVLVSALVLMAMVKRKDSRG

SEQ ID NO: 13380 - protein, 617 aa, synthetic construct
MALPVTALLLPLALLLHAARPDIQMTQSPSSLSASVGDRVTITCRASQSISLWLNWYQQKPGKAPKLLIYAASTLQSGVPSRFSGSGSGTDFTLTISSLQPEDFATYYCQQYYTSPYTFGQGTKVEIKRLEDLKNVFPPEVAVFEPSEAEISHTQKATLVCLATGFYPDHVELSWWVNGKEVHSGVCTDPQPLKEQPALNDSRYCLSSRLRVSATFWQNPRNHFRCQVQFYGLSENDEWTQDRAKPVTQIVSAEAWGRADCGFTSESYQQGVLSATNLSVIGFRILLLKVAGFNLLMTLRLWSSRAKRSGSGATNFSLLKQAGDVEENPGPTSMDWIWRILFLVGAATGAHSFEQVQLLESGGGLVQPGGSLRLSCAASGFTFSSYAMSWVRQAPGKGLEWVSVIRSSGSSTYYADSVKGRFTISRDNSKNTLYLQMNSLRAEDTAVYYCARGGGYFDYWGQGTLVTVSSTRIQNPDPAVYQLRDSKSSDKSVCLFTDFDSQTNVSQSKDSDVYITDKCVLDMRSMDFKSNSAVAWSNKSDFACANAFNNSIIPEDTFFPSPESSCDVKLVEKSFETDTNLNFQILYEILLGKATLYAVLVSALVLMAMVKRKDSRG

SEQ ID NO: 13381 - protein, 620 aa, synthetic construct
MALPVTALLLPLALLLHAARPDIQMTQSPSSLSASVGDRVTITCRASQSISSYLNWYQQKPGKAPKLLIYAVSTLQSGVPSRFSGSGSGTDFTLTISSLQPEDFATYYCQQSGTFPPTTFGQGTKVEIKRLEDLKNVFPPEVAVFEPSEAEISHTQKATLVCLATGFYPDHVELSWWVNGKEVHSGVCTDPQPLKEQPALNDSRYCLSSRLRVSATFWQNPRNHFRCQVQFYGLSENDEWTQDRAKPVTQIVSAEAWGRADCGFTSESYQQGVLSATNLSVIGFRILLLKVAGFNLLMTLRLWSSRAKRSGSGATNFSLLKQAGDVEENPGPTSMDWIWRILFLVGAATGAHSFEQVQLLESGGGLVQPGGSLRLSCAASGFTFSSHGMHWVRQAPGKGLEWVSVISGSGSNTGYADSVKGRFTISRDNSKNTLYLQMNSLRAEDTAVYYCARQWGSYAFDSWGQGTLVTVSSTRIQNPDPAVYQLRDSKSSDKSVCLFTDFDSQTNVSQSKDSDVYITDKCVLDMRSMDFKSNSAVAWSNKSDFACANAFNNSIIPEDTFFPSPESSCDVKLVEKSFETDTNLNFQILYEILLGKATLYAVLVSALVLMAMVKRKDSRG

SEQ ID NO: 13382 - protein, 630 aa, synthetic construct
MALPVTALLLPLALLLHAARPDIVMSQSPSSLAVSVGEKVTMSCKSSQSLLHSSNQKNYLAWYQQKPGQSPKVLIYWASTRESGVPDRFTGSGSGTDFTLTITSVKSEDLAVYYCQQYYSYPWTFGGGTRLEIKRLEDLKNVFPPEVAVFEPSEAEISHTQKATLVCLATGFYPDHVELSWWVNGKEVHSGVCTDPQPLKEQPALNDSRYCLSSRLRVSATFWQNPRNHFRCQVQFYGLSENDEWTQDRAKPVTQIVSAEAWGRADCGFTSESYQQGVLSATNLSVIGFRILLLKVAGFNLLMTLRLWSSRAKRSGSGATNFSLLKQAGDVEENPGPTSMDWIWRILFLVGAATGAHSFEEVQLQQSVAELVKPGASVKMSCKVSGYTLTDHTIHWMKQRPEQGLEWIGYIYPRDGITGYNEKFKGKATLTADTSSSTAYMQLNSLTSEDSAVYFCARWGYSYRNYAYYYDYWGQGTTLTVSSTRIQNPDPAVYQLRDSKSSDKSVCLFTDFDSQTNVSQSKDSDVYITDKCVLDMRSMDFKSNSAVAWSNKSDFACANAFNNSIIPEDTFFPSPESSCDVKLVEKSFETDTNLNFQILYEILLGKATLYAVLVSALVLMAMVKRKDSRG

SEQ ID NO: 13383 - protein, 627 aa, synthetic construct
MALPVTALLLPLALLLHAARPEIVLTQSPGTLSLSPGERATLSCRASQSVSSSYLAWYQQKPGQAPRLLIYGTSSRATGIPDRFSGSGSGTDFTLTISRLEPEDFAVYYCQQYGSSPFTFGGGTKVEIKRLEDLKNVFPPEVAVFEPSEAEISHTQKATLVCLATGFYPDHVELSWWVNGKEVHSGVCTDPQPLKEQPALNDSRYCLSSRLRVSATFWQNPRNHFRCQVQFYGLSENDEWTQDRAKPVTQIVSAEAWGRADCGFTSESYQQGVLSATNLSVIGFRILLLKVAGFNLLMTLRLWSSRAKRSGSGATNFSLLKQAGDVEENPGPTSMDWIWRILFLVGAATGAHSFEQVQLQESGPGLAKPSETLSLTCTVSGDSITSYYWSWIRQPPGKGLEWIGYIYYSGSTNYNPSLKSRVTISVDTSKNQFSLKLSSVTAADTAVYYCARDQRRIAAAGTHFYGMDVWGQGTTVTVSSTRIQNPDPAVYQLRDSKSSDKSVCLFTDFDSQTNVSQSKDSDVYITDKCVLDMRSMDFKSNSAVAWSNKSDFACANAFNNSIIPEDTFFPSPESSCDVKLVEKSFETDTNLNFQILYEILLGKATLYAVLVSALVLMAMVKRKDSRG

SEQ ID NO: 13384 - protein, 619 aa, synthetic construct
MALPVTALLLPLALLLHAARPDILLTQSPVILSVSPGERVSFSCRASQSIGTNIHWYQQRTNGSPRLLIKYASESISGIPSRFSGSGSGTDFTLSINSVESEDIADYYCQQNNNWPTTFGAGTKLELKLEDLKNVFPPEVAVFEPSEAEISHTQKATLVCLATGFYPDHVELSWWVNGKEVHSGVCTDPQPLKEQPALNDSRYCLSSRLRVSATFWQNPRNHFRCQVQFYGLSENDEWTQDRAKPVTQIVSAEAWGRADCGFTSESYQQGVLSATNLSVIGFRILLLKVAGFNLLMTLRLWSSRAKRSGSGATNFSLLKQAGDVEENPGPTSMDWIWRILFLVGAATGAHSFEQVQLKQSGPGLVQPSQSLSITCTVSGFSLTNYGVHWVRQSPGKGLEWLGVIWSGGNTDYNTPFTSRLSINKDNSKSQVFFKMNSLQSNDTAIYYCARALTYYDYEFAYWGQGTLVTVSATRIQNPDPAVYQLRDSKSSDKSVCLFTDFDSQTNVSQSKDSDVYITDKCVLDMRSMDFKSNSAVAWSNKSDFACANAFNNSIIPEDTFFPSPESSCDVKLVEKSFETDTNLNFQILYEILLGKATLYAVLVSALVLMAMVKRKDSRG

SEQ ID NO: 13385 - protein, 612 aa, synthetic construct
MALPVTALLLPLALLLHAARPMTQSPKFLLVSAGDRVTLTCKASQSVNNDVYWYQQEPGQSPKLLIYWASTRESGVPDRFTGSGSGTDFTLTISSVQAEDLAVYYCKQSYNLYTFGGGTKLEIKRLEDLKNVFPPEVAVFEPSEAEISHTQKATLVCLATGFYPDHVELSWWVNGKEVHSGVCTDPQPLKEQPALNDSRYCLSSRLRVSATFWQNPRNHFRCQVQFYGLSENDEWTQDRAKPVTQIVSAEAWGRADCGFTSESYQQGVLSATNLSVIGFRILLLKVAGFNLLMTLRLWSSRAKRSGSGATNFSLLKQAGDVEENPGPTSMDWIWRILFLVGAATGAHSFEESGRGLVQPGGSRKLSCAASGFTFSTSGMHWVRQAPEKGLEWVAYISSGSTTIYHADTVKGRFTISRDNPKNTLFLQMTSLRSEDTAMYYCCARSGQFGNYFDYWGQGTTLTVSSTRIQNPDPAVYQLRDSKSSDKSVCLFTDFDSQTNVSQSKDSDVYITDKCVLDMRSMDFKSNSAVAWSNKSDFACANAFNNSIIPEDTFFPSPESSCDVKLVEKSFETDTNLNFQILYEILLGKATLYAVLVSALVLMAMVKRKDSRG

SEQ ID NO: 13386 - protein, 617 aa, synthetic construct
MALPVTALLLPLALLLHAARPQSPSSLAVSAGEKVTMSCKSSQSLLNSRTRKNYLAWYQQKPGQSPKLLIYWASTRESGVPDRFTGSGSGTDFTLTISSVQAEDLAVYYCKQSNLYTFGGGTKLEIKLEDLKNVFPPEVAVFEPSEAEISHTQKATLVCLATGFYPDHVELSWWVNGKEVHSGVCTDPQPLKEQPALNDSRYCLSSRLRVSATFWQNPRNHFRCQVQFYGLSENDEWTQDRAKPVTQIVSAEAWGRADCGFTSESYQQGVLSATNLSVIGFRILLLKVAGFNLLMTLRLWSSRAKRSGSGATNFSLLKQAGDVEENPGPTSMDWIWRILFLVGAATGAHSFEQVQLEESGPELVKPGASVKLSCKASGYTFTEYIIHWVKQRSGQGLEWIGWFYPGSGSIKYNEKFKDKATLTADKSSSTVYMELSGLTSEDSAVYFCARHDGYSYFDYWGQGTTLTVSSTRIQNPDPAVYQLRDSKSSDKSVCLFTDFDSQTNVSQSKDSDVYITDKCVLDMRSMDFKSNSAVAWSNKSDFACANAFNNSIIPEDTFFPSPESSCDVKLVEKSFETDTNLNFQILYEILLGKATLYAVLVSALVLMAMVKRKDSRG

SEQ ID NO: 13387 - protein, 620 aa, synthetic construct
MALPVTALLLPLALLLHAARPDIQMTQSPSSLSASLGERVSLTCRATQELSGYLSWLQQKPDGTIKRLIYAASTLDSGVPKRFSGNRSGSDYSLTISSLESEDFADYYCLQYAIYPYTFGGGTKLEIKLEDLKNVFPPEVAVFEPSEAEISHTQKATLVCLATGFYPDHVELSWWVNGKEVHSGVCTDPQPLKEQPALNDSRYCLSSRLRVSATFWQNPRNHFRCQVQFYGLSENDEWTQDRAKPVTQIVSAEAWGRADCGFTSESYQQGVLSATNLSVIGFRILLLKVAGFNLLMTLRLWSSRAKRSGSGATNFSLLKQAGDVEENPGPTSMDWIWRILFLVGAATGAHSFEEVQLQQSGPELVKPGASVKMSCKASGYTFTSYFIHWVKQKPGQGLEWIGFINPYNDGSKYNEKFKGKATLTSDKSSSTAYMELSSLTSEDSAVYYCTRDDGYYGYAMDYWGQGTSVTVSSTRIQNPDPAVYQLRDSKSSDKSVCLFTDFDSQTNVSQSKDSDVYITDKCVLDMRSMDFKSNSAVAWSNKSDFACANAFNNSIIPEDTFFPSPESSCDVKLVEKSFETDTNLNFQILYEILLGKATLYAVLVSALVLMAMVKRKDSRG

SEQ ID NO: 13388 - protein, 625 aa, synthetic construct
MALPVTALLLPLALLLHAARPDTIVLTQSPASLAVSLGQRATISCRASESVDSYGNSFMHWYQQKPGQPPKLLIYLASNLESGVPARFSGSGSRTDFTLTIDPVEADDAATYYCQQNNYDPWTFGGGTKLEIKLEDLKNVFPPEVAVFEPSEAEISHTQKATLVCLATGFYPDHVELSWWVNGKEVHSGVCTDPQPLKEQPALNDSRYCLSSRLRVSATFWQNPRNHFRCQVQFYGLSENDEWTQDRAKPVTQIVSAEAWGRADCGFTSESYQQGVLSATNLSVIGFRILLLKVAGFNLLMTLRLWSSRAKRSGSGATNFSLLKQAGDVEENPGPTSMDWIWRILFLVGAATGAHSFEEVQLQQSGPELVKPGASVKMSCKASGYTFTSYVMHWVKQKPGQGLEWIGYINPYNDGTKYNEKFKGKATLTSDTSSSTAYMELNSLTSEDSAVYFCARPIYFDNDYFDYWGQGTTLKVSSTRIQNPDPAVYQLRDSKSSDKSVCLFTDFDSQTNVSQSKDSDVYITDKCVLDMRSMDFKSNSAVAWSNKSDFACANAFNNSIIPEDTFFPSPESSCDVKLVEKSFETDTNLNFQILYEILLGKATLYAVLVSALVLMAMVKRKDSRG

SEQ ID NO: 13389 - protein, 620 aa, synthetic construct
MALPVTALLLPLALLLHAARPDIQMTQSPSSLSASVGDRVTITCKASQDVGIAVAWYQQKPGKVPKLLIYWASTRHTGVPDRFSGSGSGTDFTLTISSLQPEDVATYYCQQYSSYPYTFGQGTKVEIKRLEDLKNVFPPEVAVFEPSEAEISHTQKATLVCLATGFYPDHVELSWWVNGKEVHSGVCTDPQPLKEQPALNDSRYCLSSRLRVSATFWQNPRNHFRCQVQFYGLSENDEWTQDRAKPVTQIVSAEAWGRADCGFTSESYQQGVLSATNLSVIGFRILLLKVAGFNLLMTLRLWSSRAKRSGSGATNFSLLKQAGDVEENPGPTSMDWIWRILFLVGAATGAHSFEEVQLVESGGGLVQPGGSLRLSCAASGFDFSRYWMSWVRQAPGKGLEWIGEINPDSSTINYAPSLKDKFIISRDNAKNSLYLQMNSLRAEDTAVYYCARPDGNYWYFDVWGQGTLVTVSSTRIQNPDPAVYQLRDSKSSDKSVCLFTDFDSQTNVSQSKDSDVYITDKCVLDMRSMDFKSNSAVAWSNKSDFACANAFNNSIIPEDTFFPSPESSCDVKLVEKSFETDTNLNFQILYEILLGKATLYAVLVSALVLMAMVKRKDSRG

SEQ ID NO: 13390 - protein, 620 aa, synthetic construct
MALPVTALLLPLALLLHAARPDIVMTQSQKSMSTSVGDRVSITCKASQDVITGVAWYQQKPGQSPKLLIYSASYRYTGVPDRFTGSGSGTDFTFTISNVQAEDLAVYYCQQHYSTPLTFGAGTKLELKLEDLKNVFPPEVAVFEPSEAEISHTQKATLVCLATGFYPDHVELSWWVNGKEVHSGVCTDPQPLKEQPALNDSRYCLSSRLRVSATFWQNPRNHFRCQVQFYGLSENDEWTQDRAKPVTQIVSAEAWGRADCGFTSESYQQGVLSATNLSVIGFRILLLKVAGFNLLMTLRLWSSRAKRSGSGATNFSLLKQAGDVEENPGPTSMDWIWRILFLVGAATGAHSFEQVQLQQPGAELVRPGASVKLSCKASGYSFTTYWMNWVKQRPGQGLEWIGMIHPSDSETRLNQKFKDKATLTVDKSSSTAYMQLSSPTSEDSAVYYCARSTMIATRAMDYWGQGTSVTVSSTRIQNPDPAVYQLRDSKSSDKSVCLFTDFDSQTNVSQSKDSDVYITDKCVLDMRSMDFKSNSAVAWSNKSDFACANAFNNSIIPEDTFFPSPESSCDVKLVEKSFETDTNLNFQILYEILLGKATLYAVLVSALVLMAMVKRKDSRG

SEQ ID NO: 13391 - protein, 626 aa, synthetic construct
MALPVTALLLPLALLLHAARPQSVLTQPPSVSGAPGQRVTISCTGSGSNIGAPYDVSWYQQLPGTAPKLLIYHNNKRPSGVPDRFSGSKSGTSASLAITGLQAEDEADYYCATVEAGLSGSVFGGGTKLTVLGALEDLKNVFPPEVAVFEPSEAEISHTQKATLVCLATGFYPDHVELSWWVNGKEVHSGVCTDPQPLKEQPALNDSRYCLSSRLRVSATFWQNPRNHFRCQVQFYGLSENDEWTQDRAKPVTQIVSAEAWGRADCGFTSESYQQGVLSATNLSVIGFRILLLKVAGFNLLMTLRLWSSRAKRSGSGATNFSLLKQAGDVEENPGPTSMDWIWRILFLVGAATGAHSFEQVQLVQSGAEVKKPGASVKVSCKVSGYTLTELSIHWVRQAPGKGLEWMGGFDPEENEIVYAQRFQGRVTMTEDTSTDTAYMELSSLRSEDTAVYYCAIVGSFSPLTLGLWGQGTMVTVSSTRIQNPDPAVYQLRDSKSSDKSVCLFTDFDSQTNVSQSKDSDVYITDKCVLDMRSMDFKSNSAVAWSNKSDFACANAFNNSIIPEDTFFPSPESSCDVKLVEKSFETDTNLNFQILYEILLGKATLYAVLVSALVLMAMVKRKDSRG

SEQ ID NO: 13392 - protein, 626 aa, synthetic construct
MALPVTALLLPLALLLHAARPQSVLTQPPSVSGAPGQRVTISCTGSGSNIGAPYDVSWYQQLPGTAPKLLIYHNNKRPSGVPDRFSGSKSGTSASLAITGLQAEDEADYYCQSYDSSSISTIFGGGTKLTVLGALEDLKNVFPPEVAVFEPSEAEISHTQKATLVCLATGFYPDHVELSWWVNGKEVHSGVCTDPQPLKEQPALNDSRYCLSSRLRVSATFWQNPRNHFRCQVQFYGLSENDEWTQDRAKPVTQIVSAEAWGRADCGFTSESYQQGVLSATNLSVIGFRILLLKVAGFNLLMTLRLWSSRAKRSGSGATNFSLLKQAGDVEENPGPTSMDWIWRILFLVGAATGAHSFEQVQLVQSGAEVKKPGASVKVSCKVSGYTLTELSIHWVRQAPGKGLEWMGGFDPEENEIVYAQRFQGRVTMTEDTSTDTAYMELSSLRSEDTAVYYCAIVGSFSGIAYRPWGQGTMVTVSSTRIQNPDPAVYQLRDSKSSDKSVCLFTDFDSQTNVSQSKDSDVYITDKCVLDMRSMDFKSNSAVAWSNKSDFACANAFNNSIIPEDTFFPSPESSCDVKLVEKSFETDTNLNFQILYEILLGKATLYAVLVSALVLMAMVKRKDSRG

SEQ ID NO: 13393 - protein, 614 aa, synthetic construct
MALPVTALLLPLALLLHAARPDIQMTQSPSSLSASVGDRVTITCRASQGIRNNLAWYQQKPGKAPKRLIYAASNLQSGVPSRFTGSGSGTEFTLIVSSLQPEDFATYYCLQHHSYPLTSGGGTKVELEDLKNVFPPEVAVFEPSEAEISHTQKATLVCLATGFYPDHVELSWWVNGKEVHSGVCTDPQPLKEQPALNDSRYCLSSRLRVSATFWQNPRNHFRCQVQFYGLSENDEWTQDRAKPVTQIVSAEAWGRADCGFTSESYQQGVLSATNLSVIGFRILLLKVAGFNLLMTLRLWSSRAKRSGSGATNFSLLKQAGDVEENPGPTSMDWIWRILFLVGAATGAHSFEEVQVLESGGGLVQPGGSLRLSCAASGFTFSSYAMSWVRQAPGKGLEWVSAISGSGGSTNYADSVKGRFTISRDNSKNTLYLQMNSLRAEDTAVYYCAGSSGWSEYWGQGTLVTVSSTRIQNPDPAVYQLRDSKSSDKSVCLFTDFDSQTNVSQSKDSDVYITDKCVLDMRSMDFKSNSAVAWSNKSDFACANAFNNSIIPEDTFFPSPESSCDVKLVEKSFETDTNLNFQILYEILLGKATLYAVLVSALVLMAMVKRKDSRG

SEQ ID NO: 13394 - protein, 620 aa, synthetic construct
MALPVTALLLPLALLLHAARPDEIQLVQSGAEVKKPGESLRISCKGSGFNIEDYYIHWVRQMPGKGLEWMGRIDPENDETKYGPIFQGHVTISADTSINTVYLQWSSLKASDTAMYYCAFRGGVYWGQGTTVTVSSLEDLKNVFPPEVAVFEPSEAEISHTQKATLVCLATGFYPDHVELSWWVNGKEVHSGVCTDPQPLKEQPALNDSRYCLSSRLRVSATFWQNPRNHFRCQVQFYGLSENDEWTQDRAKPVTQIVSAEAWGRADCGFTSESYQQGVLSATNLSVIGFRILLLKVAGFNLLMTLRLWSSRAKRSGSGATNFSLLKQAGDVEENPGPTSMDWIWRILFLVGAATGAHSFEDVVMTQSPDSLAVSLGERATINCKSSQSLLDSDGKTYLNWLQQKPGQPPKRLISLVSKLDSGVPDRFSGSGSGTDFTLTISSLQAEDVAVYYCWQGTHFPGTFGGGTKVEIKTRIQNPDPAVYQLRDSKSSDKSVCLFTDFDSQTNVSQSKDSDVYITDKCVLDMRSMDFKSNSAVAWSNKSDFACANAFNNSIIPEDTFFPSPESSCDVKLVEKSFETDTNLNFQILYEILLGKATLYAVLVSALVLMAMVKRKDSRG

SEQ ID NO: 13395 - protein, 627 aa, synthetic construct
MALPVTALLLPLALLLHAARPDELVMTQSPSSLTVTAGEKVTMSCKSSQSLLNSGNQKNYLTWYQQKPGQPPKLLIYWASTRESGVPDRFTGSGSGTDFTLTISSVQAEDLAVYYCQNDYSYPLTFGAGTKLEIKLEDLKNVFPPEVAVFEPSEAEISHTQKATLVCLATGFYPDHVELSWWVNGKEVHSGVCTDPQPLKEQPALNDSRYCLSSRLRVSATFWQNPRNHFRCQVQFYGLSENDEWTQDRAKPVTQIVSAEAWGRADCGFTSESYQQGVLSATNLSVIGFRILLLKVAGFNLLMTLRLWSSRAKRSGSGATNFSLLKQAGDVEENPGPTSMDWIWRILFLVGAATGAHSFEEVQLLEQSGAELVRPGTSVKISCKASGYAFTNYWLGWVKQRPGHGLEWIGDIFPGSGNIHYNEKFKGKATLTADKSSSTAYMQLSSLTFEDSAVYFCARLRNWDEPMDYWGQGTTVTVSSTRIQNPDPAVYQLRDSKSSDKSVCLFTDFDSQTNVSQSKDSDVYITDKCVLDMRSMDFKSNSAVAWSNKSDFACANAFNNSIIPEDTFFPSPESSCDVKLVEKSFETDTNLNFQILYEILLGKATLYAVLVSALVLMAMVKRKDSRG

SEQ ID NO: 13396 - protein, 628 aa, synthetic construct
MALPVTALLLPLALLLHAARPDELQMTQSPSSLSASVGDRVTITCRASQSISSYLNWYQQKPGQPPKLLIYWASTRESGVPDRFSGSESGTNYTLTISSLQPEDFATYFCQQSDSLPITFGQGTRLDIQLEDLKNVFPPEVAVFEPSEAEISHTQKATLVCLATGFYPDHVELSWWVNGKEVHSGVCTDPQPLKEQPALNDSRYCLSSRLRVSATFWQNPRNHFRCQVQFYGLSENDEWTQDRAKPVTQIVSAEAWGRADCGFTSESYQQGVLSATNLSVIGFRILLLKVAGFNLLMTLRLWSSRAKRSGSGATNFSLLKQAGDVEENPGPTSMDWIWRILFLVGAATGAHSFEEVQLLESGGGVVQPGRSLRLSCAASGFTFSSYGMHWVRQAPGKGLEWVAVISYDGSNKYYADSVKGRFTISRDNSKNTLYLQMNSLRAEDTAVYYCAKDMGWGSGWRPYYYYGMDVWGQGTTVTVSSTRIQNPDPAVYQLRDSKSSDKSVCLFTDFDSQTNVSQSKDSDVYITDKCVLDMRSMDFKSNSAVAWSNKSDFACANAFNNSIIPEDTFFPSPESSCDVKLVEKSFETDTNLNFQILYEILLGKATLYAVLVSALVLMAMVKRKDSRG

SEQ ID NO: 13397 - protein, 625 aa, synthetic construct
MALPVTALLLPLALLLHAARPDDIQMTQSPSSLSASVGDRVTITCRASQSISSYLNWYQQKPGKAPKLLIYAASSLQSGVPSRFSGSGSGTDFTLTISSLQPEDLATYYCQQSYSTPFTFGPGTKVDIKLEDLKNVFPPEVAVFEPSEAEISHTQKATLVCLATGFYPDHVELSWWVNGKEVHSGVCTDPQPLKEQPALNDSRYCLSSRLRVSATFWQNPRNHFRCQVQFYGLSENDEWTQDRAKPVTQIVSAEAWGRADCGFTSESYQQGVLSATNLSVIGFRILLLKVAGFNLLMTLRLWSSRAKRSGSGATNFSLLKQAGDVEENPGPTSMDWIWRILFLVGAATGAHSFEVHEVQLVQSGAEVKKPGSSVKVSCKASGGTFSSYAISWVRQAPGQGLEWMGGIIPIFGTANYAQKFQGRVTITADKSTSTAYMELSSLRSEDTAVYYCATFALFGFREQAFDIWGQGTTVTVSSTRIQNPDPAVYQLRDSKSSDKSVCLFTDFDSQTNVSQSKDSDVYITDKCVLDMRSMDFKSNSAVAWSNKSDFACANAFNNSIIPEDTFFPSPESSCDVKLVEKSFETDTNLNFQILYEILLGKATLYAVLVSALVLMAMVKRKDSRG

SEQ ID NO: 13398 - protein, 623 aa, synthetic construct
MALPVTALLLPLALLLHAARPDIVLTQSPLSLAVSLGQPAIISCKASQSVSFAGTSLMHWYHQKPGQQPRLLIYRASNLEAGVPDRFSGSGSKTDFTLTISPVEAEDAATYYCQQSREYPYTFGGGTKLEIKRLEDLKNVFPPEVAVFEPSEAEISHTQKATLVCLATGFYPDHVELSWWVNGKEVHSGVCTDPQPLKEQPALNDSRYCLSSRLRVSATFWQNPRNHFRCQVQFYGLSENDEWTQDRAKPVTQIVSAEAWGRADCGFTSESYQQGVLSATNLSVIGFRILLLKVAGFNLLMTLRLWSSRAKRSGSGATNFSLLKQAGDVEENPGPTSMDWIWRILFLVGAATGAHSFEQVQLVQSGAEVVKPGASVKISCKASGYTFTGYFMNWVKQSPGQSLEWIGRIHPYDGDTFYNQKFQGKATLTVDKSSNTAHMELLSLTSEDFAVYYCTRYDGSRAMDYWGQGTTVTVSSTRIQNPDPAVYQLRDSKSSDKSVCLFTDFDSQTNVSQSKDSDVYITDKCVLDMRSMDFKSNSAVAWSNKSDFACANAFNNSIIPEDTFFPSPESSCDVKLVEKSFETDTNLNFQILYEILLGKATLYAVLVSALVLMAMVKRKDSRG

SEQ ID NO: 13399 - protein, 620 aa, synthetic construct
MALPVTALLLPLALLLHAARPDDVVMTQTPLSLPVTPGEPASISCRSSQSLVHRNGNTYLHWYLQKPGQSPKLLIHKVSNRFSGVPDRFSGSGSGTDFTLKISRVEAEDLGVYFCSQSTHVPPLTFGAGTKLELKLEDLKNVFPPEVAVFEPSEAEISHTQKATLVCLATGFYPDHVELSWWVNGKEVHSGVCTDPQPLKEQPALNDSRYCLSSRLRVSATFWQNPRNHFRCQVQFYGLSENDEWTQDRAKPVTQIVSAEAWGRADCGFTSESYQQGVLSATNLSVIGFRILLLKVAGFNLLMTLRLWSSRAKRSGSGATNFSLLKQAGDVEENPGPTSMDWIWRILFLVGAATGAHSFEEVQLVQSGAEVEKPGASVKISCKASGSSFTGYNMNWVRQNIGKSLEWIGAIDPYYGGTSYNQKFKGRATLTVDKSTSTAYMHLKSLRSEDTAVYYCVSGMEYWGQGTSVTVSSTRIQNPDPAVYQLRDSKSSDKSVCLFTDFDSQTNVSQSKDSDVYITDKCVLDMRSMDFKSNSAVAWSNKSDFACANAFNNSIIPEDTFFPSPESSCDVKLVEKSFETDTNLNFQILYEILLGKATLYAVLVSALVLMAMVKRKDSRG

SEQ ID NO: 13400 - protein, 618 aa, synthetic construct
MALPVTALLLPLALLLHAARPDEIVMTQTPATLSVSAGERVTITCKASQSVSNDVTWYQQKPGQAPRLLIYSASNRYSGVPARFSGSGYGTEFTFTISSVQSEDFAVYFCQQDYSSFGQGTKLEIKRLEDLKNVFPPEVAVFEPSEAEISHTQKATLVCLATGFYPDHVELSWWVNGKEVHSGVCTDPQPLKEQPALNDSRYCLSSRLRVSATFWQNPRNHFRCQVQFYGLSENDEWTQDRAKPVTQIVSAEAWGRADCGFTSESYQQGVLSATNLSVIGFRILLLKVAGFNLLMTLRLWSSRAKRSGSGATNFSLLKQAGDVEENPGPTSMDWIWRILFLVGAATGAHSFEQVQLVESGPGVVQPGRSLRISCAVSGFSVTNYGVHWVRQPPGKGLEWLGVIWAGGITNYNSAFMSRLTISKDNSKNTVYLQMNSLRAEDTAMYYCASRGGHYGYALDYWGQGTLVTVSSTRIQNPDPAVYQLRDSKSSDKSVCLFTDFDSQTNVSQSKDSDVYITDKCVLDMRSMDFKSNSAVAWSNKSDFACANAFNNSIIPEDTFFPSPESSCDVKLVEKSFETDTNLNFQILYEILLGKATLYAVLVSALVLMAMVKRKDSRG

SEQ ID NO: 13401 - protein, 620 aa, synthetic construct
MALPVTALLLPLALLLHAARPDIQMTQTASSLPASLGDRVTISCSASQDISNYLNWYQQKPDGTVKLLIFYSSNLHSGVPSRFSGGGSGTDYSLTISNLEPEDIATYFCHQYSKLPWTFGGGTKLEIKRLEDLKNVFPPEVAVFEPSEAEISHTQKATLVCLATGFYPDHVELSWWVNGKEVHSGVCTDPQPLKEQPALNDSRYCLSSRLRVSATFWQNPRNHFRCQVQFYGLSENDEWTQDRAKPVTQIVSAEAWGRADCGFTSESYQQGVLSATNLSVIGFRILLLKVAGFNLLMTLRLWSSRAKRSGSGATNFSLLKQAGDVEENPGPTSMDWIWRILFLVGAATGAHSFEEVTLVESGGDFVKPGGSLKVSCAASGFAFSHYAMSWVRQTPAKRLEWVAYISSGGSGTYYSDSVKGRFTISRDNAKNTLYLQMRSLRSEDSAMYFCTRVKLGTYYFDSWGQGTTLTVSSTRIQNPDPAVYQLRDSKSSDKSVCLFTDFDSQTNVSQSKDSDVYITDKCVLDMRSMDFKSNSAVAWSNKSDFACANAFNNSIIPEDTFFPSPESSCDVKLVEKSFETDTNLNFQILYEILLGKATLYAVLVSALVLMAMVKRKDSRG

SEQ ID NO: 13402 - protein, 622 aa, synthetic construct
MALPVTALLLPLALLLHAARPQFVLTQSPSASAALGASAKLTCTLSSAHKTYTIDWYQQQKGKAPRYLIQVKSDGTYTKATGVPDRFSGSSSGADRYLIIPSVQADDEADYYCGTDYTGGYVFGGGTQLTVTLEDLKNVFPPEVAVFEPSEAEISHTQKATLVCLATGFYPDHVELSWWVNGKEVHSGVCTDPQPLKEQPALNDSRYCLSSRLRVSATFWQNPRNHFRCQVQFYGLSENDEWTQDRAKPVTQIVSAEAWGRADCGFTSESYQQGVLSATNLSVIGFRILLLKVAGFNLLMTLRLWSSRAKRSGSGATNFSLLKQAGDVEENPGPTSMDWIWRILFLVGAATGAHSFEEQLKESGGGLFKPTDTLTLTCTVSGFSLSYYGVNWVRQAPGNGLEWIGTIGGSGDTYYASWAKSRSTIIRNTNENTVTLKMTSLTAADTATYFCVRYANIGYEYFNVWGPGTLVTVSSTRIQNPDPAVYQLRDSKSSDKSVCLFTDFDSQTNVSQSKDSDVYITDKCVLDMRSMDFKSNSAVAWSNKSDFACANAFNNSIIPEDTFFPSPESSCDVKLVEKSFETDTNLNFQILYEILLGKATLYAVLVSALVLMAMVKRKDSRG

SEQ ID NO: 13403 - protein, 627 aa, synthetic construct
MALPVTALLLPLALLLHAARPQFVLTQSPSVSAALGASAKLTCTLSSAHKTYTIDWYQQQQGEAPRYLMQVKSDGSYTKGTGVPDRFSGSSSGADRYLIIPSVQADDEAGYVCGADDNGGYVFGGGTQLTVTLEDLKNVFPPEVAVFEPSEAEISHTQKATLVCLATGFYPDHVELSWWVNGKEVHSGVCTDPQPLKEQPALNDSRYCLSSRLRVSATFWQNPRNHFRCQVQFYGLSENDEWTQDRAKPVTQIVSAEAWGRADCGFTSESYQQGVLSATNLSVIGFRILLLKVAGFNLLMTLRLWSSRAKRSGSGATNFSLLKQAGDVEENPGPTSMDWIWRILFLVGAATGAHSFEQSVKESEGGLFKPTDTLTLTCTVSGFSLSRHALTWVRQAPGNGLEWIGAIDNAGTTYYASWAKSRSTITRNTDLHTVTLKMTSLTASDTATYFCARVFYDINSGYYLDGMDLWGPGTLVTVSSTRIQNPDPAVYQLRDSKSSDKSVCLFTDFDSQTNVSQSKDSDVYITDKCVLDMRSMDFKSNSAVAWSNKSDFACANAFNNSIIPEDTFFPSPESSCDVKLVEKSFETDTNLNFQILYEILLGKATLYAVLVSALVLMAMVKRKDSRG

SEQ ID NO: 13404 - protein, 621 aa, synthetic construct
MALPVTALLLPLALLLHAARPDIQMTQSPSSLSASVGDRVTITCRASQGISSWLAWYQQKPEKAPKSLIYAASSLQSGVPSRFSGSGSGTDFTLTISSLQPEDFATYYCQQYNSYPPTFGGGTKVEIKLEDLKNVFPPEVAVFEPSEAEISHTQKATLVCLATGFYPDHVELSWWVNGKEVHSGVCTDPQPLKEQPALNDSRYCLSSRLRVSATFWQNPRNHFRCQVQFYGLSENDEWTQDRAKPVTQIVSAEAWGRADCGFTSESYQQGVLSATNLSVIGFRILLLKVAGFNLLMTLRLWSSRAKRSGSGATNFSLLKQAGDVEENPGPTSMDWIWRILFLVGAATGAHSFEEVQLVESGGGLVQPGESLRLSCVASGFTFSRYKMNWVRQAPGKGLEWVSYISRSGRDIYYADSVKGRFTISRDNAKNSLYLQMNSLRDEDTAVYYCAGTVTTYYYFGMDVWGHGTTVTVSSTRIQNPDPAVYQLRDSKSSDKSVCLFTDFDSQTNVSQSKDSDVYITDKCVLDMRSMDFKSNSAVAWSNKSDFACANAFNNSIIPEDTFFPSPESSCDVKLVEKSFETDTNLNFQILYEILLGKATLYAVLVSALVLMAMVKRKDSRG

SEQ ID NO: 13405 - protein, 622 aa, synthetic construct
MALPVTALLLPLALLLHAARPDIQMTQSPSSLSASVGDRVTITCRASQGISSWLAWYQQKPEKAPKSLIYAASSLQSGVPSRFSGSGSGTDFTLTISSLQPEDFATYYCQQYNSYPPTFGGGTKVEIKLEDLKNVFPPEVAVFEPSEAEISHTQKATLVCLATGFYPDHVELSWWVNGKEVHSGVCTDPQPLKEQPALNDSRYCLSSRLRVSATFWQNPRNHFRCQVQFYGLSENDEWTQDRAKPVTQIVSAEAWGRADCGFTSESYQQGVLSATNLSVIGFRILLLKVAGFNLLMTLRLWSSRAKRSGSGATNFSLLKQAGDVEENPGPTSMDWIWRILFLVGAATGAHSFEEVQLVESGGGSVQPGESLRLSCVASGFTFSRYKMNWVRQAPGKGLEWVSYISRSGRDIYYADSVKGRFTISRDNAKNSLYLQMNSLRDEDTAVYYCAGTVTTYYYDFGMDVWGQGTTVTVSSTRIQNPDPAVYQLRDSKSSDKSVCLFTDFDSQTNVSQSKDSDVYITDKCVLDMRSMDFKSNSAVAWSNKSDFACANAFNNSIIPEDTFFPSPESSCDVKLVEKSFETDTNLNFQILYEILLGKATLYAVLVSALVLMAMVKRKDSRG

SEQ ID NO: 13406 - protein, 620 aa, synthetic construct
MALPVTALLLPLALLLHAARPQSVLTQPPSASGTPGQRVTISCSGSRSNVGGNYVFWYQQVPGATPKLLIYRSNQRPSGVPDRFAGSKSGSSASLAISGLRSEDEADYYCATWDDSLSGFVFGTGTKVTVLGLEDLKNVFPPEVAVFEPSEAEISHTQKATLVCLATGFYPDHVELSWWVNGKEVHSGVCTDPQPLKEQPALNDSRYCLSSRLRVSATFWQNPRNHFRCQVQFYGLSENDEWTQDRAKPVTQIVSAEAWGRADCGFTSESYQQGVLSATNLSVIGFRILLLKVAGFNLLMTLRLWSSRAKRSGSGATNFSLLKQAGDVEENPGPTSMDWIWRILFLVGAATGAHSFEVQLVESGGGLVKPGGSLRLSCAASGFTFSDYYMSWIRQAPGKGLEWVSYISSSGSTIYYADSVKGRFTISRDNAKNSLYLQMNSLRAEDTAVYYCARGYGKAYDQWGQGTLVTVSSTRIQNPDPAVYQLRDSKSSDKSVCLFTDFDSQTNVSQSKDSDVYITDKCVLDMRSMDFKSNSAVAWSNKSDFACANAFNNSIIPEDTFFPSPESSCDVKLVEKSFETDTNLNFQILYEILLGKATLYAVLVSALVLMAMVKRKDSRG

SEQ ID NO: 13407 - protein, 619 aa, synthetic construct
MALPVTALLLPLALLLHAARPQSVVTQPPSMSAAPGQQVTISCSGGNSNIERNYVSWYLQLPGTAPKLVIFDNDRRPSGIPDRFSGSKSGTSATLGITGLQTGDEADYYCGTWDSSLRGWVFGGGTKLTVLGLEDLKNVFPPEVAVFEPSEAEISHTQKATLVCLATGFYPDHVELSWWVNGKEVHSGVCTDPQPLKEQPALNDSRYCLSSRLRVSATFWQNPRNHFRCQVQFYGLSENDEWTQDRAKPVTQIVSAEAWGRADCGFTSESYQQGVLSATNLSVIGFRILLLKVAGFNLLMTLRLWSSRAKRSGSGATNFSLLKQAGDVEENPGPTSMDWIWRILFLVGAATGAHSFEVQLVESGGGLIQPGGSLRLSCAASGFTFSNYAMNWVRQAPGKGLEWVSTINGRGSSTIYADSVKGRFTISRDNSKNTLYLQMNSLRAEDTATYYCARYISRGLGDSWGQGTLVTVTRIQNPDPAVYQLRDSKSSDKSVCLFTDFDSQTNVSQSKDSDVYITDKCVLDMRSMDFKSNSAVAWSNKSDFACANAFNNSIIPEDTFFPSPESSCDVKLVEKSFETDTNLNFQILYEILLGKATLYAVLVSALVLMAMVKRKDSRG

SEQ ID NO: 13408 - protein, 620 aa, synthetic construct
MALPVTALLLPLALLLHAARPDVVMTQTPLSLPVSLGDQASISCRSSQSLVHSNGNTYLHWYLQKPGQSPKLLIYKVSNRFSGVPDRFSGSGSGTDFTLKISRVEAEDLGVYFCSQNTPVPPKFGSGTKLEIKLEDLKNVFPPEVAVFEPSEAEISHTQKATLVCLATGFYPDHVELSWWVNGKEVHSGVCTDPQPLKEQPALNDSRYCLSSRLRVSATFWQNPRNHFRCQVQFYGLSENDEWTQDRAKPVTQIVSAEAWGRADCGFTSESYQQGVLSATNLSVIGFRILLLKVAGFNLLMTLRLWSSRAKRSGSGATNFSLLKQAGDVEENPGPTSMDWIWRILFLVGAATGAHSFEQVQLQQSGAELVRPGASVKLSCKASGYTFNDYEMHWVKQTPVHGLKWIGALEPKTGDTAYSQKFKGKATLTADKSSSTAYMELRSLTSEDSAVYYCTSCYYYTYSGQGTLVTVSATRIQNPDPAVYQLRDSKSSDKSVCLFTDFDSQTNVSQSKDSDVYITDKCVLDMRSMDFKSNSAVAWSNKSDFACANAFNNSIIPEDTFFPSPESSCDVKLVEKSFETDTNLNFQILYEILLGKATLYAVLVSALVLMAMVKRKDSRG

SEQ ID NO: 13409 - protein, 619 aa, synthetic construct
MALPVTALLLPLALLLHAARPDIQLTQSPSSLSASVGDRVTITCRASQGIRNDLGWYQQKPGKAPKRLIYAASSLQNGVPSRFSGSGSGTEFTLTISSLQPEDFATYYCLQHNTYPAFGQGTKVEIKRLEDLKNVFPPEVAVFEPSEAEISHTQKATLVCLATGFYPDHVELSWWVNGKEVHSGVCTDPQPLKEQPALNDSRYCLSSRLRVSATFWQNPRNHFRCQVQFYGLSENDEWTQDRAKPVTQIVSAEAWGRADCGFTSESYQQGVLSATNLSVIGFRILLLKVAGFNLLMTLRLWSSRAKRSGSGATNFSLLKQAGDVEENPGPTSMDWIWRILFLVGAATGAHSFEQVQLQESGPGLVKPSQTLSLTCTVSGGSISSFNYYWSWIRHHPGKGLEWIGYIYYSGSTYSNPSLKSRVTISVDTSKNQFSLTLSSVTAADTAVYYCARGYNWNYFDYWGQGTLVTVSSTRIQNPDPAVYQLRDSKSSDKSVCLFTDFDSQTNVSQSKDSDVYITDKCVLDMRSMDFKSNSAVAWSNKSDFACANAFNNSIIPEDTFFPSPESSCDVKLVEKSFETDTNLNFQILYEILLGKATLYAVLVSALVLMAMVKRKDSRG

SEQ ID NO: 13410 - protein, 621 aa, synthetic construct
MALPVTALLLPLALLLHAARPDDIVLTQSPASLAVSLGQSVTISCRASESVEYYGTSLMQWYQQKPGQPPKLLIYATSNVESGVPARFSGSGSGTDFSLNIHPVEEDDIAMYFCQQSRKLPSTFGGGTKLEIKLEDLKNVFPPEVAVFEPSEAEISHTQKATLVCLATGFYPDHVELSWWVNGKEVHSGVCTDPQPLKEQPALNDSRYCLSSRLRVSATFWQNPRNHFRCQVQFYGLSENDEWTQDRAKPVTQIVSAEAWGRADCGFTSESYQQGVLSATNLSVIGFRILLLKVAGFNLLMTLRLWSSRAKRSGSGATNFSLLKQAGDVEENPGPTSMDWIWRILFLVGAATGAHSFEDVRLQESGPGQVKPSQTVSLTCSVTGYSITNGNHWWNWIRQVSGSKLEWIGYISSSGSTDSNPSLKSRISITRDTSKNQLFLQLNSVTTEDIATYYCARGYYFDYWGQGTTLTVSSTRIQNPDPAVYQLRDSKSSDKSVCLFTDFDSQTNVSQSKDSDVYITDKCVLDMRSMDFKSNSAVAWSNKSDFACANAFNNSIIPEDTFFPSPESSCDVKLVEKSFETDTNLNFQILYEILLGKATLYAVLVSALVLMAMVKRKDSRG

SEQ ID NO: 13411 - protein, 620 aa, synthetic construct
MALPVTALLLPLALLLHAARPDIQMTQSPSSLSASVGDRVTITCRASQDVNTAVAWYQQKPGKAPKLLIYSASFLESGVPSRFSGSRSGTDFTLTISSLQPEDFATYYCQQHYTTPPTFGQTKVEIKRLEDLKNVFPPEVAVFEPSEAEISHTQKATLVCLATGFYPDHVELSWWVNGKEVHSGVCTDPQPLKEQPALNDSRYCLSSRLRVSATFWQNPRNHFRCQVQFYGLSENDEWTQDRAKPVTQIVSAEAWGRADCGFTSESYQQGVLSATNLSVIGFRILLLKVAGFNLLMTLRLWSSRAKRSGSGATNFSLLKQAGDVEENPGPTSMDWIWRILFLVGAATGAHSFEEVQLVESGGGLVQPGGSLRLSCAASGFNIKDTYIHWVRQAPGKGLEWVARIYPTNGYTRYADSVKGRFTISADTSKNTAYLQMNSLRAEDTAVYYCSRWGGDGFYAMDVWGQGTLVTVSSTRIQNPDPAVYQLRDSKSSDKSVCLFTDFDSQTNVSQSKDSDVYITDKCVLDMRSMDFKSNSAVAWSNKSDFACANAFNNSIIPEDTFFPSPESSCDVKLVEKSFETDTNLNFQILYEILLGKATLYAVLVSALVLMAMVKRKDSRG

SEQ ID NO: 13412 - protein, 619 aa, synthetic construct
MALPVTALLLPLALLLHAARPDQSVLTQPPSVSVAPGKTARIPCEGNYIGSSNVHWYQQKPGQAPVLVIHFDSDRPSGIPDRFSGSNSGNMATLTISRVEAGDEADYYCQVWENHGWVFGGGTKLTVLSLEDLKNVFPPEVAVFEPSEAEISHTQKATLVCLATGFYPDHVELSWWVNGKEVHSGVCTDPQPLKEQPALNDSRYCLSSRLRVSATFWQNPRNHFRCQVQFYGLSENDEWTQDRAKPVTQIVSAEAWGRADCGFTSESYQQGVLSATNLSVIGFRILLLKVAGFNLLMTLRLWSSRAKRSGSGATNFSLLKQAGDVEENPGPTSMDWIWRILFLVGAATGAHSFEEVQLVETGGGLVQPGESLRLSCAASGFTFSDYEMNWVRQAPGKGLEWVSYISSSGSTIYYADSVKGRFTIYRDNAKNSLYLQMNSLRAEDTALYYCARAWGVGPPDYWGQGTLVTVSSTRIQNPDPAVYQLRDSKSSDKSVCLFTDFDSQTNVSQSKDSDVYITDKCVLDMRSMDFKSNSAVAWSNKSDFACANAFNNSIIPEDTFFPSPESSCDVKLVEKSFETDTNLNFQILYEILLGKATLYAVLVSALVLMAMVKRKDSRG

SEQ ID NO: 13413 - protein, 627 aa, synthetic construct
MALPVTALLLPLALLLHAARPDIQMTQSPSSLSASVGDTVTITCQANGYLNWYQQRRGKAPKLLIYDGSKLERGVPSRFSGRRWGQEYNLTINNLQPEDIATYFCQVYEFVVPGTRLDLKRTVAAPLEDLKNVFPPEVAVFEPSEAEISHTQKATLVCLATGFYPDHVELSWWVNGKEVHSGVCTDPQPLKEQPALNDSRYCLSSRLRVSATFWQNPRNHFRCQVQFYGLSENDEWTQDRAKPVTQIVSAEAWGRADCGFTSESYQQGVLSATNLSVIGFRILLLKVAGFNLLMTLRLWSSRAKRSGSGATNFSLLKQAGDVEENPGPTSMDWIWRILFLVGAATGAHSFEQVQLLQSGAAVTKPGASVRVSCEASGYNIRDYFIHWWRQAPGQGLQWVGWINPKTGQPNNPRQFQGRVSLTRHASWDFDTFSFYMDLKALRSDDTAVYFCARQRSDYWDFDVWGSGTQVTVSSASTKGPTRIQNPDPAVYQLRDSKSSDKSVCLFTDFDSQTNVSQSKDSDVYITDKCVLDMRSMDFKSNSAVAWSNKSDFACANAFNNSIIPEDTFFPSPESSCDVKLVEKSFETDTNLNFQILYEILLGKATLYAVLVSALVLMAMVKRKDSRG

SEQ ID NO: 13414 - protein, 633 aa, synthetic construct
MALPVTALLLPLALLLHAARPQSALTQPPSASGSPGQSITISCTGTSNNFVSWYQQHAGKAPKLVIYDVNKRPSGVPDRFSGSKSGNTASLTVSGLQTDDEAVYYCGSLVGNWDVIFGGGTKLTVLLEDLKNVFPPEVAVFEPSEAEISHTQKATLVCLATGFYPDHVELSWWVNGKEVHSGVCTDPQPLKEQPALNDSRYCLSSRLRVSATFWQNPRNHFRCQVQFYGLSENDEWTQDRAKPVTQIVSAEAWGRADCGFTSESYQQGVLSATNLSVIGFRILLLKVAGFNLLMTLRLWSSRAKRSGSGATNFSLLKQAGDVEENPGPTSMDWIWRILFLVGAATGAHSFEQPQLQESGPTLVEASETLSLTCAVSGDSTAACNSFWGWVRQPPGKGLEWVGSLSHCASYWNRGWTYHNPSLKSRLTLALDTPKNLVFLKLNSVTAADTATYYCARFGGEVLRYTDWPKPAWVDLWGRGTLVTVSSTRIQNPDPAVYQLRDSKSSDKSVCLFTDFDSQTNVSQSKDSDVYITDKCVLDMRSMDFKSNSAVAWSNKSDFACANAFNNSIIPEDTFFPSPESSCDVKLVEKSFETDTNLNFQILYEILLGKATLYAVLVSALVLMAMVKRKDSRG

SEQ ID NO: 13415 - protein, 618 aa, synthetic construct
MALPVTALLLPLALLLHAARPEIVLTQSPGTLSLSPGETAIISCRTSQYGSLAWYQQRPGQAPRLVIYSGSTRAAGIPDRFSGSRWGPDYNLTISNLESGDFGVYYCQQYEFFGQGTKVQVDIKRLEDLKNVFPPEVAVFEPSEAEISHTQKATLVCLATGFYPDHVELSWWVNGKEVHSGVCTDPQPLKEQPALNDSRYCLSSRLRVSATFWQNPRNHFRCQVQFYGLSENDEWTQDRAKPVTQIVSAEAWGRADCGFTSESYQQGVLSATNLSVIGFRILLLKVAGFNLLMTLRLWSSRAKRSGSGATNFSLLKQAGDVEENPGPTSMDWIWRILFLVGAATGAHSFEQVQLVQSGGQMKKPGESMRISCRASGYEFIDCTLNWIRLAPGKRPEWMGWLKPRGGAVNYARPLQGRVTMTRDVYSDTAFLELRSLTVDDTAVYFCTRGKNCDYNWDFEHWGRGTPVIVSSTRIQNPDPAVYQLRDSKSSDKSVCLFTDFDSQTNVSQSKDSDVYITDKCVLDMRSMDFKSNSAVAWSNKSDFACANAFNNSIIPEDTFFPSPESSCDVKLVEKSFETDTNLNFQILYEILLGKATLYAVLVSALVLMAMVKRKDSRG

SEQ ID NO: 13416 - protein, 628 aa, synthetic construct
MALPVTALLLPLALLLHAARPELVLTQSPGTLSLSAGERATLSCRASQSVSSGSLAWYQQKPGQAPRLLIYGASTRATGIPDRFSGSGSGTDFTLTIGRLEPEDLAVYYCQQYGTSPYTFGQGTKLEILEDLKNVFPPEVAVFEPSEAEISHTQKATLVCLATGFYPDHVELSWWVNGKEVHSGVCTDPQPLKEQPALNDSRYCLSSRLRVSATFWQNPRNHFRCQVQFYGLSENDEWTQDRAKPVTQIVSAEAWGRADCGFTSESYQQGVLSATNLSVIGFRILLLKVAGFNLLMTLRLWSSRAKRSGSGATNFSLLKQAGDVEENPGPTSMDWIWRILFLVGAATGAHSFELEQSGAEVKKPGSSVQVSCKASGGTFSMYGFNWVRQAPGHGLEWMGGIIPIFGTSNYAQKFRGRVTFTADQATSTAYMELTNLRSDDTAVYYCARDFGPDWEDGDSYDGSGRGFFDFWGQGTLVTVSSTRIQNPDPAVYQLRDSKSSDKSVCLFTDFDSQTNVSQSKDSDVYITDKCVLDMRSMDFKSNSAVAWSNKSDFACANAFNNSIIPEDTFFPSPESSCDVKLVEKSFETDTNLNFQILYEILLGKATLYAVLVSALVLMAMVKRKDSRG

SEQ ID NO: 13417 - protein, 608 aa, synthetic construct
MALPVTALLLPLALLLHAARPDIQMTQSPSSLSASVGDRVTITCQASQDINNYLNWYQQKPGKAPKLLIYDASNLQTGVPSRFSGSGSGTDFTFTIEDIATYYCQQYTFGPGTKVDIKLEDLKNVFPPEVAVFEPSEAEISHTQKATLVCLATGFYPDHVELSWWVNGKEVHSGVCTDPQPLKEQPALNDSRYCLSSRLRVSATFWQNPRNHFRCQVQFYGLSENDEWTQDRAKPVTQIVSAEAWGRADCGFTSESYQQGVLSATNLSVIGFRILLLKVAGFNLLMTLRLWSSRAKRSGSGATNFSLLKQAGDVEENPGPTSMDWIWRILFLVGAATGAHSFEEVQLLESGGGLVQPGGSLRLSCAASGFTFSWYSMTWVRQAPGKGLEWVSSIVPWGDFTQYADSVKGRFTISRDNSKNTLYLQMNSLRAEDTAVYYCAKGPGWGSFDLWGRGTLVTVSSTRIQNPDPAVYQLRDSKSSDKSVCLFTDFDSQTNVSQSKDSDVYITDKCVLDMRSMDFKSNSAVAWSNKSDFACANAFNNSIIPEDTFFPSPESSCDVKLVEKSFETDTNLNFQILYEILLGKATLYAVLVSALVLMAMVKRKDSRG

SEQ ID NO: 13418 - protein, 618 aa, synthetic construct
MALPVTALLLPLALLLHAARPDIQMTQSPSSLSASVGDRVTITCTASLSVSSTYLHWYQQKPGSSPKLWIYSTSNLASGVPSRFSGSGSGTSYTLTISSLQPEDFATYYCHQYHRSPLTFGGGTKVEIKRLEDLKNVFPPEVAVFEPSEAEISHTQKATLVCLATGFYPDHVELSWWVNGKEVHSGVCTDPQPLKEQPALNDSRYCLSSRLRVSATFWQNPRNHFRCQVQFYGLSENDEWTQDRAKPVTQIVSAEAWGRADCGFTSESYQQGVLSATNLSVIGFRILLLKVAGFNLLMTLRLWSSRAKRSGSGATNFSLLKQAGDVEENPGPTSMDWIWRILFLVGAATGAHSFEEVQLVESGGGLVQPGGSLRLSCAASGFSLTKYGVHWVRQAPGKGLEWVGVKWAGGSTDYNSALMSRFTISKDNAKNSLYLQMNSLRAEDTAVYYCARDHRDAMDYWGQGTLVTVSSTRIQNPDPAVYQLRDSKSSDKSVCLFTDFDSQTNVSQSKDSDVYITDKCVLDMRSMDFKSNSAVAWSNKSDFACANAFNNSIIPEDTFFPSPESSCDVKLVEKSFETDTNLNFQILYEILLGKATLYAVLVSALVLMAMVKRKDSRG

SEQ ID NO: 13419 - protein, 622 aa, synthetic construct
MALPVTALLLPLALLLHAARPDIQMTQSPSSLSASVGDRVTITCKASQDVGTAVAWYQQKPGKAPKLLIYSASYRSTGVPSRFSGSGSGTDFTLTISSLQPEDFATYYCQHHYSAPWTFGGGTKVEIKLEDLKNVFPPEVAVFEPSEAEISHTQKATLVCLATGFYPDHVELSWWVNGKEVHSGVCTDPQPLKEQPALNDSRYCLSSRLRVSATFWQNPRNHFRCQVQFYGLSENDEWTQDRAKPVTQIVSAEAWGRADCGFTSESYQQGVLSATNLSVIGFRILLLKVAGFNLLMTLRLWSSRAKRSGSGATNFSLLKQAGDVEENPGPTSMDWIWRILFLVGAATGAHSFEEVQLVESGGGLVQPGGSLRLSCAASGFTFSRNGMSWVRQAPGKGLEWVATVSSGGSYIYYADSVKGRFTISRDNAKNSLYLQMNSLRAEDTAVYYCARQGTTALATRFFDVWGQGTLVTVSSTRIQNPDPAVYQLRDSKSSDKSVCLFTDFDSQTNVSQSKDSDVYITDKCVLDMRSMDFKSNSAVAWSNKSDFACANAFNNSIIPEDTFFPSPESSCDVKLVEKSFETDTNLNFQILYEILLGKATLYAVLVSALVLMAMVKRKDSRG

SEQ ID NO: 13420 - protein, 618 aa, synthetic construct
MALPVTALLLPLALLLHAARPDIQMTQSPPSLSASVGGKVTITCKASQDIDRYMAWYQDKPGKGPKLLIHDTSTLQPGIPSRFSGSGSGRDYSFSISNLEPEDIATYYCLQYDNLWTFGGGTKLEIKRLEDLKNVFPPEVAVFEPSEAEISHTQKATLVCLATGFYPDHVELSWWVNGKEVHSGVCTDPQPLKEQPALNDSRYCLSSRLRVSATFWQNPRNHFRCQVQFYGLSENDEWTQDRAKPVTQIVSAEAWGRADCGFTSESYQQGVLSATNLSVIGFRILLLKVAGFNLLMTLRLWSSRAKRSGSGATNFSLLKQAGDVEENPGPTSMDWIWRILFLVGAATGAHSFEQVQLVQSGAELVKPGASVKMSCKASGYIFTNYNIHWVKKSPGQGLEWIGAIYPGNGDAPYSQKFQDRATLTADTSSSTTYMELSSLTSEDSAVYYCVRANWDVAFAYWGQGTLVSVSSTRIQNPDPAVYQLRDSKSSDKSVCLFTDFDSQTNVSQSKDSDVYITDKCVLDMRSMDFKSNSAVAWSNKSDFACANAFNNSIIPEDTFFPSPESSCDVKLVEKSFETDTNLNFQILYEILLGKATLYAVLVSALVLMAMVKRKDSRG

SEQ ID NO: 13421 - protein, 619 aa, synthetic construct
MALPVTALLLPLALLLHAARPDIQMTQSPASLSASVGETVTITCRVSGNIHNYLAWYQQKQGKSPQLLVYNAKTLADGVPSRFSGSGSGTQYSLKINSLQPEDFGSYYCQHFWSNPYTFGGGTKLEIKLEDLKNVFPPEVAVFEPSEAEISHTQKATLVCLATGFYPDHVELSWWVNGKEVHSGVCTDPQPLKEQPALNDSRYCLSSRLRVSATFWQNPRNHFRCQVQFYGLSENDEWTQDRAKPVTQIVSAEAWGRADCGFTSESYQQGVLSATNLSVIGFRILLLKVAGFNLLMTLRLWSSRAKRSGSGATNFSLLKQAGDVEENPGPTSMDWIWRILFLVGAATGAHSFEQVQLQQSGASVKVSCKASELVRPGTGYAFTNYLIEWVKQRPGQGLEWIGVINPGSGGTNYNEKFKGKATLTADKSSSTAYMQLSSLTSDDSAVYFCARYRSYDWYFDVWGAGTTVTVSSTRIQNPDPAVYQLRDSKSSDKSVCLFTDFDSQTNVSQSKDSDVYITDKCVLDMRSMDFKSNSAVAWSNKSDFACANAFNNSIIPEDTFFPSPESSCDVKLVEKSFETDTNLNFQILYEILLGKATLYAVLVSALVLMAMVKRKDSRG

SEQ ID NO: 13422 - protein, 618 aa, synthetic construct
MALPVTALLLPLALLLHAARPDIQMTQSFSSLSASVGDRVTITCRASQDISNYLNWYQQKPGKAPKLLIYYTSRLHSGVPSRFSGSGSGTDYTLTISSLQPEDFATYFCQQGNTLPWTFGGGTKLEIKRLEDLKNVFPPEVAVFEPSEAEISHTQKATLVCLATGFYPDHVELSWWVNGKEVHSGVCTDPQPLKEQPALNDSRYCLSSRLRVSATFWQNPRNHFRCQVQFYGLSENDEWTQDRAKPVTQIVSAEAWGRADCGFTSESYQQGVLSATNLSVIGFRILLLKVAGFNLLMTLRLWSSRAKRSGSGATNFSLLKQAGDVEENPGPTSMDWIWRILFLVGAATGAHSFEEVQLVQSGGGLVQSGGSLRLSCRASGYTFTRYWMLWVRQRPGKGLEWVAEINPRNDRTNYNEKFKTRFTISVDRSKNTLYLQMDSLRAEDTAVYFCALGGGYAMDYWGQGTLVTVSSTRIQNPDPAVYQLRDSKSSDKSVCLFTDFDSQTNVSQSKDSDVYITDKCVLDMRSMDFKSNSAVAWSNKSDFACANAFNNSIIPEDTFFPSPESSCDVKLVEKSFETDTNLNFQILYEILLGKATLYAVLVSALVLMAMVKRKDSRG

SEQ ID NO: 13423 - protein, 619 aa, synthetic construct
MALPVTALLLPLALLLHAARPDIQMTQSPASLSASVGETVTIICRASVNIYSYLAWYQQKQGKSPQLLVYNAKILAEGVPSRFSGSGSGTQFSLKINSLQPEDFGSYYCQHHYGTFTFGSGTKLEIKRLEDLKNVFPPEVAVFEPSEAEISHTQKATLVCLATGFYPDHVELSWWVNGKEVHSGVCTDPQPLKEQPALNDSRYCLSSRLRVSATFWQNPRNHFRCQVQFYGLSENDEWTQDRAKPVTQIVSAEAWGRADCGFTSESYQQGVLSATNLSVIGFRILLLKVAGFNLLMTLRLWSSRAKRSGSGATNFSLLKQAGDVEENPGPTSMDWIWRILFLVGAATGAHSFEQVQLKESGPGLVAPSQSLSITCTISGFSLTSYGVHWVRQPPGKGLEWLVVIWSDGSTTYNSALKSRLSISKDNSKSQVFLKMNSLQTDDTAIYYCASHYGSTLAFASWGHGTLVTVSAATRIQNPDPAVYQLRDSKSSDKSVCLFTDFDSQTNVSQSKDSDVYITDKCVLDMRSMDFKSNSAVAWSNKSDFACANAFNNSIIPEDTFFPSPESSCDVKLVEKSFETDTNLNFQILYEILLGKATLYAVLVSALVLMAMVKRKDSRG

SEQ ID NO: 13424 - protein, 627 aa, synthetic construct
MALPVTALLLPLALLLHAARPDIVMTQSHKFMSTSVGDRVSVTCKASQNVGNNVAWYQQKPGQSPKVLIYSASYRYSGVPDRFTGSGSGTDFTLTISNVQSEDLAEYFCQQYNTYPFTFGSGTKLEIKLEDLKNVFPPEVAVFEPSEAEISHTQKATLVCLATGFYPDHVELSWWVNGKEVHSGVCTDPQPLKEQPALNDSRYCLSSRLRVSATFWQNPRNHFRCQVQFYGLSENDEWTQDRAKPVTQIVSAEAWGRADCGFTSESYQQGVLSATNLSVIGFRILLLKVAGFNLLMTLRLWSSRAKRSGSGATNFSLLKQAGDVEENPGPTSMDWIWRILFLVGAATGAHSFEEVQLEESGGGLVQPGGSMKLSCVASGFTFSNYWMNWVRQSPEKGLEWVAEIRFKSHNYATHFAESVKGRFTISRDDSKSSVYLQMNNLRAEDTGIYYCTRRIGNSDYDWWYFDVWGAGTSVTVSSASTRIQNPDPAVYQLRDSKSSDKSVCLFTDFDSQTNVSQSKDSDVYITDKCVLDMRSMDFKSNSAVAWSNKSDFACANAFNNSIIPEDTFFPSPESSCDVKLVEKSFETDTNLNFQILYEILLGKATLYAVLVSALVLMAMVKRKDSRG

SEQ ID NO: 13425 - protein, 620 aa, synthetic construct
MALPVTALLLPLALLLHAARPDQIVLTQSPAIMSASPGEKVTISCSASSSVSYMYWYQQKPGSSPKPWIYRTSNLASGVPARFSGSGSGTSYSLTISNMEAEDAAAYYCQQYHSYPTTFGGGTKLEVKLEDLKNVFPPEVAVFEPSEAEISHTQKATLVCLATGFYPDHVELSWWVNGKEVHSGVCTDPQPLKEQPALNDSRYCLSSRLRVSATFWQNPRNHFRCQVQFYGLSENDEWTQDRAKPVTQIVSAEAWGRADCGFTSESYQQGVLSATNLSVIGFRILLLKVAGFNLLMTLRLWSSRAKRSGSGATNFSLLKQAGDVEENPGPTSMDWIWRILFLVGAATGAHSFEEVQLVESGGGLVQPKGSLKLSCAASGFSFNTYAMNWVRQAPGKGLEWIAHIRSKSNNFATYYADSVKDRFSISRDASENILFLQMNNLKTEDTAMYYCVRQGGDFPMDYWGQGTSVTVSSTRIQNPDPAVYQLRDSKSSDKSVCLFTDFDSQTNVSQSKDSDVYITDKCVLDMRSMDFKSNSAVAWSNKSDFACANAFNNSIIPEDTFFPSPESSCDVKLVEKSFETDTNLNFQILYEILLGKATLYAVLVSALVLMAMVKRKDSRG

SEQ ID NO: 13426 - protein, 619 aa, synthetic construct
MALPVTALLLPLALLLHAARPDDIQMTQSSSSFSVSLGDRVTITCMASEDIYIRLAWYQQKPGNAPRLLISAATSLETGVPSRFSGSGSGKDYTLSITSLQTEDVGTYYCQQYWSSPWTFGGGTKLEINLEDLKNVFPPEVAVFEPSEAEISHTQKATLVCLATGFYPDHVELSWWVNGKEVHSGVCTDPQPLKEQPALNDSRYCLSSRLRVSATFWQNPRNHFRCQVQFYGLSENDEWTQDRAKPVTQIVSAEAWGRADCGFTSESYQQGVLSATNLSVIGFRILLLKVAGFNLLMTLRLWSSRAKRSGSGATNFSLLKQAGDVEENPGPTSMDWIWRILFLVGAATGAHSFEDVQLQESGPGLVKPSQSLSLTCTVTGYSITSDYTWNWIRQFPGNKLEWMGYITYSGSTSYNPSLKSRNSITRDTSKNQFFLQLNSVTTEDTATYYCARLGRRYTMDYWGQGTSVTVSSTRIQNPDPAVYQLRDSKSSDKSVCLFTDFDSQTNVSQSKDSDVYITDKCVLDMRSMDFKSNSAVAWSNKSDFACANAFNNSIIPEDTFFPSPESSCDVKLVEKSFETDTNLNFQILYEILLGKATLYAVLVSALVLMAMVKRKDSRG

SEQ ID NO: 13427 - protein, 622 aa, synthetic construct
MALPVTALLLPLALLLHAARPDDIQMTQSPSSLSASVGDRVTITCRASQSISSYLNWYQQKPGKAPKLLIYDASNLETGVPSRFSGSGSGTDFTFTISSLQPEDIATYYCQQYDNLPLTFGGGTKVDIKRLEDLKNVFPPEVAVFEPSEAEISHTQKATLVCLATGFYPDHVELSWWVNGKEVHSGVCTDPQPLKEQPALNDSRYCLSSRLRVSATFWQNPRNHFRCQVQFYGLSENDEWTQDRAKPVTQIVSAEAWGRADCGFTSESYQQGVLSATNLSVIGFRILLLKVAGFNLLMTLRLWSSRAKRSGSGATNFSLLKQAGDVEENPGPTSMDWIWRILFLVGAATGAHSFEQVQLVESGGGVVQPGRSLRLSCAASGFTFSSYAMHWVRQAPGKGLEWVAVISYDGSNKYYADSVKGRFTISRDNSKNTLYLQMNSLRAEDTAVYYCARAHNSSSWSFDYWGQGTLVTVSSTRIQNPDPAVYQLRDSKSSDKSVCLFTDFDSQTNVSQSKDSDVYITDKCVLDMRSMDFKSNSAVAWSNKSDFACANAFNNSIIPEDTFFPSPESSCDVKLVEKSFETDTNLNFQILYEILLGKATLYAVLVSALVLMAMVKRKDSRG

SEQ ID NO: 13428 - protein, 631 aa, synthetic construct
MALPVTALLLPLALLLHAARPDDVVMTQSPLSLPVSLGDQASISCRSSQRLVHSNGNTYLHWYLQKPGQSPKLLIYRVSNRFPGVPDRFSGSGSGTDFTLKISRVEAEDLGIYFCSQSTHVPYTFGGGTKLEIKRLEDLKNVFPPEVAVFEPSEAEISHTQKATLVCLATGFYPDHVELSWWVNGKEVHSGVCTDPQPLKEQPALNDSRYCLSSRLRVSATFWQNPRNHFRCQVQFYGLSENDEWTQDRAKPVTQIVSAEAWGRADCGFTSESYQQGVLSATNLSVIGFRILLLKVAGFNLLMTLRLWSSRAKRSGSGATNFSLLKQAGDVEENPGPTSMDWIWRILFLVGAATGAHSFEEVRLQQSGPDLIKPGASVKMSCKASGYTFTGYVMHWVKQRPGQGLEWIGFINPYNDDIQSNERFRGKATLTSDKSSTTAYMELSSLTSEDSAVYYCARGAGYNFDGAYRFFDFWGQGTTLTVSSTRIQNPDPAVYQLRDSKSSDKSVCLFTDFDSQTNVSQSKDSDVYITDKCVLDMRSMDFKSNSAVAWSNKSDFACANAFNNSIIPEDTFFPSPESSCDVKLVEKSFETDTNLNFQILYEILLGKATLYAVLVSALVLMAMVKRKDSRG

SEQ ID NO: 13429 - protein, 622 aa, synthetic construct
MALPVTALLLPLALLLHAARPDSYELTQPPSVSVSPGQTATISCSGDQLGGKYGHWYQKKPGQSPVLVLYQDRKRPAGIPERFSGSSSGNTITLTISGTQAVDEADYYCQAWDTNLGGVFGGGTKVTVLGQLEDLKNVFPPEVAVFEPSEAEISHTQKATLVCLATGFYPDHVELSWWVNGKEVHSGVCTDPQPLKEQPALNDSRYCLSSRLRVSATFWQNPRNHFRCQVQFYGLSENDEWTQDRAKPVTQIVSAEAWGRADCGFTSESYQQGVLSATNLSVIGFRILLLKVAGFNLLMTLRLWSSRAKRSGSGATNFSLLKQAGDVEENPGPTSMDWIWRILFLVGAATGAHSFEQVQLVESGAEVKKPGASVKVSCKASGYTFTGYYMHWVRQAPGQGLEWMGRINPNSGGTNYAQKFQGRVTMTRDTSISTAYMELSRLRSDDTAVYYCASPRGRGSAFDIWGQGTLVTVSSTRIQNPDPAVYQLRDSKSSDKSVCLFTDFDSQTNVSQSKDSDVYITDKCVLDMRSMDFKSNSAVAWSNKSDFACANAFNNSIIPEDTFFPSPESSCDVKLVEKSFETDTNLNFQILYEILLGKATLYAVLVSALVLMAMVKRKDSRG

SEQ ID NO: 13430 - protein, 625 aa, synthetic construct
MALPVTALLLPLALLLHAARPDNFMLTQPHSVSESPGKTVTISCTRSSGSIASKYVQWYQQRPGSSPTTVIYEDNQRPSGVPDRFSGSIDTSSNSASLTISGLRTEDEADYYCHSYDSNNHSVFGGGTKVTVLGQLEDLKNVFPPEVAVFEPSEAEISHTQKATLVCLATGFYPDHVELSWWVNGKEVHSGVCTDPQPLKEQPALNDSRYCLSSRLRVSATFWQNPRNHFRCQVQFYGLSENDEWTQDRAKPVTQIVSAEAWGRADCGFTSESYQQGVLSATNLSVIGFRILLLKVAGFNLLMTLRLWSSRAKRSGSGATNFSLLKQAGDVEENPGPTSMDWIWRILFLVGAATGAHSFEEVQLVESGGGVVQPGGSLRLSCAASGFTFSSYAMSWVRQAPGKGLEWVSAISGSGGSTYYADSVKGRFSISRDNSKNTLYLQMNSLRAEDTAVYYCARTRSSGAFDIWGQGTLVTVSSTRIQNPDPAVYQLRDSKSSDKSVCLFTDFDSQTNVSQSKDSDVYITDKCVLDMRSMDFKSNSAVAWSNKSDFACANAFNNSIIPEDTFFPSPESSCDVKLVEKSFETDTNLNFQILYEILLGKATLYAVLVSALVLMAMVKRKDSRG

SEQ ID NO: 13431 - protein, 620 aa, synthetic construct
MALPVTALLLPLALLLHAARPDIQMNQSPSSLSASLGDTITITCHASQNINVWLSWYQQKPGNIPKLLIYKASNLHTGVPSRFSGSGSGTGFTITISSLQPEDIATYYCQQGQSYPWTFGGGTKLEIKRLEDLKNVFPPEVAVFEPSEAEISHTQKATLVCLATGFYPDHVELSWWVNGKEVHSGVCTDPQPLKEQPALNDSRYCLSSRLRVSATFWQNPRNHFRCQVQFYGLSENDEWTQDRAKPVTQIVSAEAWGRADCGFTSESYQQGVLSATNLSVIGFRILLLKVAGFNLLMTLRLWSSRAKRSGSGATNFSLLKQAGDVEENPGPTSMDWIWRILFLVGAATGAHSFEEVQLQQSGPELVKPGASVKISCKASGYSFTGYFMNWVKQSHGKSLEYIGRFNPYNGETLYNQKFKGKATLTVDKSSSTVHMELLSVTSEDSAVYYCGRSGNDDAMDYWGQGTSVTVSSATRIQNPDPAVYQLRDSKSSDKSVCLFTDFDSQTNVSQSKDSDVYITDKCVLDMRSMDFKSNSAVAWSNKSDFACANAFNNSIIPEDTFFPSPESSCDVKLVEKSFETDTNLNFQILYEILLGKATLYAVLVSALVLMAMVKRKDSRG

SEQ ID NO: 13432 - protein, 621 aa, synthetic construct
MALPVTALLLPLALLLHAARPEIVLTQSPATLSLSPGERATLSCRASQSVRSYLAWYQQKPGQAPRLLIYDASNRATGIPARFSGSGSGTDFTLTISSLEPEDFAVYYCQQRSNWPPTFGQGTKVEIKLEDLKNVFPPEVAVFEPSEAEISHTQKATLVCLATGFYPDHVELSWWVNGKEVHSGVCTDPQPLKEQPALNDSRYCLSSRLRVSATFWQNPRNHFRCQVQFYGLSENDEWTQDRAKPVTQIVSAEAWGRADCGFTSESYQQGVLSATNLSVIGFRILLLKVAGFNLLMTLRLWSSRAKRSGSGATNFSLLKQAGDVEENPGPTSMDWIWRILFLVGAATGAHSFEQLQVQESGPGLVKPSETLSLTCTVSGGSISNSYFSWGWIRQPPGKGLEWIGSFYYGEKTYYNPSLKSRATISIDTSKSQFSLKLSSVTAADTAVYYCPRGPTMIRGVIDSWGQGTLVTVSSTRIQNPDPAVYQLRDSKSSDKSVCLFTDFDSQTNVSQSKDSDVYITDKCVLDMRSMDFKSNSAVAWSNKSDFACANAFNNSIIPEDTFFPSPESSCDVKLVEKSFETDTNLNFQILYEILLGKATLYAVLVSALVLMAMVKRKDSRG

SEQ ID NO: 13433 - protein, 630 aa, synthetic construct
MALPVTALLLPLALLLHAARPDIVMTQTPLSLPVTPGEPASISCRSSRSLLDSDDGNTYLDWYLQKPGQSPQLLIYTLSYRASGVPDRFSGSGSGTDFTLKISRVEAEDVGVYYCMQRVEFPITFGQGTRLEIKRLEDLKNVFPPEVAVFEPSEAEISHTQKATLVCLATGFYPDHVELSWWVNGKEVHSGVCTDPQPLKEQPALNDSRYCLSSRLRVSATFWQNPRNHFRCQVQFYGLSENDEWTQDRAKPVTQIVSAEAWGRADCGFTSESYQQGVLSATNLSVIGFRILLLKVAGFNLLMTLRLWSSRAKRSGSGATNFSLLKQAGDVEENPGPTSMDWIWRILFLVGAATGAHSFEQVQLVESGGGVVQPGRSLRLSCAASGFIFSRYGMHWVRQAPGKGLKWVAVIWYDGSNKLYADSVKGRFTISRDNSKNTLYLQMNSLRAEDTAVYYCARDYYDNSRHHWGFDYWGQGTLVTVSSTRIQNPDPAVYQLRDSKSSDKSVCLFTDFDSQTNVSQSKDSDVYITDKCVLDMRSMDFKSNSAVAWSNKSDFACANAFNNSIIPEDTFFPSPESSCDVKLVEKSFETDTNLNFQILYEILLGKATLYAVLVSALVLMAMVKRKDSRG

SEQ ID NO: 13434 - protein, 620 aa, synthetic construct
MALPVTALLLPLALLLHAARPEIQMTQSPSSMSASLGDTITITCQATQDIFKNLNWYQQKPGKPPSLLIYYATELAEGVPSRFSGSGSGSDYSLTISNLESEDFAAYYCLQFFEFPFTFGSGTKLEMKLEDLKNVFPPEVAVFEPSEAEISHTQKATLVCLATGFYPDHVELSWWVNGKEVHSGVCTDPQPLKEQPALNDSRYCLSSRLRVSATFWQNPRNHFRCQVQFYGLSENDEWTQDRAKPVTQIVSAEAWGRADCGFTSESYQQGVLSATNLSVIGFRILLLKVAGFNLLMTLRLWSSRAKRSGSGATNFSLLKQAGDVEENPGPTSMDWIWRILFLVGAATGAHSFEQVQLQQSGAELVRPGTSVKVSCKASGYVFTNYWIEWIKQRPGQGLEWIGVMNPGSGETTYNEKFKGKATLTADKSSSTAYMQLSSLTSVDSAVYFCARDHDRDYYAMDYWGQGTSVTVSSTRIQNPDPAVYQLRDSKSSDKSVCLFTDFDSQTNVSQSKDSDVYITDKCVLDMRSMDFKSNSAVAWSNKSDFACANAFNNSIIPEDTFFPSPESSCDVKLVEKSFETDTNLNFQILYEILLGKATLYAVLVSALVLMAMVKRKDSRG

SEQ ID NO: 13435 - protein, 617 aa, synthetic construct
MALPVTALLLPLALLLHAARPDILLTQSPAILSVSPGERVSFSCRASQNIGTSIHWYQQRTNGSPRLLIKYASESVSGIPSRFSGSGSGTDFTLSINSVESEDIADYYCQHTNSWPTTFGGGTKLEIKRLEDLKNVFPPEVAVFEPSEAEISHTQKATLVCLATGFYPDHVELSWWVNGKEVHSGVCTDPQPLKEQPALNDSRYCLSSRLRVSATFWQNPRNHFRCQVQFYGLSENDEWTQDRAKPVTQIVSAEAWGRADCGFTSESYQQGVLSATNLSVIGFRILLLKVAGFNLLMTLRLWSSRAKRSGSGATNFSLLKQAGDVEENPGPTSMDWIWRILFLVGAATGAHSFEQVQLQQSDAELVKPGASVKISCKASGYTFTDHAIHWVKQKPEQGLEWIGYFSPGNGDIKYNEKFKGKATLTADKSSSTAYMQLNSLTSEDSAVYFCKRSYGNYDYWGQGTTLTVSSTRIQNPDPAVYQLRDSKSSDKSVCLFTDFDSQTNVSQSKDSDVYITDKCVLDMRSMDFKSNSAVAWSNKSDFACANAFNNSIIPEDTFFPSPESSCDVKLVEKSFETDTNLNFQILYEILLGKATLYAVLVSALVLMAMVKRKDSRG

SEQ ID NO: 13436 - protein, 622 aa, synthetic construct
MALPVTALLLPLALLLHAARPDIVMTQSPDSLAVSLGERATINCKSSQSLLNSGDQKNYLTWYQQKPGQPPKLLIYWASTRESGVPDRFSGSGSGTDFTLTISSLQAEDVAVYYCQNDYSYPLTFGQGTKVEIKLEDLKNVFPPEVAVFEPSEAEISHTQKATLVCLATGFYPDHVELSWWVNGKEVHSGVCTDPQPLKEQPALNDSRYCLSSRLRVSATFWQNPRNHFRCQVQFYGLSENDEWTQDRAKPVTQIVSAEAWGRADCGFTSESYQQGVLSATNLSVIGFRILLLKVAGFNLLMTLRLWSSRAKRSGSGATNFSLLKQAGDVEENPGPTSMDWIWRILFLVGAATGAHSFEQVQLVQSGAEVKKTGSSVKVSCKASGYTFTDHAIHVWRQAPGQALEWMGHFSPGNTDIKYNDKFKGRVTLTVDRSMSTAYMELSSLRSEDTAMYYCKTSTFFFDYWGQGTMVTVSSTRIQNPDPAVYQLRDSKSSDKSVCLFTDFDSQTNVSQSKDSDVYITDKCVLDMRSMDFKSNSAVAWSNKSDFACANAFNNSIIPEDTFFPSPESSCDVKLVEKSFETDTNLNFQILYEILLGKATLYAVLVSALVLMAMVKRKDSRG

SEQ ID NO: 13437 - protein, 621 aa, synthetic construct
MALPVTALLLPLALLLHAARPDIQMTQSPSSLSASVGDRVTITCKASQDVSIAVAWYQQKPGKAPKVLIYSASYRYTGVPDRFSGSGSGTDFTFTISSLQPEDIAVYYCQQHYITPLTFGGGTKVEIKLEDLKNVFPPEVAVFEPSEAEISHTQKATLVCLATGFYPDHVELSWWVNGKEVHSGVCTDPQPLKEQPALNDSRYCLSSRLRVSATFWQNPRNHFRCQVQFYGLSENDEWTQDRAKPVTQIVSAEAWGRADCGFTSESYQQGVLSATNLSVIGFRILLLKVAGFNLLMTLRLWSSRAKRSGSGATNFSLLKQAGDVEENPGPTSMDWIWRILFLVGAATGAHSFEQIQLVQSGHEVKKPGASVKVSCKASGYTFTNYGMNWVRQAPGQGLEWMGWINTKTGEPTYAEEFKGRFVFSLETSASTAYLQISSLKAEDTAMYFCGRGGYGSSYWYFDVWGQGTTVTVSSTRIQNPDPAVYQLRDSKSSDKSVCLFTDFDSQTNVSQSKDSDVYITDKCVLDMRSMDFKSNSAVAWSNKSDFACANAFNNSIIPEDTFFPSPESSCDVKLVEKSFETDTNLNFQILYEILLGKATLYAVLVSALVLMAMVKRKDSRG

SEQ ID NO: 13438 - protein, 623 aa, synthetic construct
MALPVTALLLPLALLLHAARPDIVMTQSPDSLAVSLGERATINCRASKSVSTSGYSYMHWYQQKPGQPPKLLIYLASNLESGVPDRFSGSGSGTDFTLTISSLQAEDVAVYYCQHSRELPYTFGQGTKLEIKLEDLKNVFPPEVAVFEPSEAEISHTQKATLVCLATGFYPDHVELSWWVNGKEVHSGVCTDPQPLKEQPALNDSRYCLSSRLRVSATFWQNPRNHFRCQVQFYGLSENDEWTQDRAKPVTQIVSAEAWGRADCGFTSESYQQGVLSATNLSVIGFRILLLKVAGFNLLMTLRLWSSRAKRSGSGATNFSLLKQAGDVEENPGPTSMDWIWRILFLVGAATGAHSFEQVQLQESGPGLVKPSETLSLTCTVSGGSISSYGVHWIRQPPGKGLEWIGVIWTSGVTDYNSALMGRVTISVDTSKNQFSLKLSSVTAADTAVYYCARDGDYDRYTMDYWGQGTLVTVSSTRIQNPDPAVYQLRDSKSSDKSVCLFTDFDSQTNVSQSKDSDVYITDKCVLDMRSMDFKSNSAVAWSNKSDFACANAFNNSIIPEDTFFPSPESSCDVKLVEKSFETDTNLNFQILYEILLGKATLYAVLVSALVLMAMVKRKDSRG

SEQ ID NO: 13439 - protein, 623 aa, synthetic construct
MALPVTALLLPLALLLHAARPDIQMTQSPSSLSASVGDRVTITCRASQSIGTSLHWYQQKPGKAPKLLIKFASRLQSGVPSRFSGSGSGTDFTLTISSLQPEDFATYYCQQSPGFPPTFGQGTKLEIKRLEDLKNVFPPEVAVFEPSEAEISHTQKATLVCLATGFYPDHVELSWWVNGKEVHSGVCTDPQPLKEQPALNDSRYCLSSRLRVSATFWQNPRNHFRCQVQFYGLSENDEWTQDRAKPVTQIVSAEAWGRADCGFTSESYQQGVLSATNLSVIGFRILLLKVAGFNLLMTLRLWSSRAKRSGSGATNFSLLKQAGDVEENPGPTSMDWIWRILFLVGAATGAHSFEQVQLVESGGGLVKPGGSLRLSCAASGFSITTSGYYWTWIRQFPGKGLEWMGYIGYNSKTYYNPALKSRITISRDNAKNSLYLQMNSLRAEDTAVYYCARSLYGGYKDAFDSWGQGTLVTVSSTRIQNPDPAVYQLRDSKSSDKSVCLFTDFDSQTNVSQSKDSDVYITDKCVLDMRSMDFKSNSAVAWSNKSDFACANAFNNSIIPEDTFFPSPESSCDVKLVEKSFETDTNLNFQILYEILLGKATLYAVLVSALVLMAMVKRKDSRG

SEQ ID NO: 13440 - protein, 628 aa, synthetic construct
MALPVTALLLPLALLLHAARPDEIVLTQSPLSLPVTPGEPASISCRSSQSLLHSIGYNYLDWYLQKPGQSPQLLIYLGSNRASGVPDRFSGSGSGTDFTLKISRVEAEDVGVYYCMQALQTPLTFGGGTKVEIKRLEDLKNVFPPEVAVFEPSEAEISHTQKATLVCLATGFYPDHVELSWWVNGKEVHSGVCTDPQPLKEQPALNDSRYCLSSRLRVSATFWQNPRNHFRCQVQFYGLSENDEWTQDRAKPVTQIVSAEAWGRADCGFTSESYQQGVLSATNLSVIGFRILLLKVAGFNLLMTLRLWSSRAKRSGSGATNFSLLKQAGDVEENPGPTSMDWIWRILFLVGAATGAHSFEEVQLVESGGGVVQPGRSLRLSCAASGFTFRSYGMHWVRQAPGKGLEWVAVISYDGSNKYYTDSVNGRFTISRDNSKNTLYLQMNSLRAEDTAVYYCARGGGYYETSGPDYWGQGTLVTVSSTRIQNPDPAVYQLRDSKSSDKSVCLFTDFDSQTNVSQSKDSDVYITDKCVLDMRSMDFKSNSAVAWSNKSDFACANAFNNSIIPEDTFFPSPESSCDVKLVEKSFETDTNLNFQILYEILLGKATLYAVLVSALVLMAMVKRKDSRG

SEQ ID NO: 13441 - protein, 626 aa, synthetic construct
MALPVTALLLPLALLLHAARPDDVVMTQSPLSLPVTPGEPASISCRSSQSLLHSIGYNYLHWFLQKPGQSPQLLIYLGSNRASGVPDRFSGSGSGTDFTLKISRVEAEDVGVYYCMQALQTPPTFGQGTRLEIKRLEDLKNVFPPEVAVFEPSEAEISHTQKATLVCLATGFYPDHVELSWWVNGKEVHSGVCTDPQPLKEQPALNDSRYCLSSRLRVSATFWQNPRNHFRCQVQFYGLSENDEWTQDRAKPVTQIVSAEAWGRADCGFTSESYQQGVLSATNLSVIGFRILLLKVAGFNLLMTLRLWSSRAKRSGSGATNFSLLKQAGDVEENPGPTSMDWIWRILFLVGAATGAHSFEQLQLQESGPGLVKPSGTLSLTCAVSGGSISSSNWWSWVRQPPGKGLEWIGEIYHSGSTNYNPSLKSRVTISVDKSKNQFSLKLSSVTAADTAVYYCVGSPYGDYVLDYWGQGTLVTVSSTRIQNPDPAVYQLRDSKSSDKSVCLFTDFDSQTNVSQSKDSDVYITDKCVLDMRSMDFKSNSAVAWSNKSDFACANAFNNSIIPEDTFFPSPESSCDVKLVEKSFETDTNLNFQILYEILLGKATLYAVLVSALVLMAMVKRKDSRG

SEQ ID NO: 13442 - protein, 624 aa, synthetic construct
MALPVTALLLPLALLLHAARPDEIVLTQSPGTLSLSLGERATLSCRASQSISSSFLAWYQQKPGQAPKLLIYAASTRATGIPDRFSGSGSGTDFTLTISRLEPEDFAVYYCQQYGRSLSFGGGTKVEVKLEDLKNVFPPEVAVFEPSEAEISHTQKATLVCLATGFYPDHVELSWWVNGKEVHSGVCTDPQPLKEQPALNDSRYCLSSRLRVSATFWQNPRNHFRCQVQFYGLSENDEWTQDRAKPVTQIVSAEAWGRADCGFTSESYQQGVLSATNLSVIGFRILLLKVAGFNLLMTLRLWSSRAKRSGSGATNFSLLKQAGDVEENPGPTSMDWIWRILFLVGAATGAHSFEQVQLQQSGPGLVKPSQTLSLTCAISGDSVSGNSATWNWIRQSPSRGLEWLGRTYYRSKWNHDYAESVKSRITINPDTSKNQFSLQLNSVTPEDTAVYYCARGDSSSWYAFDYWGQGTLVTVSSTRIQNPDPAVYQLRDSKSSDKSVCLFTDFDSQTNVSQSKDSDVYITDKCVLDMRSMDFKSNSAVAWSNKSDFACANAFNNSIIPEDTFFPSPESSCDVKLVEKSFETDTNLNFQILYEILLGKATLYAVLVSALVLMAMVKRKDSRG

SEQ ID NO: 13443 - protein, 623 aa, synthetic construct
MALPVTALLLPLALLLHAARPDQSVVTQPPSVSVAPGKTARITCGRNNIGSKSVHWYQQKPGQAPVLVVYDDSDRPSGIPERFSGSNSGNTATLTISRVEAGDEADYYCQVWDSSSDHVVFGGGTKLTVLGLEDLKNVFPPEVAVFEPSEAEISHTQKATLVCLATGFYPDHVELSWWVNGKEVHSGVCTDPQPLKEQPALNDSRYCLSSRLRVSATFWQNPRNHFRCQVQFYGLSENDEWTQDRAKPVTQIVSAEAWGRADCGFTSESYQQGVLSATNLSVIGFRILLLKVAGFNLLMTLRLWSSRAKRSGSGATNFSLLKQAGDVEENPGPTSMDWIWRILFLVGAATGAHSFEVQLVQSGGGVMRPGGSLRLSCAASGFTFDDYGMSWVRQAPGKGLEWVSGINWNGGSTGYADSVRGRFTISRDNAKNSLYLQMNSLRAEDTALYYCARERGYGYHDPHDYWGQGTLVTVSSTRIQNPDPAVYQLRDSKSSDKSVCLFTDFDSQTNVSQSKDSDVYITDKCVLDMRSMDFKSNSAVAWSNKSDFACANAFNNSIIPEDTFFPSPESSCDVKLVEKSFETDTNLNFQILYEILLGKATLYAVLVSALVLMAMVKRKDSRG

SEQ ID NO: 13444 - protein, 636 aa, synthetic construct
MALPVTALLLPLALLLHAARPEQKLISEEDLEFQAVVTQPPSASGTPGQRVTISCSGSSSNIGSNTVNWYQQVPGTAPKLLIYSNNQRPSGVPDRFSGSKSGTSASLAISGLQSEDEADYYCAAWDDSLNGWVFGGGTKLTVLLEDLKNVFPPEVAVFEPSEAEISHTQKATLVCLATGFYPDHVELSWWVNGKEVHSGVCTDPQPLKEQPALNDSRYCLSSRLRVSATFWQNPRNHFRCQVQFYGLSENDEWTQDRAKPVTQIVSAEAWGRADCGFTSESYQQGVLSATNLSVIGFRILLLKVAGFNLLMTLRLWSSRAKRSGSGATNFSLLKQAGDVEENPGPTSMDWIWRILFLVGAATGAHSFEQMQLVQSGAEVKEPGESLRISCKGSGYSFTNFWISWVRQMPGKGLEWMGRVDPGYSYSTYSPSFQGHVTISADKSTSTAYLQWNSLKASDTAMYYCARVQYSGYYDWFDPWGQGTLVTVSSTRIQNPDPAVYQLRDSKSSDKSVCLFTDFDSQTNVSQSKDSDVYITDKCVLDMRSMDFKSNSAVAWSNKSDFACANAFNNSIIPEDTFFPSPESSCDVKLVEKSFETDTNLNFQILYEILLGKATLYAVLVSALVLMAMVKRKDSRG

SEQ ID NO: 13445 - protein, 630 aa, synthetic construct
MALPVTALLLPLALLLHAARPEQKLISEEDLEFDIQMTQSPSTLSASVGDRVTITCRASQNINKWLAWYQQRPGKAPQLLIYKASSLESGVPSRFSGSGSGTEYTLTISSLQPDDFATYYCQQYNSYATFGQGTKVEIKRLEDLKNVFPPEVAVFEPSEAEISHTQKATLVCLATGFYPDHVELSWWVNGKEVHSGVCTDPQPLKEQPALNDSRYCLSSRLRVSATFWQNPRNHFRCQVQFYGLSENDEWTQDRAKPVTQIVSAEAWGRADCGFTSESYQQGVLSATNLSVIGFRILLLKVAGFNLLMTLRLWSSRAKRSGSGATNFSLLKQAGDVEENPGPTSMDWIWRILFLVGAATGAHSFEQVQLVQSGAEVKKPGESLKISCKGSGYNFSNKWIGWVRQLPGRGLEWIAIIYPGYSDITYSPSFQGRVTISADTSINTAYLHWHSLKASDTAMYYCVRHTALAGFDYWGLGTLVTVSSTRIQNPDPAVYQLRDSKSSDKSVCLFTDFDSQTNVSQSKDSDVYITDKCVLDMRSMDFKSNSAVAWSNKSDFACANAFNNSIIPEDTFFPSPESSCDVKLVEKSFETDTNLNFQILYEILLGKATLYAVLVSALVLMAMVKRKDSRG

SEQ ID NO: 13446 - protein, 621 aa, synthetic construct
MALPVTALLLPLALLLHAARPIVLTQSPASLAVSLGQRATISCRASESVDNYGNTFMHWYQQKPGQPPKLLIYRASNLESGIPARFSGSGSRTDFTLTINPVEADDVATYYCQQSNEDPPTFGAGTKLELKLEDLKNVFPPEVAVFEPSEAEISHTQKATLVCLATGFYPDHVELSWWVNGKEVHSGVCTDPQPLKEQPALNDSRYCLSSRLRVSATFWQNPRNHFRCQVQFYGLSENDEWTQDRAKPVTQIVSAEAWGRADCGFTSESYQQGVLSATNLSVIGFRILLLKVAGFNLLMTLRLWSSRAKRSGSGATNFSLLKQAGDVEENPGPTSMDWIWRILFLVGAATGAHSFEQIQLVQSGPELKKPGETVKISCKASGYIFTNYGMNWVKQAPGKSFKWMGWINTYTGESTYSADFKGRFAFSLETSASTAYLHINDLKNEDTATYFCARSGGYDPMDYWGQGTSVTVSSTRIQNPDPAVYQLRDSKSSDKSVCLFTDFDSQTNVSQSKDSDVYITDKCVLDMRSMDFKSNSAVAWSNKSDFACANAFNNSIIPEDTFFPSPESSCDVKLVEKSFETDTNLNFQILYEILLGKATLYAVLVSALVLMAMVKRKDSRG

SEQ ID NO: 13447 - protein, 620 aa, synthetic construct
MALPVTALLLPLALLLHAARPEIVLTQSPGTLSLSPGERATLSCRASQSVSNTYLAWYHQRPGQAPRLLIYGASSRATGIPDRFSGSGSGTDFALTISSLEPEDFAVYYCQQYSNSWTFGQGTKVEIKRLEDLKNVFPPEVAVFEPSEAEISHTQKATLVCLATGFYPDHVELSWWVNGKEVHSGVCTDPQPLKEQPALNDSRYCLSSRLRVSATFWQNPRNHFRCQVQFYGLSENDEWTQDRAKPVTQIVSAEAWGRADCGFTSESYQQGVLSATNLSVIGFRILLLKVAGFNLLMTLRLWSSRAKRSGSGATNFSLLKQAGDVEENPGPTSMDWIWRILFLVGAATGAHSFEQVQLVESGGGVVQPGRSLRLSCAASGFTFSSYDMHWVRQAPGKGLEWVAVISYDGTNEYYADSVKGRFTISRDTSKNTLYLQMNSLRAEDTAVYYCARERYFDWSFDYWGQGTLVSVSSTRIQNPDPAVYQLRDSKSSDKSVCLFTDFDSQTNVSQSKDSDVYITDKCVLDMRSMDFKSNSAVAWSNKSDFACANAFNNSIIPEDTFFPSPESSCDVKLVEKSFETDTNLNFQILYEILLGKATLYAVLVSALVLMAMVKRKDSRG

SEQ ID NO: 13448 - protein, 619 aa, synthetic construct
MALPVTALLLPLALLLHAARPELTQDPAVSVALGQTVRITCQGDSLRSNYANWYQQKPGQAPVLVIYGQNNRPSGIPDRFSGSSSGNTASLTITGAQAADEADYYCDSRVSTGNHVVFGGGTKLTVLGQLEDLKNVFPPEVAVFEPSEAEISHTQKATLVCLATGFYPDHVELSWWVNGKEVHSGVCTDPQPLKEQPALNDSRYCLSSRLRVSATFWQNPRNHFRCQVQFYGLSENDEWTQDRAKPVTQIVSAEAWGRADCGFTSESYQQGVLSATNLSVIGFRILLLKVAGFNLLMTLRLWSSRAKRSGSGATNFSLLKQAGDVEENPGPTSMDWIWRILFLVGAATGAHSFEEVQLVQSGAEVKKPGASVKVSCKASGYTFTSYAMHWVRQAPGQRLEWMGWINAGNGNTKYSQKFQGRVTITRDTSASTAYMELSSLRSEDTAVYYCARDISYGSFDYWGQGTLVTVSSTRIQNPDPAVYQLRDSKSSDKSVCLFTDFDSQTNVSQSKDSDVYITDKCVLDMRSMDFKSNSAVAWSNKSDFACANAFNNSIIPEDTFFPSPESSCDVKLVEKSFETDTNLNFQILYEILLGKATLYAVLVSALVLMAMVKRKDSRG

SEQ ID NO: 13449 - protein, 621 aa, synthetic construct
MALPVTALLLPLALLLHAARPDIVLTQTPATLSVTPGDSVSLSCRASQSISNNLHWYQQKSHESPRLLIKNASQSISGIPSKFSGSGSGTDFTLRINSVETEDFGMYFCQQSNSWPYTFGSGTKLEIKLEDLKNVFPPEVAVFEPSEAEISHTQKATLVCLATGFYPDHVELSWWVNGKEVHSGVCTDPQPLKEQPALNDSRYCLSSRLRVSATFWQNPRNHFRCQVQFYGLSENDEWTQDRAKPVTQIVSAEAWGRADCGFTSESYQQGVLSATNLSVIGFRILLLKVAGFNLLMTLRLWSSRAKRSGSGATNFSLLKQAGDVEENPGPTSMDWIWRILFLVGAATGAHSFEQVKLQQSGPELVKPGASVKISCKASGYSFTGYYMHWVKQSHGNILDWIGYIYPYNGVSSYNQKFKGKATLTVDKSSSTAYMELRSLTSEDSAVYYCARERGLYQLRAMDYWGQGTSVTVSSTRIQNPDPAVYQLRDSKSSDKSVCLFTDFDSQTNVSQSKDSDVYITDKCVLDMRSMDFKSNSAVAWSNKSDFACANAFNNSIIPEDTFFPSPESSCDVKLVEKSFETDTNLNFQILYEILLGKATLYAVLVSALVLMAMVKRKDSRG

SEQ ID NO: 13450 - protein, 612 aa, synthetic construct
MALPVTALLLPLALLLHAARPDIVMTQTPAIMSASPGQKVTITCSASSSVNYMHWYQQKLGSSPKLWIYDTSKLAPGVPARFSGSGSGTSYSLTISSMEAEDAASYFCHQWSSYPYTFGSGTKLEIKLEDLKNVFPPEVAVFEPSEAEISHTQKATLVCLATGFYPDHVELSWWVNGKEVHSGVCTDPQPLKEQPALNDSRYCLSSRLRVSATFWQNPRNHFRCQVQFYGLSENDEWTQDRAKPVTQIVSAEAWGRADCGFTSESYQQGVLSATNLSVIGFRILLLKVAGFNLLMTLRLWSSRAKRSGSGATNFSLLKQAGDVEENPGPTSMDWIWRILFLVGAATGAHSFEEVQLQESGPDLVKPSQSLSLTCTVTGYSITSGYGWHWIRQFPGNKLEWMGYIHYSGSTTYNPSLKSRISISRDTSKNQFFLQLNSVTTEDTATYYCARSLRYWGQGTTLTVSSTRIQNPDPAVYQLRDSKSSDKSVCLFTDFDSQTNVSQSKDSDVYITDKCVLDMRSMDFKSNSAVAWSNKSDFACANAFNNSIIPEDTFFPSPESSCDVKLVEKSFETDTNLNFQILYEILLGKATLYAVLVSALVLMAMVKRKDSRG

SEQ ID NO: 13451 - protein, 615 aa, synthetic construct
MALPVTALLLPLALLLHAARPDIQMTQSPSSLSASVGDRVTITCSATSSISYMHWYQQKPGKAPKGWIYDTSKLAHGVPSRFSGSGSGTDFTLTISSLQPEDFATYYCHQRRSYPFTFGQGTKVEIKLEDLKNVFPPEVAVFEPSEAEISHTQKATLVCLATGFYPDHVELSWWVNGKEVHSGVCTDPQPLKEQPALNDSRYCLSSRLRVSATFWQNPRNHFRCQVQFYGLSENDEWTQDRAKPVTQIVSAEAWGRADCGFTSESYQQGVLSATNLSVIGFRILLLKVAGFNLLMTLRLWSSRAKRSGSGATNFSLLKQAGDVEENPGPTSMDWIWRILFLVGAATGAHSFEEVQLVQSGAEVKKPGASVKVSCKASGYTFTNFWIHWVRQAPGQGLEWIGEIDPSDSYTNYNQKFKGRVTITRDTSTSTAYLELSSLRSEDTAVYYCAREITTVDYWGQGTLVTVSSTRIQNPDPAVYQLRDSKSSDKSVCLFTDFDSQTNVSQSKDSDVYITDKCVLDMRSMDFKSNSAVAWSNKSDFACANAFNNSIIPEDTFFPSPESSCDVKLVEKSFETDTNLNFQILYEILLGKATLYAVLVSALVLMAMVKRKDSRG

SEQ ID NO: 13452 - protein, 622 aa, synthetic construct
MALPVTALLLPLALLLHAARPDIQMTQSPSSLSASVGDRVTITCKASQGFNKYVAWYQQKPGKAPKLLIYYTSTLQPGVPSRFSGSGSGRDYTLTISSLQPEDFATYYCLQYGNLLYAFGQGTKVEIKRLEDLKNVFPPEVAVFEPSEAEISHTQKATLVCLATGFYPDHVELSWWVNGKEVHSGVCTDPQPLKEQPALNDSRYCLSSRLRVSATFWQNPRNHFRCQVQFYGLSENDEWTQDRAKPVTQIVSAEAWGRADCGFTSESYQQGVLSATNLSVIGFRILLLKVAGFNLLMTLRLWSSRAKRSGSGATNFSLLKQAGDVEENPGPTSMDWIWRILFLVGAATGAHSFEEVQLVQSGAEVKKPGASVKVSCKASGYTFTSYWIGWVRQAPGQGLEWIGDIYPGGGYTNYNEKFKGRVTITRDTSTSTAYLELSSLRSEDTAVYYCARLDGSSYRGAMDSWGQGTLVTVSSTRIQNPDPAVYQLRDSKSSDKSVCLFTDFDSQTNVSQSKDSDVYITDKCVLDMRSMDFKSNSAVAWSNKSDFACANAFNNSIIPEDTFFPSPESSCDVKLVEKSFETDTNLNFQILYEILLGKATLYAVLVSALVLMAMVKRKDSRG

SEQ ID NO: 13453 - protein, 618 aa, synthetic construct
MALPVTALLLPLALLLHAARPDIQMTQSPSSLSASVGDRVTITCRASQDIRYYLNWYQQKPGKAPKLLIYVASSLQSGVPSRFSGSGSGTEFTLTVSSLQPEDFATYYCLQVYSTPRTFGQGTKVEIKLEDLKNVFPPEVAVFEPSEAEISHTQKATLVCLATGFYPDHVELSWWVNGKEVHSGVCTDPQPLKEQPALNDSRYCLSSRLRVSATFWQNPRNHFRCQVQFYGLSENDEWTQDRAKPVTQIVSAEAWGRADCGFTSESYQQGVLSATNLSVIGFRILLLKVAGFNLLMTLRLWSSRAKRSGSGATNFSLLKQAGDVEENPGPTSMDWIWRILFLVGAATGAHSFEEVQLVESGGGLAKPGGSLRLSCAASGFRFTFNNYYMDWVRQAPGQGLEWVSRISSSGDPTWYADSVKGRFTISRENAKNTLFLQMNSLRAEDTAVYYCASLTTGSDSWGQGVLVTVSSTRIQNPDPAVYQLRDSKSSDKSVCLFTDFDSQTNVSQSKDSDVYITDKCVLDMRSMDFKSNSAVAWSNKSDFACANAFNNSIIPEDTFFPSPESSCDVKLVEKSFETDTNLNFQILYEILLGKATLYAVLVSALVLMAMVKRKDSRG

SEQ ID NO: 13454 - protein, 619 aa, synthetic construct
MALPVTALLLPLALLLHAARPEIVMTQSPATLSVSPGERATLSCRASQSVSRNLAWYQQKPGQAPRLLIYGASTRATGIPARFSGSGSGTEFTLTIGSLQSEDFAVYYCQQYKTWPRTFGQGTNVEIKLEDLKNVFPPEVAVFEPSEAEISHTQKATLVCLATGFYPDHVELSWWVNGKEVHSGVCTDPQPLKEQPALNDSRYCLSSRLRVSATFWQNPRNHFRCQVQFYGLSENDEWTQDRAKPVTQIVSAEAWGRADCGFTSESYQQGVLSATNLSVIGFRILLLKVAGFNLLMTLRLWSSRAKRSGSGATNFSLLKQAGDVEENPGPTSMDWIWRILFLVGAATGAHSFEQVQLQQWGAGLLKPSETLSLTCAVFGGSFSGYYWSWIRQPPGKGLEWIGEINHRGNTNDNPSLKSRVTISVDTSKNQFALKLSSVTAADTAVYYCARERGYTYGNFDHWGQGTLVTVSSTRIQNPDPAVYQLRDSKSSDKSVCLFTDFDSQTNVSQSKDSDVYITDKCVLDMRSMDFKSNSAVAWSNKSDFACANAFNNSIIPEDTFFPSPESSCDVKLVEKSFETDTNLNFQILYEILLGKATLYAVLVSALVLMAMVKRKDSRG

SEQ ID NO: 13455 - protein, 620 aa, synthetic construct
MALPVTALLLPLALLLHAARPEIVMTPSSATLSVSPGERATLSCRASQSVSRNLAWYQQKPGQAPRLLIYGASTRATGIPARFSGSGSGTEFTLTISSLQSEDFAVYYCHQYSNWMCSFGQGTKLEIKLEDLKNVFPPEVAVFEPSEAEISHTQKATLVCLATGFYPDHVELSWWVNGKEVHSGVCTDPQPLKEQPALNDSRYCLSSRLRVSATFWQNPRNHFRCQVQFYGLSENDEWTQDRAKPVTQIVSAEAWGRADCGFTSESYQQGVLSATNLSVIGFRILLLKVAGFNLLMTLRLWSSRAKRSGSGATNFSLLKQAGDVEENPGPTSMDWIWRILFLVGAATGAHSFEEVQLLESGGGLVQPGGSLRLSCAASGFTFSRYAMNWVRQAPGKGLEWVSGISGSGGRTYYADSVKGRFTISRDNSKNTLYLQMNSLRAEDTAVYYCAKDRDFWSGPFDYWGQGTLVTVSSTRIQNPDPAVYQLRDSKSSDKSVCLFTDFDSQTNVSQSKDSDVYITDKCVLDMRSMDFKSNSAVAWSNKSDFACANAFNNSIIPEDTFFPSPESSCDVKLVEKSFETDTNLNFQILYEILLGKATLYAVLVSALVLMAMVKRKDSRG

SEQ ID NO: 13456 - protein, 625 aa, synthetic construct
MALPVTALLLPLALLLHAARPDIQMTQSPSSLSASVGDRVTITCKASKNIRSYLAWYQQKPGKAPKLLIYSGSTLHSGVPSRFSGSGSGTDFTLTISSLQPEDFATYYCQQHHEYPLTFGQGTKVEIKRLEDLKNVFPPEVAVFEPSEAEISHTQKATLVCLATGFYPDHVELSWWVNGKEVHSGVCTDPQPLKEQPALNDSRYCLSSRLRVSATFWQNPRNHFRCQVQFYGLSENDEWTQDRAKPVTQIVSAEAWGRADCGFTSESYQQGVLSATNLSVIGFRILLLKVAGFNLLMTLRLWSSRAKRSGSGATNFSLLKQAGDVEENPGPTSMDWIWRILFLVGAATGAHSFEQVQLQESGPGLVKPSETLSLTCTVSGYTITSGYDWSWIRQPPGKGLEWIGYINYGGSTNYKPSLGSRVTISVDTSKNQFSLKLSSVTAADTAVYYCARYNEYKSYIYDWYFDFWGQGTLVTVSSTRIQNPDPAVYQLRDSKSSDKSVCLFTDFDSQTNVSQSKDSDVYITDKCVLDMRSMDFKSNSAVAWSNKSDFACANAFNNSIIPEDTFFPSPESSCDVKLVEKSFETDTNLNFQILYEILLGKATLYAVLVSALVLMAMVKRKDSRG

SEQ ID NO: 13457 - protein, 627 aa, synthetic construct
MALPVTALLLPLALLLHAARPQSVVTQPPSVSAAPGQKVTISCSGSSSNIGNNYVSWYQQLPGTAPKLLIYDNNKRPSGIPDRFSGSKSGTSATLGITGLQTGDEADYYCGTWDGSLYTMLFGGGTKLTVLLEDLKNVFPPEVAVFEPSEAEISHTQKATLVCLATGFYPDHVELSWWVNGKEVHSGVCTDPQPLKEQPALNDSRYCLSSRLRVSATFWQNPRNHFRCQVQFYGLSENDEWTQDRAKPVTQIVSAEAWGRADCGFTSESYQQGVLSATNLSVIGFRILLLKVAGFNLLMTLRLWSSRAKRSGSGATNFSLLKQAGDVEENPGPTSMDWIWRILFLVGAATGAHSFEEVQLVESGGGLVKPGGSLRLSCAASGFTFSNAWMSWVRQAPGKGLEWVGFIRSKAYGGTTEYAASVKGRFTISRDDSKSIAYLQMNNLKTEDTAVYYCARDGLYSSSWYDSDYWGQGTLVTVSSTRIQNPDPAVYQLRDSKSSDKSVCLFTDFDSQTNVSQSKDSDVYITDKCVLDMRSMDFKSNSAVAWSNKSDFACANAFNNSIIPEDTFFPSPESSCDVKLVEKSFETDTNLNFQILYEILLGKATLYAVLVSALVLMAMVKRKDSRG

SEQ ID NO: 13458 - protein, 632 aa, synthetic construct
MALPVTALLLPLALLLHAARPQSVLTQPPSVSGAPGQRVTISCTGSSSNIGAGYDVHWYQQLPGTAPKLLIFGNSNRPSGVPDRFSGFKSGTSASLAITGLQAEDEADYFCQSYDSSLSGSGVFGTGTKVTVLGLEDLKNVFPPEVAVFEPSEAEISHTQKATLVCLATGFYPDHVELSWWVNGKEVHSGVCTDPQPLKEQPALNDSRYCLSSRLRVSATFWQNPRNHFRCQVQFYGLSENDEWTQDRAKPVTQIVSAEAWGRADCGFTSESYQQGVLSATNLSVIGFRILLLKVAGFNLLMTLRLWSSRAKRSGSGATNFSLLKQAGDVEENPGPTSMDWIWRILFLVGAATGAHSFEQMQLVQSGGGLVQPGRSLRLSCAASGFTFDDYAMHWVRQAPGKGLEWVSGISWNSGSIGYADSVKGRFTISRDNAKNSLYLQMNSLRAEDTALYYCAKDIHSGSYYGLLYYAMDVWGQGTTVTVSSTRIQNPDPAVYQLRDSKSSDKSVCLFTDFDSQTNVSQSKDSDVYITDKCVLDMRSMDFKSNSAVAWSNKSDFACANAFNNSIIPEDTFFPSPESSCDVKLVEKSFETDTNLNFQILYEILLGKATLYAVLVSALVLMAMVKRKDSRG

SEQ ID NO: 13459 - protein, 632 aa, synthetic construct
MALPVTALLLPLALLLHAARPLPVLTQPPSASGTPGQRVTISCSGRSSNIGSNSVNWYRQLPGAAPKLLIYSNNQRPPGVPVRFSGSKSGTSASLAISGLQSEDEATYYCATWDDNLNVHYVFGTGTKVTVLGSRLEDLKNVFPPEVAVFEPSEAEISHTQKATLVCLATGFYPDHVELSWWVNGKEVHSGVCTDPQPLKEQPALNDSRYCLSSRLRVSATFWQNPRNHFRCQVQFYGLSENDEWTQDRAKPVTQIVSAEAWGRADCGFTSESYQQGVLSATNLSVIGFRILLLKVAGFNLLMTLRLWSSRAKRSGSGATNFSLLKQAGDVEENPGPTSMDWIWRILFLVGAATGAHSFELEMAQVQLVQSGAEVKKPGSSVKVSCKASGGTFSSYAISWVRQAPGQGLEWMGRIIPILGIANYAQKFQGRVTITADKSTSTAYMELSSLRSEDTAVYYCARGGYYSHDMWSEDWGQGTLVTVSSTRIQNPDPAVYQLRDSKSSDKSVCLFTDFDSQTNVSQSKDSDVYITDKCVLDMRSMDFKSNSAVAWSNKSDFACANAFNNSIIPEDTFFPSPESSCDVKLVEKSFETDTNLNFQILYEILLGKATLYAVLVSALVLMAMVKRKDSRG

SEQ ID NO: 13460 - protein, 626 aa, synthetic construct
MALPVTALLLPLALLLHAARPDFVMTQSPDSLAVSLGERVTMSCKSSQSLLNSGNQKNYLTWYQQKPGQPPKLLIYWASTRESGVPDRFSGSGSGTDFTLTISSLQAEDVAVYYCQNDYSYPYTFGQGTKLEIKLEDLKNVFPPEVAVFEPSEAEISHTQKATLVCLATGFYPDHVELSWWVNGKEVHSGVCTDPQPLKEQPALNDSRYCLSSRLRVSATFWQNPRNHFRCQVQFYGLSENDEWTQDRAKPVTQIVSAEAWGRADCGFTSESYQQGVLSATNLSVIGFRILLLKVAGFNLLMTLRLWSSRAKRSGSGATNFSLLKQAGDVEENPGPTSMDWIWRILFLVGAATGAHSFEEVQLVQSGAELKKPGASVKVSCKASGYTFTDYYMKWVRQAPGQGLEWIGDIIPSNGATFYNQKFKGRVTITVDKSTSTAYMELSSLRSEDTAVYYCARSHLLRASWFAYWGQGTLVTVSSTRIQNPDPAVYQLRDSKSSDKSVCLFTDFDSQTNVSQSKDSDVYITDKCVLDMRSMDFKSNSAVAWSNKSDFACANAFNNSIIPEDTFFPSPESSCDVKLVEKSFETDTNLNFQILYEILLGKATLYAVLVSALVLMAMVKRKDSRG

SEQ ID NO: 13461 - protein, 626 aa, synthetic construct
MALPVTALLLPLALLLHAARPDFVMTQSPDSLAVSLGERVTMSCKSSQSLLNSGNQKNYLTWYQQKPGQPPKLLIYWASTRESGVPDRFSGSGSGTDFTLTISSLQAEDVAVYYCQNDYSYPYTFGQGTKLEIKLEDLKNVFPPEVAVFEPSEAEISHTQKATLVCLATGFYPDHVELSWWVNGKEVHSGVCTDPQPLKEQPALNDSRYCLSSRLRVSATFWQNPRNHFRCQVQFYGLSENDEWTQDRAKPVTQIVSAEAWGRADCGFTSESYQQGVLSATNLSVIGFRILLLKVAGFNLLMTLRLWSSRAKRSGSGATNFSLLKQAGDVEENPGPTSMDWIWRILFLVGAATGAHSFEQVQLVQSGAELKKPGASVKVSCKASGYTFTDYYMKWVRQAPGQGLEWIGDIIPSNGATFYNQKFKGRVTITVDKSTSTAYMELSSLRSEDTAVYYCARSHLLRASWFAYWGQGTLVTVSSTRIQNPDPAVYQLRDSKSSDKSVCLFTDFDSQTNVSQSKDSDVYITDKCVLDMRSMDFKSNSAVAWSNKSDFACANAFNNSIIPEDTFFPSPESSCDVKLVEKSFETDTNLNFQILYEILLGKATLYAVLVSALVLMAMVKRKDSRG

SEQ ID NO: 13462 - protein, 616 aa, synthetic construct
MALPVTALLLPLALLLHAARPDVQITQSPSYLAASPGETITINCRASKSISKDLAWYQEKPGKTNKLLIYSGSTLQSGIPSRFSGSGSGTDFTLTISSLEPEDFAMYYCQQHNKYPYTFGGGTKLEIKRLEDLKNVFPPEVAVFEPSEAEISHTQKATLVCLATGFYPDHVELSWWVNGKEVHSGVCTDPQPLKEQPALNDSRYCLSSRLRVSATFWQNPRNHFRCQVQFYGLSENDEWTQDRAKPVTQIVSAEAWGRADCGFTSESYQQGVLSATNLSVIGFRILLLKVAGFNLLMTLRLWSSRAKRSGSGATNFSLLKQAGDVEENPGPTSMDWIWRILFLVGAATGAHSFEQVQLQQPGAELVRPGASVKLSCKASGYTFTSYWMNWVKQRPDQGLEWIGRIDPYDSETHYNQKFKDKAILTVDKSSSTAYMQLSSLTSEDSAVYYCARGNWDDYWGQGTTLTVSSTRIQNPDPAVYQLRDSKSSDKSVCLFTDFDSQTNVSQSKDSDVYITDKCVLDMRSMDFKSNSAVAWSNKSDFACANAFNNSIIPEDTFFPSPESSCDVKLVEKSFETDTNLNFQILYEILLGKATLYAVLVSALVLMAMVKRKDSRG

SEQ ID NO: 13463 - protein, 618 aa, synthetic construct
MALPVTALLLPLALLLHAARPEIVLTQSPTSMTASPGEQVTITCRASSSINYMHWYQQKPGASPRPWIYETSKLASGVPDRFSGSASGTSYSLTINNMEAEDAATYYCQQWNYPSWTFGGGTKLELKLEDLKNVFPPEVAVFEPSEAEISHTQKATLVCLATGFYPDHVELSWWVNGKEVHSGVCTDPQPLKEQPALNDSRYCLSSRLRVSATFWQNPRNHFRCQVQFYGLSENDEWTQDRAKPVTQIVSAEAWGRADCGFTSESYQQGVLSATNLSVIGFRILLLKVAGFNLLMTLRLWSSRAKRSGSGATNFSLLKQAGDVEENPGPTSMDWIWRILFLVGAATGAHSFEEVQLVESGGGLVQPGRSLKLSCAASGFTFSDYNMAWVRQAPKKGLEWVATILYDGGRTYYRGSVKGRFTISRDNAKSTLYLRMDSLRSEDTATYYCATHSRGTDYFDYWGQGVMVTVSSTRIQNPDPAVYQLRDSKSSDKSVCLFTDFDSQTNVSQSKDSDVYITDKCVLDMRSMDFKSNSAVAWSNKSDFACANAFNNSIIPEDTFFPSPESSCDVKLVEKSFETDTNLNFQILYEILLGKATLYAVLVSALVLMAMVKRKDSRG

SEQ ID NO: 13464 - protein, 627 aa, synthetic construct
MALPVTALLLPLALLLHAARPDIVMTQSPSSLAVSEGETVTINCKSSQSFLSSGDGKNYVAWYQYKPGQSPKLLIYWASTRQSGVPDRFIGSGSGTDFTLTISTVQAEDLAIYYCQQYYDTPLTFGSGTKLEIKLEDLKNVFPPEVAVFEPSEAEISHTQKATLVCLATGFYPDHVELSWWVNGKEVHSGVCTDPQPLKEQPALNDSRYCLSSRLRVSATFWQNPRNHFRCQVQFYGLSENDEWTQDRAKPVTQIVSAEAWGRADCGFTSESYQQGVLSATNLSVIGFRILLLKVAGFNLLMTLRLWSSRAKRSGSGATNFSLLKQAGDVEENPGPTSMDWIWRILFLVGAATGAHSFEEVKLQESGPSLVQSSQTLSLTCTVSGFSLTSYHIHWVRQTPGKGLEWMGVMWSDGDTSYNSALKSRLSISRDTSQSQVFLKMNSLQTEDTATYYCARGYYSSYLYLWFAYWGQGTLVTVSSTRIQNPDPAVYQLRDSKSSDKSVCLFTDFDSQTNVSQSKDSDVYITDKCVLDMRSMDFKSNSAVAWSNKSDFACANAFNNSIIPEDTFFPSPESSCDVKLVEKSFETDTNLNFQILYEILLGKATLYAVLVSALVLMAMVKRKDSRG

SEQ ID NO: 13465 - protein, 631 aa, synthetic construct
MALPVTALLLPLALLLHAARPDVLMTQTPVSLPVSLGGQVSISCRSSQSLVHSDGDTYLHWYLQKPGQSPQLLIYRVSNRFSGVPDRFSGSGSGTDFTLKISRVEPEDLGLYYCLQTTHFPPWTFGGGTKLEMKLEDLKNVFPPEVAVFEPSEAEISHTQKATLVCLATGFYPDHVELSWWVNGKEVHSGVCTDPQPLKEQPALNDSRYCLSSRLRVSATFWQNPRNHFRCQVQFYGLSENDEWTQDRAKPVTQIVSAEAWGRADCGFTSESYQQGVLSATNLSVIGFRILLLKVAGFNLLMTLRLWSSRAKRSGSGATNFSLLKQAGDVEENPGPTSMDWIWRILFLVGAATGAHSFEQVQLQQSGPELRRPGSSVRLSCKASGYRIKDFLIHWIKNRPEHGLEWIGWIDPEDGETKYAQKFQTKATLTADTSSNTAYMQLSSLTSEDTATYFCARWGDVYYGLMRGHVMDAWGQGTSVTVSSTRIQNPDPAVYQLRDSKSSDKSVCLFTDFDSQTNVSQSKDSDVYITDKCVLDMRSMDFKSNSAVAWSNKSDFACANAFNNSIIPEDTFFPSPESSCDVKLVEKSFETDTNLNFQILYEILLGKATLYAVLVSALVLMAMVKRKDSRG

SEQ ID NO: 13466 - protein, 626 aa, synthetic construct
MALPVTALLLPLALLLHAARPDIVMTQSPATLSLSPGERATLSCRSSKSLQNVNGNTYLYWFQQKPGQSPQLLIYRMSNLNSGVPDRFSGSGSGTEFTLTISSLEPEDFAVYYCMQHLEYPITFGAGTKLEIKLEDLKNVFPPEVAVFEPSEAEISHTQKATLVCLATGFYPDHVELSWWVNGKEVHSGVCTDPQPLKEQPALNDSRYCLSSRLRVSATFWQNPRNHFRCQVQFYGLSENDEWTQDRAKPVTQIVSAEAWGRADCGFTSESYQQGVLSATNLSVIGFRILLLKVAGFNLLMTLRLWSSRAKRSGSGATNFSLLKQAGDVEENPGPTSMDWIWRILFLVGAATGAHSFEEVQLVESGGGLVKPGGSLKLSCAASGYTFTSYVMHWVRQAPGKGLEWIGYINPYNDGTKYNEKFQGRVTISSDKSISTAYMELSSLRSEDTAMYYCARGTYYYGTRVFDYWGQGTLVTVSSTRIQNPDPAVYQLRDSKSSDKSVCLFTDFDSQTNVSQSKDSDVYITDKCVLDMRSMDFKSNSAVAWSNKSDFACANAFNNSIIPEDTFFPSPESSCDVKLVEKSFETDTNLNFQILYEILLGKATLYAVLVSALVLMAMVKRKDSRG

SEQ ID NO: 13467 - protein, 622 aa, synthetic construct; identical to SEQ ID NO: 9443

SEQ ID NO: 13468 - protein, 624 aa, synthetic construct
MALPVTALLLPLALLLHAARPQIVLSQSPAILSASPGEKVTMTCRASSSVSYMHWYQQKPGSSPKPWIYATSNLASGVPARFSGSGSGTSYSFTISRVEAEDAATYYCQQWTFNPPTFGGGTRLEIKRTVAALEDLKNVFPPEVAVFEPSEAEISHTQKATLVCLATGFYPDHVELSWWVNGKEVHSGVCTDPQPLKEQPALNDSRYCLSSRLRVSATFWQNPRNHFRCQVQFYGLSENDEWTQDRAKPVTQIVSAEAWGRADCGFTSESYQQGVLSATNLSVIGFRILLLKVAGFNLLMTLRLWSSRAKRSGSGATNFSLLKQAGDVEENPGPTSMDWIWRILFLVGAATGAHSFEQAYLQQSGAELVRPGASVKMSCKASGYTFTSYNMHWVKQTPRQGLEWIGGIYPGNGDTSYNQKFKGKATLTVGKSSSTAYMQLSSLTSEDSAVYFCARYDYNYAMDYWGQGTSVTVSSASTRIQNPDPAVYQLRDSKSSDKSVCLFTDFDSQTNVSQSKDSDVYITDKCVLDMRSMDFKSNSAVAWSNKSDFACANAFNNSIIPEDTFFPSPESSCDVKLVEKSFETDTNLNFQILYEILLGKATLYAVLVSALVLMAMVKRKDSRG

SEQ ID NO: 13469 - protein, 622 aa, synthetic construct
MALPVTALLLPLALLLHAARPEIVLTQSPATLSLSPGERATLSCRASQSVSSYLAWYQQKPGQAPRLLIYDASNRATGIPARFSGSGSGTDFTLTISSLEPEDFAVYYCQQRSNWPITFGQGTRLEIKLEDLKNVFPPEVAVFEPSEAEISHTQKATLVCLATGFYPDHVELSWWVNGKEVHSGVCTDPQPLKEQPALNDSRYCLSSRLRVSATFWQNPRNHFRCQVQFYGLSENDEWTQDRAKPVTQIVSAEAWGRADCGFTSESYQQGVLSATNLSVIGFRILLLKVAGFNLLMTLRLWSSRAKRSGSGATNFSLLKQAGDVEENPGPTSMDWIWRILFLVGAATGAHSFEEVQLVESGGGLVQPDRSLRLSCAASGFTFHDYAMHWVRQAPGKGLEWVSTISWNSGTIGYADSVKGRFTISRDNAKNSLYLQMNSLRAEDTALYYCAKDIQYGNYYYGMDVWGQGTTVTVSSTRIQNPDPAVYQLRDSKSSDKSVCLFTDFDSQTNVSQSKDSDVYITDKCVLDMRSMDFKSNSAVAWSNKSDFACANAFNNSIIPEDTFFPSPESSCDVKLVEKSFETDTNLNFQILYEILLGKATLYAVLVSALVLMAMVKRKDSRG

SEQ ID NO: 13470 - protein, 617 aa, synthetic construct
MALPVTALLLPLALLLHAARPDIQMTQSPSSLSASVGDRVTINCKASQDINSYLSWFQQKPGKAPKTLIYRANRLVDGVPSRFSGSGSGQDYTLTISSLQPEDFATYYCLQYDEFPLTFGGGTKVEIKLEDLKNVFPPEVAVFEPSEAEISHTQKATLVCLATGFYPDHVELSWWVNGKEVHSGVCTDPQPLKEQPALNDSRYCLSSRLRVSATFWQNPRNHFRCQVQFYGLSENDEWTQDRAKPVTQIVSAEAWGRADCGFTSESYQQGVLSATNLSVIGFRILLLKVAGFNLLMTLRLWSSRAKRSGSGATNFSLLKQAGDVEENPGPTSMDWIWRILFLVGAATGAHSFEQVQLVQSGAEVKKPGASVKVSCKASGYTFTNYDINWVRQAPGQGLEWIGWIYPGDGSTKYNEKFKAKATLTADTSTSTAYMELRSLRSDDTAVYYCASGYEDAMDYWGQGTTVTVSSTRIQNPDPAVYQLRDSKSSDKSVCLFTDFDSQTNVSQSKDSDVYITDKCVLDMRSMDFKSNSAVAWSNKSDFACANAFNNSIIPEDTFFPSPESSCDVKLVEKSFETDTNLNFQILYEILLGKATLYAVLVSALVLMAMVKRKDSRG

SEQ ID NO: 13471 - protein, 619 aa, synthetic construct
MALPVTALLLPLALLLHAARPDIVMTQTPLSLSVTPGQPASISCKSSQSLLDGDGKTYLNWLLQKPGQSPQRLIYLVSKLDSGVPDRFSGSGSGTDFTLKISRVEAEDVGVYYCWQGTHFPRTFGQGTKLEIKLEDLKNVFPPEVAVFEPSEAEISHTQKATLVCLATGFYPDHVELSWWVNGKEVHSGVCTDPQPLKEQPALNDSRYCLSSRLRVSATFWQNPRNHFRCQVQFYGLSENDEWTQDRAKPVTQIVSAEAWGRADCGFTSESYQQGVLSATNLSVIGFRILLLKVAGFNLLMTLRLWSSRAKRSGSGATNFSLLKQAGDVEENPGPTSMDWIWRILFLVGAATGAHSFEQVQLVQSGAEVKKPGASVKVSCKASGYTFKDTYIHWVRQAPGQGLEWMGRIDPANGNTKYDPKFQGRVTMTRDTSISTAYMELSRLRSDDTAVYYCARRGGVDWGQGTLVTVSSTRIQNPDPAVYQLRDSKSSDKSVCLFTDFDSQTNVSQSKDSDVYITDKCVLDMRSMDFKSNSAVAWSNKSDFACANAFNNSIIPEDTFFPSPESSCDVKLVEKSFETDTNLNFQILYEILLGKATLYAVLVSALVLMAMVKRKDSRG

SEQ ID NO: 13472 - protein, 620 aa, synthetic construct
MALPVTALLLPLALLLHAARPDIQMTQSPSSLSASVGDRVTITCKASQDVSTAVAWFQQKPGKAPKLLIYSPSYRYTGVPSRFSGSGSGTDFTLTISSLQPEDFTYYCQQLYSTPYTFGQGTKVEIKLEDLKNVFPPEVAVFEPSEAEISHTQKATLVCLATGFYPDHVELSWWVNGKEVHSGVCTDPQPLKEQPALNDSRYCLSSRLRVSATFWQNPRNHFRCQVQFYGLSENDEWTQDRAKPVTQIVSAEAWGRADCGFTSESYQQGVLSATNLSVIGFRILLLKVAGFNLLMTLRLWSSRAKRSGSGATNFSLLKQAGDVEENPGPTSMDWIWRILFLVGAATGAHSFEEVQLVQSGAEVKKPGASVKVSCKASGYTFTDYYLDVVVRQAPGQGLEWIGRVNPYNGGTIYNQKFKGRVTLTRDTSTSTAYLELSSLRSEDTAVYYCARDHYRYDPLLDYWGQGTLVTVSSTRIQNPDPAVYQLRDSKSSDKSVCLFTDFDSQTNVSQSKDSDVYITDKCVLDMRSMDFKSNSAVAWSNKSDFACANAFNNSIIPEDTFFPSPESSCDVKLVEKSFETDTNLNFQILYEILLGKATLYAVLVSALVLMAMVKRKDSRG

SEQ ID NO: 13473 - protein, 626 aa, synthetic construct
MALPVTALLLPLALLLHAARPDIQMTQSPSSLSASVGDRVTITCRASQSVSTSSYNYMHWYQQKPGKPPKLLIKYASNLESGVPSRFSGSGSGTDFTLTISSLQPEDFATYYCQHSWEIPLTFGQGTKVEIKLEDLKNVFPPEVAVFEPSEAEISHTQKATLVCLATGFYPDHVELSWWVNGKEVHSGVCTDPQPLKEQPALNDSRYCLSSRLRVSATFWQNPRNHFRCQVQFYGLSENDEWTQDRAKPVTQIVSAEAWGRADCGFTSESYQQGVLSATNLSVIGFRILLLKVAGFNLLMTLRLWSSRAKRSGSGATNFSLLKQAGDVEENPGPTSMDWIWRILFLVGAATGAHSFEEVQLVQSGAEVKKPGASVKVSCKASGYSFTDYYMHWVRQAPGQGLEWIGRINPYNGAAFYSQNFKDRVTLTVDTSTSTAYLELSSLRSEDTAVYYCAIERGADLEGYAMDYWGQGTLVTVSSTRIQNPDPAVYQLRDSKSSDKSVCLFTDFDSQTNVSQSKDSDVYITDKCVLDMRSMDFKSNSAVAWSNKSDFACANAFNNSIIPEDTFFPSPESSCDVKLVEKSFETDTNLNFQILYEILLGKATLYAVLVSALVLMAMVKRKDSRG

SEQ ID NO: 13474 - protein, 624 aa, synthetic construct
MALPVTALLLPLALLLHAARPEIVLTQSPATLSASPGERVTLTCRASSNVISSYVHWYQQKPGSSPRLFLYSTSNLASGVPSRFSGSGSGTDFTFTISSLEAEDAATYYCQQYSGYPLTFGQGTRLEIKLEDLKNVFPPEVAVFEPSEAEISHTQKATLVCLATGFYPDHVELSWWVNGKEVHSGVCTDPQPLKEQPALNDSRYCLSSRLRVSATFWQNPRNHFRCQVQFYGLSENDEWTQDRAKPVTQIVSAEAWGRADCGFTSESYQQGVLSATNLSVIGFRILLLKVAGFNLLMTLRLWSSRAKRSGSGATNFSLLKQAGDVEENPGPTSMDWIWRILFLVGAATGAHSFEQVQLQESGPGLVKPSETLSLTCAVSGYSITSAYYWNWIRQPPGKGLEWIGYISYDGRNNYNPSLKNRITINPDTSKNQFSLQLNSVTPEDTAVYYCAREGDYDVGNYYAMDYWGQGTLVTVSSTRIQNPDPAVYQLRDSKSSDKSVCLFTDFDSQTNVSQSKDSDVYITDKCVLDMRSMDFKSNSAVAWSNKSDFACANAFNNSIIPEDTFFPSPESSCDVKLVEKSFETDTNLNFQILYEILLGKATLYAVLVSALVLMAMVKRKDSRG

SEQ ID NO: 13475 - protein, 624 aa, synthetic construct
MALPVTALLLPLALLLHAARPEIVLTQSPATLSLSPGERATLSCRASSNVISSYVHWYQQKPGQAPRLLIYSTSNLASGIPARFSGSGSGTDFTLTISSLEPEDFAVYYCQQYSGYPLTFGQGTRLEIKLEDLKNVFPPEVAVFEPSEAEISHTQKATLVCLATGFYPDHVELSWWVNGKEVHSGVCTDPQPLKEQPALNDSRYCLSSRLRVSATFWQNPRNHFRCQVQFYGLSENDEWTQDRAKPVTQIVSAEAWGRADCGFTSESYQQGVLSATNLSVIGFRILLLKVAGFNLLMTLRLWSSRAKRSGSGATNFSLLKQAGDVEENPGPTSMDWIWRILFLVGAATGAHSFEEVQLVESGGGLVQPGRSLRLSCAASGYSITSAYYWNWVRQAPGKGLEWVSYISYDGRNNYNPSLKNRFTISRDNAKKSLYLQMNSLRAEDTALYYCAKEGDYDVGNYYAMDYWGQGTTVTVSSTRIQNPDPAVYQLRDSKSSDKSVCLFTDFDSQTNVSQSKDSDVYITDKCVLDMRSMDFKSNSAVAWSNKSDFACANAFNNSIIPEDTFFPSPESSCDVKLVEKSFETDTNLNFQILYEILLGKATLYAVLVSALVLMAMVKRKDSRG

SEQ ID NO: 13476 - protein, 623 aa, synthetic construct
MALPVTALLLPLALLLHAARPDVVMTQTPLSLPVSLGDQASISCRSSQSLVHSNGNTYLRWYLQKPGQSPKVLIYKVSNRVSGVPDRFSGSGSGTDFTLKINRVEAEDLGVYFCSQSTHVPWTFGGGTKLEIKLEDLKNVFPPEVAVFEPSEAEISHTQKATLVCLATGFYPDHVELSWWVNGKEVHSGVCTDPQPLKEQPALNDSRYCLSSRLRVSATFWQNPRNHFRCQVQFYGLSENDEWTQDRAKPVTQIVSAEAWGRADCGFTSESYQQGVLSATNLSVIGFRILLLKVAGFNLLMTLRLWSSRAKRSGSGATNFSLLKQAGDVEENPGPTSMDWIWRILFLVGAATGAHSFEGVKLDETGGGLVQPGGAMKLSCVTSGFTFGHYWMNWVRQSPEKGLEWVAQFRNKPYNYETYYSDSVKGRFTISRDDSKSSVYLQMNNLRVEDTGIYYCTGASYGMEYLGQGTSVTVSTTRIQNPDPAVYQLRDSKSSDKSVCLFTDFDSQTNVSQSKDSDVYITDKCVLDMRSMDFKSNSAVAWSNKSDFACANAFNNSIIPEDTFFPSPESSCDVKLVEKSFETDTNLNFQILYEILLGKATLYAVLVSALVLMAMVKRKDSRG

SEQ ID NO: 13477 - protein, 629 aa, synthetic construct
MALPVTALLLPLALLLHAARPQVQLVESGGNLVQPGGSLRLSCAASGFTFGSFSMSWVRQAPGGGLEWVAGLSARSSLTHYADSVKGRFTISRDNAKNSVYLQMNSLRVEDTAVYYCARRSYDSSGYWGHFYSYMDVWGQGTLVTVSLEDLKNVFPPEVAVFEPSEAEISHTQKATLVCLATGFYPDHVELSWWVNGKEVHSGVCTDPQPLKEQPALNDSRYCLSSRLRVSATFWQNPRNHFRCQVQFYGLSENDEWTQDRAKPVTQIVSAEAWGRADCGFTSESYQQGVLSATNLSVIGFRILLLKVAGFNLLMTLRLWSSRAKRSGSGATNFSLLKQAGDVEENPGPTSMDWIWRILFLVGAATGAHSFESVLTQPSSVSAAPGQKVTISCSGSTSNIGNNYVSWYQQHPGKAPKLMIYDVSKRPSGVPDRFSGSKSGNSASLDISGLQSEDEADYYCAAWDDSLSEFLFGTGTKLTVLGTRIQNPDPAVYQLRDSKSSDKSVCLFTDFDSQTNVSQSKDSDVYITDKCVLDMRSMDFKSNSAVAWSNKSDFACANAFNNSIIPEDTFFPSPESSCDVKLVEKSFETDTNLNFQILYEILLGKATLYAVLVSALVLMAMVKRKDSRG

SEQ ID NO: 13478 - protein, 624 aa, synthetic construct
MALPVTALLLPLALLLHAARPDVVMTQSPSSLSASVGDRVTITCQSSLDISHYLNWYQQKPGKAPKLLIYDASNLETGVPSRFSGSGSGTHFTFTISSLQPEDFATYYCQQYDNLPLTFGGGTKLEIKRLEDLKNVFPPEVAVFEPSEAEISHTQKATLVCLATGFYPDHVELSWWVNGKEVHSGVCTDPQPLKEQPALNDSRYCLSSRLRVSATFWQNPRNHFRCQVQFYGLSENDEWTQDRAKPVTQIVSAEAWGRADCGFTSESYQQGVLSATNLSVIGFRILLLKVAGFNLLMTLRLWSSRAKRSGSGATNFSLLKQAGDVEENPGPTSMDWIWRILFLVGAATGAHSFEQVQLVQSGGGVVQPGGSLRVSCAASGVTLSDYGMHWVRQAPGKGLEWVAFIRNDGSDKYYADSVKGRFTISRDNSEKTVSLQMSSLRAEDTAVYYCAKNGESGPLDYWYLDLWGRGTLVTVSSTRIQNPDPAVYQLRDSKSSDKSVCLFTDFDSQTNVSQSKDSDVYITDKCVLDMRSMDFKSNSAVAWSNKSDFACANAFNNSIIPEDTFFPSPESSCDVKLVEKSFETDTNLNFQILYEILLGKATLYAVLVSALVLMAMVKRKDSRG

SEQ ID NO: 13479 - protein, 628 aa, synthetic construct
MALPVTALLLPLALLLHAARPSYELTQPPSVSGTPGQRVAISCSGSSSNIGTRMVTWYQHVPGTAPKLLIFNNNQRPSGVPDRFSASKSGTSASLAIIGLQSDDEADYYCATWDDNVKSYVFGTGTKVTVLGSRLEDLKNVFPPEVAVFEPSEAEISHTQKATLVCLATGFYPDHVELSWWVNGKEVHSGVCTDPQPLKEQPALNDSRYCLSSRLRVSATFWQNPRNHFRCQVQFYGLSENDEWTQDRAKPVTQIVSAEAWGRADCGFTSESYQQGVLSATNLSVIGFRILLLKVAGFNLLMTLRLWSSRAKRSGSGATNFSLLKQAGDVEENPGPTSMDWIWRILFLVGAATGAHSFELEMAQVQLQQWGAGLLKPSETLSLTCAVYGGSFSGYYWSWIRQPPGKGLEWIGEINHSGSTNYNPSLKSRVTISVDTSKNQFSLKLSSVTAADTAVYYCARAPQSWYVGDVWGQGTLVTVSSTRIQNPDPAVYQLRDSKSSDKSVCLFTDFDSQTNVSQSKDSDVYITDKCVLDMRSMDFKSNSAVAWSNKSDFACANAFNNSIIPEDTFFPSPESSCDVKLVEKSFETDTNLNFQILYEILLGKATLYAVLVSALVLMAMVKRKDSRG

SEQ ID NO: 13480 - protein, 625 aa, synthetic construct
MALPVTALLLPLALLLHAARPQSVLTQPPSLSVAPGKTASITCGGNNIGMKSVHWYQQRPGQAPVLVIYYDSDRPSGIPGRFSGSNSGNTATLTISRVEAGDEADYYCQVWDTTGDHPGYVFGTGTKVTVLLEDLKNVFPPEVAVFEPSEAEISHTQKATLVCLATGFYPDHVELSWWVNGKEVHSGVCTDPQPLKEQPALNDSRYCLSSRLRVSATFWQNPRNHFRCQVQFYGLSENDEWTQDRAKPVTQIVSAEAWGRADCGFTSESYQQGVLSATNLSVIGFRILLLKVAGFNLLMTLRLWSSRAKRSGSGATNFSLLKQAGDVEENPGPTSMDWIWRILFLVGAATGAHSFEQVQLVQSGAEVKKPGSSVKVSCKASGGTFSSYAISWVRQAPGQGLEWMGGIIPIFGTANYAQKFQGRVTITADESTSTAYMELSSLRSEDTAVYYCARGVYGYSGSAPYDEWGQGTLVTVSSTRIQNPDPAVYQLRDSKSSDKSVCLFTDFDSQTNVSQSKDSDVYITDKCVLDMRSMDFKSNSAVAWSNKSDFACANAFNNSIIPEDTFFPSPESSCDVKLVEKSFETDTNLNFQILYEILLGKATLYAVLVSALVLMAMVKRKDSRG

SEQ ID NO: 13481 - protein, 623 aa, synthetic construct
MALPVTALLLPLALLLHAARPEVQLVESGGGLVQPGRSLRLSCAASGFTFDDYAMHWVRQAPGKGLEWVSGISWNSGSIGYADSVKGRFTISRDNAKNSLYLQMNSLRAEDTALYYCAKDKGGGYYDFWSGSDYWGQGTLVTVSSLEDLKNVFPPEVAVFEPSEAEISHTQKATLVCLATGFYPDHVELSWWVNGKEVHSGVCTDPQPLKEQPALNDSRYCLSSRLRVSATFWQNPRNHFRCQVQFYGLSENDEWTQDRAKPVTQIVSAEAWGRADCGFTSESYQQGVLSATNLSVIGFRILLLKVAGFNLLMTLRLWSSRAKRSGSGATNFSLLKQAGDVEENPGPTSMDWIWRILFLVGAATGAHSFESSELTQDPAVSVALGQTVRITCQGDSLRSYYASWYQQKPGQAPVLVIYGKNNRPSGIPDRFSGSSSGNTASLTITGAQAEDEADYYCNSRDSSGWVFGGGTKLTVLTRIQNPDPAVYQLRDSKSSDKSVCLFTDFDSQTNVSQSKDSDVYITDKCVLDMRSMDFKSNSAVAWSNKSDFACANAFNNSIIPEDTFFPSPESSCDVKLVEKSFETDTNLNFQILYEILLGKATLYAVLVSALVLMAMVKRKDSRG

SEQ ID NO: 13482 - protein, 632 aa, synthetic construct
MALPVTALLLPLALLLHAARPEVQLQQSGPGLVKPSQTLSLTCAISGDSVLSNSDTWNWIRQSPSRGLEWLGRTYHRSTWYDDYASSVRGRVSINVDTSKNQYSLQLNAVTPEDTGVYYCARDRLQDGNSWSDAFDVWGQGTMVTVSSLEDLKNVFPPEVAVFEPSEAEISHTQKATLVCLATGFYPDHVELSWWVNGKEVHSGVCTDPQPLKEQPALNDSRYCLSSRLRVSATFWQNPRNHFRCQVQFYGLSENDEWTQDRAKPVTQIVSAEAWGRADCGFTSESYQQGVLSATNLSVIGFRILLLKVAGFNLLMTLRLWSSRAKRSGSGATNFSLLKQAGDVEENPGPTSMDWIWRILFLVGAATGAHSFEQSALTQPASVSGSPGQSITISCTGTSSDVGGYNYVSWYQQHPGKAPKLMIYDVSNRPSGVSNRFSGSKSGNTASLTISGLQAEDEADYYCSSYTSSSTLVYVFGTGTKVTVLTRIQNPDPAVYQLRDSKSSDKSVCLFTDFDSQTNVSQSKDSDVYITDKCVLDMRSMDFKSNSAVAWSNKSDFACANAFNNSIIPEDTFFPSPESSCDVKLVEKSFETDTNLNFQILYEILLGKATLYAVLVSALVLMAMVKRKDSRG

SEQ ID NO: 13483 - protein, 610 aa, synthetic construct
MALPVTALLLPLALLLHAARPQVQLVQSGAEVKKPGASVKVSCKASGYTFTSYDINWVRQATGQGLEWMGWMNPNSGNTGYAQKFQGRVTMTRNTSISTAYMELSSLRSEDTAVYYCARGDSTKVEIKLEDLKNVFPPEVAVFEPSEAEISHTQKATLVCLATGFYPDHVELSWWVNGKEVHSGVCTDPQPLKEQPALNDSRYCLSSRLRVSATFWQNPRNHFRCQVQFYGLSENDEWTQDRAKPVTQIVSAEAWGRADCGFTSESYQQGVLSATNLSVIGFRILLLKVAGFNLLMTLRLWSSRAKRSGSGATNFSLLKQAGDVEENPGPTSMDWIWRILFLVGAATGAHSFEQSVLTQPRSVSGSPGQSVTISCTGTSSDVGGYNYVSWYQQHPGEAPKLIIYDADKRPSGISNRFSSGKSGNTASLTISGLQVEDEADYYCCSYAGGSTWVFGGGTKVTVLTRIQNPDPAVYQLRDSKSSDKSVCLFTDFDSQTNVSQSKDSDVYITDKCVLDMRSMDFKSNSAVAWSNKSDFACANAFNNSIIPEDTFFPSPESSCDVKLVEKSFETDTNLNFQILYEILLGKATLYAVLVSALVLMAMVKRKDSRG

SEQ ID NO: 13484 - protein, 632 aa, synthetic construct
MALPVTALLLPLALLLHAARPEVQLQQSGPGLVKPSQTLSLTCAISGDSVSSNSAAWNWIRQSPSRGLEWLGRTYYRSKWYSDYAVSVKSRITINPDTSKNQFSLQLNSVTPEDTAVYYCARDPYDFWSGYPDAFDIWGQGTMVTVSSLEDLKNVFPPEVAVFEPSEAEISHTQKATLVCLATGFYPDHVELSWWVNGKEVHSGVCTDPQPLKEQPALNDSRYCLSSRLRVSATFWQNPRNHFRCQVQFYGLSENDEWTQDRAKPVTQIVSAEAWGRADCGFTSESYQQGVLSATNLSVIGFRILLLKVAGFNLLMTLRLWSSRAKRSGSGATNFSLLKQAGDVEENPGPTSMDWIWRILFLVGAATGAHSFEQSALTQPASVSGSPGQSITISCTGTSSDVGGYNYVSWYQQHPGKAPKVIISEVNNRPSGVSHRFSGSKSGNTASLTISGLQAEDEADYFCSSYTSGRTLYVFGTGSKVTVLGTRIQNPDPAVYQLRDSKSSDKSVCLFTDFDSQTNVSQSKDSDVYITDKCVLDMRSMDFKSNSAVAWSNKSDFACANAFNNSIIPEDTFFPSPESSCDVKLVEKSFETDTNLNFQILYEILLGKATLYAVLVSALVLMAMVKRKDSRG
